United States Patent Application Publication US 2023/0026259 A1 - sequence listing, part 11

SEQ ID NO: 49071 - protein, 172 aa, Homo sapiens
  Payload ID: 9829
  Gene Symbol: MAN2B1
  Gene Name: mannosidase, alpha, class 2B, member 1
  ENSP ID: ENSP00000470533
MGAYARASGVCARGCLDSAGPWTMSRALRPPLPPLCFFLLLLAAAGARAGGYEVCVFGVPVQTCPTVQPNMLNVHLLPHTHDDVGWLKTVDQYFYGIKNDIQHAGVQYILDSVISALLADPTRRFIYVEIAFFSRWWHQQTNATQEVVRDLVRQGRLEFANGGWVMNDEAAT

SEQ ID NO: 49072 - protein, 140 aa, Homo sapiens
  Payload ID: 9829
  Gene Symbol: MAN2B1
  Gene Name: mannosidase, alpha, class 2B, member 1
  ENSP ID: ENSP00000471685
  MOD_RES (1)..(1): Any amino acid
XLAAGWGPCEVLLSNALARLRGFKDHFTFCQQLNISICPLSQTAARFQVIVYNPLGRKVNWMVRLPVSEGVFVVKDPNGRTVPSDLRQPGAPSGAAVLSLTARPGLQHLFSSPGASLEAPGPRTTAHPQKILVPCFNHRK

SEQ ID NO: 49073 - protein, 1009 aa, Homo sapiens
  Payload ID: 9830
  Gene Symbol: MAN2B2
  Gene Name: mannosidase, alpha, class 2B, member 2
  Uniprot ID: Q9Y2E5
  ENSP ID: ENSP00000285599
MGQLCWLPLLAPLLLLRPPGVQSAGPIRAFVVPHSHMDVGWVYTVQESMRAYAANVYTSVVEELARGQQRRFIAVEQEFFRLWWDGVASDQQKYQVRQLLEEGRLEFVIGGQVMHDEAVTHLDDQILQLTEGHGFLYETFGIRPQFSWHVDPFGASATTPTLFALAGFNAHLGSRIDYDLKAAMQEARGLQFVWRGSPSLSERQEIFTHIMDQYSYCTPSHIPFSNRSGFYWNGVAVFPKPPQDGVYPNMSEPVTPANINLYAEALVANVKQRAAWFRTPHVLWPWGCDKQFFNASVQFANMDPLLDHINSHAAELGVSVQYATLGDYFRALHALNVTWRVRDHHDFLPYSTEPFQAWTGFYTSRSSLKGLARRASALLYAGESMFTRYLWPAPRGHLDPTWALQQLQQLRWAVSEVQHHDAITGTESPKVRDMYATHLASGMLGMRKLMASIVLDELQPQAPMAASSDAGPAGHFASVYNPLAWTVTTIVTLTVGFPGVRVTDEAGHPVPSQIQNSTETPSAYDLLILTTIPGLSYRHYNIRPTAGAQEGTQEPAATVASTLQFGRRLRRRTSHAGRYLVPVANDCYIVLLDQDTNLMHSIWERQSNRTVRVTQEFLEYHVNGDVKQGPISDNYLFTPGKAAVPAWEAVEMEIVAGQLVTEIRQYFYRNMTAQNYTYAIRSRLTHVPQGHDGELLCHRIEQEYQAGPLELNREAVLRTSTNLNSQQVIYSDNNGYQMQRRPYVSYVNNSIARNYYPMVQSAFMEDGKSRLVLLSERAHGISSQGNGQVEVMLHRRLWNNFDWDLGYNLTLNDTSVVHPVLWLLLGSWSLTTALRQRSALALQHRPVVLFGDLAGTAPKLPGPQQQEAVTLPPNLHLQILSIPGWRYSSNHTEHSQNLRKGHRGEAQADLRRVLLRLYHLYEVGEDPVLSQPVTVNLEAVLQALGSVVAVEERSLTGTWDLSMLHRWSWRTGPGRHRGDTTSPSRPPGGPIITVHPKEIRTFFIHFQQQ

SEQ ID NO: 49074 - protein, 958 aa, Homo sapiens
  Payload ID: 9830
  Gene Symbol: MAN2B2
  Gene Name: mannosidase, alpha, class 2B, member 2
  ENSP ID: ENSP00000423129
MGQLCWLPLLAPLLLLRPPGVQSAGPIRAFVVPHSHMDVGWVYTVQESMRAYAANVYTSVVEELARGQQRRFIAVEQEFFRLWWDGVASDQQKYQVRQLLEEGRLEFVIGGQVMHDEAVTHLDDQILQLTEGHGFLYETFGIRPQFSWHVDPFGASATTPTLFALAGFNAHLGSRIDYDLKAAMQEARGLQFVWRGSPSLSERQEIFTHIMDQYSYCTPSHIPFSNRSGFYWNGVAVFPKPPQDGVYPNMSEPVTPANINLYAELGVSVQYATLGDYFRALHALNVTWRVRDHHDFLPYSTEPFQAWTGFYTSRSSLKGLARRASALLYAGESMFTRYLWPAPRGHLDPTWALQQLQQLRWAVSEVQHHDAITGTESPKVRDMYATHLASGMLGMRKLMASIVLDELQPQAPMAASSDAGPAGHFASVYNPLAWTVTTIVTLTVGFPGVRVTDEAGHPVPSQIQNSTETPSAYDLLILTTIPGLSYRHYNIRPTAGAQEGTQEPAATVASTLQFGRRLRRRTSHAGRYLVPVANDCYIVLLDQDTNLMHSIWERQSNRTVRVTQEFLEYHVNGDVKQGPISDNYLFTPGKAAVPAWEAVEMEIVAGQLVTEIRQYFYRNMTAQNYTYAIRSRLTHVPQGHDGELLCHRIEQEYQAGPLELNREAVLRTSTNLNSQQVIYSDNNGYQMQRRPYVSYVNNSIARNYYPMVQSAFMEDGKSRLVLLSERAHGISSQGNGQVEVMLHRRLWNNFDWDLGYNLTLNDTSVVHPVLWLLLGSWSLTTALRQRSALALQHRPVVLFGDLAGTAPKLPGPQQQEAVTLPPNLHLQILSIPGWRYSSNHTEHSQNLRKGHRGEAQADLRRVLLRLYHLYEVGEDPVLSQPVTVNLEAVLQALGSVVAVEERSLTGTWDLSMLHRWSWRTGPGRHRGDTTSPSRPPGGPIITVHPKEIRTFFIHFQQQ

SEQ ID NO: 49075 - protein, 953 aa, Homo sapiens
  Payload ID: 9830
  Gene Symbol: MAN2B2
  Gene Name: mannosidase, alpha, class 2B, member 2
  ENSP ID: ENSP00000426273
  MOD_RES (1)..(1): Any amino acid
XQLCWLPLLAPLLLLRPPGVQSAGPIRAFVVPHSHMDVGWVYTVQESMRAYAANVYTSVVEELARGQQRRFIAVEQEFFRLWWDGVASDQQKYQVRQLLEEGRLEFVIGGQVMHDEAVTHLDDQILQLTEGHGFLYETFGIRPQFSWHVDPFGASATTPTLFALAGFNAHLGSRIDYDLKAAMQEARGLQFVWRGSPSLSERQEIFTHIMDQYSYCTPSHIPFSNRSGFYWNGVAVFPKPPQDGVYPNMSEPVTPANINLYAEALVANVKQRAAWFRTPHVLWPWGCDKQFFNASVQFANMDPLLDHINSHAAELGVSVQYATLGDYFRALHALNVTWRVRDHHDFLPYSTEPFQAWTGFYTSRSSLKGLARRASALLYAGESMFTRYLWPAPRGHLDPTWALQQLQQLRWAVSEVQHHDAITGTESPKVRDMYATHLASGMLGMRKLMASIVLDELQPQAPMAASSDAGPAGHFASVYNPLAWTVTTIVTLTVGFPGVRVTDEAGHPVPSQIQNSTETPSAYDLLILTTIPGLSYRHYNIRPTAGAQEGTQEPAATVASTLQFGRRLRRRTSHAGRYLVPVANDCYIVLLDQDTNLMHSIWERQSNRTVRVTQEFLEYHVNGDVKQGPISDNYLFTPGKAAVPAWEAVEMEIVAGQLVTEIRQYFYRNMTAQNYTYAIRSRLTHVPQGHDGELLCHRIEQEYQAGPLELNREAVLRTSTNLNSQQVIYSDNNGYQMQRRPYVSYVNNSIARNYYPMVQSAFMEDGKSRLVLLSERAHGISSQGNGQVEVMLHRRLWNNFDWDLGYNLTLNDTSVVHPVLWLLLGSWSLTTALRQRSALALQHRPVVLFGDLAGTAPKLPGPQQQEAVTLPPNLHLQILSIPGWRYSSNHTEHSQNLRKGHRGEAQADLRRVLLRLYHLYEVGEDPVLSQPVTVNLEVNFPTPIQTISQGSKP

SEQ ID NO: 49076 - protein, 1040 aa, Homo sapiens
  Payload ID: 9831
  Gene Symbol: MAN2C1
  Gene Name: mannosidase, alpha, class 2C, member 1
  Uniprot ID: Q9NTJ4
  ENSP ID: ENSP00000267978
MAAAPALKHWRTTLERVEKFVSPLYFTDCNLRGRLFGASCPVAVLSSFLTPERLPYQEAVQRDFRPAQVGDSFGPTWWTCWFRVELTIPEAWVGQEVHLCWESDGEGLVWRDGEPVQGLTKEGEKTSYVLTDRLGERDPRSLTLYVEVACNGLLGAGKGSMIAAPDPEKMFQLSRAELAVFHRDVHMLLVDLELLLGIAKGLGKDNQRSFQALYTANQMVNVCDPAQPETFPVAQALASRFFGQHGGESQHTIHATGHCHIDTAWLWPFKETVRKCARSWVTALQLMERNPEFIFACSQAQQLEWVKSRYPGLYSRIQEFACRGQFVPVGGTWVEMDGNLPSGEAMVRQFLQGQNFFLQEFGKMCSEFWLPDTFGYSAQLPQIMHGCGIRRFLTQKLSWNLVNSFPHHTFFWEGLDGSRVLVHFPPGDSYGMQGSVEEVLKTVANNRDKGRANHSAFLFGFGDGGGGPTQTMLDRLKRLSNTDGLPRVQLSSPRQLFSALESDSEQLCTWVGELFLELHNGTYTTHAQIKKGNRECERILHDVELLSSLALARSAQFLYPAAQLQHLWRLLLLNQFHDVVTGSCIQMVAEEAMCHYEDIRSHGNTLLSAAAAALCAGEPGPEGLLIVNTLPWKRIEVMALPKPGGAHSLALVTVPSMGYAPVPPPTSLQPLLPQQPVFVVQETDGSVTLDNGIIRVKLDPTGRLTSLVLVASGREAIAEGAVGNQFVLFDDVPLYWDAWDVMDYHLETRKPVLGQAGTLAVGTEGGLRGSAWFLLQISPNSRLSQEVVLDVGCPYVRFHTEVHWHEAHKFLKVEFPARVRSSQATYEIQFGHLQRPTHYNTSWDWARFEVWAHRWMDLSEHGFGLALLNDCKYGASVRGSILSLSLLRAPKAPDATADTGRHEFTYALMPHKGSFQDAGVIQAAYSLNFPLLALPAPSPAPATSWSAFSVSSPAVVLETVKQAESSPQRRSLVLRLYEAHGSHVDCWLHLSLPVQEAILCDLLERPDPAGHLTLRDNRLKLTFSPFQVLSLLLVLQPPPH

SEQ ID NO: 49077 - protein, 209 aa, Homo sapiens
  Payload ID: 9831
  Gene Symbol: MAN2C1
  Gene Name: mannosidase, alpha, class 2C, member 1
  ENSP ID: ENSP00000390738
MAAAPALKHWRTTLERVEKFVSPLYFTDCNLRGRLFGASCPVAVLSSFLTPERLPYQEAVQRDFRPAQVGDSFGPTWWTCWFRVELTIPEAWVGQEVHLCWESDGEGLVWRDGEPVQGLTKEGEKTSYVLTDRLGERDPRSLTLYVEVACNGLLGAGKGSMIAAPDPEKMFQLSRAELAVFHRDVHMLLVDLELLLGIAKPGFGPSKRL

SEQ ID NO: 49078 - protein, 180 aa, Homo sapiens
  Payload ID: 9831
  Gene Symbol: MAN2C1
  Gene Name: mannosidase, alpha, class 2C, member 1
  ENSP ID: ENSP00000454406
MAAAPALKHWRTTLERVEKFVSPLYFTDCNLRGRLFGASCPVAVLSSFLTPERLPYQEAVQRDFRPAQVGDSFGPTWWTCWFRVELTIPEAWVGQEVHLCWESDGEGLVWRDGEPVQGLTKEGEKTSYVLTDRLGERDPRRLECNGTISAHCDRRLPGSSNSPASASLLAEITASLSMWK

SEQ ID NO: 49079 - protein, 941 aa, Homo sapiens
  Payload ID: 9831
  Gene Symbol: MAN2C1
  Gene Name: mannosidase, alpha, class 2C, member 1
  Uniprot ID: Q9NTJ4
  ENSP ID: ENSP00000454589
MAAAPALKHWRTTLERVEKFVSPLYFTDCNLRGRLFGASCPVAVLSSFLTPERLPYQEAVQRDFRPAQVGDSFGPTWWTCWFRVELTIPEAWVGQEVHLCWESDGEGLVWRDGEPVQGLTKEGEKTSYVLTDRLGERDPRSLTLYVEVACNGLLGAGKGSMIAAPDPEKMFQLSRAELAVFHRDVHMLLVDLELLLGIAKAQQLEWVKSRYPGLYSRIQEFACRGQFVPVGGTWVEMDGNLPSGEAMVRQFLQGQNFFLQEFGKMCSEFWLPDTFGYSAQLPQIMHGCGIRRFLTQKLSWNLVNSFPHHTFFWEGLDGSRVLVHFPPGDSYGMQGSVEEVLKTVANNRDKGRANHSAFLFGFGDGGGGPTQTMLDRLKRLSNTDGLPRVQLSSPRQLFSALESDSEQLCTWVGELFLELHNGTYTTHAQIKKGNRECERILHDVELLSSLALARSAQFLYPAAQLQHLWRLLLLNQFHDVVTGSCIQMVAEEAMCHYEDIRSHGNTLLSAAAAALCAGEPGPEGLLIVNTLPWKRIEVMALPKPGGAHSLALVTVPSMGYAPVPPPTSLQPLLPQQPVFVVQETDGSVTLDNGIIRVKLDPTGRLTSLVLVASGREAIAEGAVGNQFVLFDDVPLYWDAWDVMDYHLETRKPVLGQAGTLAVGTEGGLRGSAWFLLQISPNSRLSQEVVLDVGCPYVRFHTEVHWHEAHKFLKVEFPARVRSSQATYEIQFGHLQRPTHYNTSWDWARFEVWAHRWMDLSEHGFGLALLNDCKYGASVRGSILSLSLLRAPKAPDATADTGRHEFTYALMPHKGSFQDAGVIQAAYSLNFPLLALPAPSPAPATSWSAFSVSSPAVVLETVKQAESSPQRRSLVLRLYEAHGSHVDCWLHLSLPVQEAILCDLLERPDPAGHLTLRDNRLKLTFSPFQVLSLLLVLQPPPH

SEQ ID NO: 49080 - protein, 183 aa, Homo sapiens
  Payload ID: 9831
  Gene Symbol: MAN2C1
  Gene Name: mannosidase, alpha, class 2C, member 1
  ENSP ID: ENSP00000455788
MAAAPALKHWRTTLERVEKFVSPLYFTDCNLRGSFLTPERLPYQEAVQRDFRPAQVGDSFGPTWWTCWFRVELTIPEAWVGQEVHLCWESDGEGLVWRDGEPVQGLTKEGEKTSYVLTDRLGERDPRSLTLYVEVACNGLLGAGKGSMIAAPDPEKMFQLSRAELAVFHRDVHMLLVDLELLL

SEQ ID NO: 49081 - protein, 89 aa, Homo sapiens
  Payload ID: 9831
  Gene Symbol: MAN2C1
  Gene Name: mannosidase, alpha, class 2C, member 1
  ENSP ID: ENSP00000455803
MAAAPALKHWRTTLERVEKFVSPLYFTDCNLRGRLFGASCPVAVLSSFLTPERLPYQEAVQRDFRPAQVGDSFGPTSLADGGPAGSGWS

SEQ ID NO: 49082 - protein, 1017 aa, Homo sapiens
  Payload ID: 9831
  Gene Symbol: MAN2C1
  Gene Name: mannosidase, alpha, class 2C, member 1
  Uniprot ID: Q9NTJ4
  ENSP ID: ENSP00000455998
MAAAPALKHWRTTLERVEKFVSPLYFTDCNLRGRLFGASCPVAVLSSFLTPERLPYQEAVQRDFRPAQVGDSFGPTWWTCWFRVELTIPEAWVGQEVHLCWESDGEGLVWRDGEPVQGLTKEGEKTSYVLTDRLGERDPRSLTLYVEVACNGLLGAGKGSMIAAPDPEKMFQLSRAELAVFHRDVHMLLVDLELLLGIAKGLGKDNQRSFQALYTANQMVNVCDPAQPETFPVAQALASRFFGQHGGESQHTIHATGHCHIDTAWLWPFKETVRKCARSWVTALQLMERNPEFIFACSQAQQLEWVKSRYPGLYSRIQEFACRGQFVPVGGTWVEMDGNLPSGEAMVRQFLQGQNFFLQEFGKMCSEFWLPDTFGYSAQLPQIMHGCGIRRFLTQKLSWNLVNSFPHHTFFWEGLDGSRVLVHFPPGDSYGMQGSVEEVLKTVANNRDKGRANHSAFLFGFGDGGGGPTQTMLDRLKRLSNTDGLPRVQLSSPRQLFSALESDSEQLCTWVGELFLELHNGTYTTHAQIKKGNRECERILHDVELLSSLALARSAQFLYPAAQLQHLWRLLLLNQFHDVVTGSCIQMVAEEAMCHYEDIRSHGNTLLSAAAAALCAGEPGPEGLLIVNTLPWKRIEVMALPKPGGAHSLALVTVPSMGYAPVPPPTSLQPLLPQQPVFVVQETDGSVTLDNGIIRVKLDPTGRLTSLVLVASGREAIAEGAVGNQFVLFDDVPLYWDAWDVMDYHLETRKPVLGQAGTLAVGTEGGLRGSAWFLLQISPNSRLSQEVVLDVGCPYVRFHTEVHWHEAHKFLKVEFPARVRSSQATYEIQFGHLQRPTHYNTSWDWARFEVWAHRWMDLSEHGFGLALLNDCKYGASVRGSILSLSLLRAPKAPDATADTGRHEFTYALMPHKAPSPAPATSWSAFSVSSPAVVLETVKQAESSPQRRSLVLRLYEAHGSHVDCWLHLSLPVQEAILCDLLERPDPAGHLTLRDNRLKLTFSPFQVLSLLLVLQPPPH

SEQ ID NO: 49083 - protein, 182 aa, Homo sapiens
  Payload ID: 9831
  Gene Symbol: MAN2C1
  Gene Name: mannosidase, alpha, class 2C, member 1
  ENSP ID: ENSP00000456257
MAAAPALKHWRTTLERVEKFVSPLYFTDCNLRGRWWTCWFRVELTIPEAWVGQEVHLCWESDGEGLVWRDGEPVQGLTKEGEKTSYVLTDRLGERDPRSLTLYVEVACNGLLGAGKGSMIAAPDPEKMFQLSRAELAVFHRDVHMLLVDLELLLGIAKGLGKDNQRSFQALYTANQMVNVCD

SEQ ID NO: 49084 - protein, 77 aa, Homo sapiens
  Payload ID: 9831
  Gene Symbol: MAN2C1
  Gene Name: mannosidase, alpha, class 2C, member 1
  ENSP ID: ENSP00000456419
MAAAPALKHWRTTLERVEKFVSPLYFTDCNLRGRLFGASCPVAVLSSFLTPERLPYQEAVQRDFRPAQVGDSFGPTW

SEQ ID NO: 49085 - protein, 172 aa, Homo sapiens
  Payload ID: 9831
  Gene Symbol: MAN2C1
  Gene Name: mannosidase, alpha, class 2C, member 1
  ENSP ID: ENSP00000456667
GLTKEGEKTSYVLTDRLGERDPRSLTLYVEVACNGLLGAGKGSMIAAPDPEKMFQLSRAELAVFHRDVHMLLVDLELLLGIAKGLGKDNQRSFQALYTANQMVNVCDPAQPETFPVAQALASRFFGQHGGESQHTIHATGHCHIDTAPEGIDSDAAEVLGSQNKGFLCCAKM

SEQ ID NO: 49086 - protein, 77 aa, Homo sapiens; identical to SEQ ID NO: 49084
  Payload ID: 9831
  Gene Symbol: MAN2C1
  Gene Name: mannosidase, alpha, class 2C, member 1
  ENSP ID: ENSP00000456914

SEQ ID NO: 49087 - protein, 1057 aa, Homo sapiens
  Payload ID: 9831
  Gene Symbol: MAN2C1
  Gene Name: mannosidase, alpha, class 2C, member 1
  Uniprot ID: Q9NTJ4
  ENSP ID: ENSP00000457788
MAAAPALKHWRTTLERVEKFVSPLYFTDCNLRGRLFGASCPVAVLSSFLTPERLPYQEAVQRDFRPAQVGDSFGPTWWTCWFRVELTIPEAWVGQEVHLCWESDGEGLVWRDGEPVQGLTKEGEKTSYVLTDRLGERDPRSLTLYVEVACNGLLGAGKGSMIAAPDPEKMFQLSRAELAVFHRDVHMLLVDLELLLGIAKGLGKDNQRSFQALYTANQMVNVCDPAQPETFPVAQALASRFFGQHGGESQHTIHATGHCHIDTAWLWPFKETVRKCARSWVTALQLMERNPEFIFACSQAQQLEWVKSRYPGLYSRIQEFACRGQFVPVGGTWVEMDGNLPSGEAMVRQFLQGQNFFLQEFGKMCSEFWLPDTFGYSAQLPQIMHGCGIRRFLTQKLSWNLVNSFPHHTFFWEGLDGSRVLVHFPPGDSYGMQGSVEEVLKTVANNRDKGRANHSAFLFGFGDGGGGPTQTMLDRLKRLSNTDGLPRVQLSSPRQLFSALESDSEQLCTWVGELFLELHNGTYTTHAQIKKGNRECERILHDVELLSSLALARSAQFLYPAAQLQHLWRLLLLNQFHDVVTGSCIQMVAEEAMCHYEDIRSHGNTLLSAAAAALCAGEPGPEGLLIVNTLPWKRIEVMALPKPGGAHSLGLTPSPGDSAQHGLCSCSSPHLTAAPAAPAACVRSARAPTDSASRPPPTKTDGSVTLDNGIIRVKLDPTGRLTSLVLVASGREAIAEGAVGNQFVLFDDVPLYWDAWDVMDYHLETRKPVLGQAGTLAVGTEGGLRGSAWFLLQISPNSRLSQEVVLDVGCPYVRFHTEVHWHEAHKFLKVEFPARVRSSQATYEIQFGHLQRPTHYNTSWDWARFEVWAHRWMDLSEHGFGLALLNDCKYGASVRGSILSLSLLRAPKAPDATADTGRHEFTYALMPHKGSFQDAGVIQAAYSLNFPLLALPAPSPAPATSWSAFSVSSPAVVLETVKQAESSPQRRSLVLRLYEAHGSHVDCWLHLSLPVQEAILCDLLERPDPAGHLTLRDNRLKLTFSPFQVLSLLLVLQPPPH

SEQ ID NO: 49088 - protein, 182 aa, Homo sapiens
  Payload ID: 9831
  Gene Symbol: MAN2C1
  Gene Name: mannosidase, alpha, class 2C, member 1
  ENSP ID: ENSP00000457833
MAAAPALKHWRTTLERVEKFVSPLYFTDCNLRGRLFGASCPVAVLSSFLTPERLPYQEAVQRDFRPAQVGDSFGPTWWTCWFRVELTIPEAWVGQEVHLCWESDGEGLVWRDGEPVQGLTKEGEKTSYVLTDRLGERDPRRFKRFSCLSFPSSRDYSLTLYVEVACNGLLGAGKGSMIAAPD

SEQ ID NO: 49089 - protein, 425 aa, Homo sapiens
  Payload ID: 9831
  Gene Symbol: MAN2C1
  Gene Name: mannosidase, alpha, class 2C, member 1
  ENSP ID: ENSP00000479988
MALPKPGGAHSLALVTVPSMGYAPVPPPTSLQPLLPQQPVFVVQETDGSVTLDNGIIRVKLDPTGRLTSLVLVASGREAIAEGAVGNQFVLFDDVPLYWDAWDVMDYHLETRKPVLGQAGTLAVGTEGGLRGSAWFLLQISPNSRLSQEVVLDVGCPYVRFHTEVHWHEAHKFLKVEFPARVRSSQATYEIQFGHLQRPTHYNTSWDWARFEVWAHRWMDLSEHGFGLALLNDCKYGASVRGSILSLSLLRAPKAPDATADTGRHEFTYALMPHKGSFQDAGVIQAAYSLNFPLLALPAPSPAPATSWSAFSVSSPAVVLETVKQAESSPQRRSLVLRLYEAHGSHVDCWLHLSLPVQEAILCDLLERPDPAGHLTSGQPPEAHLFSLPSAVPVARASASATLSPWGWGFVCRRLWGLLISASPA

SEQ ID NO: 49090 - protein, 879 aa, Homo sapiens
  Payload ID: 9832
  Gene Symbol: MANBA
  Gene Name: mannosidase, beta A, lysosomal
  Uniprot ID: O00462
  ENSP ID: ENSP00000226578
MRLHLLLLLALCGAGTTAAELSYSLRGNWSICNGNGSLELPGAVPGCVHSALFQQGLIQDSYYRFNDLNYRWVSLDNWTYSKEFKIPFEISKWQKVNLILEGVDTVSKILFNEVTIGETDNMFNRYSFDITNVVRDVNSIELRFQSAVLYAAQQSKAHTRYQVPPDCPPLVQKGECHVNFVRKEQCSFSWDWGPSFPTQGIWKDVRIEAYNICHLNYFTFSPIYDKSAQEWNLEIESTFDVVSSKPVGGQVIVAIPKLQTQQTYSIELQPGKRIVELFVNISKNITVETWWPHGHGNQTGYNMTVLFELDGGLNIEKSAKVYFRTVELIEEPIKGSPGLSFYFKINGFPIFLKGSNWIPADSFQDRVTSELLRLLLQSVVDANMNTLRVWGGGIYEQDEFYELCDELGIMVWQDFMFACALYPTDQGFLDSVTAEVAYQIKRLKSHPSIIIWSGNNENEEALMMNWYHISFTDRPIYIKDYVTLYVKNIRELVLAGDKSRPFITSSPTNGAETVAEAWVSQNPNSNYFGDVHFYDYISDCWNWKVFPKARFASEYGYQSWPSFSTLEKVSSTEDWSFNSKFSLHRQHHEGGNKQMLYQAGLHFKLPQSTDPLRTFKDTIYLTQVMQAQCVKTETEFYRRSRSEIVDQQGHTMGALYWQLNDIWQAPSWASLEYGGKWKMLHYFAQNFFAPLLPVGFENENTFYIYGVSDLHSDYSMTLSVRVHTWSSLEPVCSRVTERFVMKGGEAVCLYEEPVSELLRRCGNCTRESCVVSFYLSADHELLSPTNYHFLSSPKEAVGLCKAQITAIISQQGDIFVFDLETSAVAPFVWLDVGSIPGRFSDNGFLMTEKTRTILFYPWEPTSKNELEQSFHVTSLTDIY

SEQ ID NO: 49091 - protein, 68 aa, Homo sapiens
  Payload ID: 9832
  Gene Symbol: MANBA
  Gene Name: mannosidase, beta A, lysosomal
  ENSP ID: ENSP00000422001
MRLHLLLLLALCGAGTTAAELSYSLRGNWSICNGNGSLELPGAVPGCVHSALFQQGLIQSLTLSPRLE

SEQ ID NO: 49092 - protein, 822 aa, Homo sapiens
  Payload ID: 9832
  Gene Symbol: MANBA
  Gene Name: mannosidase, beta A, lysosomal
  ENSP ID: ENSP00000427322
MRLHLLLLLALCGAGTTAAELSYSLRGNWSICNGNGSLELPGAVPGCVHSALFQQGLIQDSYYRFNDLNYRWVSLDNWTYSKEFKIPFEISKWQKVNLILEGVDTVSKILFNEVTIGETDNMFNRYEQCSFSWDWGPSFPTQGIWKDVRIEAYNICHLNYFTFSPIYDKSAQEWNLEIESTFDVVSSKPVGGQVIVAIPKLQTQQTYSIELQPGKRIVELFVNISKNITVETWWPHGHGNQTGYNMTVLFELDGGLNIEKSAKVYFRTVELIEEPIKGSPGLSFYFKINGFPIFLKGSNWIPADSFQDRVTSELLRLLLQSVVDANMNTLRVWGGGIYEQDEFYELCDELGIMVWQDFMFACALYPTDQGFLDSVTAEVAYQIKRLKSHPSIIIWSGNNENEEALMMNWYHISFTDRPIYIKDYVTLYVKNIRELVLAGDKSRPFITSSPTNGAETVAEAWVSQNPNSNYFGDVHFYDYISDCWNWKVFPKARFASEYGYQSWPSFSTLEKVSSTEDWSFNSKFSLHRQHHEGGNKQMLYQAGLHFKLPQSTDPLRTFKDTIYLTQVMQAQCVKTETEFYRRSRSEIVDQQGHTMGALYWQLNDIWQAPSWASLEYGGKWKMLHYFAQNFFAPLLPVGFENENTFYIYGVSDLHSDYSMTLSVRVHTWSSLEPVCSRVTERFVMKGGEAVCLYEEPVSELLRRCGNCTRESCVVSFYLSADHELLSPTNYHFLSSPKEAVGLCKAQITAIISQQGDIFVFDLETSAVAPFVWLDVGSIPGRFSDNGFLMTEKTRTILFYPWEPTSKNELEQSFHVTSLTDIY

SEQ ID NO: 49093 - protein, 85 aa, Homo sapiens
  Payload ID: 9833
  Gene Symbol: MANBAL
  Gene Name: mannosidase, beta A, lysosomal-like
  Uniprot ID: Q9NQG1
  ENSP ID: ENSP00000362707
MASDLDFSPPEVPEPTFLENLLRYGLFLGAIFQLICVLAIIVPIPKSHEAEAEPSEPRSAEVTRKPKAAVPSVNKRPKKETKKKR

SEQ ID NO: 49094 - protein, 85 aa, Homo sapiens; identical to SEQ ID NO: 49093
  Payload ID: 9833
  Gene Symbol: MANBAL
  Gene Name: mannosidase, beta A, lysosomal-like
  Uniprot ID: Q9NQG1
  ENSP ID: ENSP00000362708

SEQ ID NO: 49095 - protein, 56 aa, Homo sapiens
  Payload ID: 9833
  Gene Symbol: MANBAL
  Gene Name: mannosidase, beta A, lysosomal-like
  ENSP ID: ENSP00000380337
MASDLDFSPPEVPEPTFLENLLRYGLFLGAIFQLICVLAIIVPIPKSHEAEFHVEA

SEQ ID NO: 49096 - protein, 85 aa, Homo sapiens; identical to SEQ ID NO: 49093
  Payload ID: 9833
  Gene Symbol: MANBAL
  Gene Name: mannosidase, beta A, lysosomal-like
  Uniprot ID: Q9NQG1
  ENSP ID: ENSP00000380338

SEQ ID NO: 49097 - protein, 85 aa, Homo sapiens; identical to SEQ ID NO: 49093
  Payload ID: 9833
  Gene Symbol: MANBAL
  Gene Name: mannosidase, beta A, lysosomal-like
  Uniprot ID: Q9NQG1
  ENSP ID: ENSP00000380339

SEQ ID NO: 49098 - protein, 462 aa, Homo sapiens
  Payload ID: 9834
  Gene Symbol: MANEA
  Gene Name: mannosidase, endo-alpha
  Uniprot ID: Q5SRI9
  ENSP ID: ENSP00000351669
MAKFRRRTCIILALFILFIFSLMMGLKMLRPNTATFGAPFGLDLLPELHQRTIHLGKNFDFQKSDRINSETNTKNLKSVEITMKPSKASELNLDELPPLNNYLHVFYYSWYGNPQFDGKYIHWNHPVLEHWDPRIAKNYPQGRHNPPDDIGSSFYPELGSYSSRDPSVIETHMRQMRSASIGVLALSWYPPDVNDENGEPTDNLVPTILDKAHKYNLKVTFHIEPYSNRDDQNMYKNVKYIIDKYGNHPAFYRYKTKTGNALPMFYVYDSYITKPEKWANLLTTSGSRSIRNSPYDGLFIALLVEEKHKYDILQSGFDGIYTYFATNGFTYGSSHQNWASLKLFCDKYNLIFIPSVGPGYIDTSIRPWNTQNTRNRINGKYYEIGLSAALQTRPSLISITSFNEWHEGTQIEKAVPKRTSNTVYLDYRPHKPGLYLELTRKWSEKYSKERATYALDRQLPVS

SEQ ID NO: 49099 - protein, 198 aa, Homo sapiens
  Payload ID: 9834
  Gene Symbol: MANEA
  Gene Name: mannosidase, endo-alpha
  ENSP ID: ENSP00000358299
MAKFRRRTCIILALFILFIFSLMMGLKMLRPNTATFGAPFGLDLLPELHQRTIHLGKNFDFQKSDRINSETNTKNLKSVEITMKPSKASELNLDELPPLNNYLHVFYYSWYGNPQFDGKYIHWNHPVLEHWDPRIAKNYPQGRHNPPDDIGSSFYPELGSYSSRDPSVIETHMRQMRSASIGNYCIYIYVCLCLYICI

SEQ ID NO: 49100 - protein, 207 aa, Homo sapiens
  Payload ID: 9834
  Gene Symbol: MANEA
  Gene Name: mannosidase, endo-alpha
  ENSP ID: ENSP00000477554
MAKFRRRTCIILALFILFIFSLMMGLKMLRPNTATFGAPFGLDLLPELHQRTIHLGKNFDFQKSDRINSETNTKNLKSVEITMKPSKASELNLDELPPLNNYLHVFYYSWYGNPQFDGKYIHWNHPVLEHWDPRIAKNYPQGRHNPPDDIGSSFYPELGSYSSRDPSVIETHMRQMRSASIGNYCIYICVFVSVYMHINDFLCNFTS

SEQ ID NO: 49101 - protein, 235 aa, Homo sapiens
  Payload ID: 9835
  Gene Symbol: MANEAL
  Gene Name: mannosidase, endo-alpha-like
  Uniprot ID: Q5VSG8
  ENSP ID: ENSP00000328770
MITGSPQMTWCPPFWTPPISTASRYGSHGAFYRYKNSMGKSLPLFYIYDSYLTSPEAWAHLLTPNGPHSIRNTPYDGVFIALLVEEGHTHDILAAGFDGMYTYFASNGFSFGSSHQNWKAVKNFCDANNLMFIPSVGPGYIDTSIRPWNNHNTRNRVNGKYYETALQAALTVRPEIVSITSFNEWHEGTQIEKAIPKKTPTRLYLDYLPHQPSLYLELTRRWAEHFIKEKEQWLM

SEQ ID NO: 49102 - protein, 457 aa, Homo sapiens
  Payload ID: 9835
  Gene Symbol: MANEAL
  Gene Name: mannosidase, endo-alpha-like
  Uniprot ID: Q5VSG8
  ENSP ID: ENSP00000362136
MARRRRRACIALFLVLLFAFGTLMGLRTLKAPDGLPALGPGLELAPFERRPEGAPAPAARAPAAPAAPPPPPPPPRTADPGGSPGPAPAEAEPAPVQSLRVYSDLHAFYYSWYGSPRREGHYIHWDHVMVPHWDPKISASYPRGRHSPPDDLGSSFYPELGPYSSRDPEVLREHMTQLKEAAIGVLVLSWYPPGMADDNGEPSDDLVPAILDTAHQYSIQVAFHIQPYKGRDDITVHDNIKYIIDTYGSHGAFYRYKNSMGKSLPLFYIYDSYLTSPEAWAHLLTPNGPHSIRNTPYDGVFIALLVEEGHTHDILAAGFDGMYTYFASNGFSFGSSHQNWKAVKNFCDANNLMFIPSVGPGYIDTSIRPWNNHNTRNRVNGKYYETALQAALTVRPEIVSITSFNEWHEGTQIEKAIPKKTPTRLYLDYLPHQPSLYLELTRRWAEHFIKEKEQWLM

SEQ ID NO: 49103 - protein, 250 aa, Homo sapiens
  Payload ID: 9835
  Gene Symbol: MANEAL
  Gene Name: mannosidase, endo-alpha-like
  Uniprot ID: Q5VSG8
  ENSP ID: ENSP00000380755
MARRRRRACIALFLVLLFAFGTLMGLRTLKAPDGLPALGPGLELAPFERRPEGAPAPAARAPAAPAAPPPPPPPPRTADPGGSPGPAPAEAEPAPVQSLRVYSDLHAFYYSWYGSPRREGHYIHWDHVMVPHWDPKISASYPRGRHSPPDDLGSSFYPELGPYSSRDPEVLREHMTQLKEAAIGVLVLSWYPPGMADDNGEPSDDLVPAILDTAHQYSIQVAFHIQPYKGRDDITVHDNIKYIIDTTGKL

SEQ ID NO: 49104 - protein, 130 aa, Homo sapiens
  Payload ID: 9835
  Gene Symbol: MANEAL
  Gene Name: mannosidase, endo-alpha-like
  ENSP ID: ENSP00000432567
VYSDLHAFYYSWYGSPRREGHYIHWDHVMVPHWDPKISASYPRGRHSPPDDLGSSFYPELGPYSSRDPEVLREHMTQLKEAAIGVLVLSWYPPGMADDNGEPSDDLVPAILDTAHQYSIQVWLPWCILPL

SEQ ID NO: 49105 - protein, 263 aa, Homo sapiens
  Payload ID: 9835
  Gene Symbol: MANEAL
  Gene Name: mannosidase, endo-alpha-like
  ENSP ID: ENSP00000437312
MADDNGEPSDDLVPAILDTAHQYSIQVAFHIQPYKGRDDITVHDNIKYIIDTYGSHGAFYRYKNSMGKSLPLFYIYDSYLTSPEAWAHLLTPNGPHSIRNTPYDGVFIALLVEEGHTHDILAAGFDGMYTYFASNGFSFGSSHQNWKAVKNFCDANNLMFIPSVGPGYIDTSIRPWNNHNTRNRVNGKYYETALQAALTVRPEIVSITSFNEWHEGTQIEKAIPKKTPTRLYLDYLPHQPSLYLELTRRWAEHFIKEKEQWLM

SEQ ID NO: 49106 - protein, 445 aa, Homo sapiens
  Payload ID: 9836
  Gene Symbol: MGAT1
  Gene Name: mannosyl (alpha-1,3-)-glycoprotein beta-1,2-N- acetylglucosaminyltransferase
  Uniprot ID: P26572
  ENSP ID: ENSP00000311888
MLKKQSAGLVLWGAILFVAWNALLLLFFWTRPAPGRPPSVSALDGDPASLTREVIRLAQDAEVELERQRGLLQQIGDALSSQRGRVPTAAPPAQPRVPVTPAPAVIPILVIACDRSTVRRCLDKLLHYRPSAELFPIIVSQDCGHEETAQAIASYGSAVTHIRQPDLSSIAVPPDHRKFQGYYKIARHYRWALGQVFRQFRFPAAVVVEDDLEVAPDFFEYFRATYPLLKADPSLWCVSAWNDNGKEQMVDASRPELLYRTDFFPGLGWLLLAELWAELEPKWPKAFWDDWMRRPEQRQGRACIRPEISRTMTFGRKGVSHGQFFDQHLKFIKLNQQFVHFTQLDLSYLQREAYDRDFLARVYGAPQLQVEKVRTNDRKELGEVRVQYTGRDSFKAFAKALGVMDDLKSGVPRAGYRGIVTFQFRGRRVHLAPPLTWEGYDPSWN

SEQ ID NO: 49107 - protein, 445 aa, Homo sapiens; identical to SEQ ID NO: 49106
  Payload ID: 9836
  Gene Symbol: MGAT1
  Gene Name: mannosyl (alpha-1,3-)-glycoprotein beta-1,2-N- acetylglucosaminyltransferase
  Uniprot ID: P26572
  ENSP ID: ENSP00000332073

SEQ ID NO: 49108 - protein, 445 aa, Homo sapiens; identical to SEQ ID NO: 49106
  Payload ID: 9836
  Gene Symbol: MGAT1
  Gene Name: mannosyl (alpha-1,3-)-glycoprotein beta-1,2-N- acetylglucosaminyltransferase
  Uniprot ID: P26572
  ENSP ID: ENSP00000377010

SEQ ID NO: 49109 - protein, 445 aa, Homo sapiens; identical to SEQ ID NO: 49106
  Payload ID: 9836
  Gene Symbol: MGAT1
  Gene Name: mannosyl (alpha-1,3-)-glycoprotein beta-1,2-N- acetylglucosaminyltransferase
  Uniprot ID: P26572
  ENSP ID: ENSP00000402838

SEQ ID NO: 49110 - protein, 445 aa, Homo sapiens; identical to SEQ ID NO: 49106
  Payload ID: 9836
  Gene Symbol: MGAT1
  Gene Name: mannosyl (alpha-1,3-)-glycoprotein beta-1,2-N- acetylglucosaminyltransferase
  Uniprot ID: P26572
  ENSP ID: ENSP00000404718

SEQ ID NO: 49111 - protein, 104 aa, Homo sapiens
  Payload ID: 9836
  Gene Symbol: MGAT1
  Gene Name: mannosyl (alpha-1,3-)-glycoprotein beta-1,2-N- acetylglucosaminyltransferase
  ENSP ID: ENSP00000421738
MLKKQSAGLVLWGAILFVAWNALLLLFFWTRPAPGRPPSVSALDGDPASLTREVIRLAQDAEVELERQRGLLQQIGDALSSQRGRVPTAAPPAQPRVPVTPAPA

SEQ ID NO: 49112 - protein, 103 aa, Homo sapiens
  Payload ID: 9836
  Gene Symbol: MGAT1
  Gene Name: mannosyl (alpha-1,3-)-glycoprotein beta-1,2-N- acetylglucosaminyltransferase
  ENSP ID: ENSP00000422588
MLKKQSAGLVLWGAILFVAWNALLLLFFWTRPAPGRPPSVSALDGDPASLTREVIRLAQDAEVELERQRGLLQQIGDALSSQRGRVPTAAPPAQPRVPVTPAP

SEQ ID NO: 49113 - protein, 111 aa, Homo sapiens
  Payload ID: 9836
  Gene Symbol: MGAT1
  Gene Name: mannosyl (alpha-1,3-)-glycoprotein beta-1,2-N- acetylglucosaminyltransferase
  ENSP ID: ENSP00000422906
MLKKQSAGLVLWGAILFVAWNALLLLFFWTRPAPGRPPSVSALDGDPASLTREVIRLAQDAEVELERQRGLLQQIGDALSSQRGRVPTAAPPAQPRVPVTPAPAVIPILVI

SEQ ID NO: 49114 - protein, 95 aa, Homo sapiens
  Payload ID: 9836
  Gene Symbol: MGAT1
  Gene Name: mannosyl (alpha-1,3-)-glycoprotein beta-1,2-N- acetylglucosaminyltransferase
  ENSP ID: ENSP00000423401
MLKKQSAGLVLWGAILFVAWNALLLLFFWTRPAPGRPPSVSALDGDPASLTREVIRLAQDAEVELERQRGLLQQIGDALSSQRGRVPTAAPPAQP

SEQ ID NO: 49115 - protein, 127 aa, Homo sapiens
  Payload ID: 9836
  Gene Symbol: MGAT1
  Gene Name: mannosyl (alpha-1,3-)-glycoprotein beta-1,2-N- acetylglucosaminyltransferase
  ENSP ID: ENSP00000424382
MLKKQSAGLVLWGAILFVAWNALLLLFFWTRPAPGRPPSVSALDGDPASLTREVIRLAQDAEVELERQRGLLQQIGDALSSQRGRVPTAAPPAQPRVPVTPAPAVIPILVIACDRSTVRRCLDKLLH

SEQ ID NO: 49116 - protein, 199 aa, Homo sapiens
  Payload ID: 9836
  Gene Symbol: MGAT1
  Gene Name: mannosyl (alpha-1,3-)-glycoprotein beta-1,2-N- acetylglucosaminyltransferase
  ENSP ID: ENSP00000424891
MLKKQSAGLVLWGAILFVAWNALLLLFFWTRPAPGRPPSVSALDGDPASLTREVIRLAQDAEVELERQRGLLQQIGDALSSQRGRVPTAAPPAQPRVPVTPAPAVIPILVIACDRSTVRRCLDKLLHYRPSAELFPIIVSQDCGHEETAQAIASYGSAVTHIRQPDLSSIAVPPDHRKFQGYYKIARHYRWALGQVFRQ

SEQ ID NO: 49117 - protein, 153 aa, Homo sapiens
  Payload ID: 9836
  Gene Symbol: MGAT1
  Gene Name: mannosyl (alpha-1,3-)-glycoprotein beta-1,2-N- acetylglucosaminyltransferase
  ENSP ID: ENSP00000425988
MLKKQSAGLVLWGAILFVAWNALLLLFFWTRPAPGRPPSVSALDGDPASLTREVIRLAQDAEVELERQRGLLQQIGDALSSQRGRVPTAAPPAQPRVPVTPAPAVIPILVIACDRSTVRRCLDKLLHYRPSAELFPIIVSQDCGHEETAQAIA

SEQ ID NO: 49118 - protein, 115 aa, Homo sapiens
  Payload ID: 9836
  Gene Symbol: MGAT1
  Gene Name: mannosyl (alpha-1,3-)-glycoprotein beta-1,2-N- acetylglucosaminyltransferase
  ENSP ID: ENSP00000427116
MLKKQSAGLVLWGAILFVAWNALLLLFFWTRPAPGRPPSVSALDGDPASLTREVIRLAQDAEVELERQRGLLQQIGDALSSQRGRVPTAAPPAQPRVPVTPAPAVIPILVIACDR

SEQ ID NO: 49119 - protein, 34 aa, Homo sapiens
  Payload ID: 9836
  Gene Symbol: MGAT1
  Gene Name: mannosyl (alpha-1,3-)-glycoprotein beta-1,2-N- acetylglucosaminyltransferase
  ENSP ID: ENSP00000427433
MLKKQSAGLVLWGAILFVAWNALLLLFFWTRPAP

SEQ ID NO: 49120 - protein, 535 aa, Homo sapiens
  Payload ID: 9837
  Gene Symbol: MGAT4A
  Gene Name: mannosyl (alpha-1,3-)-glycoprotein beta-1,4-N- acetylglucosaminyltransferase, isozyme A
  Uniprot ID: Q9UM21
  ENSP ID: ENSP00000264968
MRLRNGTVATALAFITSFLTLSWYTTWQNGKEKLIAYQREFLALKERLRIAEHRISQRSSELNTIVQQFKRVGAETNGSKDALNKFSDNTLKLLKELTSKKSLQVPSIYYHLPHLLKNEGSLQPAVQIGNGRTGVSIVMGIPTVKREVKSYLIETLHSLIDNLYPEEKLDCVIVVFIGETDIDYVHGVVANLEKEFSKEISSGLVEVISPPESYYPDLTNLKETFGDSKERVRWRTKQNLDYCFLMMYAQEKGIYYIQLEDDIIVKQNYFNTIKNFALQLSSEEWMILEFSQLGFIGKMFQAPDLTLIVEFIFMFYKEKPIDWLLDHILWVKVCNPEKDAKHCDRQKANLRIRFRPSLFQHVGLHSSLSGKIQKLTDKDYMKPLLLKIHVNPPAEVSTSLKVYQGHTLEKTYMGEDFFWAITPIAGDYILFKFDKPVNVESYLFHSGNQEHPGDILLNTTVEVLPFKSEGLEISKETKDKRLEDGYFRIGKFENGVAEGMVDPSLNPISAFRLSVIQNSAVWAILNEIHIKKATN

SEQ ID NO: 49121 - protein, 535 aa, Homo sapiens; identical to SEQ ID NO: 49120
  Payload ID: 9837
  Gene Symbol: MGAT4A
  Gene Name: mannosyl (alpha-1,3-)-glycoprotein beta-1,4-N- acetylglucosaminyltransferase, isozyme A
  Uniprot ID: Q9UM21
  ENSP ID: ENSP00000377127

SEQ ID NO: 49122 - protein, 535 aa, Homo sapiens; identical to SEQ ID NO: 49120
  Payload ID: 9837
  Gene Symbol: MGAT4A
  Gene Name: mannosyl (alpha-1,3-)-glycoprotein beta-1,4-N- acetylglucosaminyltransferase, isozyme A
  Uniprot ID: Q9UM21
  ENSP ID: ENSP00000386841

SEQ ID NO: 49123 - protein, 423 aa, Homo sapiens
  Payload ID: 9837
  Gene Symbol: MGAT4A
  Gene Name: mannosyl (alpha-1,3-)-glycoprotein beta-1,4-N- acetylglucosaminyltransferase, isozyme A
  Uniprot ID: Q9UM21
  ENSP ID: ENSP00000404889
MNYSITVSIVMGIPTVKREVKSYLIETLHSLIDNLYPEEKLDCVIVVFIGETDIDYVHGVVANLEKEFSKEISSGLVEVISPPESYYPDLTNLKETFGDSKERVRWRTKQNLDYCFLMMYAQEKGIYYIQLEDDIIVKQNYFNTIKNFALQLSSEEWMILEFSQLGFIGKMFQAPDLTLIVEFIFMFYKEKPIDWLLDHILWVKVCNPEKDAKHCDRQKANLRIRFRPSLFQHVGLHSSLSGKIQKLTDKDYMKPLLLKIHVNPPAEVSTSLKVYQGHTLEKTYMGEDFFWAITPIAGDYILFKFDKPVNVESYLFHSGNQEHPGDILLNTTVEVLPFKSEGLEISKETKDKRLEDGYFRIGKFENGVAEGMVDPSLNPISAFRLSVIQNSAVWAILNEQRVFSGWWQKSRDKAEGPQAPLLF

SEQ ID NO: 49124 - protein, 44 aa, Homo sapiens
  Payload ID: 9837
  Gene Symbol: MGAT4A
  Gene Name: mannosyl (alpha-1,3-)-glycoprotein beta-1,4-N- acetylglucosaminyltransferase, isozyme A
  ENSP ID: ENSP00000475198
MRLRNGTVATALAFITSFLTLSWYTTWQNGKGKENDSENVHEMY

SEQ ID NO: 49125 - protein, 548 aa, Homo sapiens
  Payload ID: 9838
  Gene Symbol: MGAT4B
  Gene Name: mannosyl (alpha-1,3-)-glycoprotein beta-1,4-N- acetylglucosaminyltransferase, isozyme B
  Uniprot ID: Q9UQ53
  ENSP ID: ENSP00000292591
MRLRNGTFLTLLLFCLCAFLSLSWYAALSGQKGDVVDVYQREFLALRDRLHAAEQESLKRSKELNLVLDEIKRAVSERQALRDGDGNRTWGRLTEDPRLKPWNGSHRHVLHLPTVFHHLPHLLAKESSLQPAVRVGQGRTGVSVVMGIPSVRREVHSYLTDTLHSLISELSPQEKEDSVIVVLIAETDSQYTSAVTENIKALFPTEIHSGLLEVISPSPHFYPDFSRLRESFGDPKERVRWRTKQNLDYCFLMMYAQSKGIYYVQLEDDIVAKPNYLSTMKNFALQQPSEDWMILEFSQLGFIGKMFKSLDLSLIVEFILMFYRDKPIDWLLDHILWVKVCNPEKDAKHCDRQKANLRIRFKPSLFQHVGTHSSLAGKIQKLKDKDFGKQALRKEHVNPPAEVSTSLKTYQHFTLEKAYLREDFFWAFTPAAGDFIRFRFFQPLRLERFFFRSGNIEHPEDKLFNTSVEVLPFDNPQSDKEALQEGRTATLRYPRSPDGYLQIGSFYKGVAEGEVDPAFGPLEALRLSIQTDSPVWVILSEIFLKKAD

SEQ ID NO: 49126 - protein, 563 aa, Homo sapiens
  Payload ID: 9838
  Gene Symbol: MGAT4B
  Gene Name: mannosyl (alpha-1,3-)-glycoprotein beta-1,4-N- acetylglucosaminyltransferase, isozyme B
  Uniprot ID: Q9UQ53
  ENSP ID: ENSP00000338487
MSRVAGTRTDVNELLQRWTPRCVRWHTGGARRVALDRPLVTACLPPAGDVVDVYQREFLALRDRLHAAEQESLKRSKELNLVLDEIKRAVSERQALRDGDGNRTWGRLTEDPRLKPWNGSHRHVLHLPTVFHHLPHLLAKESSLQPAVRVGQGRTGVSVVMGIPSVRREVHSYLTDTLHSLISELSPQEKEDSVIVVLIAETDSQYTSAVTENIKALFPTEIHSGLLEVISPSPHFYPDFSRLRESFGDPKERVRWRTKQNLDYCFLMMYAQSKGIYYVQLEDDIVAKPNYLSTMKNFALQQPSEDWMILEFSQLGFIGKMFKSLDLSLIVEFILMFYRDKPIDWLLDHILWVKVCNPEKDAKHCDRQKANLRIRFKPSLFQHVGTHSSLAGKIQKLKDKDFGKQALRKEHVNPPAEVSTSLKTYQHFTLEKAYLREDFFWAFTPAAGDFIRFRFFQPLRLERFFFRSGNIEHPEDKLFNTSVEVLPFDNPQSDKEALQEGRTATLRYPRSPDGYLQIGSFYKGVAEGEVDPAFGPLEALRLSIQTDSPVWVILSEIFLKKAD

SEQ ID NO: 49127 - protein, 200 aa, Homo sapiens
  Payload ID: 9838
  Gene Symbol: MGAT4B
  Gene Name: mannosyl (alpha-1,3-)-glycoprotein beta-1,4-N- acetylglucosaminyltransferase, isozyme B
  ENSP ID: ENSP00000427995
MGIPSVRREVHSYLTDTLHSLISELSPQEKEDSVIVVLIAETDSQYTSAVTENIKALFPTEIHSGLLEVISPSPHFYPDFSRLRESFGDPKERVRWRTKQNLDYCFLMMYAQSKGIYYVQLEDDIVAKPNYLSTMKNFALQQPSEDWMILEFSQLGFIGKMFKSLDLSLIVEFILMFYRDKPIDWLLDHILWVKVCNPEK

SEQ ID NO: 49128 - protein, 244 aa, Homo sapiens
  Payload ID: 9838
  Gene Symbol: MGAT4B
  Gene Name: mannosyl (alpha-1,3-)-glycoprotein beta-1,4-N- acetylglucosaminyltransferase, isozyme B
  ENSP ID: ENSP00000428764
  MOD_RES (1)..(1): Any amino acid
XQYTSAVTENIKALFPTEIHSGLLEVISPSPHFYPDFSRLRESFGDPKERVRWRTKQNLDYCFLMMYAQSKGIYYVQLEDDIVAKPNYLSTMKNFALQQPSEDWMILEFSQLGFIGKMFKSLDLSLIVEFILMFYRDKPIDWLLDHILWVKVCNPEKDAKHCDRQKANLRIRFKPSLFQHVGTHSSLAGKIQKLKDKDFGKQALRKEHVNPPAEWEHRAPGGQALQHVCGGAALRQPSVRQGGP

SEQ ID NO: 49129 - protein, 373 aa, Homo sapiens
  Payload ID: 9838
  Gene Symbol: MGAT4B
  Gene Name: mannosyl (alpha-1,3-)-glycoprotein beta-1,4-N -acetylglucosaminyltransferase, isozyme B
  ENSP ID: ENSP00000428906
  MOD_RES (1)..(1): Any amino acid
XEDSVIVVLIAETDSQYTSAVTENIKALFPTEIHSGLLEVISPSPHFYPDFSRLRESFGDPKERVRWRTKQNLDYCFLMMYAQSKGIYYVQLEDDIVAKPNYLSTMKNFALQQPSEDWMILEFSQLGFIGKMFKSLDLSLIVEFILMFYRDKPIDWLLDHILWVKVCNPEKDAHCDRQKANLRIRFKPSLFQHVGTHSSLAGKIQKLKDKDFGKQALRKEHVNPPAEVSTSLKTYQHFTLEKAYLREDFFWAFTPAAGDFIRFRFFQPLRLERFFFRSGNIEHPEDKLFNTSVEVLPFDNPQSDKEALQEGRTATLRYPRSPDGYLQIGSFYKGVAEGEVDPAFGPLEALRLSIQTDSPVWVILSEIFLKKAD

SEQ ID NO: 49130 - protein, 240 aa, Homo sapiens
  Payload ID: 9838
  Gene Symbol: MGAT4B
  Gene Name: mannosyl (alpha-1,3-)-glycoprotein beta-1,4-N- acetylglucosaminyltransferase, isozyme B
  ENSP ID: ENSP00000428960
  MOD_RES (1)..(1): Any amino acid
XKMFKSLDLSLIVEFILMFYRDKPIDWLLDHILWVKVCNPEKDAKHCDRQKANLRIRFKPSLFQHVGTHSSLAGKIQKLKDKDFGKQALRKEHVNPPAEVSTSLKTYQHFTLEKAYLREDFFWAFTPAAGDFIRFRFFQPLRLERGNIEHPEDKLFNTSVEVLPFDNPQSDKEALQEGRTATLRYPRSPDGYLQIGSFYKGVAEGEVDPAFGPLEALRLSIQTDSPVWVILSEIFLKKAD

SEQ ID NO: 49131 - protein, 157 aa, Homo sapiens
  Payload ID: 9838
  Gene Symbol: MGAT4B
  Gene Name: mannosyl (alpha-1,3-)-glycoprotein beta-1,4-N- acetylglucosaminyltransferase, isozyme B
  ENSP ID: ENSP00000430376
MSRVAGTRTDVNELLQRWTPRCVRWHTGGARRVALDRPLVTACLPPAGDVVDVYQREFLALRDRLHAAEQESLKRSKELNLVLDEIKRAVSERQALRDGDGNRTWGRLTEDPRLKPWNGSHRHVLHLPTVFHHLPHLLAKESSLQPAVRVGQGRTGD

SEQ ID NO: 49132 - protein, 429 aa, Homo sapiens
  Payload ID: 9838
  Gene Symbol: MGAT4B
  Gene Name: mannosyl (alpha-1,3-)-glycoprotein beta-1,4-N- acetylglucosaminyltransferase, isozyme B
  ENSP ID: ENSP00000430721
  MOD_RES (1)..(1): Any amino acid
XEQESLKRSKELNLVLDEIKRAVSERQALRDGDGNRTWGRLTEDPRLKPWNGSHRHVLHLPTVFHHLPHLLAKESSLQPAVRVGQGRTGVSVVMGIPSVRREVHSYLTDTLHSLISELSPQEKEDSVIVVLIAETDSQYTSAVTENIKALFPTEIHSGLLEVISPSPHFYPDFSRLRESFGDPKERVRWRTKQNLDYCFLMMYAQSKGIYYVQLEDDIVAKPNYLSTMKNFALQQPSEDWMILEFSQLGFIGQRLWKAGAAEGACEPASRGEHEPEDIPALHPGESLPARGLLLGLHPCRGGLHPLPLLPTSKTGAVLLPQWEHRAPGGQALQHVCGGAALRQPSVRQGGPAGGPHRHPPVPSEPRRLPPDRLLLQGSGRGRGGPSLRPSGSTAPLDPDGLPCVGDSERDLPEKGRLSCGLLRVPCGQP

SEQ ID NO: 49133 - protein, 322 aa, Homo sapiens
  Payload ID: 9838
  Gene Symbol: MGAT4B
  Gene Name: mannosyl (alpha-1,3-)-glycoprotein beta-1,4-N- acetylglucosaminyltransferase, isozyme B
  ENSP ID: ENSP00000430723
  MOD_RES (1)..(1): Any amino acid
XFPTEIHSGLLEVISPSPHFYPDFSRLRESFGDPKERVRWRTKQNLDYCFLMMYAQSKGIYYVQLEDDIVAKPNYLSTMKNFALQQPSEDWMILEFSQLGFIGKMFKSLDLSLIVEFILMFYRDKPIDWLLDHILWVKVCNPEKDAAGIKVGAHAITAVPPPLQDKDFGKQALRKEHVNPPAEVSTSLKTYQHFTLEKAYLREDFFWAFTPAAGDFIRFRFFQPLRLERFFFRSGNIEHPEDKLFNTSVEVLPFDNPQSDKEALQEGRTATLRYPRSPDGYLQIGSFYKGVAEGEVDPAFGPLEALRLSIQTDSPVWVILSE

SEQ ID NO: 49134 - protein, 150 aa, Homo sapiens
  Payload ID: 9838
  Gene Symbol: MGAT4B
  Gene Name: mannosyl (alpha-1,3-)-glycoprotein beta-1,4-N- acetylglucosaminyltransferase, isozyme B
  ENSP ID: ENSP00000430964
  MOD_RES (1)..(1): Any amino acid
XLLLFCLCAFLSLSWYAALSGQKGDVVDVYQREFLALRDRLHAAEQESLKRSKELNLVLDEIKRAVSERQALRDGDGNRTWGRLTGPPIEAVERLTPARAAPAHRLPSPATPAGQGEQSAARGARGPGPHRSVGGDGHPERAARGALVPD

SEQ ID NO: 49135 - protein, 307 aa, Homo sapiens
  Payload ID: 9838
  Gene Symbol: MGAT4B
  Gene Name: mannosyl (alpha-1,3-)-glycoprotein beta-1,4-N -acetylglucosaminyltransferase, isozyme B
  ENSP ID: ENSP00000431093
  MOD_RES (1)..(1): Any amino acid
XTSAVTENIKALFPTEIHSGLLEVISPSPHFYPDFSRLRESFGDPKERVRWRTKQNLDYCFLMMYAQSKGIYYVQLEDDIVAKPNYLSTMKNFALQQPSEDWMILEFSQLGFIARGHSLLAGWQDPETEGQRLWKAGAAEGACEPASRGEHEPEDIPALHPGESLPARGLLLGLHPCRGGLHPLPLLPTSKTGAVLLPQWEHRAPGGQALQHVCGGAALRQPSVRQGGPAGGPHRHPPVPSEPRRLPPDRLLLQGSGRGRGGPSLRPSGSTAPLDPDGLPCVGDSERDLPEKGRLSCGLLRVPCGQP

SEQ ID NO: 49136 - protein, 447 aa, Homo sapiens
  Payload ID: 9839
  Gene Symbol: MGAT2
  Gene Name: mannosyl (alpha-1,6-)-glycoprotein beta-1,2- N-acetylglucosaminyltransferase
  Uniprot ID: Q10469
  ENSP ID: ENSP00000307423
MRFRIYKRKVLILTLVVAACGFVLWSSNGRQRKNEALAPPLLDAEPARGAGGRGGDHPSVAVGIRRVSNVSAASLVPAVPQPEADNLTLRYRSLVYQLNFDQTLRNVDKAGTWAPRELVLVVQVHNRPEYLRLLLDSLRKAQGIDNVLVIFSHDFWSTEINQLIAGVNFCPVLQVFFPFSIQLYPNEFPGSDPRDCPRDLPKNAALKLGCINAEYPDSFGHYREAKFSQTKHHWWWKLHFVWERVKILRDYAGLILFLEEDHYLAPDFYHVFKKMWKLKQQECPECDVLSLGTYSASRSFYGMADKVDVKTWKSTEHNMGLALTRNAYQKLIECTDTFCTYDDYNWDWTLQYLTVSCLPKFWKVLVPQIPRIFHAGDCGMHHKKTCRPSTQSAQIESLLNNNKQYMFPETLTISEKFTVVAISPPRKNGGWGDIRDHELCKSYRRLQ

SEQ ID NO: 49137 - protein, 741 aa, Homo sapiens
  Payload ID: 9840
  Gene Symbol: MGAT5
  Gene Name: mannosyl (alpha-1,6-)-glycoprotein beta-1,6-N- acetyl-glucosaminyltransferase
  Uniprot ID: Q09328
  ENSP ID: ENSP00000281923
MALFTPWKLSSQKLGFFLVTFGFIWGMMLLHFTIQQRTQPESSSMLREQILDLSKRYIKALAEENRNVVDGPYAGVMTAYDLKKTLAVLLDNILQRIGKLESKVDNLVVNGTGTNSTNSTTAVPSLVALEKINVADIINGAQEKCVLPPMDGYPHCEGKIKWMKDMWRSDPCYADYGVDGSTCSFFIYLSEVENWCPHLPWRAKNPYEEADHNSLAEIRTDFNILYSMMKKHEEFRWMRLRIRRMADAWIQAIKSLAEKQNLEKRKRKKVLVHLGLLTKESGFKIAETAFSGGPLGELVQWSDLITSLYLLGHDIRISASLAELKEIMKKVVGNRSGCPTVGDRIVELIYIDIVGLAQFKKTLGPSWVHYQCMLRVLDSFGTEPEFNHANYAQSKGHKTPWGKWNLNPQQFYTMFPHTPDNSFLGFVVEQHLNSSDIHHINEIKRQNQSLVYGKVDSFWKNKKIYLDIIHTYMEVHATVYGSSTKNIPSYVKNHGILSGRDLQFLLRETKLFVGLGFPYEGPAPLEAIANGCAFLNPKFNPPKSSKNTDFFIGKPTLRELTSQHPYAEVFIGRPHVWTVDLNNQEEVEDAVKAILNQKIEPYMPYEFTCEGMLQRINAFIEKQDFCHGQVMWPPLSALQVKLAEPGQSCKQVCQESQLICEPSFFQHLNKDKDMLKYKVTCQSSELAKDILVPSFDPKNKHCVFQGDLLLFSCAGAHPRHQRVCPCRDFIKGQVALCKDCL

SEQ ID NO: 49138 - protein, 741 aa, Homo sapiens; identical to SEQ ID NO: 49137
  Payload ID: 9840
  Gene Symbol: MGAT5
  Gene Name: mannosyl (alpha-1,6-)-glycoprotein beta-1,6-N- acetyl-glucosaminyltransferase
  Uniprot ID: Q09328
  ENSP ID: ENSP00000386377

SEQ ID NO: 49139 - protein, 790 aa, Homo sapiens
  Payload ID: 9841
  Gene Symbol: MGAT5B
  Gene Name: mannosyl (alpha-1,6-)-glycoprotein beta-1,6-N- acetyl-glucosaminyltransferase, isozyme B
  Uniprot ID: Q3V5L5
  ENSP ID: ENSP00000301618
MITVNPDGKIMVRRCLVTLRPFRLFVLGIGFFTLCFLMTSLGGQFSARRLGDSPFTIRTEVMGGPESRGVLRKMSDLLELMVKRMDALARLENSSELHRAGGDLHFPADRMPPGAGLMERIQAIAQNVSDIAVKVDQILRHSLLLHSKVSEGRRDQCEAPSDPKFPDCSGKVEWMRARWTSDPCYAFFGVDGTECSFLIYLSEVEWFCPPLPWRNQTAAQRAPKPLPKVQAVFRSNLSHLLDLMGSGKESLIFMKKRTKRLTAQWALAAQRLAQKLGATQRDQKQILVHIGFLTEESGDVFSPRVLKGGPLGEMVQWADILTALYVLGHGLRVTVSLKELQSNLGVPPGRGSCPLTMPLPFDLIYTDYHGLQQMKRHMGLSFKKYRCRIRVIDTFGTEPAYNHEEYATLHGYRTNWGYWNLNPKQFMTMFPHTPDNSFMGFVSEELNETEKRLIKGGKASNMAVVYGKEASIWKGKEKFLGILNKYMEIHGTVYYESQRPPEVPAFVKNHGLLPQPEFQQLLRKAKLFIGFGFPYEGPAPLEAIANGCIFLQSRFSPPHSSLNHEFFRGKPTSREVFSQHPYAENFIGKPHVWTVDYNNSEEFEAAIKAIMRTQVDPYLPYEYTCEGMLERIHAYIQHQDFCRAPDPALPEAHAPQSPFVLAPNATHLEWARNTSLAPGAWPPAHALRAWLAVPGRACTDTCLDHGLICEPSFFPFLNSQDAFLKLQVPCDSTESEMNHLYPAFAQPGQECYLQKEPLLFSCAGSNTKYRRLCPCRDFRKGQVALCQGCL

SEQ ID NO: 49140 - protein, 801 aa, Homo sapiens
  Payload ID: 9841
  Gene Symbol: MGAT5B
  Gene Name: mannosyl (alpha-1,6-)-glycoprotein beta-1,6-N- acetyl-glucosaminyltransferase, isozyme B
  Uniprot ID: Q3V5L5
  ENSP ID: ENSP00000391227
MHSFVKHLCSRYVVERQGTMALPALLTRLLPLRRLFVLGIGFFTLCFLMTSLGGQFSARRLGDSPFTIRTEVMGGPESRGVLRKMSDLLELMVKRMDALARLENSSELHRAGGDLHFPADRMPPGAGLMERIQAIAQNVSDIAVKVDQILRHSLLLHSKVSEGRRDQCEAPSDPKFPDCSGKVEWMRARWTSDPCYAFFGVDGTECSFLIYLSEVEWFCPPLPWRNQTAAQRAPKPLPKVQAVFRSNLSHLLDLMGSGKESLIFMKKRTKRLTAQWALAAQRLAQKLGATQRDQKQILVHIGFLTEESGDVFSPRVLKGGPLGEMVQWADILTALYVLGHGLRVTVSLKELQSNLGVPPGRGSCPLTMPLPFDLIYTDYHGLQQMKRHMGLSFKKYRCRIRVIDTFGTEPAYNHEEYATLHGYRTNWGYWNLNPKQFMTMFPHTPDNSFMGFVSEELNETEKRLIKGGKASNMAVVYGKEASIWKGKEKFLGILNKYMEIHGTVYYESQRPPEVPAFVKNHGLLPQPEFQQLLRKAKLFIGFGFPYEGPAPLEAIANGCIFLQSRFSPPHSSLNHEFFRGKPTSREVFSQHPYAENFIGKPHVWTVDYNNSEEFEAAIKAIMRTQVDPYLPYEYTCEGMLERIHAYIQHQDFCRAPDPALPEAHAPQSPFVLAPNATHLEWARNTSLAPGAWPPAHALRAWLAVPGRACTDTCLDHGLICEPSFFPFLNSQDAFLKLQVPCDSTESEMNHLYPAFAQPGQECYLQKEPLLFSCAGSNTKYRRLCPCRDFRKGQVALCQGCL

SEQ ID NO: 49141 - protein, 483 aa, Homo sapiens
  Payload ID: 9841
  Gene Symbol: MGAT5B
  Gene Name: mannosyl (alpha-1,6-)-glycoprotein beta-1,6-N- acetyl-glucosaminyltransferase, isozyme B
  ENSP ID: ENSP00000455631
MHSFVKHLCSRYVVERQGTMALPALLTRLLPLRRLFVLGIGFFTLCFLMTSLGGQFSARRLGDSPFTIRTEVMGGPESRGVLRKMSDLLELMVKRMDALARLENSSELHRAGGDLHFPADRMPPGAGLMERIQAIAQNVSDIAVKVDQILRHSLLLHSKVSEGRRDQCEAPSDPKFPDCSGKVEWMRARWTSDPCYAFFGVDGTECSFLIYLSEVEWFCPPLPWRNQTAAQRAPKPLPKVQAVFRSNLSHLLDLMGSGKESLIFMKKRTKRLTAQWALAAQRLAQKLGATQRDQKQILVHIGFLTEESGDVFSPRVLKGGPLGEMVQWADILTALYVLGHGLRVTVSLKELQSNLGVPPGRGSCPLTMPLPFDLIYTDYHGLQQMKRHMGLSFKKYRCRIRVIDTFGTEPAYNHEEYATLHGYRTNWGYWNLNPKQFMTMFREGEVPGHPEQIHGDPWHRVLREPAAPRGASLCEEPRPLTAA

SEQ ID NO: 49142 - protein, 792 aa, Homo sapiens
  Payload ID: 9841
  Gene Symbol: MGAT5B
  Gene Name: mannosyl (alpha-1,6-)-glycoprotein beta-1,6-N- acetyl-glucosaminyltransferase, isozyme B
  Uniprot ID: Q3V5L5
  ENSP ID: ENSP00000456037
MITVNPDGKIMVRRCLVTLRPFRLFVLGIGFFTLCFLMTSLGGQFSARRLGDSPFTIRTEVMGGPESRGVLRKMSDLLELMVKRMDALARLENSSELHRAGGDLHFPADRMPPGAGLMERIQAIAQNVSDIAVKVDQILRHSLLLHSKVSEGRRDQCEAPSDPKFPDCSGKVEWMRARWTSDPCYAFFGVDGTECSFLIYLSEVEWFCPPLPWRNQTAAQRAPKPLPKVQAVFRSNLSHLLDLMGSGKESLIFMKKRTKRLTAQWALAAQRLAQKLGATQRDQKQILVHIGFLTEESGDVFSPRVLKGGPLGEMVQWADILTALYVLGHGLRVTVSLKELQSNLGVPPGRGSCPLTMPLPFDLIYTDYHGLQQMKRHMGLSFKKYRCRIRVIDTFGTEPAYNHEEYATLHGYRTNWGYWNLNPKQFMTMFPHTPDNSFMGFVSEELNETEKRLIKGGKASNMAVVYGKEASIWKLQGKEKFLGILNKYMEIHGTVYYESQRPPEVPAFVKNHGLLPQPEFQQLLRKAKLFIGFGFPYEGPAPLEAIANGCIFLQSRFSPPHSSLNHEFFRGKPTSREVFSQHPYAENFIGKPHVWTVDYNNSEEFEAAIKAIMRTQVDPYLPYEYTCEGMLERIHAYIQHQDFCRAPDPALPEAHAPQSPFVLAPNATHLEWARNTSLAPGAWPPAHALRAWLAVPGRACTDTCLDHGLICEPSFFPFLNSQDAFLKLQVPCDSTESEMNHLYPAFAQPGQECYLQKEPLLFSCAGSNTKYRRLCPCRDFRKGQVALCQGCL

SEQ ID NO: 49143 - protein, 110 aa, Homo sapiens
  Payload ID: 9841
  Gene Symbol: MGAT5B
  Gene Name: mannosyl (alpha-1,6-)-glycoprotein beta-1,6-N- acetyl-glucosaminyltransferase, isozyme B
  ENSP ID: ENSP00000457614
MITVNPDGKIMVRRCLVTLRPFRLFVLGIGFFTLCFLMTSLGGQFSARRLGDSPFTIRTEVMGGPESRGVLRKMSDLLELMVKRMDALARLENSSELHRAGGDLHFPADR

SEQ ID NO: 49144 - protein, 533 aa, Homo sapiens
  Payload ID: 9842
  Gene Symbol: MGAT3
  Gene Name: mannosyl (beta-1,4-)-glycoprotein beta-1,4- N-acetylglucosaminyltransferase
  Uniprot ID: Q09327
  ENSP ID: ENSP00000345270
MKMRRYKLFLMFCMAGLCLISFLHFFKTLSYVTFPRELASLSPNLVSSFFWNNAPVTPQASPEPGGPDLLRTPLYSHSPLLQPLPPSKAAEELHRVDLVLPEDTTEYFVRTKAGGVCFKPGTKMLERPPPGRPEEKPEGANGSSARRPPRYLLSARERTGGRGARRKWVECVCLPGWHGPSCGVPTVVQYSNLPTKERLVPREVPRRVINAINVNHEFDLLDVRFHELGDVVDAFVVCESNFTAYGEPRPLKFREMLTNGTFEYIRHKVLYVFLDHFPPGGRQDGWIADDYLRTFLTQDGVSRLRNLRPDDVFIIDDADEIPARDGVLFLKLYDGWTEPFAFHMRKSLYGFFWKQPGTLEVVSGCTVDMLQAVYGLDGIRLRRRQYYTMPNFRQYENRTGHILVQWSLGSPLHFAGWHCSWCFTPEGIYFKLVSAQNGDFPRWGDYEDKRDLNYIRGLIRTGGWFDGTQQEYPPADPSEHMYAPKYLLKNYDRFHYLLDNPYQEPRSTAAGGWRHRGPEGRPPARGKLDEAEV

SEQ ID NO: 49145 - protein, 108 aa, Homo sapiens
  Payload ID: 9842
  Gene Symbol: MGAT3
  Gene Name: mannosyl (beta-1,4-)-glycoprotein beta-1,4-N- acetylglucosaminyltransferase
  ENSP ID: ENSP00000408075
MESCSCHPGSGVQWRDHGSLQLPPPGFKMKMRRYKLFLMFCMAGLCLISFLHFFKTLSYVTFPRELASLSPNLVSSFFWNNAPVTPQASPEPGGPDLLRTPLYSHSPL

SEQ ID NO: 49146 - protein, 161 aa, Homo sapiens
  Payload ID: 9842
  Gene Symbol: MGAT3
  Gene Name: mannosyl (beta-1,4-)-glycoprotein beta-1,4-N- acetylglucosaminyltransferase
  ENSP ID: ENSP00000416226
MKMRRYKLFLMFCMAGLCLISFLHFFKTLSYVTFPRELASLSPNLVSSFFWNNAPVTPQASPEPGGPDLLRTPLYSHSPLLQPLPPSKAAEELHRVDLVLPEDTTEYFVRTKAGGVCFKPGTKMLERPPPGRPEEKPEGANGSSARRPPRYLLSARERTGG

SEQ ID NO: 49147 - protein, 837 aa, Homo sapiens
  Payload ID: 9843
  Gene Symbol: MOGS
  Gene Name: mannosyl-oligosaccharide glucosidase
  Uniprot ID: Q13724
  ENSP ID: ENSP00000233616
MARGERRRRAVPAEGVRTAERAARGGPGRRDGRGGGPRSTAGGVALAVVVLSLALGMSGRWVLAWYRARRAVTLHSAPPVLPADSSSPAVAPDLFWGTYRPHVYFGMKTRSPKPLLTGLMWAQQGTTPGTPKLRHTCEQGDGVGPYGWEFHDGLSFGRQHIQDGALRLTTEFVKRPGGQHGGDWSWRVTVEPQDSGTSALPLVSLFFYVVTDGKEVLLPEVGAKGQLKFISGHTSELGDFRFTLLPPTSPGDTAPKYGSYNVFWTSNPGLPLLTEMVKSRLNSWFQHRPPGAPPERYLGLPGSLKWEDRGPSGQGQGQFLIQQVTLKIPISIEFVFESGSAQAGGNQALPRLAGSLLTQALESHAEGFRERFEKTFQLKEKGLSSGEQVLGQAALSGLLGGIGYFYGQGLVLPDIGVEGSEQKVDPALFPPVPLFTAVPSRSFFPRGFLWDEGFHQLVVQRWDPSLTREALGHWLGLLNADGWIGREQILGDEARARVPPEFLVQRAVHANPPTLLLPVAHMLEVGDPDDLAFLRKALPRLHAWFSWLHQSQAGPLPLSYRWRGRDPALPTLLNPKTLPSGLDDYPRASHPSVTERHLDLRCWVALGARVLTRLAEHLGEAEVAAELGPLAASLEAAESLDELHWAPELGVFADFGNHTKAVQLKPRPPQGLVRVVGRPQPQLQYVDALGYVSLFPLLLRLLDPTSSRLGPLLDILADSRHLWSPFGLRSLAASSSFYGQRNSEHDPPYWRGAVWLNVNYLALGALHHYGHLEGPHQARAAKLHGELRANVVGNVWRQYQATGFLWEQYSDRDGRGMGCRPFHGWTSLVLLAMAEDY

SEQ ID NO: 49148 - protein, 209 aa, Homo sapiens
  Payload ID: 9843
  Gene Symbol: MOGS
  Gene Name: mannosyl-oligosaccharide glucosidase
  ENSP ID: ENSP00000386493
MARGERRRRAVPAEGVRTAERAARGGPGRRDGRGGGPRSTAGGVALAVVVLSLALGMSGRWVLAWYRARRAVTLHSAPPVLPADSSSPAVAPDLFWGTYRPHVYFGMKTRSPKPLLTGLMWAQQGTTPGTPKLRHTCEQGDGVGPYGWEFHDGLSFGRQHIQDGALRLTTEFVKRPGGQHGGDWSWRVTVEPQDSATMSSGPPTQDCPC

SEQ ID NO: 49149 - protein, 731 aa, Homo sapiens
  Payload ID: 9843
  Gene Symbol: MOGS
  Gene Name: mannosyl-oligosaccharide glucosidase
  Uniprot ID: Q13724
  ENSP ID: ENSP00000388201
MKTRSPKPLLTGLMWAQQGTTPGTPKLRHTCEQGDGVGPYGWEFHDGLSFGRQHIQDGALRLTTEFVKRPGGQHGGDWSWRVTVEPQDSGTSALPLVSLFFYVVTDGKEVLLPEVGAKGQLKFISGHTSELGDFRFTLLPPTSPGDTAPKYGSYNVFWTSNPGLPLLTEMVKSRLNSWFQHRPPGAPPERYLGLPGSLKWEDRGPSGQGQGQFLIQQVTLKIPISIEFVFESGSAQAGGNQALPRLAGSLLTQALESHAEGFRERFEKTFQLKEKGLSSGEQVLGQAALSGLLGGIGYFYGQGLVLPDIGVEGSEQKVDPALFPPVPLFTAVPSRSFFPRGFLWDEGFHQLVVQRWDPSLTREALGHWLGLLNADGWIGREQILGDEARARVPPEFLVQRAVHANPPTLLLPVAHMLEVGDPDDLAFLRKALPRLHAWFSWLHQSQAGPLPLSYRWRGRDPALPTLLNPKTLPSGLDDYPRASHPSVTERHLDLRCWVALGARVLTRLAEHLGEAEVAAELGPLAASLEAAESLDELHWAPELGVFADFGNHTKAVQLKPRPPQGLVRVVGRPQPQLQYVDALGYVSLFPLLLRLLDPTSSRLGPLLDILADSRHLWSPFGLRSLAASSSFYGQRNSEHDPPYWRGAVWLNVNYLALGALHHYGHLEGPHQARAAKLHGELRANVVGNVWRQYQATGFLWEQYSDRDGRGMGCRPFHGWTSLVLLAMAEDY

SEQ ID NO: 49150 - protein, 145 aa, Homo sapiens
  Payload ID: 9843
  Gene Symbol: MOGS
  Gene Name: mannosyl-oligosaccharide glucosidase
  ENSP ID: ENSP00000396298
MWAQQGTTPGTPKLRHTCEQGDGVGPYGWEFHDGLSFGRQHIQDGALRLTTEFVKRPGGQHGGDWSWRVTVEPQDSGTSALPLVSLFFYVVTDGKEVLLPEVGAKGQLKFISGHTSELGDFRFTLLPPTSPGDTAPKYGSYNVFW

SEQ ID NO: 49151 - protein, 491 aa, Homo sapiens
  Payload ID: 9843
  Gene Symbol: MOGS
  Gene Name: mannosyl-oligosaccharide glucosidase
  ENSP ID: ENSP00000410992
MKTRSPKPLLTGLMWAQQGTTPGTPKLRHTCEQGDGVGPYGWEFHDGLSFGRQHIQDGALRLTTEFVKRPGGQHGGDWSWRVTVEPQDSGTSALPLVSLFFYVVTDGKEVLLPEVGAKGQLKFISGHTSELGDFRFTLLPPTSPGDTAPKYGSYNVFWTSNPGLPLLTEMVKSRLNSWFQHRPPGAPPERYLGLPGSLKWEDRGPSGQGQGQFLIQQVTLKIPISIEFVFESGSAQAGGNQALPRLAGSLLTQALESHAEGFRERFEKTFQLKEKGLSSGEQVLGQAALSGLLGGIGYFYGQGLVLPDIGVEGSEQKVDPALFPPVPLFTAVPSRSFFPRGFLWDEGFHQLVVQRWDPSLTREALGHWLGLLNADGWIGREQILGDEARARVPPEFLVQRAVHANPPTLLLPVAHMLEVGDPDDLAFLRKALPRLHAWFSWLHQSQAGPLPLSYRWRGRDPALPTLLNPKTLPSGLDDYPRASHPSVTERH

SEQ ID NO: 49152 - protein, 397 aa, Homo sapiens
  Payload ID: 9844
  Gene Symbol: MANSC1
  Gene Name: MANSC domain containing 1
  Uniprot ID: Q9H8J5
  ENSP ID: ENSP00000379638
MFFGGEGSLTYTLGIRGNEPVYTSTQEDCINSCCSTKNISGDKACNLMIFDTRKTARQPNCYLFFCPNEEACPLKPAKGLMSYRIITDFPSLTRNLPSQELPQEDSLLHGQFSQAVTPLAHHHTDYSKPTDISWRDTLSQKFGSSDHLEKLFKMDEASAQLLAYKEKGHSQSSQFSSDQEIAHLLPENVSALPATVAVASPHTTSATPKPATLLPTNASVTPSGTSQPQLATTAPPVTTVTSQPPTTLISTVFTRAAATLQAMATTAVLTTTFQAPTDSKGSLETIPFTEISNLTLNTGNVYNPTALSMSNVESSTMNKTASWEGREASPGSSSQGSVPENQYGLPFEKWLLIGSLLFGVLFLVIGLVLLGRILSESLRRKRYSRLDYLINGIYVDI

SEQ ID NO: 49153 - protein, 57 aa, Homo sapiens
  Payload ID: 9844
  Gene Symbol: MANSC1
  Gene Name: MANSC domain containing 1
  ENSP ID: ENSP00000437624
MFFGGEGSLTYTLVIICFLTLRLSASQNCLKKSLEDVVIDIQSSLSKGIRGNEPVYT

SEQ ID NO: 49154 - protein, 431 aa, Homo sapiens
  Payload ID: 9844
  Gene Symbol: MANSC1
  Gene Name: MANSC domain containing 1
  Uniprot ID: Q9H8J5
  ENSP ID: ENSP00000438205
MFFGGEGSLTYTLVIICFLTLRLSASQNCLKKSLEDVVIDIQSSLSKGIRGNEPVYTSTQEDCINSCCSTKNISGDKACNLMIFDTRKTARQPNCYLFFCPNEEACPLKPAKGLMSYRIITDFPSLTRNLPSQELPQEDSLLHGQFSQAVTPLAHHHTDYSKPTDISWRDTLSQKFGSSDHLEKLFKMDEASAQLLAYKEKGHSQSSQFSSDQEIAHLLPENVSALPATVAVASPHTTSATPKPATLLPTNASVTPSGTSQPQLATTAPPVTTVTSQPPTTLISTVFTRAAATLQAMATTAVLTTTFQAPTDSKGSLETIPFTEISNLTLNTGNVYNPTALSMSNVESSTMNKTASWEGREASPGSSSQGSVPENQYGLPFEKWLLIGSLLFGVLFLVIGLVLLGRILSESLRRKRYSRLDYLINGIYVDI

SEQ ID NO: 49155 - protein, 350 aa, Homo sapiens
  Payload ID: 9844
  Gene Symbol: MANSC1
  Gene Name: MANSC domain containing 1
  ENSP ID: ENSP00000445303
MIFDTRKTARQPNCYLFFCPNEEACPLKPAKGLMSYRIITDFPSLTRNLPSQELPQEDSLLHGQFSQAVTPLAHHHTDYSKPTDISWRDTLSQKFGSSDHLEKLFKMDEASAQLLAYKEKGHSQSSQFSSDQEIAHLLPENVSALPATVAVASPHTTSATPKPATLLPTNASVTPSGTSQPQLATTAPPVTTVTSQPPTTLISTVFTRAAATLQAMATTAVLTTTFQAPTDSKGSLETIPFTEISNLTLNTGNVYNPTALSMSNVESSTMNKTASWEGREASPGSSSQGSVPENQYGLPFEKWLLIGSLLFGVLFLVIGLVLLGRILSESLRRKRYSRLDYLINGIYVDI

SEQ ID NO: 49156 - protein, 57 aa, Homo sapiens; identical to SEQ ID NO: 49153
  Payload ID: 9844
  Gene Symbol: MANSC1
  Gene Name: MANSC domain containing 1
  ENSP ID: ENSP00000486216

SEQ ID NO: 49157 - protein, 350 aa, Homo sapiens; identical to SEQ ID NO: 49155
  Payload ID: 9844
  Gene Symbol: MANSC1
  Gene Name: MANSC domain containing 1
  ENSP ID: ENSP00000487019

SEQ ID NO: 49158 - protein, 397 aa, Homo sapiens; identical to SEQ ID NO: 49152
  Payload ID: 9844
  Gene Symbol: MANSC1
  Gene Name: MANSC domain containing 1
  Uniprot ID: Q9H8J5
  ENSP ID: ENSP00000487244

SEQ ID NO: 49159 - protein, 431 aa, Homo sapiens; identical to SEQ ID NO: 49154
  Payload ID: 9844
  Gene Symbol: MANSC1
  Gene Name: MANSC domain containing 1
  Uniprot ID: Q9H8J5
  ENSP ID: ENSP00000487587

SEQ ID NO: 49160 - protein, 340 aa, Homo sapiens
  Payload ID: 9845
  Gene Symbol: MANSC4
  Gene Name: MANSC domain containing 4
  Uniprot ID: A6NHS7
  ENSP ID: ENSP00000370673
MHVAEVAVNVILLLSMGWTSDSLCSPTIFYRDCWIRRFPGLLINLEESQKLGAQFLKYYSESTGQKCSRSCCLRKDVSCNLAVFYHSPIHDNINCLHVHCPTLESCILEPGTSAILYNITDGIDPDLLVFEQSPTYLNTRSSSNRWDRLRILKAMNLDKQTTTINGMLPSTEAPSSTTHQDLVVNTNSTSYSKELTTDFWARFTSLNESITTKINKVSPSTDFISNPDNKTISPFFEPIDTKLSHMPVPPGLNSSKQLLNKTKGYNSRNHTSANEDEVSVTSKTWLVSVALCTSVIFLGCCIVILASGCCGKQQGQYKPGQRKSGSLQIKNRNHMKENSS

SEQ ID NO: 49161 - protein, 112 aa, Homo sapiens
  Payload ID: 9846
  Gene Symbol: MKNK1
  Gene Name: MAP kinase interacting serine/threonine kinase 1
  ENSP ID: ENSP00000339197
MQNIPEMGSSEPLPIADGDRRRKKKRRGRATDSLPGKFEDMYKLTSELLGEGAYAKVQGAVSLQNGKEYAVKIIEKQAGHSRSRVFREVETLYQCQGNKFHLSPHPEAKALQ

SEQ ID NO: 49162 - protein, 329 aa, Homo sapiens
  Payload ID: 9846
  Gene Symbol: MKNK1
  Gene Name: MAP kinase interacting serine/threonine kinase 1
  ENSP ID: ENSP00000339573
MAKSMPSKSSRNKQGTVGVGCFERWRRCISVRETSSILAHIQKQKHFNEREASRVVRDVAAALDFLHTKGIAHRDLKPENILCESPEKVSPVKICDFDLGSGMKLNNSCTPITTPELTTPCGSAEYMAPEVVEVFTDQATFYDKRCDLWSLGVVLYIMLSGYPPFVGHCGADCGWDRGEVCRVCQNKLFESIQEGKYEFPDKDWAHISSEAKDLISKLLVRDAKQRLSAAQVLQHPWVQGQAPEKGLPTPQVLQRNSSTMDLTLFAAEAIALNRQLSQHEENELAEEPEALADGLCSMKLSPPCKSRLARRRALAQAGRGEDRSPPTAL

SEQ ID NO: 49163 - protein, 424 aa, Homo sapiens
  Payload ID: 9846
  Gene Symbol: MKNK1
  Gene Name: MAP kinase interacting serine/threonine kinase 1
  Uniprot ID: Q9BUB5
  ENSP ID: ENSP00000361013
MVSSQKLEKPIEMGSSEPLPIADGDRRRKKKRRGRATDSLPGKFEDMYKLTSELLGEGAYAKVQGAVSLQNGKEYAVKIIEKQAGHSRSRVFREVETLYQCQGNKNILELIEFFEDDTRFYLVFEKLQGGSILAHIQKQKHFNEREASRVVRDVAAALDFLHTKGIAHRDLKPENILCESPEKVSPVKICDFDLGSGMKLNNSCTPITTPELTTPCGSAEYMAPEVVEVFTDQATFYDKRCDLWSLGVVLYIMLSGYPPFVGHCGADCGWDRGEVCRVCQNKLFESIQEGKYEFPDKDWAHISSEAKDLISKLLVRDAKQRLSAAQVLQHPWVQGQAPEKGLPTPQVLQRNSSTMDLTLFAAEAIALNRQLSQHEENELAEEPEALADGLCSMKLSPPCKSRLARRRALAQAGRGEDRSPPTAL

SEQ ID NO: 49164 - protein, 465 aa, Homo sapiens
  Payload ID: 9846
  Gene Symbol: MKNK1
  Gene Name: MAP kinase interacting serine/threonine kinase 1
  Uniprot ID: Q9BUB5
  ENSP ID: ENSP00000361014
MVSSQKLEKPIEMGSSEPLPIADGDRRRKKKRRGRATDSLPGKFEDMYKLTSELLGEGAYAKVQGAVSLQNGKEYAVKIIEKQAGHSRSRVFREVETLYQCQGNKNILELIEFFEDDTRFYLVFEKLQGGSILAHIQKQKHFNEREASRVVRDVAAALDFLHTKDKVSLCHLGWSAMAPSGLTAAPTSLGSSDPPTSASQVAGTTGIAHRDLKPENILCESPEKVSPVKICDFDLGSGMKLNNSCTPITTPELTTPCGSAEYMAPEVVEVFTDQATFYDKRCDLWSLGVVLYIMLSGYPPFVGHCGADCGWDRGEVCRVCQNKLFESIQEGKYEFPDKDWAHISSEAKDLISKLLVRDAKQRLSAAQVLQHPWVQGQAPEKGLPTPQVLQRNSSTMDLTLFAAEAIALNRQLSQHEENELAEEPEALADGLCSMKLSPPCKSRLARRRALAQAGRGEDRSPPTAL

SEQ ID NO: 49165 - protein, 347 aa, Homo sapiens
  Payload ID: 9846
  Gene Symbol: MKNK1
  Gene Name: MAP kinase interacting serine/threonine kinase 1
  Uniprot ID: Q9BUB5
  ENSP ID: ENSP00000411135
MVSSQKLEKPIEMGSSEPLPIADGDRRRKKKRRGRATDSLPGKFEDMYKLTSELLGEGAYAKVQGAVSLQNGKEYAVKIIEKQAGHSRSRVFREVETLYQCQGNKNILELIEFFEDDTRFYLVFEKLQGGSILAHIQKQKHFNEREASRVVRDVAAALDFLHTKGIAHRDLKPENILCESPEKVSPVKICDFDLGSGMKLNNSCTPITTPELTTPCGSAEYMAPEVVEVFTDQATFYDKRCDLWSLGVVLYIMLSGYPPFVGHCGADCGWDRGEVCRVCQNKLFESIQEGKYEFPDKDWAHISSEAKDLISKLLVRDAKQRLSAAQVLQHPWVQGEQQHNGPDALRS

SEQ ID NO: 49166 - protein, 171 aa, Homo sapiens
  Payload ID: 9846
  Gene Symbol: MKNK1
  Gene Name: MAP kinase interacting serine/threonine kinase 1
  ENSP ID: ENSP00000431837
MGSSEPLPIADGDRRRKKKRRGRATDSLPGKFEDMYKLTSELLGEGAYAKVQGAVSLQNGKEYAVKIIEKQAGHSRSRVFREVETLYQCQGNKNILELIEFFEDDTRFYLVFEKLQGGSILAHIQKQKHFNEREASRVVRDVAAALDFLHTKGIAHRDLKPENILCESPEK

SEQ ID NO: 49167 - protein, 126 aa, Homo sapiens
  Payload ID: 9846
  Gene Symbol: MKNK1
  Gene Name: MAP kinase interacting serine/threonine kinase 1
  ENSP ID: ENSP00000431985
MILGHCSLDLLGSSNPPTSASQAATGFHVRGRWRTEDCHLRTKAIETLRVAGRHQLPDRSFISFGISSLQMVSSQKLEKPIEMGSSEPLPIADGDRRRKKKRRGRATDSLPGKFEDMYKLTSELLG

SEQ ID NO: 49168 - protein, 37 aa, Homo sapiens
  Payload ID: 9846
  Gene Symbol: MKNK1
  Gene Name: MAP kinase interacting serine/threonine kinase 1
  ENSP ID: ENSP00000432369
MVSSQKLEKPIVSETTLQVPFPRKVLTICPFWRTLFH

SEQ ID NO: 49169 - protein, 143 aa, Homo sapiens
  Payload ID: 9846
  Gene Symbol: MKNK1
  Gene Name: MAP kinase interacting serine/threonine kinase 1
  ENSP ID: ENSP00000432665
MQNIPEMGSSEPLPIADGDRRRKKKRRGRATDSLPGKFEDMYKLTSELLGEGAYAKVQGAVSLQNGKEYAVKIIEKQAGHSRSRVFREVETLYQCQGNKNILELIEFFEDDTRFYLVFEKLQGGSILAHIQKQKHFNEREASR

SEQ ID NO: 49170 - protein, 118 aa, Homo sapiens [sequence omitted]

SEQ ID NO: 49171 - protein, 100 aa, Homo sapiens
  Payload ID: 9846
  Gene Symbol: MKNK1
  Gene Name: MAP kinase interacting serine/threonine kinase 1
  ENSP ID: ENSP00000434021
MVSSQKLEKPIEMGSSEPLPIADGDRRRKKKRRGRATDSLPGKFEDMYKLTSELLGEGAYAKVQGAVSLQNGKEYAVKIIEKQAGHSRSRVFREVETLYQ

SEQ ID NO: 49172 - protein, 60 aa, Homo sapiens
  Payload ID: 9846
  Gene Symbol: MKNK1
  Gene Name: MAP kinase interacting serine/threonine kinase 1
  ENSP ID: ENSP00000434051
MVSSQKLEKPIEMGSSEPLPIADGDRRRKKKRRGRATDSLPGKFEDVILPSAIPGGAAER

SEQ ID NO: 49173 - protein, 56 aa, Homo sapiens
  Payload ID: 9846
  Gene Symbol: MKNK1
  Gene Name: MAP kinase interacting serine/threonine kinase 1
  ENSP ID: ENSP00000434493
MVSSQKLEKPIEMGSSEPLPIADGDRRRKKKRRGRATDSLPGKFEDHRETSRAQSE

SEQ ID NO: 49174 - protein, 91 aa, Homo sapiens
  Payload ID: 9846
  Gene Symbol: MKNK1
  Gene Name: MAP kinase interacting serine/threonine kinase 1
  ENSP ID: ENSP00000434834
MVSSQKLEKPIEMGSSEPLPIADGDRRRKKKRRGRATDSLPGKFEDMYKLTSELLGEGAYAKVQGAVSLQNGKEYAVKVSVSAECQALLCK

SEQ ID NO: 49175 - protein, 85 aa, Homo sapiens
  Payload ID: 9846
  Gene Symbol: MKNK1
  Gene Name: MAP kinase interacting serine/threonine kinase 1
  ENSP ID: ENSP00000435069
  MOD_RES (1)..(1): Any amino acid
XTPELTTPCGSAEYMAPEVVEVFTDQATFYDKRCDLWSLGVVLYIMLSGYPPFVGHCGADCGWDRGEVCRVCQEQQHNGPDALRS

SEQ ID NO: 49176 - protein, 101 aa, Homo sapiens
  Payload ID: 9846
  Gene Symbol: MKNK1
  Gene Name: MAP kinase interacting serine/threonine kinase 1
  ENSP ID: ENSP00000435163
MVSSQKLEKPIEMGSSEPLPIADGDRRRKKKRRGRATDSLPGKFEDMYKLTSELLGEGAYAKVQGAVSLQNGKEYAVKIIEKQAGHSRSRVFREVETLYQC

SEQ ID NO: 49177 - protein, 178 aa, Homo sapiens
  Payload ID: 9846
  Gene Symbol: MKNK1
  Gene Name: MAP kinase interacting serine/threonine kinase 1
  ENSP ID: ENSP00000436709
MVSSQKLEKPIEMGSSEPLPIADGDRRRKKKRRGRATDSLPGKFEDMYKLTSELLGEGAYAKVQGAVSLQNGKEYAVKIIEKQAGHSRSRVFREVETLYQCQGNKNILELIEFFEDDTRFYLVFEKLQGGSILAHIQKQKHFNEREASRVVRDVAAALDFLHTKGIAHRDLKPENILC

SEQ ID NO: 49178 - protein, 465 aa, Homo sapiens
  Payload ID: 9847
  Gene Symbol: MKNK2
  Gene Name: MAP kinase interacting serine/threonine kinase 2
  Uniprot ID: Q9HBH9
  ENSP ID: ENSP00000250896
MVQKKPAELQGFHRSFKGQNPFELAFSLDQPDHGDSDFGLQCSARPDMPASQPIDIPDAKKRGKKKKRGRATDSFSGRFEDVYQLQEDVLGEGAHARVQTCINLITSQEYAVKIIEKQPGHIRSRVFREVEMLYQCQGHRNVLELIEFFEEEDRFYLVFEKMRGGSILSHIHKRRHFNELEASVVVQDVASALDFLHNKGIAHRDLKPENILCEHPNQVSPVKICDFDLGSGIKLNGDCSPISTPELLTPCGSAEYMAPEVVEAFSEEASIYDKRCDLWSLGVILYILLSGYPPFVGRCGSDCGWDRGEACPACQNMLFESIQEGKYEFPDKDWAHISCAAKDLISKLLVRDAKQRLSAAQVLQHPWVQGCAPENTLPTPMVLQRNSCAKDLTSFAAEAIAMNRQLAQHDEDLAEEEAAGQGQPVLVRATSRCLQLSPPSQSKLAQRRQRASLSSAPVVLVGDHA

SEQ ID NO: 49179 - protein, 414 aa, Homo sapiens
  Payload ID: 9847
  Gene Symbol: MKNK2
  Gene Name: MAP kinase interacting serine/threonine kinase 2
  Uniprot ID: Q9HBH9
  ENSP ID: ENSP00000309485
MVQKKPAELQGFHRSFKGQNPFELAFSLDQPDHGDSDFGLQCSARPDMPASQPIDIPDAKKRGKKKKRGRATDSFSGRFEDVYQLQEDVLGEGAHARVQTCINLITSQEYAVKIIEKQPGHIRSRVFREVEMLYQCQGHRNVLELIEFFEEEDRFYLVFEKMRGGSILSHIHKRRHFNELEASVVVQDVASALDFLHNKGIAHRDLKPENILCEHPNQVSPVKICDFDLGSGIKLNGDCSPISTPELLTPCGSAEYMAPEVVEAFSEEASIYDKRCDLWSLGVILYILLSGYPPFVGRCGSDCGWDRGEACPACQNMLFESIQEGKYEFPDKDWAHISCAAKDLISKLLVRDAKQRLSAAQVLQHPWVQGCAPENTLPTPMVLQRWDSHFLLPPHPCRIHVRPGGLVRTVTVNE

SEQ ID NO: 49180 - protein, 129 aa, Homo sapiens
  Payload ID: 9847
  Gene Symbol: MKNK2
  Gene Name: MAP kinase interacting serine/threonine kinase 2
  ENSP ID: ENSP00000464828
MAPEVVEAFSEEASIYDKRCDLWSLGVILYILLSGYPPFVGRCGSDCGWDRGEACPACQNMLFESIQEGKYEFPDKDWAHISCAAKDLISKLLVRDAKQRLSAAQVLQHPWVQGCAPENTLPTPMVLQR

SEQ ID NO: 49181 - protein, 176 aa, Homo sapiens
  Payload ID: 9847
  Gene Symbol: MKNK2
  Gene Name: MAP kinase interacting serine/threonine kinase 2
  ENSP ID: ENSP00000465079
NILCEHPNQVSPVKICDFDLGSGIKLNGDCSPISTPELLTPCGSAEYMAPEVVEAFSEEASIYDKRCDLWSLGVILYILLSGYPPFVGRCGSDCGWDRGEACPACQNMLFESIQEGKYEFPDKDWAHISCAAKDLISKLLVRDAKQRLSAAQVLQHPWVQGCAPENTLPTPMVLQR

SEQ ID NO: 49182 - protein, 82 aa, Homo sapiens
  Payload ID: 9847
  Gene Symbol: MKNK2
  Gene Name: MAP kinase interacting serine/threonine kinase 2
  ENSP ID: ENSP00000465425
MVQKKPAELQGFHRSFKGQNPFELAFSLDQPDHGDSDFGLQCSARPDMPASQPIDIPDAKKRGKKKKRGRATDSFSGRFEDH

SEQ ID NO: 49183 - protein, 158 aa, Homo sapiens
  Payload ID: 9847
  Gene Symbol: MKNK2
  Gene Name: MAP kinase interacting serine/threonine kinase 2
  ENSP ID: ENSP00000465645
MAPEVVEAFSEEASIYDKRCDLWSLGVILYILLSGYPPFVGRCGSDCGWDRGEACPACQNMLFESIQEGKYEFPDKDWAHISCAAKDLISKLLVRDAKQRLSAAQVLQHPWVQGCAPENTLPTPMVLQRWDSHFLLPPHPCRIHVRPGGLVRTVTVNE

SEQ ID NO: 49184 - protein, 73 aa, Homo sapiens
  Payload ID: 9847
  Gene Symbol: MKNK2
  Gene Name: MAP kinase interacting serine/threonine kinase 2
  ENSP ID: ENSP00000466064
MVQKKPAELQGFHRSFKGQNPFELAFSLDQPDHGDSDFGLQCSARPGEGPEGEEGTGQLLSLPWQWPAPAGGW

SEQ ID NO: 49185 - protein, 76 aa, Homo sapiens
  Payload ID: 9847
  Gene Symbol: MKNK2
  Gene Name: MAP kinase interacting serine/threonine kinase 2
  ENSP ID: ENSP00000466147
MVQKKPAELQGFHRSFKGQNPFELAFSLDQPDHGDSDFGLQCSARPGEGPEGEEGTGQLLSLPWQWPAPAGGWGHA

SEQ ID NO: 49186 - protein, 43 aa, Homo sapiens
  Payload ID: 9847
  Gene Symbol: MKNK2
  Gene Name: MAP kinase interacting serine/threonine kinase 2
  ENSP ID: ENSP00000466594
  MOD_RES (1)..(1): Any amino acid
XRTCCLRASRRASTSSPTRTGPTSPALPKTSSPSCWSVTPSRG

SEQ ID NO: 49187 - protein, 465 aa, Homo sapiens; identical to SEQ ID NO: 49178
  Payload ID: 9847
  Gene Symbol: MKNK2
  Gene Name: MAP kinase interacting serine/threonine kinase 2
  Uniprot ID: Q9HBH9
  ENSP ID: ENSP00000467811

SEQ ID NO: 49188 - protein, 795 aa, Homo sapiens
  Payload ID: 9848
  Gene Symbol: MARK1
  Gene Name: MAP/microtubule affinity-regulating kinase 1
  Uniprot ID: Q9P0L2
  ENSP ID: ENSP00000355884
MSARTPLPTVNERDTENHTSVDGYTEPHIQPTKSSSRQNIPRCRNSITSATDEQPHIGNYRLQKTIGKGNFAKVKLARHVLTGREVAVKIIDKTQLNPTSLQKLFREVRIMKILNHPNIVKLFEVIETEKTLYLVMEYASGGEVFDYLVAHGRMKEKEARAKFRQIVSAVQYCHQKYIVHRDLKAENLLLDGDMNIKIADFGFSNEFTVGNKLDTFCGSPPYAAPELFQGKKYDGPEVDVWSLGVILYTLVSGSLPFDGQNLKELRERVLRGKYRIPFYMSTDCENLLKKLLVLNPIKRGSLEQIMKDRWMNVGHEEEELKPYTEPDPDFNDTKRIDIMVTMGFARDEINDALINQKYDEVMATYILLGRKPPEFEGGESLSSGNLCQRSRPSSDLNNSTLQSPAHLKVQRSISANQKQRRFSDHAGPSIPPAVSYTKRPQANSVESEQKEEWDKDVARKLGSTTVGSKSEMTASPLVGPERKKSSTIPSNNVYSGGSMARRNTYVCERTTDRYVALQNGKDSSLTEMSVSSISSAGSSVASAVPSARPRHQKSMSTSGHPIKVTLPTIKDGSEAYRPGTTQRVPAASPSAHSISTATPDRTRFPRGSSSRSTFHGEQLRERRSVAYNGPPASPSHETGAFAHARRGTSTGIISKITSKFVRRDPSEGEASGRTDTSRSTSGEPKERDKEEGKDSKPRSLRFTWSMKTTSSMDPNDMMREIRKVLDANNCDYEQKERFLLFCVHGDARQDSLVQWEMEVCKLPRLSLNGVRFKRISGTSIAFKNIASKIANELKL

SEQ ID NO: 49189 - protein, 758 aa, Homo sapiens
  Payload ID: 9848
  Gene Symbol: MARK1
  Gene Name: MAP/microtubule affinity-regulating kinase 1
  Uniprot ID: Q9P0L2
  ENSP ID: ENSP00000355885
MSARTPLPTVNERDTENHTSVDGYTEPHIQPTKSSSRQNIPRCRNSITSATDEQPHIGNYRLQKTIGKGNFAKVKLARHVLTGREVAVKIIDKTQLNPTSLQKLFREVRIMKILNHPNIGEVFDYLVAHGRMKEKEARAKFRQIVSAVQYCHQKYIVHRDLKAENLLLDGDMNIKIADFGFSNEFTVGNKLDTFCGSPPYAAPELFQGKKYDGPEVDVWSLGVILYTLVSGSLPFDGQNLKELRERVLRGKYRIPFYMSTDCENLLKKLLVLNPIKRGSLEQIMKDRWMNVGHEEEELKPYTEPDPDFNDTKRIDIMVTMGFARDEINDALINQKYDEVMATYILLGRKPPEFEGGESLSSGNLCQRSRPSSDLNNSTLQSPAHLKVQRSISANQKQRRFSDHAGPSIPPAVSYTKRPQANSVESEQKEEWDKDVARKLGSTTVGSKSEMTASPLVGPERKKSSTIPSNNVYSGGSMARRNTYVCERTTDRYVALQNGKDSSLTEMSVSSISSAGSSVASAVPSARPRHQKSMSTSGHPIKVTLPTIKDGSEAYRPGTTQRVPAASPSAHSISTATPDRTRFPRGSSSRSTFHGEQLRERRSVAYNGPPASPSHETGAFAHARRGTSTGIISKITSKFVRRSTSGEPKERDKEEGKDSKPRSLRFTWSMKTTSSMDPNDMMREIRKVLDANNCDYEQKERFLLFCVHGDARQDSLVQWEMEVCKLPRLSLNGVRFKRISGTSIAFKNIASKIANELKL

SEQ ID NO: 49190 - protein, 780 aa, Homo sapiens
  Payload ID: 9848
  Gene Symbol: MARK1
  Gene Name: MAP/microtubule affinity-regulating kinase 1
  ENSP ID: ENSP00000386017
MSARTPLPTVNERDTENHTSVDGYTEPHIQPTKSSSRQNIPRCRNSITSATDEQPHIGNYRLQKTIGKGNFAKVKLARHVLTGREVAVKIIDKTQLNPTSLQKLFREVRIMKILNHPNIVKLFEVIETEKTLYLVMEYASGGEVFDYLVAHGRMKEKEARAKFRQIVSAVQYCHQKYIVHRDLKAENLLLDGDMNIKIADFGFSNEFTVGNKLDTFCGSPPYAAPELFQGKKYDGPEVDVWSLGVILYTLVSGSLPFDGQNLKELRERVLRGKYRIPFYMSTDCENLLKKLLVLNPIKRGSLEQIMKDRWMNVGHEEEELKPYTEPDPDFNDTKRIDIMVTMGFARDEINDALINQKYDEVMATYILLGRKPPEFEGGESLSSGNLCQRSRPSSDLNNSTLQSPAHLKVQRSISANQKQRRFSDHAGPSIPPAVSYTKRPQANSVESEQKEEWDKDVARKLGSTTVGSKSEMTASPLVGPERKKSSTIPSNNVYSGGSMARRNTYVCERTTDRYVALQNGKDSSLTEMSVSSISSAGSSVASAVPSARPRHQKSMSTSGHPIKVTLPTIKDGSEAYRPGTTQRVPAASPSAHSISTATPDRTRFPRGSSSRSTFHGEQLRERRSVAYNGPPASPSHETGAFAHARRGTSTGIISKITSKFVRRSTSGEPKERDKEEGKDSKPRSLRFTWSMKTTSSMDPNDMMREIRKVLDANNCDYEQKERFLLFCVHGDARQDSLVQWEMEVCKLPRLSLNGVRFKRISGTSIAFKNIASKIANELKL

SEQ ID NO: 49191 - protein, 796 aa, Homo sapiens
  Payload ID: 9848
  Gene Symbol: MARK1
  Gene Name: MAP/microtubule affinity-regulating kinase 1
  ENSP ID: ENSP00000483424
MSARTPLPTVNERDTENHTSVDGYTEPHIQPTKSSSRQNIPRCRNSITSATDEQPHIGNYRLQKTIGKGNFAKVKLARHVLTGREVAVKIIDKTQLNPTSLQKLFREVRIMKILNHPNIVKLFEVIETEKTLYLVMEYASGGEVFDYLVAHGRMKEKEARAKFRQIVSAVQYCHQKYIVHRDLKAENLLLDGDMNIKIADFGFSNEFTVGNKLDTFCGSPPYAAPELFQGKKYDGPEVDVWSLGVILYTLVSGSLPFDGQNLKELRERVLRGKYRIPFYMSTDCENLLKKLLVLNPIKRGSLEQIMKDRWMNVGHEEEELKPYTEPDPDFNDTKRIDIMVTMGFARDEINDALINQKYDEVMATYILLGRKPPEFEGGESLSSGNLCQRSRPSSDLNNSTLQSPAHLKVQRSISANQKQRRFSDHAGPSIPPAVSYTKRPQANSVESEQKEEWDKDVARKLGSTTVGSKSEMTASPLVGPERKKSSTIPSNNVYSGGSMARRNTYVCERTTDRYVALQNGKDSSLTEMSVSSISSAGSSVASAVPSARPRHQKSMSTSGHPIKVTLPTIKDGSEAYRPGSTTQRVPAASPSAHSISTATPDRTRFPRGSSSRSTFHGEQLRERRSVAYNGPPASPSHETGAFAHARRGTSTGIISKITSKFVRRDPSEGEASGRTDTSRSTSGEPKERDKEEGKDSKPRSLRFTWSMKTTSSMDPNDMMREIRKVLDANNCDYEQKERFLLFCVHGDARQDSLVQWEMEVCKLPRLSLNGVRFKRISGTSIAFKNIASKIANELKL

SEQ ID NO: 49192 - protein, 709 aa, Homo sapiens
  Payload ID: 9849
  Gene Symbol: MARK2
  Gene Name: MAP/microtubule affinity-regulating kinase 2
  Uniprot ID: Q7KZI7
  ENSP ID: ENSP00000294247
MSSARTPLPTLNERDTEQPTLGHLDSKPSSKSNMIRGRNSATSADEQPHIGNYRLLKTIGKGNFAKVKLARHILTGKEVAVKIIDKTQLNSSSLQKLFREVRIMKVLNHPNIVKLFEVIETEKTLYLVMEYASGGEVFDYLVAHGRMKEKEARAKFRQIVSAVQYCHQKFIVHRDLKAENLLLDADMNIKIADFGFSNEFTFGNKLDTFCGSPPYAAPELFQGKKYDGPEVDVWSLGVILYTLVSGSLPFDGQNLKELRERVLRGKYRIPFYMSTDCENLLKKFLILNPSKRGTLEQIMKDRWMNVGHEDDELKPYVEPLPDYKDPRRTELMVSMGYTREEIQDSLVGQRYNEVMATYLLLGYKSSELEGDTITLKPRPSADLTNSSAPSPSHKVQRSVSANPKQRRFSDQAGPAIPTSNSYSKKTQSNNAENKRPEEDRESGRKASSTAKVPASPLPGLERKKTTPTPSTNSVLSTSTNRSRNSPLLERASLGQASIQNGKDSTAPQRVPVASPSAHNISSSGGAPDRTNFPRGVSSRSTFHAGQLRQVRDQQNLPYGVTPASPSGHSQGRRGASGSIFSKFTSKFVRRPHVVGSGGNDKEKEEFREAKPRSLRFTWSMKTTSSMEPNEMMREIRKVLDANSCQSELHEKYMLLCMHGTPGHEDFVQWEMEVCKLPRLSLNGVRFKRISGTSMAFKNIASKIANELKL

SEQ ID NO: 49193 - protein, 719 aa, Homo sapiens
  Payload ID: 9849
  Gene Symbol: MARK2
  Gene Name: MAP/microtubule affinity-regulating kinase 2
  Uniprot ID: Q7KZI7
  ENSP ID: ENSP00000355091
MSSARTPLPTLNERDTEQPTLGHLDSKPSSKSNMIRGRNSATSADEQPHIGNYRLLKTIGKGNFAKVKLARHILTGKEVAVKIIDKTQLNSSSLQKLFREVRIMKVLNHPNIVKLFEVIETEKTLYLVMEYASGGEVFDYLVAHGRMKEKEARAKFRQIVSAVQYCHQKFIVHRDLKAENLLLDADMNIKIADFGFSNEFTFGNKLDTFCGSPPYAAPELFQGKKYDGPEVDVWSLGVILYTLVSGSLPFDGQNLKELRERVLRGKYRIPFYMSTDCENLLKKFLILNPSKRGTLEQIMKDRWMNVGHEDDELKPYVEPLPDYKDPRRTELMVSMGYTREEIQDSLVGQRYNEVMATYLLLGYKSSELEGDTITLKPRPSADLTNSSAPSPSHKVQRSVSANPKQRRFSDQAAGPAIPTSNSYSKKTQSNNAENKRPEEDRESGRKASSTAKVPASPLPGLERKKTTPTPSTNSVLSTSTNRSRNSPLLERASLGQASIQNGKDSTAPQRVPVASPSAHNISSSGGAPDRTNFPRGVSSRSTFHAGQLRQVRDQQNLPYGVTPASPSGHSQGRRGASGSIFSKFTSKFVRRNLSFRFARRPHVVGSGGNDKEKEEFREAKPRSLRFTWSMKTTSSMEPNEMMREIRKVLDANSCQSELHEKYMLLCMHGTPGHEDFVQWEMEVCKLPRLSLNGVRFKRISGTSMAFKNIASKIANELKL

SEQ ID NO: 49194 - protein, 699 aa, Homo sapiens
  Payload ID: 9849
  Gene Symbol: MARK2
  Gene Name: MAP/microtubule affinity-regulating kinase 2
  ENSP ID: ENSP00000367041
MIRGRNSATSADEQPHIGNYRLLKTIGKGNFAKVKLARHILTGKEVAVKIIDKTQLNSSSLQKLFREVRIMKVLNHPNIVKLFEVIETEKTLYLVMEYASGGEVFDYLVAHGRMKEKEARAKFRQIVSAVQYCHQKFIVHRDLKAENLLLDADMNIKIADFGFSNEFTFGNKLDTFCGSPPYAAPELFQGKKYDGPEVDVWSLGVILYTLVSGSLPFDGQNLKELRERVLRGKYRIPFYMSTDCENLLKKFLILNPSKRGTLEQIMKDRWMNVGHEDDELKPYVEPLPDYKDPRRTELMVSMGYTREEIQDSLVGQRYNEVMATYLLLGYKSSELEGDTITLKPRPSADLTNSSAPSPSHKVQRSVSANPKQRRFSDQAGPAIPTSNSYSKKTQSNNAENKRPEEDRESGRKASSTAKVPASPLPGLERKKTTPTPSTNSVLSTSTNRSRNSPLLERASLGQASGLPPTESNCEVPRPSTAPQRVPVASPSAHNISSSGGAPDRTNFPRGVSSRSTFHAGQLRQVRDQQNLPYGVTPASPSGHSQGRRGASGSIFSKFTSKFVRRNLNEPESKDRVETLRPHVVGSGGNDKEKEEFREAKPRSLRFTWSMKTTSSMEPNEMMREIRKVLDANSCQSELHEKYMLLCMHGTPGHEDFVQWEMEVCKLPRLSLNGVRFKRISGTSMAFKNIASKIANELKL

SEQ ID NO: 49195 - protein, 788 aa, Homo sapiens
  Payload ID: 9849
  Gene Symbol: MARK2
  Gene Name: MAP/microtubule affinity-regulating kinase 2
  Uniprot ID: Q7KZI7
  ENSP ID: ENSP00000385751
MSSARTPLPTLNERDTEQPTLGHLDSKPSSKSNMIRGRNSATSADEQPHIGNYRLLKTIGKGNFAKVKLARHILTGKEVAVKIIDKTQLNSSSLQKLFREVRIMKVLNHPNIVKLFEVIETEKTLYLVMEYASGGEVFDYLVAHGRMKEKEARAKFRQIVSAVQYCHQKFIVHRDLKAENLLLDADMNIKIADFGFSNEFTFGNKLDTFCGSPPYAAPELFQGKKYDGPEVDVWSLGVILYTLVSGSLPFDGQNLKELRERVLRGKYRIPFYMSTDCENLLKKFLILNPSKRGTLEQIMKDRWMNVGHEDDELKPYVEPLPDYKDPRRTELMVSMGYTREEIQDSLVGQRYNEVMATYLLLGYKSSELEGDTITLKPRPSADLTNSSAPSPSHKVQRSVSANPKQRRFSDQAAGPAIPTSNSYSKKTQSNNAENKRPEEDRESGRKASSTAKVPASPLPGLERKKTTPTPSTNSVLSTSTNRSRNSPLLERASLGQASIQNGKDSLTMPGSRASTASASAAVSAARPRQHQKSMSASVHPNKASGLPPTESNCEVPRPSTAPQRVPVASPSAHNISSSGGAPDRTNFPRGVSSRSTFHAGQLRQVRDQQNLPYGVTPASPSGHSQGRRGASGSIFSKFTSKFVRRNLSFRFARRNLNEPESKDRVETLRPHVVGSGGNDKEKEEFREAKPRSLRFTWSMKTTSSMEPNEMMREIRKVLDANSCQSELHEKYMLLCMHGTPGHEDFVQWEMEVCKLPRLSLNGVRFKRISGTSMAFKNIASKIANELKL

SEQ ID NO: 49196 - protein, 691 aa, Homo sapiens
  Payload ID: 9849
  Gene Symbol: MARK2
  Gene Name: MAP/microtubule affinity-regulating kinase 2
  Uniprot ID: Q7KZI7
  ENSP ID: ENSP00000386128
MIRGRNSATSADEQPHIGNYRLLKTIGKGNFAKVKLARHILTGKEVAVKIIDKTQLNSSSLQKLFREVRIMKVLNHPNIVKLFEVIETEKTLYLVMEYASGGEVFDYLVAHGRMKEKEARAKFRQIVSAVQYCHQKFIVHRDLKAENLLLDADMNIKIADFGFSNEFTFGNKLDTFCGSPPYAAPELFQGKKYDGPEVDVWSLGVILYTLVSGSLPFDGQNLKELRERVLRGKYRIPFYMSTDCENLLKKFLILNPSKRGTLEQIMKDRWMNVGHEDDELKPYVEPLPDYKDPRRTELMVSMGYTREEIQDSLVGQRYNEVMATYLLLGYKSSELEGDTITLKPRPSADLTNSSAPSPSHKVQRSVSANPKQRRFSDQAGPAIPTSNSYSKKTQSNNAENKRPEEDRESGRKASSTAKVPASPLPGLERKKTTPTPSTNSVLSTSTNRSRNSPLLERASLGQASIQNGKDSTAPQRVPVASPSAHNISSSGGAPDRTNFPRGVSSRSTFHAGQLRQVRDQQNLPYGVTPASPSGHSQGRRGASGSIFSKFTSKFVRRNLNEPESKDRVETLRPHVVGSGGNDKEKEEFREAKPRSLRFTWSMKTTSSMEPNEMMREIRKVLDANSCQSELHEKYMLLCMHGTPGHEDFVQWEMEVCKLPRLSLNGVRFKRISGTSMAFKNIASKIANELKL

SEQ ID NO: 49197 - protein, 699 aa, Homo sapiens; identical to SEQ ID NO: 49194
  Payload ID: 9849
  Gene Symbol: MARK2
  Gene Name: MAP/microtubule affinity-regulating kinase 2
  ENSP ID: ENSP00000415494

SEQ ID NO: 49198 - protein, 755 aa, Homo sapiens
  Payload ID: 9849
  Gene Symbol: MARK2
  Gene Name: MAP/microtubule affinity-regulating kinase 2
  Uniprot ID: Q7KZI7
  ENSP ID: ENSP00000421075
MIRGRNSATSADEQPHIGNYRLLKTIGKGNFAKVKLARHILTGKEVAVKIIDKTQLNSSSLQKLFREVRIMKVLNHPNIVKLFEVIETEKTLYLVMEYASGGEVFDYLVAHGRMKEKEARAKFRQIVSAVQYCHQKFIVHRDLKAENLLLDADMNIKIADFGFSNEFTFGNKLDTFCGSPPYAAPELFQGKKYDGPEVDVWSLGVILYTLVSGSLPFDGQNLKELRERVLRGKYRIPFYMSTDCENLLKKFLILNPSKRGTLEQIMKDRWMNVGHEDDELKPYVEPLPDYKDPRRTELMVSMGYTREEIQDSLVGQRYNEVMATYLLLGYKSSELEGDTITLKPRPSADLTNSSAPSPSHKVQRSVSANPKQRRFSDQAAGPAIPTSNSYSKKTQSNNAENKRPEEDRESGRKASSTAKVPASPLPGLERKKTTPTPSTNSVLSTSTNRSRNSPLLERASLGQASIQNGKDSLTMPGSRASTASASAAVSAARPRQHQKSMSASVHPNKASGLPPTESNCEVPRPSTAPQRVPVASPSAHNISSSGGAPDRTNFPRGVSSRSTFHAGQLRQVRDQQNLPYGVTPASPSGHSQGRRGASGSIFSKFTSKFVRRNLSFRFARRNLNEPESKDRVETLRPHVVGSGGNDKEKEEFREAKPRSLRFTWSMKTTSSMEPNEMMREIRKVLDANSCQSELHEKYMLLCMHGTPGHEDFVQWEMEVCKLPRLSLNGVRFKRISGTSMAFKNIASKIANELKL

SEQ ID NO: 49199 - protein, 778 aa, Homo sapiens
  Payload ID: 9849
  Gene Symbol: MARK2
  Gene Name: MAP/microtubule affinity-regulating kinase 2
  ENSP ID: ENSP00000423452
MSSARTPLPTLNERDTEQPTLGHLDSKPSSKSNMIRGRNSATSADEQPHIGNYRLLKTIGKGNFAKVKLARHILTGKEVAVKIIDKTQLNSSSLQKLFREVRIMKVLNHPNIVKLFEVIETEKTLYLVMEYASGGEVFDYLVAHGRMKEKEARAKFRQIVSAVQYCHQKFIVHRDLKAENLLLDADMNIKIADFGFSNEFTFGNKLDTFCGSPPYAAPELFQGKKYDGPEVDVWSLGVILYTLVSGSLPFDGQNLKELRERVLRGKYRIPFYMSTDCENLLKKFLILNPSKRGTLEQIMKDRWMNVGHEDDELKPYVEPLPDYKDPRRTELMVSMGYTREEIQDSLVGQRYNEVMATYLLLGYKSSELEGDTITLKPRPSADLTNSSAPSPSHKVQRSVSANPKQRRFSDQAGPAIPTSNSYSKKTQSNNAENKRPEEDRESGRKASSTAKVPASPLPGLERKKTTPTPSTNSVLSTSTNRSRNSPLLERASLGQASIQNGKDSLTMPGSRASTASASAAVSAARPRQHQKSMSASVHPNKASGLPPTESNCEVPRPSTAPQRVPVASPSAHNISSSGGAPDRTNFPRGVSSRSTFHAGQLRQVRDQQNLPYGVTPASPSGHSQGRRGASGSIFSKFTSKFVRRNLNEPESKDRVETLRPHVVGSGGNDKEKEEFREAKPRSLRFTWSMKTTSSMEPNEMMREIRKVLDANSCQSELHEKYMLLCMHGTPGHEDFVQWEMEVCKLPRLSLNGVRFKRISGTSMAFKNIASKIANELKL

SEQ ID NO: 49200 - protein, 60 aa, Homo sapiens
  Payload ID: 9849
  Gene Symbol: MARK2
  Gene Name: MAP/microtubule affinity-regulating kinase 2
  ENSP ID: ENSP00000423844
MEVAGSPFPFLQSVACLLTLAHIPAVGNILQHRRRGAGPTLGHLDSKPSSKSNMIRGRNS

SEQ ID NO: 49201 - protein, 745 aa, Homo sapiens
  Payload ID: 9849
  Gene Symbol: MARK2
  Gene Name: MAP/microtubule affinity-regulating kinase 2
  Uniprot ID: Q7KZI7
  ENSP ID: ENSP00000423974
MIRGRNSATSADEQPHIGNYRLLKTIGKGNFAKVKLARHILTGKEVAVKIIDKTQLNSSSLQKLFREVRIMKVLNHPNIVKLFEVIETEKTLYLVMEYASGGEVFDYLVAHGRMKEKEARAKFRQIVSAVQYCHQKFIVHRDLKAENLLLDADMNIKIADFGFSNEFTFGNKLDTFCGSPPYAAPELFQGKKYDGPEVDVWSLGVILYTLVSGSLPFDGQNLKELRERVLRGKYRIPFYMSTDCENLLKKFLILNPSKRGTLEQIMKDRWMNVGHEDDELKPYVEPLPDYKDPRRTELMVSMGYTREEIQDSLVGQRYNEVMATYLLLGYKSSELEGDTITLKPRPSADLTNSSAPSPSHKVQRSVSANPKQRRFSDQAGPAIPTSNSYSKKTQSNNAENKRPEEDRESGRKASSTAKVPASPLPGLERKKTTPTPSTNSVLSTSTNRSRNSPLLERASLGQASIQNGKDSLTMPGSRASTASASAAVSAARPRQHQKSMSASVHPNKASGLPPTESNCEVPRPSTAPQRVPVASPSAHNISSSGGAPDRTNFPRGVSSRSTFHAGQLRQVRDQQNLPYGVTPASPSGHSQGRRGASGSIFSKFTSKFVRRNLNEPESKDRVETLRPHVVGSGGNDKEKEEFREAKPRSLRFTWSMKTTSSMEPNEMMREIRKVLDANSCQSELHEKYMLLCMHGTPGHEDFVQWEMEVCKLPRLSLNGVRFKRISGTSMAFKNIASKIANELKL

SEQ ID NO: 49202 - protein, 724 aa, Homo sapiens
  Payload ID: 9849
  Gene Symbol: MARK2
  Gene Name: MAP/microtubule affinity-regulating kinase 2
  Uniprot ID: Q7KZI7
  ENSP ID: ENSP00000425765
MSSARTPLPTLNERDTEQPTLGHLDSKPSSKSNMIRGRNSATSADEQPHIGNYRLLKTIGKGNFAKVKLARHILTGKEVAVKIIDKTQLNSSSLQKLFREVRIMKVLNHPNIVKLFEVIETEKTLYLVMEYASGGEVFDYLVAHGRMKEKEARAKFRQIVSAVQYCHQKFIVHRDLKAENLLLDADMNIKIADFGFSNEFTFGNKLDTFCGSPPYAAPELFQGKKYDGPEVDVWSLGVILYTLVSGSLPFDGQNLKELRERVLRGKYRIPFYMSTDCENLLKKFLILNPSKRGTLEQIMKDRWMNVGHEDDELKPYVEPLPDYKDPRRTELMVSMGYTREEIQDSLVGQRYNEVMATYLLLGYKSSELEGDTITLKPRPSADLTNSSAPSPSHKVQRSVSANPKQRRFSDQAGPAIPTSNSYSKKTQSNNAENKRPEEDRESGRKASSTAKVPASPLPGLERKKTTPTPSTNSVLSTSTNRSRNSPLLERASLGQASIQNGKDSTAPQRVPVASPSAHNISSSGGAPDRTNFPRGVSSRSTFHAGQLRQVRDQQNLPYGVTPASPSGHSQGRRGASGSIFSKFTSKFVRRNLNEPESKDRVETLRPHVVGSGGNDKEKEEFREAKPRSLRFTWSMKTTSSMEPNEMMREIRKVLDANSCQSELHEKYMLLCMHGTPGHEDFVQWEMEVCKLPRLSLNGVRFKRISGTSMAFKNIASKIANELKL

SEQ ID NO: 49203 - protein, 111 aa, Homo sapiens
  Payload ID: 9849
  Gene Symbol: MARK2
  Gene Name: MAP/microtubule affinity-regulating kinase 2
  ENSP ID: ENSP00000437509
MIRGRNSATSADEQPHIGNYRLLKTIGKGNFAKVKLARHILTGKEVAVKIIDKTQLNSSSLQKLFREVRIMKVLNHPNIVKLFEVIETEKTLYLVMEYASGGEVFDYLVAH

SEQ ID NO: 49204 - protein, 91 aa, Homo sapiens
  Payload ID: 9849
  Gene Symbol: MARK2
  Gene Name: MAP/microtubule affinity-regulating kinase 2
  ENSP ID: ENSP00000444859
MGGQRNTSVGNIVQRWRDHVVCQKAGVIYSGRKAQEHGTGRTDFTPAQRLMMPTLGHLDSKPSSKSNMIRGRNSATSADEQPHIGNYRLLK

SEQ ID NO: 49205 - protein, 161 aa, Homo sapiens
  Payload ID: 9849
  Gene Symbol: MARK2
  Gene Name: MAP/microtubule affinity-regulating kinase 2
  ENSP ID: ENSP00000444956
MIRGRNSATSADEQPHIGNYRLLKTIGKGNFAKVKLARHILTGKEVAVKIIDKTQLNSSSLQKLFREVRIMKVLNHPNIVKLFEVIETEKTLYLVMEYASGGEVFDYLVAHGRMKEKEARAKFRQIVSAVQYCHQKFIVHRDLKAENLLLDADMNIKIADF

SEQ ID NO: 49206 - protein, 713 aa, Homo sapiens
  Payload ID: 9850
  Gene Symbol: MARK3
  Gene Name: MAP/microtubule affinity-regulating kinase 3
  ENSP ID: ENSP00000216288
MSTRTPLPTVNERDTENHTSHGDGRQEVTSRTSRSGARCRNSIASCADEQPHIGNYRLLKTIGKGNFAKVKLARHILTGREVAIKIIDKTQLNPTSLQKLFREVRIMKILNHPNIVKLFEVIETEKTLYLIMEYASGGEVFDYLVAHGRMKEKEARSKFRQIVSAVQYCHQKRIVHRDLKAENLLLDADMNIKIADFGFSNEFTVGGKLDTFCGSPPYAAPELFQGKKYDGPEVDVWSLGVILYTLVSGSLPFDGQNLKELRERVLRGKYRIPFYMSTDCENLLKRFLVLNPIKRGTLEQIMKDRWINAGHEEDELKPFVEPELDISDQKRIDIMVGMGYSQEEIQESLSKMKYDEITATYLLLGRKSSEVRPSSDLNNSTGQSPHHKVQRSVSSSQKQRRYSDHAGPAIPSVVAYPKRSQTSTADSDLKEDGISSRKSSGSAVGGKGIAPASPMLGNASNPNKADIPERKKSSTVPSSNTASGGMTRRNTYVCSERTTADRHSVIQNGKENSTIPDQRTPVASTHSISSAATPDRIRFPRGTASRSTFHGQPRERRTATYNGPPASPSLSHEATPLSQTRSRGSTNLFSKLTSKLTRSRNVSAEQKDENKEAKPRSLRFTWSMKTTSSMDPGDMMREIRKVLDANNCDYEQRERFLLFCVHGDGHAENLVQWEMEVCKLPRLSLNGVRFKRISGTSIAFKNIASKIANELKL

SEQ ID NO: 49207 - protein, 729 aa, Homo sapiens
  Payload ID: 9850
  Gene Symbol: MARK3
  Gene Name: MAP/microtubule affinity-regulating kinase 3
  Uniprot ID: P27448
  ENSP ID: ENSP00000303698
MSTRTPLPTVNERDTENHTSHGDGRQEVTSRTSRSGARCRNSIASCADEQPHIGNYRLLKTIGKGNFAKVKLARHILTGREVAIKIIDKTQLNPTSLQKLFREVRIMKILNHPNIVKLFEVIETEKTLYLIMEYASGGEVFDYLVAHGRMKEKEARSKFRQIVSAVQYCHQKRIVHRDLKAENLLLDADMNIKIADFGFSNEFTVGGKLDTFCGSPPYAAPELFQGKKYDGPEVDVWSLGVILYTLVSGSLPFDGQNLKELRERVLRGKYRIPFYMSTDCENLLKRFLVLNPIKRGTLEQIMKDRWINAGHEEDELKPFVEPELDISDQKRIDIMVGMGYSQEEIQESLSKMKYDEITATYLLLGRKSSELDASDSSSSSNLSLAKVRPSSDLNNSTGQSPHHKVQRSVSSSQKQRRYSDHAGPAIPSVVAYPKRSQTSTADSDLKEDGISSRKSSGSAVGGKGIAPASPMLGNASNPNKADIPERKKSSTVPSSNTASGGMTRRNTYVCSERTTADRHSVIQNGKENSTIPDQRTPVASTHSISSAATPDRIRFPRGTASRSTFHGQPRERRTATYNGPPASPSLSHEATPLSQTRSRGSTNLFSKLTSKLTRSRNVSAEQKDENKEAKPRSLRFTWSMKTTSSMDPGDMMREIRKVLDANNCDYEQRERFLLFCVHGDGHAENLVQWEMEVCKLPRLSLNGVRFKRISGTSIAFKNIASKIANELKL

SEQ ID NO: 49208 - protein, 776 aa, Homo sapiens
  Payload ID: 9850
  Gene Symbol: MARK3
  Gene Name: MAP/microtubule affinity-regulating kinase 3
  ENSP ID: ENSP00000335347
MSTRTPLPTVNERDTENHTSHGDGRQEVTSRTSRSGARCRNSIASCADEQPHIGNYRLLKTIGKGNFAKVKLARHILTGREVAIKIIDKTQLNPTSLQKLFREVRIMKILNHPNIVKLFEVIETEKTLYLIMEYASGGEVFDYLVAHGRMKEKEARSKFRQGCQAGQTIKVQVSFDLLSLMFTFIVSAVQYCHQKRIVHRDLKAENLLLDADMNIKIADFGFSNEFTVGGKLDTFCGSPPYAAPELFQGKKYDGPEVDVWSLGVILYTLVSGSLPFDGQNLKELRERVLRGKYRIPFYMSTDCENLLKRFLVLNPIKRGTLEQIMKDRWINAGHEEDELKPFVEPELDISDQKRIDIMVGMGYSQEEIQESLSKMKYDEITATYLLLGRKSSELDASDSSSSSNLSLAKVRPSSDLNNSTGQSPHHKVQRSVSSSQKQRRYSDHAGPAIPSVVAYPKRSQTSTADSDLKEDGISSRKSSGSAVGGKGIAPASPMLGNASNPNKADIPERKKSSTVPSSNTASGGMTRRNTYVCSERTTADRHSVIQNGKENSTIPDQRTPVASTHSISSAATPDRIRFPRGTASRSTFHGQPRERRTATYNGPPASPSLSHEATPLSQTRSRGSTNLFSKLTSKLTRRNMSFRFIKRLPTEYERNGRYEGSSRNVSAEQKDENKEAKPRSLRFTWSMKTTSSMDPGDMMREIRKVLDANNCDYEQRERFLLFCVHGDGHAENLVQWEMEVCKLPRLSLNGVRFKRISGTSIAFKNIASKIANELKL

SEQ ID NO: 49209 - protein, 659 aa, Homo sapiens
  Payload ID: 9850
  Gene Symbol: MARK3
  Gene Name: MAP/microtubule affinity-regulating kinase 3
  ENSP ID: ENSP00000402104
MSTRTPLPTVNERDTENHTSHGDGRQEVTSRTSRSGARCRNSIASCADEQPHIGNYRLLKTIGKGNFAKVKLARHILTGREVAIKIIDKTQLNPTSLQKLFREVRIMKILNHPNIVKLFEVIETEKTLYLIMEYASGGEVFDYLVAHGRMKEKEARSKFRQIVSAVQYCHQKRIVHRDLKELRERVLRGKYRIPFYMSTDCENLLKRFLVLNPIKRGTLEQIMKDRWINAGHEEDELKPFVEPELDISDQKRIDIMVGMGYSQEEIQESLSKMKYDEITATYLLLGRKSSELDASDSSSSSNLSLAKVRPSSDLNNSTGQSPHHKVQRSVSSSQKQRRYSDHAGPAIPSVVAYPKRSQTSTADSDLKEDGISSRKSSGSAVGGKGIAPASPMLGNASNPNKADIPERKKSSTVPSSNTASGGMTRRNTYVCSERTTADRHSVIQNGKENSTIPDQRTPVASTHSISSAATPDRIRFPRGTASRSTFHGQPRERRTATYNGPPASPSLSHEATPLSQTRSRGSTNLFSKLTSKLTRRNMSFRFIKSRNVSAEQKDENKEAKPRSLRFTWSMKTTSSMDPGDMMREIRKVLDANNCDYEQRERFLLFCVHGDGHAENLVQWEMEVCKLPRLSLNGVRFKRISGTSIAFKNIASKIANELKL

SEQ ID NO: 49210 - protein, 752 aa, Homo sapiens
  Payload ID: 9850
  Gene Symbol: MARK3
  Gene Name: MAP/microtubule affinity-regulating kinase 3
  ENSP ID: ENSP00000408092
MSTRTPLPTVNERDTENHTSHGDGRQEVTSRTSRSGARCRNSIASCADEQPHIGNYRLLKTIGKGNFAKVKLARHILTGREVAIKIIDKTQLNPTSLQKLFREVRIMKILNHPNIVKLFEVIETEKTLYLIMEYASGGEVFDYLVAHGRMKEKEARSKFRQGCQAGQTIKVQVSFDLLSLMFTFIVSAVQYCHQKRIVHRDLKAENLLLDADMNIKIADFGFSNEFTVGGKLDTFCGSPPYAAPELFQGKKYDGPEVDVWSLGVILYTLVSGSLPFDGQNLKELRERVLRGKYRIPFYMSTDCENLLKRFLVLNPIKRGTLEQIMKDRWINAGHEEDELKPFVEPELDISDQKRIDIMVGMGYSQEEIQESLSKMKYDEITATYLLLGRKSSELDASDSSSSSNLSLAKVRPSSDLNNSTGQSPHHKVQRSVSSSQKQRRYSDHAGPAIPSVVAYPKRSQTSTADSDLKEDGISSRKSSGSAVGGKGIAPASPMLGNASNPNKADIPERKKSSTVPSSNTASGGMTRRNTYVCSERTTADRHSVIQNGKENSTIPDQRTPVASTHSISSAATPDRIRFPRGTASRSTFHGQPRERRTATYNGPPASPSLSHEATPLSQTRSRGSTNLFSKLTSKLTRSRNVSAEQKDENKEAKPRSLRFTWSMKTTSSMDPGDMMREIRKVLDANNCDYEQRERFLLFCVHGDGHAENLVQWEMEVCKLPRLSLNGVRFKRISGTSIAFKNIASKIANELKL

SEQ ID NO: 49211 - protein, 753 aa, Homo sapiens
  Payload ID: 9850
  Gene Symbol: MARK3
  Gene Name: MAP/microtubule affinity-regulating kinase 3
  ENSP ID: ENSP00000411397
MSTRTPLPTVNERDTENHTSHGDGRQEVTSRTSRSGARCRNSIASCADEQPHIGNYRLLKTIGKGNFAKVKLARHILTGREVAIKIIDKTQLNPTSLQKLFREVRIMKILNHPNIVKLFEVIETEKTLYLIMEYASGGEVFDYLVAHGRMKEKEARSKFRQIVSAVQYCHQKRIVHRDLKAENLLLDADMNIKIADFGFSNEFTVGGKLDTFCGSPPYAAPELFQGKKYDGPEVDVWSLGVILYTLVSGSLPFDGQNLKELRERVLRGKYRIPFYMSTDCENLLKRFLVLNPIKRGTLEQIMKDRWINAGHEEDELKPFVEPELDISDQKRIDIMVGMGYSQEEIQESLSKMKYDEITATYLLLGRKSSELDASDSSSSSNLSLAKVRPSSDLNNSTGQSPHHKVQRSVSSSQKQRRYSDHAGPAIPSVVAYPKRSQTSTADSDLKEDGISSRKSSGSAVGGKGIAPASPMLGNASNPNKADIPERKKSSTVPSSNTASGGMTRRNTYVCSERTTADRHSVIQNGKENSTIPDQRTPVASTHSISSAATPDRIRFPRGTASRSTFHGQPRERRTATYNGPPASPSLSHEATPLSQTRSRGSTNLFSKLTSKLTRRNMSFRFIKRLPTEYERNGRYEGSSRNVSAEQKDENKEAKPRSLRFTWSMKTTSSMDPGDMMREIRKVLDANNCDYEQRERFLLFCVHGDGHAENLVQWEMEVCKLPRLSLNGVRFKRISGTSIAFKNIASKIANELKL

SEQ ID NO: 49212 - protein, 505 aa, Homo sapiens
  Payload ID: 9850
  Gene Symbol: MARK3
  Gene Name: MAP/microtubule affinity-regulating kinase 3
  ENSP ID: ENSP00000450460
  MOD_RES (1)..(1): Any amino acid
XVDVWSLGVILYTLVSGSLPFDGQNLKELRERVLRGKYRIPFYMSTDCENLLKRFLVLNPIKRGTLEQIMKDRWINAGHEEDELKPFVEPELDISDQKRIDIMVGMGYSQEEIQESLSKMKYDEITATYLLLGRKSSEVRPSSDLNNSTGQSPHHKVQRSVSSSQKQRRYSDHAGPAIPSVVAYPKRSQTSTADSDLKEDGISSRKSSGSAVGGKGIAPASPMLGNASNPNKADIPERKKSSTVPSSNTASGGMTRRNTYVCSERTTADRHSVIQNGKENSTIPDQRTPVASTHSISSAATPDRIRFPRGTASRSTFHGQPRERRTATYNGPPASPSLSHEATPLSQTRSRGSTNLFSKLTSKLTRRNMSFRFIKRLPTEYERNGRYEGSSRNVSAEQKDENKEAKPRSLRFTWSMKTTSSMDPGDMMREIRKVLDANNCDYEQRERFLLFCVHGDGHAENLVQWEMEVCKLPRLSLNGVRFKRISGTSIAFKNIASKIANELKL

SEQ ID NO: 49213 - protein, 744 aa, Homo sapiens
  Payload ID: 9850
  Gene Symbol: MARK3
  Gene Name: MAP/microtubule affinity-regulating kinase 3
  Uniprot ID: P27448
  ENSP ID: ENSP00000450772
MSTRTPLPTVNERDTENHTSHGDGRQEVTSRTSRSGARCRNSIASCADEQPHIGNYRLLKTIGKGNFAKVKLARHILTGREVAIKIIDKTQLNPTSLQKLFREVRIMKILNHPNIVKLFEVIETEKTLYLIMEYASGGEVFDYLVAHGRMKEKEARSKFRQIVSAVQYCHQKRIVHRDLKAENLLLDADMNIKIADFGFSNEFTVGGKLDTFCGSPPYAAPELFQGKKYDGPEVDVWSLGVILYTLVSGSLPFDGQNLKELRERVLRGKYRIPFYMSTDCENLLKRFLVLNPIKRGTLEQIMKDRWINAGHEEDELKPFVEPELDISDQKRIDIMVGMGYSQEEIQESLSKMKYDEITATYLLLGRKSSELDASDSSSSSNLSLAKVRPSSDLNNSTGQSPHHKVQRSVSSSQKQRRYSDHAGPAIPSVVAYPKRSQTSTADSDLKEDGISSRKSSGSAVGGKGIAPASPMLGNASNPNKADIPERKKSSTVPSSNTASGGMTRRNTYVCSERTTADRHSVIQNGKENSTIPDQRTPVASTHSISSAATPDRIRFPRGTASRSTFHGQPRERRTATYNGPPASPSLSHEATPLSQTRSRGSTNLFSKLTSKLTRRLPTEYERNGRYEGSSRNVSAEQKDENKEAKPRSLRFTWSMKTTSSMDPGDMMREIRKVLDANNCDYEQRERFLLFCVHGDGHAENLVQWEMEVCKLPRLSLNGVRFKRISGTSIAFKNIASKIANELKL

SEQ ID NO: 49214 - protein, 331 aa, Homo sapiens
  Payload ID: 9850
  Gene Symbol: MARK3
  Gene Name: MAP/microtubule affinity-regulating kinase 3
  ENSP ID: ENSP00000451623
APASPMLGNASNPNKADIPERKKSSTVPSSNTASGGMTRRNTYVCSERTTADRHSVIQNGKENSLTEMFAYAASPASVCTSTCRLRHQKSMSMSASGHPKMMLPPIDSEGDNFKAITIPDQRTPVASTHSISSAATPDRIRFPRGTASRSTFHGQPRERRTATYNGPPASPSLSHEATPLSQTRSRGSTNLFSKLTSKLTRRLPTEYERNGRYEGSSRNVSAEQKDENKEAKPRSLRFTWSMKTTSSMDPGDMMREIRKVLDANNCDYEQRERFLLFCVHGDGHAENLVQWEMEVCKLPRLSLNGVRFKRISGTSIAFKNIASKIANELKL

SEQ ID NO: 49215 - protein, 129 aa, Homo sapiens
  Payload ID: 9850
  Gene Symbol: MARK3
  Gene Name: MAP/microtubule affinity-regulating kinase 3
  ENSP ID: ENSP00000452829
MDCANHTSHGDGRQEVTSRTSRSGARCRNSIASCADEQPHIGNYRLLKTIGKGNFAKVKLARHILTGREVAIKIIDKTQLNPTSLQKLFREVRIMKILNHPNIVKLFEVIETEKTLYLIMEYASGGKNI

SEQ ID NO: 49216 - protein, 222 aa, Homo sapiens
  Payload ID: 9850
  Gene Symbol: MARK3
  Gene Name: MAP/microtubule affinity-regulating kinase 3
  ENSP ID: ENSP00000452893
AGPAIPSVVAYPKRSQTSTADSDLKEDGISSRKSSGSAVGGKGIAPASPMLGNASNPNKADIPERKKSSTVPSSNTASGGMTRRNTYVCSERTTADRHSVIQNGKENSRNVSAEQKDENKEAKPRSLRFTWSMKTTSSMDPGDMMREIRKVLDANNCDYEQRERFLLFCVHGDGHAENLVQWEMEVCKLPRLSLNGVRFKRISGTSIAFKNIASKIANELKL

SEQ ID NO: 49217 - protein, 178 aa, Homo sapiens
  Payload ID: 9850
  Gene Symbol: MARK3
  Gene Name: MAP/microtubule affinity-regulating kinase 3
  ENSP ID: ENSP00000454169
MSTRTPLPTVNERDTENHTSHGDGRQEVTSRTSRSGARCRNSIASCADEQPHIGNYRLLKTIGKGNFAKVKLARHILTGRELFREVRIMKILNHPNIVKLFEVIETEKTLYLIMEYASGGEVFDYLVAHGRMKEKEARSKFRQIVSAVQYCHQKRIVHRDLKAENLLLDADMNIKIAD

SEQ ID NO: 49218 - protein, 752 aa, Homo sapiens
  Payload ID: 9851
  Gene Symbol: MARK4
  Gene Name: MAP/microtubule affinity-regulating kinase 4
  Uniprot ID: Q96L34
  ENSP ID: ENSP00000262891
MSSRTVLAPGNDRNSDTHGTLGSGRSSDKGPSWSSRSLGARCRNSIASCPEEQPHVGNYRLLRTIGKGNFAKVKLARHILTGREVAIKIIDKTQLNPSSLQKLFREVRIMKGLNHPNIVKLFEVIETEKTLYLVMEYASAGEVFDYLVSHGRMKEKEARAKFRQIVSAVHYCHQKNIVHRDLKAENLLLDAEANIKIADFGFSNEFTLGSKLDTFCGSPPYAAPELFQGKKYDGPEVDIWSLGVILYTLVSGSLPFDGHNLKELRERVLRGKYRVPFYMSTDCESILRRFLVLNPAKRCTLEQIMKDKWINIGYEGEELKPYTEPEEDFGDTKRIEVMVGMGYTREEIKESLTSQKYNEVTATYLLLGRKTEEGGDRGAPGLALARVRAPSDTTNGTSSSKGTSHSKGQRSSSSTYHRQRRHSDFCGPSPAPLHPKRSPTSTGEAELKEERLPGRKASCSTAGSGSRGLPPSSPMVSSAHNPNKAEIPERRKDSTSTPNNLPPSMMTRRNTYVCTERPGAERPSLLPNGKENSSGTPRVPPASPSSHSLAPPSGERSRLARGSTIRSTFHGGQVRDRRAGGGGGGGVQNGPPASPTLAHEAAPLPAGRPRPTTNLFTKLTSKLTRRVADEPERIGGPEVTSCHLPWDQTETAPRLLRFPWSVKLTSSRPPEALMAALRQATAAARCRCRQPQPFLLACLHGGAGGPEPLSHFEVEVCQLPRPGLRGVLFRRVAGTALAFRTLVTRISNDLEL

SEQ ID NO: 49219 - protein, 688 aa, Homo sapiens
  Payload ID: 9851
  Gene Symbol: MARK4
  Gene Name: MAP/microtubule affinity-regulating kinase 4
  Uniprot ID: Q96L34
  ENSP ID: ENSP00000300843
MSSRTVLAPGNDRNSDTHGTLGSGRSSDKGPSWSSRSLGARCRNSIASCPEEQPHVGNYRLLRTIGKGNFAKVKLARHILTGREVAIKIIDKTQLNPSSLQKLFREVRIMKGLNHPNIVKLFEVIETEKTLYLVMEYASAGEVFDYLVSHGRMKEKEARAKFRQIVSAVHYCHQKNIVHRDLKAENLLLDAEANIKIADFGFSNEFTLGSKLDTFCGSPPYAAPELFQGKKYDGPEVDIWSLGVILYTLVSGSLPFDGHNLKELRERVLRGKYRVPFYMSTDCESILRRFLVLNPAKRCTLEQIMKDKWINIGYEGEELKPYTEPEEDFGDTKRIEVMVGMGYTREEIKESLTSQKYNEVTATYLLLGRKTEEGGDRGAPGLALARVRAPSDTTNGTSSSKGTSHSKGQRSSSSTYHRQRRHSDFCGPSPAPLHPKRSPTSTGEAELKEERLPGRKASCSTAGSGSRGLPPSSPMVSSAHNPNKAEIPERRKDSTSTPNNLPPSMMTRRNTYVCTERPGAERPSLLPNGKENSSGTPRVPPASPSSHSLAPPSGERSRLARGSTIRSTFHGGQVRDRRAGGGGGGGVQNGPPASPTLAHEAAPLPAGRPRPTTNLFTKLTSKLTRRVTLDPSKRQNSNRCVSGASLPQGSKIRSQTNLRESGDLRSQVAIYLGIKRKPPPGCSDSPGV

SEQ ID NO: 49220 - protein, 62 aa, Homo sapiens
  Payload ID: 9851
  Gene Symbol: MARK4
  Gene Name: MAP/microtubule affinity-regulating kinase 4
  ENSP ID: ENSP00000465414
MKGLNHPNIVKLFEVIETEKTLYLVMEYASAGEVFDYLVSHGRMKEKEARAKFRQIVSAVHY

SEQ ID NO: 49221 - protein, 74 aa, Homo sapiens
  Payload ID: 9851
  Gene Symbol: MARK4
  Gene Name: MAP/microtubule affinity-regulating kinase 4
  ENSP ID: ENSP00000465613
MKGLNHPNIVKLFEVIETEKTLYLVMEYASAGEVFDYLVSHGRMKEKEARAKFRQIVSAVHYCHQKNIVHRDLK

SEQ ID NO: 49222 - protein, 97 aa, Homo sapiens
  Payload ID: 9851
  Gene Symbol: MARK4
  Gene Name: MAP/microtubule affinity-regulating kinase 4
  ENSP ID: ENSP00000466702
MSSRTVLAPGNDRNSDTAENLLLDAEANIKIADFGFSNEFTLGSKLDTFCGSPPYAAPELFQGKKYDGPEVDIWSLGVILYTLVSGSLPFDGHNLKR

SEQ ID NO: 49223 - protein, 48 aa, Homo sapiens
  Payload ID: 9851
  Gene Symbol: MARK4
  Gene Name: MAP/microtubule affinity-regulating kinase 4
  ENSP ID: ENSP00000466843
  MOD_RES (1)..(1): Any amino acid
XNLLLDAEANIKIADFGFSNEFTLGSKLDTFCGSPPYAAPELFQGKKL

SEQ ID NO: 49224 - protein, 97 aa, Homo sapiens; identical to SEQ ID NO: 49222
  Payload ID: 9851
  Gene Symbol: MARK4
  Gene Name: MAP/microtubule affinity-regulating kinase 4
  ENSP ID: ENSP00000480702

SEQ ID NO: 49225 - protein, 79 aa, Homo sapiens
  Payload ID: 9851
  Gene Symbol: MARK4
  Gene Name: MAP/microtubule affinity-regulating kinase 4
  ENSP ID: ENSP00000484974
MAALRQATAAARCRCRQPQPFLLACLHGGAGGPEPLSHFEVEVCQLPRPGLRGVLFRRVAGTALAFRTLVTRISNDLEL

SEQ ID NO: 49226 - protein, 343 aa, Homo sapiens
  Payload ID: 9852
  Gene Symbol: MBIP
  Gene Name: MAP3K12 binding inhibitory protein 1
  Uniprot ID: Q9NS73
  ENSP ID: ENSP00000324444
MAAATELNRPSSGDRNLERRCRPNLSREVLYEIFRSLHTLVGQLDLRDDVVKITIDWNKLQSLSAFQPALLFSALEQHILYLQPFLAKLQSPIKEENTTAVEEIGRTEMGNKNEVNDKFSIGDLQEEEKHKESDLRDVKKTQIHFDPEVVQIKAGKAEIDRRISAFIERKQAEINENNVREFCNVIDCNQENSCARTDAIFTPYPGFKSHVKVSRVVNTYGPQTRPEGIPGSGHKPNSMLRDCGNQAVEERLQNIEAHLRLQTGGPVPRDIYQRIKKLEDKILELEGISPEYFQSVSFSGKRRKVQPPQNYSLAELDEKISALKQALLRKSREAESMATHHLP

SEQ ID NO: 49227 - protein, 282 aa, Homo sapiens
  Payload ID: 9852
  Gene Symbol: MBIP
  Gene Name: MAP3K12 binding inhibitory protein 1
  Uniprot ID: Q9NS73
  ENSP ID: ENSP00000352517
MAAATELNRPSSGDRNLERRCRPNLSREVLYEIFRSLHTLVGQLDLRDDVVKITIDWNKLQSLSAFQPALLFSALEQHILYLQPFLAKLQSPIKEENTTAVEEIGRTEMGNKNEVNDKFSIGDLQEEEKHKESDLRDVKKTQIHFDPEVVQIKAGKAEIDRRISAFIERKQAEINENNVREFCNVIDCNQENSCARTDAIFTPYPGFKSHVKVSRVVNTYGPQTRPEGIPGSGHKPNSMLRDCGNQAVEERLQNIEAHLRLQTELFWKKKKSSTTSTELFTG

SEQ ID NO: 49228 - protein, 344 aa, Homo sapiens
  Payload ID: 9852
  Gene Symbol: MBIP
  Gene Name: MAP3K12 binding inhibitory protein 1
  Uniprot ID: Q9NS73
  ENSP ID: ENSP00000399718
MAAATELNRPSSGDRNLERRCRPNLSREVLYEIFRSLHTLVGQLDLRDDVVKITIDWNKLQSLSAFQPALLFSALEQHILYLQPFLAKLQSPIKEENTTAVEEIGRTEMGNKNEVNDKFSIGDLQEEEKHKESDLRDVKKTQIHFDPEVVQIKAGKAEIDRRISAFIERKQAEINENNVREFCNVIDCNQENSCARTDAIFTPYPGFKSHVKVSRVVNTYGPQTRPEGIPGSGHKPNSMLRDCGNQAVEERLQNIEAHLRLQTGGPVPRDIYQRIKKLEDKILELEGISPEYFQSVSFSGKRRKVQPPQQNYSLAELDEKISALKQALLRKSREAESMATHHLP

SEQ ID NO: 49229 - protein, 299 aa, Homo sapiens
  Payload ID: 9852
  Gene Symbol: MBIP
  Gene Name: MAP3K12 binding inhibitory protein 1
  ENSP ID: ENSP00000473739
  MOD_RES (1)..(1): Any amino acid
XTELNRPSSGDRNLERRCRPNLSREVLYEIFRSLHTLVGQLDLRDDVVKITIDWNKLQSLSAFQPALLFSALEQHILYLQPFLAKLQSPIKEENTTAVEEIGRTEMGNKNEVNDKFSIGDLQEEEKHKESDLRDVKKTQIHFDPEVVQIKAGKAEIDRRISAFIERKQAEINENNVREFCNVIDCNQENSCARTDAIFTPYPGFKSHVKVSRVVNTYGPQTRPEGIPGSGHKPNSMLRDCGNQAVEERLQNIEAHLRLQTGGPVPRDIYQRIKKLEDKILELEGISPEYFQSVVSISVF

SEQ ID NO: 49230 - protein, 281 aa, Homo sapiens
  Payload ID: 9852
  Gene Symbol: MBIP
  Gene Name: MAP3K12 binding inhibitory protein 1
  ENSP ID: ENSP00000474535
MAAATELNRPSSGDRNLERRCRPNLSREVLYEIFRSLHTLVGQLDLRDDVVKITIDWNKLQSLSAFQPALLFSALEQHILYLQMELCCSQPFLAKLQSPIKEENTTAVEEIGRTEMGNKNEVNDKFSIGDLQEEEKHKESDLRDVKKTQIHFDPEVVQIKAGKAEIDRRISAFIERKQAEINENNVREFCNVIDCNQENSCARTDAIFTPYPGFKSHVKVSRVVNTYGPQTRPEGIPGSGHKPNSMLRDCGNQAVEERLQNIEAHLRLQTGGPVPRDIYQR

SEQ ID NO: 49231 - protein, 222 aa, Homo sapiens
  Payload ID: 9852
  Gene Symbol: MBIP
  Gene Name: MAP3K12 binding inhibitory protein 1
  ENSP ID: ENSP00000474583
MAAATELNRPSSGDRNLERRCRPNLSREVLYEIFRSLHTLVGQPFLAKLQSPIKEENTTAVEEIGRTEMGNKNEVNDKFSIGDLQEEEKHKESDLRDVKKTQIHFDPEVVQIKAGKAEIDRRISAFIERKQAEINENNVREFCNVIDCNQENSCARTDAIFTPYPGFKSHVKVSRVVNTYGPQTRPEGIPGSGHKPNSMLRDCGNQAVEERLQNIEAHLRLQ

SEQ ID NO: 49232 - protein, 112 aa, Homo sapiens
  Payload ID: 9852
  Gene Symbol: MBIP
  Gene Name: MAP3K12 binding inhibitory protein 1
  ENSP ID: ENSP00000474845
MLDLRDDVVKITIDWNKLQSLSAFQPALLFSALEQHILYLQPFLAKLQSPIKEENTTAVEEIGRTEMGNKNEVNDKFSIGDLQEEEKHKESDLRDVKKTQIHFDPEVVQIKA

SEQ ID NO: 49233 - protein, 298 aa, Homo sapiens
  Payload ID: 9852
  Gene Symbol: MBIP
  Gene Name: MAP3K12 binding inhibitory protein 1
  ENSP ID: ENSP00000484282
MAAATELNRPSSGDRNLERRCRPNLSREVLYEIFRSLHTLVGQLDLRDDVVKITIDWNKLQSLSAFQPALLFSALEQHILYLQPFLAKLQSPIKEENTTAVEEIGRTEMGNKNEVNDKFSIGDLQEEEKHKESDLRDVKKTQIHFDPEVVQIKAGKAEIDRRISAFIERKQAEINENNVREFCNVIDCNQENSCARTDAIFTPYPGFKSHVKVSRVVNTYGPQTRPEGIPGSGHKPNSMLRDCGNQAVEERLQNIEAHLRLQTGGPVPRDIYQRIKKLEDKILELEGISPEYFQSVGL

SEQ ID NO: 49234 - protein, 242 aa, Homo sapiens
  Payload ID: 9853
  Gene Symbol: MAP3K7CL
  Gene Name: MAP3K7 C-terminal like
  Uniprot ID: P57077
  ENSP ID: ENSP00000286791
MVQLIAPLEVMWNEAADLKPLALSRRLECSGGIMAHYSPDLLGPEMESRYFAQVGLEHLASSSPPAFGFLKCLDYSISVLCSATSLAMLEDNPKVSKLATGDWMLTLKPKSITVPVEIPSSPLDDTPPEDSIPLVFPELDQQLQPLPPCHDSEESMEVFKQHCQIAEEYHEVKKEITLLEQRKKELIAKLDQAEKEKVDAAELVREFEALTEENRTLRLAQSQCVEQLEKLRIQYQKRQGSS

SEQ ID NO: 49235 - protein, 242 aa, Homo sapiens; identical to SEQ ID NO: 49234
  Payload ID: 9853
  Gene Symbol: MAP3K7CL
  Gene Name: MAP3K7 C-terminal like
  Uniprot ID: P57077
  ENSP ID: ENSP00000343212

SEQ ID NO: 49236 - protein, 142 aa, Homo sapiens
  Payload ID: 9853
  Gene Symbol: MAP3K7CL
  Gene Name: MAP3K7 C-terminal like
  Uniprot ID: P57077
  ENSP ID: ENSP00000345777
MISTARVPADKPVRIAFSLNDASDDTPPEDSIPLVFPELDQQLQPLPPCHDSEESMEVFKQHCQIAEEYHEVKKEITLLEQRKKELIAKLDQAEKEKVDAAELVREFEALTEENRTLRLAQSQCVEQLEKLRIQYQKRQGSS

SEQ ID NO: 49237 - protein, 142 aa, Homo sapiens; identical to SEQ ID NO: 49236
  Payload ID: 9853
  Gene Symbol: MAP3K7CL
  Gene Name: MAP3K7 C-terminal like
  Uniprot ID: P57077
  ENSP ID: ENSP00000382809

SEQ ID NO: 49238 - protein, 142 aa, Homo sapiens; identical to SEQ ID NO: 49236
  Payload ID: 9853
  Gene Symbol: MAP3K7CL
  Gene Name: MAP3K7 C-terminal like
  Uniprot ID: P57077
  ENSP ID: ENSP00000382810

SEQ ID NO: 49239 - protein, 142 aa, Homo sapiens; identical to SEQ ID NO: 49236
  Payload ID: 9853
  Gene Symbol: MAP3K7CL
  Gene Name: MAP3K7 C-terminal like
  Uniprot ID: P57077
  ENSP ID: ENSP00000382812

SEQ ID NO: 49240 - protein, 142 aa, Homo sapiens; identical to SEQ ID NO: 49236
  Payload ID: 9853
  Gene Symbol: MAP3K7CL
  Gene Name: MAP3K7 C-terminal like
  Uniprot ID: P57077
  ENSP ID: ENSP00000382816

SEQ ID NO: 49241 - protein, 142 aa, Homo sapiens; identical to SEQ ID NO: 49236
  Payload ID: 9853
  Gene Symbol: MAP3K7CL
  Gene Name: MAP3K7 C-terminal like
  Uniprot ID: P57077
  ENSP ID: ENSP00000382817

SEQ ID NO: 49242 - protein, 242 aa, Homo sapiens; identical to SEQ ID NO: 49234
  Payload ID: 9853
  Gene Symbol: MAP3K7CL
  Gene Name: MAP3K7 C-terminal like
  Uniprot ID: P57077
  ENSP ID: ENSP00000382828

SEQ ID NO: 49243 - protein, 44 aa, Homo sapiens
  Payload ID: 9853
  Gene Symbol: MAP3K7CL
  Gene Name: MAP3K7 C-terminal like
  ENSP ID: ENSP00000402384
MVQLIAPLEVMWNEAADLKPLALSRRLECSGGIMAHYSPDLLGP

SEQ ID NO: 49244 - protein, 94 aa, Homo sapiens
  Payload ID: 9853
  Gene Symbol: MAP3K7CL
  Gene Name: MAP3K7 C-terminal like
  ENSP ID: ENSP00000411208
MISTARVPADKPVRIAFSLNDASDDTPPEDSIPLVFPELDQQLQPLPPCHDSEESMEVFKQHCQIAEEYHEVKKEITLLEQRKKELIAKLDQAE

SEQ ID NO: 49245 - protein, 136 aa, Homo sapiens
  Payload ID: 9853
  Gene Symbol: MAP3K7CL
  Gene Name: MAP3K7 C-terminal like
  ENSP ID: ENSP00000437846
MLVSSSSLTPFPPVRTADDTPPEDSIPLVFPELDQQLQPLPPCHDSEESMEVFKQHCQIAEEYHEVKKEITLLEQRKKELIAKLDQAEKEKVDAAELVREFEALTEENRTLRLAQSQCVEQLEKLRIQYQKRQGSS

SEQ ID NO: 49246 - protein, 199 aa, Homo sapiens
  Payload ID: 9854
  Gene Symbol: MAP6D1
  Gene Name: MAP6 domain containing 1
  Uniprot ID: Q9H9H5
  ENSP ID: ENSP00000314560
MAWPCISRLCCLARRWNQLDRSDVAVPLTLHGYSDLDSEEPGTGGAASRRGQPPAGARDSGRDVPLTQYQRDFGLWTTPAGPKDPPPGRGPGAGGRRGKSSAQSSAPPAPGARGVYVLPIGDADAAAAVTTSYRQEFQAWTGVKPSRSTKTKPARVITTHTSGWDSSPGAGFQVPEVRKKFTPNPSAIFQASAPRILNV

SEQ ID NO: 49247 - protein, 182 aa, Homo sapiens
  Payload ID: 9854
  Gene Symbol: MAP6D1
  Gene Name: MAP6 domain containing 1
  ENSP ID: ENSP00000388945
MAWPCISRLCCLARRWNQLDRSDVAVPLTLHGYSDLDSEEPGTGGAASRRGQPPAGARDSGRDVPLTQYQRDFGLWTTPAGPKDPPPGRGPGAGGRRGKSSAQSSAPPAPGARGVYVLPIGDADAAAAVTTSYRQEFQAWTGVKPSRSTKTKPARVITTHTSGWDSSPGAGFQASAPRILNV

SEQ ID NO: 49248 - protein, 133 aa, Homo sapiens
  Payload ID: 9854
  Gene Symbol: MAP6D1
  Gene Name: MAP6 domain containing 1
  ENSP ID: ENSP00000390816
  MOD_RES (1)..(1): Any amino acid
XCCLARRWNQLDRSDVAVPLTLHGYSDLDSEEPGTGGAASRRGQPPAGARDSGRDVPLTQYQRDFGLWTTPAGPKDPPPGRGPGAGGRRGKSSAQSSAPPAPGARGVYVLPIGDADAAAAVTTSYRNSRLGLE

SEQ ID NO: 49249 - protein, 803 aa, Homo sapiens
  Payload ID: 9855
  Gene Symbol: MAP7D1
  Gene Name: MAP7 domain containing 1
  Uniprot ID: Q3KQU3
  ENSP ID: ENSP00000320228
MESGPRAELGAGAPPAVVARTPPEPRPSPEGDPSPPPPPMSALVPDTPPDTPPAMKNATSSKQLPLEPESPSGQVGPRPAPPQEESPSSEAKSRGPTPPAMGPRDARPPRRSSQPSPTAVPASDSPPTKQEVKKAGERHKLAKERREERAKYLAAKKAVWLEKEEKAKALREKQLQERRRRLEEQRLKAEQRRAALEERQRQKLEKNKERYEAAIQRSVKKTWAEIRQQRWSWAGALHHSSPGHKTNRSLQLSAWESSIVDRLMTPTLSFLARSRSAVTLPRNGRDQGRGCDPGRGPTWGRAGASLARGPQPDRTHPSAAVPVCPRSASASPLTPCSVTRSVHRCAPAGERGERRKPNAGGSPAPVRRRPEASPVQKKEKKDKERENEKEKSALARERSLKKRQSLPASPRARLSASTASELSPKSKARPSSPSTSWHRPASPCPSPGPGHTLPPKPPSPRGTTASPKGRVRRKEEAKESPSAAGPEDKSQSKRRASNEKESAAPASPAPSPAPSPTPAPPQKEQPPAETPTDAAVLTSPPAPAPPVTPSKPMAGTTDREEATRLLAEKRRQAREQREREEQERRLQAERDKRMREEQLAREAEARAEREAEARRREEQEAREKAQAEQEEQERLQKQKEEAEARSREEAERQRLEREKHFQQQEQERQERRKRLEEIMKRTRKSEVSETKKQDSKEANANGSSPEPVKAVEARSPGLQKEAVQKEEPIPQEPQWSLPSKELPASLVNGLQPLPAHQENGFSTNGPSGDKSLSRTPETLLPFAEAEAFLKKAVVQSPQVTEVL

SEQ ID NO: 49250 - protein, 808 aa, Homo sapiens
  Payload ID: 9855
  Gene Symbol: MAP7D1
  Gene Name: MAP7 domain containing 1
  Uniprot ID: Q3KQU3
  ENSP ID: ENSP00000362243
MESGPRAELGAGAPPAVVARTPPEPRPSPEGDPSPPPPPMSALVPDTPPDTPPAMKNATSSKQLPLEPESPSGQVGPRPAPPQEESPSSEAKSRGPTPPAMGPRDARPPRRSSQPSPTAVPASDSPPTKQEVKKAGERHKLAKERREERAKYLAAKKAVWLEKEEKAKALREKQLQERRRRLEEQRLKAEQRRAALEERQRQKLEKNKERYEAAIQRSVKKTWAEIRQQRWSWAGALHHSSPGHKTSGSRCSVSAVNLPKHVDSIINKRLSKSSATLWNSPSRNRSLQLSAWESSIVDRLMTPTLSFLARSRSAVTLPRNGRDQAVPVCPRSASASPLTPCSVTRSVHRCAPAGERGERRKPNAGGSPAPVRRRPEASPVQKKEKKDKERENEKEKSALARERSLKKRQSLPASPRARLSASTASELSPKSKARPSSPSTSWHRPASPCPSPGPGHTLPPKPPSPRGTTASPKGRVRRKEEAKESPSAAGPEDKSQSKRRASNEKESAAPASPAPSPAPSPTPAPPQKEQPPAETPTDAAVLTSPPAPAPPVTPSKPMAGTTDREEATRLLAEKRRQAREQREREEQERRLQAERDKRMREEQLAREAEARAEREAEARRREEQEAREKAQAEQEEQERLQKQKEEAEARSREEAERQRLEREKHFQQQEQERQERRKRLEEIMKRTRKSEVSETKKQDSKEANANGSSPEPVKAVEARSPGLQKEAVQKEEPIPQEPQWSLPSKELPASLVNGLQPLPAHQENGFSTNGPSGDKSLSRTPETLLPFAEAEAFLKKAVVQSPQVTEVL

SEQ ID NO: 49251 - protein, 841 aa, Homo sapiens
  Payload ID: 9855
  Gene Symbol: MAP7D1
  Gene Name: MAP7 domain containing 1
  Uniprot ID: Q3KQU3
  ENSP ID: ENSP00000362244
MESGPRAELGAGAPPAVVARTPPEPRPSPEGDPSPPPPPMSALVPDTPPDTPPAMKNATSSKQLPLEPESPSGQVGPRPAPPQEESPSSEAKSRGPTPPAMGPRDARPPRRSSQPSPTAVPASDSPPTKQEVKKAGERHKLAKERREERAKYLAAKKAVWLEKEEKAKALREKQLQERRRRLEEQRLKAEQRRAALEERQRQKLEKNKERYEAAIQRSVKKTWAEIRQQRWSWAGALHHSSPGHKTSGSRCSVSAVNLPKHVDSIINKRLSKSSATLWNSPSRNRSLQLSAWESSIVDRLMTPTLSFLARSRSAVTLPRNGRDQGRGCDPGRGPTWGRAGASLARGPQPDRTHPSAAVPVCPRSASASPLTPCSVTRSVHRCAPAGERGERRKPNAGGSPAPVRRRPEASPVQKKEKKDKERENEKEKSALARERSLKKRQSLPASPRARLSASTASELSPKSKARPSSPSTSWHRPASPCPSPGPGHTLPPKPPSPRGTTASPKGRVRRKEEAKESPSAAGPEDKSQSKRRASNEKESAAPASPAPSPAPSPTPAPPQKEQPPAETPTDAAVLTSPPAPAPPVTPSKPMAGTTDREEATRLLAEKRRQAREQREREEQERRLQAERDKRMREEQLAREAEARAEREAEARRREEQEAREKAQAEQEEQERLQKQKEEAEARSREEAERQRLEREKHFQQQEQERQERRKRLEEIMKRTRKSEVSETKQKQDSKEANANGSSPEPVKAVEARSPGLQKEAVQKEEPIPQEPQWSLPSKELPASLVNGLQPLPAHQENGFSTNGPSGDKSLSRTPETLLPFAEAEAFLKKAVVQSPQVTEVL

SEQ ID NO: 49252 - protein, 244 aa, Homo sapiens
  Payload ID: 9855
  Gene Symbol: MAP7D1
  Gene Name: MAP7 domain containing 1
  ENSP ID: ENSP00000390091
MSALVPDTPPDTPPAMKNATSSKQLPLEPESPSGQVGPRPAPPQEESPSSEAKSRGPTPPAMGPRDARPPRRSSQPSPTAVPASDSPPTKQEVKKAGERHKLAKERREERAKYLAAKKAVWLEKEEKAKALREKQLQERRRRLEEQRLKAEQRRAALEERQRQKLEKNKERYEAAIQRSVKKTWAEIRQQRWSWAGALHHSSPGHKTSGSRCSVSAVNLPKHVDSIINKRLSKSSATLWNSPSR

SEQ ID NO: 49253 - protein, 140 aa, Homo sapiens
  Payload ID: 9855
  Gene Symbol: MAP7D1
  Gene Name: MAP7 domain containing 1
  ENSP ID: ENSP00000435126
MSALVPDTPPDTPPAMKNATSSKQLPLEPESPSGQVGPRPAPPQEESPSSEAKSRGPTPPAMGPRDARPPRRSSQPSPTAVPASDSPPTKQEVKKAGERHKLAKERREERAKYLAAKKAVWLEKEEKAKALREKQLQERR

SEQ ID NO: 49254 - protein, 248 aa, Homo sapiens
  Payload ID: 9855
  Gene Symbol: MAP7D1
  Gene Name: MAP7 domain containing 1
  ENSP ID: ENSP00000437046
  MOD_RES (1)..(1): Any amino acid
XDKERENEKEKSALARERSLKKRQSLPASPRARLSASTASELSPKSKARPSSPSTSWHRPASPCPSPGPGHTLPPKPPSPRGTTASPKGRVRRKEEAKESPSAAGPEDKSQSKRRASNEKESAAPASPAPSPAPSPTPAPPQKEQPPAETPTAPAPPVTPSKPMAGTTDREEATRLLAEKRRQAREQREREEQERRLQAERDKRMREEQLAREAEARAEREAEARRREEQEAREKAQAEQEEQERLQK

SEQ ID NO: 49255 - protein, 773 aa, Homo sapiens
  Payload ID: 9856
  Gene Symbol: MAP7D2
  Gene Name: MAP7 domain containing 2
  Uniprot ID: Q96T17
  ENSP ID: ENSP00000368964
MERGGGGSGTGSRPEGTARGTSLPGKIAEPGAVRTSQPNYRPQGMEGFLKSDERQRLAKERREEREKCLAAREQQILEKQKRARLQYEKQMEERWRKLEEQRQREDQKRAAVEEKRKQKLREEEERLEAMMRRSLERTQQLELKKKYSWGAPLAIGPGGHDACDKLSTSTMSLPKPTEPPMNKRLSSSTVAISYSPDRAHHMHLSPMEAILVSRLLTPTQSSLARSRASVMLSGQANDSVFHVCPRLAPLGPLNPSYKSSPTRNIEKKKATSTSTSGAGDVGKEALSGGEASLVEKVKRGQRTATSLPVVNFGSPLRRCEFSGGIPKRPSSPVISKTATKAYPQSPKTTKPPYPGSPVKYRLPALSGQDMPKRKAEKEKSNKEREGTLAQQAAGPQGEEALEKHVVDKHASEKHAAAAGGKAENSAALGKPTAGTTDAGEAAKILAEKRRQARLQKEQEEQERLEKEEQDRLEREELKRKAEEERLRLEEEARKQEEERKRQEEEKKKQEGEEKRKAGEEAKRKAEEELLLKEKQEQEKQEKAMIEKQKEAAETKAREVAEQMRLEREQIMLQIEQERLERKKRIDEIMKRTRKSDVSPQVKKEDPKVGVQPAVCVEKKTKLVVPNKMEINGLNTCQEVNGVDHAAPETYPQDIFSNGLKPAGGLIHLDALDGKSNSLDDSTEEVQSMDVSPVSKEELISIPEFSPVSEMIPGVSLDQNGTGNARALQDLLDFTGPPTFPKRSSENLSLDDCNKNLIEGFNSPGQETPLNTFC

SEQ ID NO: 49256 - protein, 732 aa, Homo sapiens
  Payload ID: 9856
  Gene Symbol: MAP7D2
  Gene Name: MAP7 domain containing 2
  Uniprot ID: Q96T17
  ENSP ID: ENSP00000368972
MERGGGGSGTGSRPEGTARGTSLPGKIAEPGAVRTSQPNYRPQGMEGFLKSDERQRLAKERREEREKCLAAREQQILEKQKRARLQYEKQMEERWRKLEEQRQREDQKRAAVEEKRKQKLREEEERLEAMMRRSLERTQQLELKKKYSWGAPLAIGPGGHDACDKLSTSTMSLPKPTEPPMNKRLSSSTVAISYSPDRVFHVCPRLAPLGPLNPSYKSSPTRNIEKKKATSTSTSGAGDVGKEALSGGEASLVEKVKRGQRTATSLPVVNFGSPLRRCEFSGGIPKRPSSPVISKTATKAYPQSPKTTKPPYPGSPVKYRLPALSGQDMPKRKAEKEKSNKEREGTLAQQAAGPQGEEALEKHVVDKHASEKHAAAAGGKAENSAALGKPTAGTTDAGEAAKILAEKRRQARLQKEQEEQERLEKEEQDRLEREELKRKAEEERLRLEEEARKQEEERKRQEEEKKKQEGEEKRKAGEEAKRKAEEELLLKEKQEQEKQEKAMIEKQKEAAETKAREVAEQMRLEREQIMLQIEQERLERKKRIDEIMKRTRKSDVSPQVKKEDPKVGVQPAVCVEKKTKLVVPNKMEINGLNTCQEVNGVDHAAPETYPQDIFSNGLKPAGGLIHLDALDGKSNSLDDSTEEVQSMDVSPVSKEELISIPEFSPVSEMIPGVSLDQNGTGNARALQDLLDFTGPPTFPKRSSENLSLDDCNKNLIEGFNSPGQETPLNTFC

SEQ ID NO: 49257 - protein, 687 aa, Homo sapiens
  Payload ID: 9856
  Gene Symbol: MAP7D2
  Gene Name: MAP7 domain containing 2
  Uniprot ID: Q96T17
  ENSP ID: ENSP00000388239
MERGGGGSGTGSRPEGTARGTSLPGKIAEPGAVRTSQPNYRPQGMEGFLKSDERQRLAKERREEREKCLAAREQQILEKQKRARLQYEKQMEERWRKLEEQRQREDQKRAAVEEKRKQKLREEEERLEAMMRRSLERTQQLELKKKYSWGAPLAIGPGGHDAPLGPLNPSYKSSPTRNIEKKKATSTSTSGAGDVGKEALSGGEASLVEKVKRGQRTATSLPVVNFGSPLRRCEFSGGIPKRPSSPVISKTATKAYPQSPKTTKPPYPGSPVKYRLPALSGQDMPKRKAEKEKSNKEREGTLAQQAAGPQGEEALEKHVVDKHASEKHAAAAGGKAENSAALGKPTAGTTDAGEAAKILAEKRRQARLQKEQEEQERLEKEEQDRLEREELKRKAEEERLRLEEEARKQEEERKRQEEEKKKQEGEEKRKAGEEAKRKAEEELLLKEKQEQEKQEKAMIEKQKEAAETKAREVAEQMRLEREQIMLQIEQERLERKKRIDEIMKRTRKSDVSPQVKKEDPKVGVQPAVCVEKKTKLVVPNKMEINGLNTCQEVNGVDHAAPETYPQDIFSNGLKPAGGLIHLDALDGKSNSLDDSTEEVQSMDVSPVSKEELISIPEFSPVSEMIPGVSLDQNGTGNARALQDLLDFTGPPTFPKRSSENLSLDDCNKNLIEGFNSPGQETPLNTFC

SEQ ID NO: 49258 - protein, 680 aa, Homo sapiens
  Payload ID: 9856
  Gene Symbol: MAP7D2
  Gene Name: MAP7 domain containing 2
  Uniprot ID: Q96T17
  ENSP ID: ENSP00000413301
MEGFLKSDERQRLAKERREEREKCLAAREQQILEKQKRARLQYEKQMEERWRKLEEQRQREDQKRAAVEEKRKQKLREEEERLEAMMRRSLERTQQLELKKKYSWGAPLAIGPGGHDACDKLSTSTMSLPKPTEPPMNKRLSSSTVAISYSPDRAPLGPLNPSYKSSPTRNIEKKKATSTSTSGAGDVGKEALSGGEASLVEKVKRGQRTATSLPVVNFGSPLRRCEFSGGIPKRPSSPVISKTATKAYPQSPKTTKPPYPGSPVKYRLPALSGQDMPKRKAEKEKSNKEREGTLAQQAAGPQGEEALEKHVVDKHASEKHAAAAGGKAENSAALGKPTAGTTDAGEAAKILAEKRRQARLQKEQEEQERLEKEEQDRLEREELKRKAEEERLRLEEEARKQEEERKRQEEEKKKQEGEEKRKAGEEAKRKAEEELLLKEKQEQEKQEKAMIEKQKEAAETKAREVAEQMRLEREQIMLQIEQERLERKKRIDEIMKRTRKSDVSPQVKKEDPKVGVQPAVCVEKKTKLVVPNKMEINGLNTCQEVNGVDHAAPETYPQDIFSNGLKPAGGLIHLDALDGKSNSLDDSTEEVQSMDVSPVSKEELISIPEFSPVSEMIPGVSLDQNGTGNARALQDLLDFTGPPTFPKRSSENLSLDDCNKNLIEGFNSPGQETPLNTFC

SEQ ID NO: 49259 - protein, 876 aa, Homo sapiens
  Payload ID: 9857
  Gene Symbol: MAP7D3
  Gene Name: MAP7 domain containing 3
  Uniprot ID: Q8IWC1
  ENSP ID: ENSP00000318086
MMADGAAAGAGGSPSLRELRARMVAAANEIAKERRKQDVVNRVATHSSNIRSTFKPVIDGSMLKNDIKQRLARERREEKRRQQDANKETQLLEKERKTKLQYEKQMEERQRKLKERKEKEEQRRIAAEEKRHQKDEAQKEKFTAILYRTLERRRLADDYQQKRWSWGGSAMANSESKTANKRSASTEKLEQGTSALIRQMPLSSAGLQNSVAKRKTDKERSSSLNRRDSNLHSSTDKEQAERKPRVTGVTNYVMQYVTVPLRKCTSDELRAVMFPMSTMKIPPQTKVEESPLEKVETPPKASVDAPPQVNVEVFCNTSMEASPKAGVGMAPEVSTDSFPVVSVDVSPVVSTYDSEMSMDASPELSIEALPKVDLETVPKVSIVASPEASLEAPPEVSLEALPEVSVEAAPEGSLEAPPKGSAEVAPKESVKGSPKESMEASPEAMVKASPKTSLEASMEASPKAKARDAPKKSEMDKQALIPIAKKRLSSYTECYKWSSSPENACGLPSPISTNRQIQKNCPPSPLPLISKQSPQTSFPYKIMPIQHTLSVQSASSTVKKKKETVSKTTNRCEALSQRHMIYEESGNKSTAGIMNAEAATKILTELRRLAREQREKEEEERQREEMQQRVIKKSKDMAKEAVGGQAEDHLKLKDGQQQNETKKKKGWLDQEDQEAPLQKGDAKIKAQEEADKRKKEHERIMLQNLQERLERKKRIEEIMKRTRKTDVNASKVTETSSHDIYEEAEADNEESDKDSLNEMFPSAILNGTGSPTKFKMPFNNAKKMTHKLVFLEDGTSQVRKEPKTYFNGDLKNFRQKSMKDTSIQEVVSRPSSKRMTSHTTKTRKADETNTTSRSSAQTKSEGFHDILPKSSDTFRQ

SEQ ID NO: 49260 - protein, 802 aa, Homo sapiens
  Payload ID: 9857
  Gene Symbol: MAP7D3
  Gene Name: MAP7 domain containing 3
  ENSP ID: ENSP00000359694
MMADGAAAGAGGSPSLRELRARMVAAANEIAKERRKQDVVNRVATHSSNIRSTFKPVIDGSMLKNDIKQRLARERREEKRRQQDANKETQLLEKERKTKLQYEKQMEERQRKLKERKEKEEQRRIAAEEKRHQKDEAQKEKFTAILYRTLERRRLADDYQQKRWSWGGSAMANSESKTANKRSASTEKLEQGTSALIRQMPLSSAGLQNSVAKRKTDKERSSSLNRRDSNLHSSTDKEQAERKPRVEESPLEKVETPPKASVDAPPQVNVEVFCNTSMEASPKAGVGMAPEVSTDSFPVVSVDVSPVVSTYDSEMSMDASPELSIEALPKVDLETVPKVSIVASPEASLEAPPEVSLEALPEVSVEAAPEGSLEAPPKGSAEVAPKESVKGSPKESMEASPEAMVKASPKTSLEASMEASPKAKARDAPKKSEMDKQALIPIAKKRLSSYTECYKWSSSPENACGLPSPISTNRQIQKNCPPSPLPLISKQSPQTSFPYKIMPIQHTLSVQSASSTVKKKKETVSKTTNRCEALSQRHMIYEESGNKSTAGIMNAEAATKILTELRRLAREQREKEEEERQREEMQQRVIKKSKDMAKEAVGGQAEDHLKLKDGQQQNETKKKKGWLDQEDQEAPLQKGDAKIKAQEEADKRKKEHERIMLQNLQERLERKKRIEEIMKRTRKTDVNASKVTETSSHDIYEEAEADNEESDKDSLNEMFPSAILNGTGSPTKFKMPFNNAKKMTHKLVFLEDGTSQVRKEPKTYFNGDLKNFRQKSMKDTSIQEVVSRPSSKRMTSHTTKTR

SEQ ID NO: 49261 - protein, 841 aa, Homo sapiens
  Payload ID: 9857
  Gene Symbol: MAP7D3
  Gene Name: MAP7 domain containing 3
  Uniprot ID: Q8IWC1
  ENSP ID: ENSP00000359695
MMADGAAAGAGGSPSLRELRARMVAAANEIAKERRKQDVVNRVATHSSNIRSTFKPVIDGSMLKNDIKQRLARERREEKRRQQDANKETQLLEKERKTKLQYEKQMEERQRKLKERKEKEEQRRIAAEEKRHQKDEAQKEKFTAILYRTLERRRLADDYQQKRWSWGGSAMANSESKTGKTDKERSSSLNRRDSNLHSSTDKEQAERKPRVTGVTNYVMQYVTVPLRKCTSDELRAVMFPMSTMKIPPQTKVEESPLEKVETPPKASVDAPPQVNVEVFCNTSMEASPKAGVGMAPEVSTDSFPVVSVDVSPVVSTYDSEMSMDASPELSIEALPKVDLETVPKVSIVASPEASLEAPPEVSLEALPEVSVEAAPEGSLEAPPKGSAEVAPKESVKGSPKESMEASPEAMVKASPKTSLEASMEASPKAKARDAPKKSEMDKQALIPIAKKRLSSYTECYKWSSSPENACGLPSPISTNRQIQKNCPPSPLPLISKQSPQTSFPYKIMPIQHTLSVQSASSTVKKKKETVSKTTNRCEALSQRHMIYEESGNKSTAGIMNAEAATKILTELRRLAREQREKEEEERQREEMQQRVIKKSKDMAKEAVGGQAEDHLKLKDGQQQNETKKKKGWLDQEDQEAPLQKGDAKIKAQEEADKRKKEHERIMLQNLQERLERKKRIEEIMKRTRKTDVNASKVTETSSHDIYEEAEADNEESDKDSLNEMFPSAILNGTGSPTKFKMPFNNAKKMTHKLVFLEDGTSQVRKEPKTYFNGDLKNFRQKSMKDTSIQEVVSRPSSKRMTSHTTKTRKADETNTTSRSSAQTKSEGFHDILPKSSDTFRQ

SEQ ID NO: 49262 - protein, 858 aa, Homo sapiens
  Payload ID: 9857
  Gene Symbol: MAP7D3
  Gene Name: MAP7 domain containing 3
  Uniprot ID: Q8IWC1
  ENSP ID: ENSP00000359697
MTSPRVAAANEIAKERRKQDVVNRVATHSSNIRSTFKPVIDGSMLKNDIKQRLARERREEKRRQQDANKETQLLEKERKTKLQYEKQMEERQRKLKERKEKEEQRRIAAEEKRHQKDEAQKEKFTAILYRTLERRRLADDYQQKRWSWGGSAMANSESKTANKRSASTEKLEQGTSALIRQMPLSSAGLQNSVAKRKTDKERSSSLNRRDSNLHSSTDKEQAERKPRVTGVTNYVMQYVTVPLRKCTSDELRAVMFPMSTMKIPPQTKVEESPLEKVETPPKASVDAPPQVNVEVFCNTSMEASPKAGVGMAPEVSTDSFPVVSVDVSPVVSTYDSEMSMDASPELSIEALPKVDLETVPKVSIVASPEASLEAPPEVSLEALPEVSVEAAPEGSLEAPPKGSAEVAPKESVKGSPKESMEASPEAMVKASPKTSLEASMEASPKAKARDAPKKSEMDKQALIPIAKKRLSSYTECYKWSSSPENACGLPSPISTNRQIQKNCPPSPLPLISKQSPQTSFPYKIMPIQHTLSVQSASSTVKKKKETVSKTTNRCEALSQRHMIYEESGNKSTAGIMNAEAATKILTELRRLAREQREKEEEERQREEMQQRVIKKSKDMAKEAVGGQAEDHLKLKDGQQQNETKKKKGWLDQEDQEAPLQKGDAKIKAQEEADKRKKEHERIMLQNLQERLERKKRIEEIMKRTRKTDVNASKVTETSSHDIYEEAEADNEESDKDSLNEMFPSAILNGTGSPTKFKMPFNNAKKMTHKLVFLEDGTSQVRKEPKTYFNGDLKNFRQKSMKDTSIQEVVSRPSSKRMTSHTTKTRKADETNTTSRSSAQTKSEGFHDILPKSSDTFRQ

SEQ ID NO: 49263 - protein, 1608 aa, Homo sapiens
  Payload ID: 9858
  Gene Symbol: MADD
  Gene Name: MAP-kinase activating death domain
  Uniprot ID: Q8WXG6
  ENSP ID: ENSP00000304505
MVQKKKFCPRLLDYLVIVGARHPSSDSVAQTPELLRRYPLEDHTEFPLPPDVVFFCQPEGCLSVRQRRMSLRDDTSFVFTLTDKDTGVTRYGICVNFYRSFQKRISKEKGEGGAGSRGKEGTHATCASEEGGTESSESGSSLQPLSADSTPDVNQSPRGKRRAKAGSRSRNSTLTSLCVLSHYPFFSTFRECLYTLKRLVDCCSERLLGKKLGIPRGVQRDTMWRIFTGSLLVEEKSSALLHDLREIEAWIYRLLRSPVPVSGQKRVDIEVLPQELQPALTFALPDPSRFTLVDFPLHLPLELLGVDACLQVLTCILLEHKVVLQSRDYNALSMSVMAFVAMIYPLEYMFPVIPLLPTCMASAEQLLLAPTPYIIGVPASFFLYKLDFKMPDDVWLVDLDSNRVIAPTNAEVLPILPEPESLELKKHLKQALASMSLNTQPILNLEKFHEGQEIPLLLGRPSNDLQSTPSTEFNPLIYGNDVDSVDVATRVAMVRFFNSANVLQGFQMHTRTLRLFPRPVVAFQAGSFLASRPRQTPFAEKLARTQAVEYFGEWILNPTNYAFQRIHNNMFDPALIGDKPKWYAHQLQPIHYRVYDSNSQLAEALSVPPERDSDSEPTDDSGSDSMDYDDSSSSYSSLGDFVSEMMKCDINGDTPNVDPLTHAALGDASEVEIDELQNQKEAEEPGPDSENSQENPPLRSSSSTTASSSPSTVIHGANSEPADSTEMDDKAAVGVSKPLPSVPPSIGKSNVDRRQAEIGEGSVRRRIYDNPYFEPQYGFPPEEDEDEQGESYTPRFSQHVSGNRAQKLLRPNSLRLASDSDAESDSRASSPNSTVSNTSTEGFGGIMSFASSLYRNHSTSFSLSNLTLPTKGAREKATPFPSLKVFGLNTLMEIVTEAGPGSGEGNRRALVDQKSSVIKHSPTVKREPPSPQGRSSNSSENQQFLKEVVHSVLDGQGVGWLNMKKVRRLLESEQLRVFVLSKLNRMVQSEDDARQDIIPDVEISRKVYKGMLDLLKCTVLSLEQSYAHAGLGGMASIFGLLEIAQTHYYSKEPDKRKRSPTESVNTPVGKDPGLAGRGDPKAMAQLRVPQLGPRAPSATGKGPKELDTRSLKEENFIASIGPEVIKPVFDLGETEEKKSQISADSGVSLTSSSQRTDQDSVIGVSPAVMIRSSSQDSEVSTVVSNSSGETLGADSDLSSNAGDGPGGEGSVHLASSRGTLSDSEIETNSATSTIFGKAHSLKPSIKEKLAGSPIRTSEDVSQRVYLYEGLLGKERSTLWDQMQFWEDAFLDAVMLEREGMGMDQGPQEMIDRYLSLGEHDRKRLEDDEDRLLATLLHNLISYMLLMKVNKNDIRKKVRRLMGKSHIGLVYSQQINEVLDQLANLNGRDLSIWSSGSRHMKKQTFVVHAGTDTNGDIFFMEVCDDCVVLRSNIGTVYERWWYEKLINMTYCPKTKVLCLWRRNGSETQLNKFYTKKCRELYYCVKDSMERAAARQQSIKPGPELGGEFPVQDLKTGEGGLLQVTLEGINLKFMHNQVFIELNHIKKCNTVRGVFVLEEFVPEIKEVVSHKYKTPMAHEICYSVLCLFSYVAAVHSSEEDLRTPPRPVSS

SEQ ID NO: 49264 - protein, 1647 aa, Homo sapiens
  Payload ID: 9858
  Gene Symbol: MADD
  Gene Name: MAP-kinase activating death domain
  Uniprot ID: Q8WXG6
  ENSP ID: ENSP00000310933
MVQKKKFCPRLLDYLVIVGARHPSSDSVAQTPELLRRYPLEDHTEFPLPPDVVFFCQPEGCLSVRQRRMSLRDDTSFVFTLTDKDTGVTRYGICVNFYRSFQKRISKEKGEGGAGSRGKEGTHATCASEEGGTESSESGSSLQPLSADSTPDVNQSPRGKRRAKAGSRSRNSTLTSLCVLSHYPFFSTFRECLYTLKRLVDCCSERLLGKKLGIPRGVQRDTMWRIFTGSLLVEEKSSALLHDLREIEAWIYRLLRSPVPVSGQKRVDIEVLPQELQPALTFALPDPSRFTLVDFPLHLPLELLGVDACLQVLTCILLEHKVVLQSRDYNALSMSVMAFVAMIYPLEYMFPVIPLLPTCMASAEQLLLAPTPYIIGVPASFFLYKLDFKMPDDVWLVDLDSNRVIAPTNAEVLPILPEPESLELKKHLKQALASMSLNTQPILNLEKFHEGQEIPLLLGRPSNDLQSTPSTEFNPLIYGNDVDSVDVATRVAMVRFFNSANVLQGFQMHTRTLRLFPRPVVAFQAGSFLASRPRQTPFAEKLARTQAVEYFGEWILNPTNYAFQRIHNNMFDPALIGDKPKWYAHQLQPIHYRVYDSNSQLAEALSVPPERDSDSEPTDDSGSDSMDYDDSSSSYSSLGDFVSEMMKCDINGDTPNVDPLTHAALGDASEVEIDELQNQKEAEEPGPDSENSQENPPLRSSSSTTASSSPSTVIHGANSEPADSTEMDDKAAVGVSKPLPSVPPSIGKSNVDRRQAEIGEGSVRRRIYDNPYFEPQYGFPPEEDEDEQGESYTPRFSQHVSGNRAQKLLRPNSLRLASDSDAESDSRASSPNSTVSNTSTEGFGGIMSFASSLYRNHSTSFSLSNLTLPTKGAREKATPFPSLKVFGLNTLMEIVTEAGPGSGEGNRRALVDQKSSVIKHSPTVKREPPSPQGRSSNSSENQQFLKEVVHSVLDGQGVGWLNMKKVRRLLESEQLRVFVLSKLNRMVQSEDDARQDIIPDVEISRKVYKGMLDLLKCTVLSLEQSYAHAGLGGMASIFGLLEIAQTHYYSKEPDKRKRSPTESVNTPVGKDPGLAGRGDPKAMAQLRVPQLGPRAPSATGKGPKELDTRSLKEENFIASIELWNKHQEVKKQKALEKQRPEVIKPVFDLGETEEKKSQISADSGVSLTSSSQRTDQDSVIGVSPAVMIRSSSQDSEVSTVVSNSSGETLGADSDLSSNAGDGPGGEGSVHLASSRGTLSDSEIETNSATSTIFGKAHSLKPSIKEKLAGSPIRTSEDVSQRVYLYEGLLGRDKGSMWDQLEDAAMETFSISKERSTLWDQMQFWEDAFLDAVMLEREGMGMDQGPQEMIDRYLSLGEHDRKRLEDDEDRLLATLLHNLISYMLLMKVNKNDIRKKVRRLMGKSHIGLVYSQQINEVLDQLANLNGRDLSIWSSGSRHMKKQTFVVHAGTDTNGDIFFMEVCDDCVVLRSNIGTVYERWWYEKLINMTYCPKTKVLCLWRRNGSETQLNKFYTKKCRELYYCVKDSMERAAARQQSIKPGPELGGEFPVQDLKTGEGGLLQVTLEGINLKFMHNQVFIELNHIKKCNTVRGVFVLEEFVPEIKEVVSHKYKTPMAHEICYSVLCLFSYVAAVHSSEEDLRTPPRPVSS

SEQ ID NO: 49265 - protein, 1588 aa, Homo sapiens
  Payload ID: 9858
  Gene Symbol: MADD
  Gene Name: MAP-kinase activating death domain
  ENSP ID: ENSP00000343902
MVQKKKFCPRLLDYLVIVGARHPSSDSVAQTPELLRRYPLEDHTEFPLPPDVVFFCQPEGCLSVRQRRMSLRDDTSFVFTLTDKDTGVTRYGICVNFYRSFQKRISKEKGEGGAGSRGKEGTHATCASEEGGTESSESGSSLQPLSADSTPDVNQSPRGKRRAKAGSRSRNSTLTSLCVLSHYPFFSTFRECLYTLKRLVDCCSERLLGKKLGIPRGVQRDTMWRIFTGSLLVEEKSSALLHDLREIEAWIYRLLRSPVPVSGQKRVDIEVLPQELQPALTFALPDPSRFTLVDFPLHLPLELLGVDACLQVLTCILLEHKVVLQSRDYNALSMSVMAFVAMIYPLEYMFPVIPLLPTCMASAEQLLLAPTPYIIGVPASFFLYKLDFKMPDDVWLVDLDSNRVIAPTNAEVLPILPEPESLELKKHLKQALASMSLNTQPILNLEKFHEGQEIPLLLGRPSNDLQSTPSTEFNPLIYGNDVDSVDVATRVAMVRFFNSANVLQGFQMHTRTLRLFPRPVVAFQAGSFLASRPRQTPFAEKLARTQAVEYFGEWILNPTNYAFQRIHNNMFDPALIGDKPKWYAHQLQPIHYRVYDSNSQLAEALSVPPERDSDSEPTDDSGSDSMDYDDSSSSYSSLGDFVSEMMKCDINGDTPNVDPLTHAALGDASEVEIDELQNQKEAEEPGPDSENSQENPPLRSSSSTTASSSPSTVIHGANSEPADSTEMDDKAAVGVSKPLPSVPPSIGKSNVDRRQAEIGEGSVRRRIYDNPYFEPQYGFPPEEDEDEQGESYTPRFSQHVSGNRAQKLLRPNSLRLASDSDAESDSRASSPNSTVSNTSTEGFGGIMSFASSLYRNHSTSFSLSNLTLPTKGAREKATPFPSLKGNRRALVDQKSSVIKHSPTVKREPPSPQGRSSNSSENQQFLKEVVHSVLDGQGVGWLNMKKVRRLLESEQLRVFVLSKLNRMVQSEDDARQDIIPDVEISRKVYKGMLDLLKCTVLSLEQSYAHAGLGGMASIFGLLEIAQTHYYSKEPDKRKRSPTESVNTPVGKDPGLAGRGDPKAMAQLRVPQLGPRAPSATGKGPKELDTRSLKEENFIASIGPEVIKPVFDLGETEEKKSQISADSGVSLTSSSQRTDQDSVIGVSPAVMIRSSSQDSEVSTVVSNSSGETLGADSDLSSNAGDGPGGEGSVHLASSRGTLSDSEIETNSATSTIFGKAHSLKPSIKEKLAGSPIRTSEDVSQRVYLYEGLLGKERSTLWDQMQFWEDAFLDAVMLEREGMGMDQGPQEMIDRYLSLGEHDRKRLEDDEDRLLATLLHNLISYMLLMKVNKNDIRKKVRRLMGKSHIGLVYSQQINEVLDQLANLNGRDLSIWSSGSRHMKKQTFVVHAGTDTNGDIFFMEVCDDCVVLRSNIGTVYERWWYEKLINMTYCPKTKVLCLWRRNGSETQLNKFYTKKCRELYYCVKDSMERAAARQQSIKPGPELGGEFPVQDLKTGEGGLLQVTLEGINLKFMHNQVFIELNHIKKCNTVRGVFVLEEFVPEIKEVVSHKYKTPMAHEICYSVLCLFSYVAAVHSSEEDLRTPPRPVSS

SEQ ID NO: 49266 - protein, 1581 aa, Homo sapiens
  Payload ID: 9858
  Gene Symbol: MADD
  Gene Name: MAP-kinase activating death domain
  Uniprot ID: Q8WXG6
  ENSP ID: ENSP00000378745
MVQKKKFCPRLLDYLVIVGARHPSSDSVAQTPELLRRYPLEDHTEFPLPPDVVFFCQPEGCLSVRQRRMSLRDDTSFVFTLTDKDTGVTRYGICVNFYRSFQKRISKEKGEGGAGSRGKEGTHATCASEEGGTESSESGSSLQPLSADSTPDVNQSPRGKRRAKAGSRSRNSTLTSLCVLSHYPFFSTFRECLYTLKRLVDCCSERLLGKKLGIPRGVQRDTMWRIFTGSLLVEEKSSALLHDLREIEAWIYRLLRSPVPVSGQKRVDIEVLPQELQPALTFALPDPSRFTLVDFPLHLPLELLGVDACLQVLTCILLEHKVVLQSRDYNALSMSVMAFVAMIYPLEYMFPVIPLLPTCMASAEQLLLAPTPYIIGVPASFFLYKLDFKMPDDVWLVDLDSNRVIAPTNAEVLPILPEPESLELKKHLKQALASMSLNTQPILNLEKFHEGQEIPLLLGRPSNDLQSTPSTEFNPLIYGNDVDSVDVATRVAMVRFFNSANVLQGFQMHTRTLRLFPRPVVAFQAGSFLASRPRQTPFAEKLARTQAVEYFGEWILNPTNYAFQRIHNNMFDPALIGDKPKWYAHQLQPIHYRVYDSNSQLAEALSVPPERDSDSEPTDDSGSDSMDYDDSSSSYSSLGDFVSEMMKCDINGDTPNVDPLTHAALGDASEVEIDELQNQKEAEEPGPDSENSQENPPLRSSSSTTASSSPSTVIHGANSEPADSTEMDDKAAVGVSKPLPSVPPSIGKSNVDRRQAEIGEGSVRRRIYDNPYFEPQYGFPPEEDEDEQGESYTPRFSQHVSGNRAQKLLRPNSLRLASDSDAESDSRASSPNSTVSNTSTEGFGGIMSFASSLYRNHSTSFSLSNLTLPTKGAREKATPFPSLKVFGLNTLMEIVTEAGPGSGEGNRRALVDQKSSVIKHSPTVKREPPSPQGRSSNSSENQQFLKEVVHSVLDGQGVGWLNMKKVRRLLESEQLRVFVLSKLNRMVQSEDDARQDIIPDVEISRKVYKGMLDLLKCTVLSLEQSYAHAGLGGMASIFGLLEIAQTHYYSKEPDKRKRSPTESVNTPVGKDPGLAGRGDPKAMAQLRVPQLGPRAPSATGKGPKELDTRSLKEENFIASIELWNKHQEVKKQKALEKQRPEVIKPVFDLGETEEKKSQISADSGVSLTSSSQRTDQDSVIGVSPAVMIRSSSQDSEVSTVVSNSSGETLGADSDLSSNAGDGPGGEGSVHLASSRGTLSDSEIETNSATSTIFGKAHSLKPSIKEKLAGSPIRTSEDVSQRVYLYEGLLGRDKGSMWDQLEDAAMETFSISKERSTLWDQMQFWEDAFLDAVMLEREGMGMDQGPQEMIDRYLSLGEHDRKRLEDDEDRLLATLLHNLISYMLLMKVNKNDIRKKVRRLMGKSHIGLVYSQQINEVLDQLANLNGRDLSIWSSGSRHMKKQTFVVHAGTDTNGDIFFMEVCDDCVVLRSNIGTVYERWWYEKLINMTYCPKTKVLCLWRRNGSETQLNKFYTKKCRELYYCVKDSMERAAARQQSIKPGPELGGEFPVQDLKTGEGGLLQVTLEGINLKFMHNQFLKLKKW

SEQ ID NO: 49267 - protein, 1541 aa, Homo sapiens
  Payload ID: 9858
  Gene Symbol: MADD
  Gene Name: MAP-kinase activating death domain
  Uniprot ID: Q8WXG6
  ENSP ID: ENSP00000378753
MVQKKKFCPRLLDYLVIVGARHPSSDSVAQTPELLRRYPLEDHTEFPLPPDVVFFCQPEGCLSVRQRRMSLRDDTSFVFTLTDKDTGVTRYGICVNFYRSFQKRISKEKGEGGAGSRGKEGTHATCASEEGGTESSESGSSLQPLSADSTPDVNQSPRGKRRAKAGSRSRNSTLTSLCVLSHYPFFSTFRECLYTLKRLVDCCSERLLGKKLGIPRGVQRDTMWRIFTGSLLVEEKSSALLHDLREIEAWIYRLLRSPVPVSGQKRVDIEVLPQELQPALTFALPDPSRFTLVDFPLHLPLELLGVDACLQVLTCILLEHKVVLQSRDYNALSMSVMAFVAMIYPLEYMFPVIPLLPTCMASAEQLLLAPTPYIIGVPASFFLYKLDFKMPDDVWLVDLDSNRVIAPTNAEVLPILPEPESLELKKHLKQALASMSLNTQPILNLEKFHEGQEIPLLLGRPSNDLQSTPSTEFNPLIYGNDVDSVDVATRVAMVRFFNSANVLQGFQMHTRTLRLFPRPVVAFQAGSFLASRPRQTPFAEKLARTQAVEYFGEWILNPTNYAFQRIHNNMFDPALIGDKPKWYAHQLQPIHYRVYDSNSQLAEALSVPPERDSDSEPTDDSGSDSMDYDDSSSSYSSLGDFVSEMMKCDINGDTPNVDPLTHAALGDASEVEIDELQNQKEAEEPGPDSENSQENPPLRSSSSTTASSSPSTVIHGANSEPADSTEMDDKAAVGVSKPLPSVPPSIGKSNVDRRQAEIGEGAQKLLRPNSLRLASDSDAESDSRASSPNSTVSNTSTEGFGGIMSFASSLYRNHSTSFSLSNLTLPTKGAREKATPFPSLKGNRRALVDQKSSVIKHSPTVKREPPSPQGRSSNSSENQQFLKEVVHSVLDGQGVGWLNMKKVRRLLESEQLRVFVLSKLNRMVQSEDDARQDIIPDVEISRKVYKGMLDLLKCTVLSLEQSYAHAGLGGMASIFGLLEIAQTHYYSKEPDKRKRSPTESVNTPVGKDPGLAGRGDPKAMAQLRVPQLGPRAPSATGKGPKELDTRSLKEENFIASIGPEVIKPVFDLGETEEKKSQISADSGVSLTSSSQRTDQDSVIGVSPAVMIRSSSQDSEVSNSSGETLGADSDLSSNAGDGPGGEGSVHLASSRGTLSDSEIETNSATSTIFGKAHSLKPSIKEKLAGSPIRTSEDVSQRVYLYEGLLGKERSTLWDQMQFWEDAFLDAVMLEREGMGMDQGPQEMIDRYLSLGEHDRKRLEDDEDRLLATLLHNLISYMLLMKVNKNDIRKKVRRLMGKSHIGLVYSQQINEVLDQLANLNGRDLSIWSSGSRHMKKQTFVVHAGTDTNGDIFFMEVCDDCVVLRSNIGTVYERWWYEKLINMTYCPKTKVLCLWRRNGSETQLNKFYTKKCRELYYCVKDSMERAAARQQSIKPGPELGGEFPVQDLKTGEGGLLQVTLEGINLKFMHNQVFIELNHIKKCNTVRGVFVLEEFVPEIKEVVSHKYKTPMAHEICYSVLCLFSYVAAVHSSEEDLRTPPRPVSS

SEQ ID NO: 49268 - protein, 1565 aa, Homo sapiens
  Payload ID: 9858
  Gene Symbol: MADD
  Gene Name: MAP-kinase activating death domain
  Uniprot ID: Q8WXG6
  ENSP ID: ENSP00000384204
MVQKKKFCPRLLDYLVIVGARHPSSDSVAQTPELLRRYPLEDHTEFPLPPDVVFFCQPEGCLSVRQRRMSLRDDTSFVFTLTDKDTGVTRYGICVNFYRSFQKRISKEKGEGGAGSRGKEGTHATCASEEGGTESSESGSSLQPLSADSTPDVNQSPRGKRRAKAGSRSRNSTLTSLCVLSHYPFFSTFRECLYTLKRLVDCCSERLLGKKLGIPRGVQRDTMWRIFTGSLLVEEKSSALLHDLREIEAWIYRLLRSPVPVSGQKRVDIEVLPQELQPALTFALPDPSRFTLVDFPLHLPLELLGVDACLQVLTCILLEHKVVLQSRDYNALSMSVMAFVAMIYPLEYMFPVIPLLPTCMASAEQLLLAPTPYIIGVPASFFLYKLDFKMPDDVWLVDLDSNRVIAPTNAEVLPILPEPESLELKKHLKQALASMSLNTQPILNLEKFHEGQEIPLLLGRPSNDLQSTPSTEFNPLIYGNDVDSVDVATRVAMVRFFNSANVLQGFQMHTRTLRLFPRPVVAFQAGSFLASRPRQTPFAEKLARTQAVEYFGEWILNPTNYAFQRIHNNMFDPALIGDKPKWYAHQLQPIHYRVYDSNSQLAEALSVPPERDSDSEPTDDSGSDSMDYDDSSSSYSSLGDFVSEMMKCDINGDTPNVDPLTHAALGDASEVEIDELQNQKEAEEPGPDSENSQENPPLRSSSSTTASSSPSTVIHGANSEPADSTEMDDKAAVGVSKPLPSVPPSIGKSNVDRRQAEIGEGAQKLLRPNSLRLASDSDAESDSRASSPNSTVSNTSTEGFGGIMSFASSLYRNHSTSFSLSNLTLPTKGAREKATPFPSLKVFGLNTLMEIVTEAGPGSGEGNRRALVDQKSSVIKHSPTVKREPPSPQGRSSNSSENQQFLKEVVHSVLDGQGVGWLNMKKVRRLLESEQLRVFVLSKLNRMVQSEDDARQDIIPDVEISRKVYKGMLDLLKCTVLSLEQSYAHAGLGGMASIFGLLEIAQTHYYSKEPDKRKRSPTESVNTPVGKDPGLAGRGDPKAMAQLRVPQLGPRAPSATGKGPKELDTRSLKEENFIASIGPEVIKPVFDLGETEEKKSQISADSGVSLTSSSQRTDQDSVIGVSPAVMIRSSSQDSEVSTVVSNSSGETLGADSDLSSNAGDGPGGEGSVHLASSRGTLSDSEIETNSATSTIFGKAHSLKPSIKEKLAGSPIRTSEDVSQRVYLYEGLLGKERSTLWDQMQFWEDAFLDAVMLEREGMGMDQGPQEMIDRYLSLGEHDRKRLEDDEDRLLATLLHNLISYMLLMKVNKNDIRKKVRRLMGKSHIGLVYSQQINEVLDQLANLNGRDLSIWSSGSRHMKKQTFVVHAGTDTNGDIFFMEVCDDCVVLRSNIGTVYERWWYEKLINMTYCPKTKVLCLWRRNGSETQLNKFYTKKCRELYYCVKDSMERAAARQQSIKPGPELGGEFPVQDLKTGEGGLLQVTLEGINLKFMHNQVFIELNHIKKCNTVRGVFVLEEFVPEIKEVVSHKYKTPMAHEICYSVLCLFSYVAAVHSSEEDLRTPPRPVSS

SEQ ID NO: 49269 - protein, 1587 aa, Homo sapiens
  Payload ID: 9858
  Gene Symbol: MADD
  Gene Name: MAP-kinase activating death domain
  Uniprot ID: Q8WXG6
  ENSP ID: ENSP00000384287
MVQKKKFCPRLLDYLVIVGARHPSSDSVAQTPELLRRYPLEDHTEFPLPPDVVFFCQPEGCLSVRQRRMSLRDDTSFVFTLTDKDTGVTRYGICVNFYRSFQKRISKEKGEGGAGSRGKEGTHATCASEEGGTESSESGSSLQPLSADSTPDVNQSPRGKRRAKAGSRSRNSTLTSLCVLSHYPFFSTFRECLYTLKRLVDCCSERLLGKKLGIPRGVQRDTMWRIFTGSLLVEEKSSALLHDLREIEAWIYRLLRSPVPVSGQKRVDIEVLPQELQPALTFALPDPSRFTLVDFPLHLPLELLGVDACLQVLTCILLEHKVVLQSRDYNALSMSVMAFVAMIYPLEYMFPVIPLLPTCMASAEQLLLAPTPYIIGVPASFFLYKLDFKMPDDVWLVDLDSNRVIAPTNAEVLPILPEPESLELKKHLKQALASMSLNTQPILNLEKFHEGQEIPLLLGRPSNDLQSTPSTEFNPLIYGNDVDSVDVATRVAMVRFFNSANVLQGFQMHTRTLRLFPRPVVAFQAGSFLASRPRQTPFAEKLARTQAVEYFGEWILNPTNYAFQRIHNNMFDPALIGDKPKWYAHQLQPIHYRVYDSNSQLAEALSVPPERDSDSEPTDDSGSDSMDYDDSSSSYSSLGDFVSEMMKCDINGDTPNVDPLTHAALGDASEVEIDELQNQKEAEEPGPDSENSQENPPLRSSSSTTASSSPSTVIHGANSEPADSTEMDDKAAVGVSKPLPSVPPSIGKSNVDRRQAEIGEGSVRRRIYDNPYFEPQYGFPPEEDEDEQGESYTPRFSQHVSGNRAQKLLRPNSLRLASDSDAESDSRASSPNSTVSNTSTEGFGGIMSFASSLYRNHSTSFSLSNLTLPTKGAREKATPFPSLKGNRRALVDQKSSVIKHSPTVKREPPSPQGRSSNSSENQQFLKEVVHSVLDGQGVGWLNMKKVRRLLESEQLRVFVLSKLNRMVQSEDDARQDIIPDVEISRKVYKGMLDLLKCTVLSLEQSYAHAGLGGMASIFGLLEIAQTHYYSKEPDKRKRSPTESVNTPVGKDPGLAGRGDPKAMAQLRVPQLGPRAPSATGKGPKELDTRSLKEENFIASIGPEVIKPVFDLGETEEKKSQISADSGVSLTSSSQRTDQDSVIGVSPAVMIRSSSQDSEVSTVSNSSGETLGADSDLSSNAGDGPGGEGSVHLASSRGTLSDSEIETNSATSTIFGKAHSLKPSIKEKLAGSPIRTSEDVSQRVYLYEGLLGKERSTLWDQMQFWEDAFLDAVMLEREGMGMDQGPQEMIDRYLSLGEHDRKRLEDDEDRLLATLLHNLISYMLLMKVNKNDIRKKVRRLMGKSHIGLVYSQQINEVLDQLANLNGRDLSIWSSGSRHMKKQTFVVHAGTDTNGDIFFMEVCDDCVVLRSNIGTVYERWWYEKLINMTYCPKTKVLCLWRRNGSETQLNKFYTKKCRELYYCVKDSMERAAARQQSIKPGPELGGEFPVQDLKTGEGGLLQVTLEGINLKFMHNQVFIELNHIKKCNTVRGVFVLEEFVPEIKEVVSHKYKTPMAHEICYSVLCLFSYVAAVHSSEEDLRTPPRPVSS

SEQ ID NO: 49270 - protein, 1479 aa, Homo sapiens
  Payload ID: 9858
  Gene Symbol: MADD
  Gene Name: MAP-kinase activating death domain
  Uniprot ID: Q8WXG6
  ENSP ID: ENSP00000384435
MVQKKKFCPRLLDYLVIVGARHPSSDSVAQTPELLRRYPLEDHTEFPLPPDVVFFCQPEGCLSVRQRRMSLRDDTSFVFTLTDKDTGVTRYGICVNFYRSFQKRISKEKGEGGAGSRGKEGTHATCASEEGGTESSESGSSLQPLSADSTPDVNQSPRGKRRAKAGSRSRNSTLTSLCVLSHYPFFSTFRECLYTLKRLVDCCSERLLGKKLGIPRGVQRDTMWRIFTGSLLVEEKSSALLHDLREIEAWIYRLLRSPVPVSGQKRVDIEVLPQELQPALTFALPDPSRFTLVDFPLHLPLELLGVDACLQVLTCILLEHKVVLQSRDYNALSMSVMAFVAMIYPLEYMFPVIPLLPTCMASAEQLLLAPTPYIIGVPASFFLYKLDFKMPDDVWLVDLDSNRVIAPTNAEVLPILPEPESLELKKHLKQALASMSLNTQPILNLEKFHEGQEIPLLLGRPSNDLQSTPSTEFNPLIYGNDVDSVDVATRVAMVRFFNSANVLQGFQMHTRTLRLFPRPVVAFQAGSFLASRPRQTPFAEKLARTQAVEYFGEWILNPTNYAFQRIHNNMFDPALIGDKPKWYAHQLQPIHYRVYDSNSQLAEALSVPPERDSDSEPTDDSGSDSMDYDDSSSSYSSLGDFVSEMMKCDINGDTPNVDPLTHAALGDASEVEIDELQNQKEAEEPGPDSENSQENPPLRSSSSTTASSSPSTVIHGANSEPADSTEMDDKAAVGVSKPLPSVPPSIGKSNVDRRQAEIGEGAQKLLRPNSLRLASDSDAESDSRASSPNSTVSNTSTEGFGGIMSFASSLYRNHSTSFSLSNLTLPTKGAREKATPFPSLKGNRRALVDQKSSVIKHSPTVKREPPSPQGRSSNSSENQQFLKEVVHSVLDGQGVGWLNMKKVRRLLESEQLRVFVLSKLNRMVQSEDDARQDIIPDVEISRKVYKGMLDLLKCTVLSLEQSYAHAGLGGMASIFGLLEIAQTHYYSKEPDKRKRSPTESVNTPVGKDPGLAGRGDPKAMAQLRVPQLGPRAPSATGKGPKELDTRSLKEENFIASIGPEVIKPVFDLGETEEKKSQISADSGVSLTSSSQRTDQDSVIGVSPAVMIRSSSQDSEVSTVVSNSSGETLGADSDLSSNAGDGPGGEGSVHLASSRGTLSDSEIETNSATSTIFGKAHSLKPSIKEKLAGSPIRTSEDVSQRVYLYEGLLGKERSTLWDQMQFWEDAFLDAVMLEREGMGMDQGPQEMIDRYLSLGEHDRKRLEDDEDRLLATLLHNLISYMLLMKVNKNDIRKKVRRLMGKSHIGLVYSQQINEVLDQLANLNGRDLSIWSSGSRHMKKQTFVVHAGTDTNGDIFFMEVCDDCVVLRSNIGTVYERWWYEKLINMTYCPKTKVLCLWRRNGSETQLNKFYTKKCRELYYCVKDSMERAAARQQSIKPGPELGGEFPVQDLKTGEGGLLQVTLEGINLKFMHNQFLKLKKW

SEQ ID NO: 49271 - protein, 439 aa, Homo sapiens
  Payload ID: 9858
  Gene Symbol: MADD
  Gene Name: MAP-kinase activating death domain
  ENSP ID: ENSP00000384483
MIRSSSQDSEVSNSSGETLGADSDLSSNAGDGPGGEGSVHLASSRGTLSDSEIETNSATSTIFGKAHSLKPSIKEKLAGSPIRTSEDVSQRVYLYEGLLGRDKGSMWDQLEDAAMETFSISKERSTLWDQMQFWEDAFLDAVMLEREGMGMDQGPQEMIDRYLSLGEHDRKRLEDDEDRLLATLLHNLISYMLLMKVNKNDIRKKVRRLMGKSHIGLVYSQQINEVLDQLANLNGRDLSIWSSGSRHMKKQTFVVHAGTDTNGDIFFMEVCDDCVVLRSNIGTVYERWWYEKLINMTYCPKTKVLCLWRRNGSETQLNKFYTKKCRELYYCVKDSMERAAARQQSIKPGPELGGEFPVQDLKTGEGGLLQVTLEGINLKFMHNQVGASGSTRLPVVPSVRRTNVQAPSTSPASMREGPLELEGELEQLDPGKKPQGRAQ

SEQ ID NO: 49272 - protein, 1545 aa, Homo sapiens
  Payload ID: 9858
  Gene Symbol: MADD
  Gene Name: MAP-kinase activating death domain
  Uniprot ID: Q8WXG6
  ENSP ID: ENSP00000385585
MVQKKKFCPRLLDYLVIVGARHPSSDSVAQTPELLRRYPLEDHTEFPLPPDVVFFCQPEGCLSVRQRRMSLRDDTSFVFTLTDKDTGVTRYGICVNFYRSFQKRISKEKGEGGAGSRGKEGTHATCASEEGGTESSESGSSLQPLSADSTPDVNQSPRGKRRAKAGSRSRNSTLTSLCVLSHYPFFSTFRECLYTLKRLVDCCSERLLGKKLGIPRGVQRDTMWRIFTGSLLVEEKSSALLHDLREIEAWIYRLLRSPVPVSGQKRVDIEVLPQELQPALTFALPDPSRFTLVDFPLHLPLELLGVDACLQVLTCILLEHKVVLQSRDYNALSMSVMAFVAMIYPLEYMFPVIPLLPTCMASAEQLLLAPTPYIIGVPASFFLYKLDFKMPDDVWLVDLDSNRVIAPTNAEVLPILPEPESLELKKHLKQALASMSLNTQPILNLEKFHEGQEIPLLLGRPSNDLQSTPSTEFNPLIYGNDVDSVDVATRVAMVRFFNSANVLQGFQMHTRTLRLFPRPVVAFQAGSFLASRPRQTPFAEKLARTQAVEYFGEWILNPTNYAFQRIHNNMFDPALIGDKPKWYAHQLQPIHYRVYDSNSQLAEALSVPPERDSDSEPTDDSGSDSMDYDDSSSSYSSLGDFVSEMMKCDINGDTPNVDPLTHAALGDASEVEIDELQNQKEAEEPGPDSENSQENPPLRSSSSTTASSSPSTVIHGANSEPADSTEMDDKAAVGVSKPLPSVPPSIGKSNVDRRQAEIGEGAQKLLRPNSLRLASDSDAESDSRASSPNSTVSNTSTEGFGGIMSFASSLYRNHSTSFSLSNLTLPTKGAREKATPFPSLKGNRRALVDQKSSVIKHSPTVKREPPSPQGRSSNSSENQQFLKEVVHSVLDGQGVGWLNMKKVRRLLESEQLRVFVLSKLNRMVQSEDDARQDIIPDVEISRKVYKGMLDLLKCTVLSLEQSYAHAGLGGMASIFGLLEIAQTHYYSKEPDKRKRSPTESVNTPVGKDPGLAGRGDPKAMAQLRVPQLGPRAPSATGKGPKELDTRSLKEENFIASIGPEVIKPVFDLGETEEKKSQISADSGVSLTSSSQRTDQDSVIGVSPAVMIRSSSQDSEVSTVVSNSSGETLGADSDLSSNAGDGPGGEGSVHLASSRGTLSDSEIETNSATSTIFGKAHSLKPSIKEKLAGSPIRTSEDVSQRVYLYEGLLGKERSTLWDQMQFWEDAFLDAVMLEREGMGMDQGPQEMIDRYLSLGEHDRKRLEDDEDRLLATLLHNLISYMLLMKVNKNDIRKKVRRLMGKSHIGLVYSQQINEVLDQLANLNGRDLSIWSSGSRHMKKQTFVVHAGTDTNGDIFFMEVCDDCVVLRSNIGTVYERWWYEKLINMTYCPKTKVLCLWRRNGSETQLNKFYTKKCRELYYCVKDSMERAAARQQSIKPGPELGGEFPVQDLKTGEGGLLQVTLEGINLKFMHNQVFIELNHIKKCNTVRGVFVLEEFVPEIKEVVSHKYKTPMAHEICYSVLCLFSYVAAVHSSEEDLRTPPRPVSS

SEQ ID NO: 49273 - protein, 75 aa, Homo sapiens
  Payload ID: 9858
  Gene Symbol: MADD
  Gene Name: MAP-kinase activating death domain
  ENSP ID: ENSP00000388255
MVQKKKFCPRLLDYLVIVGARHPSSDSVAQTPELLRRYPLEDHTEFPLPPDVVFFCQPEGCLSVRQRRMSLRDDT

SEQ ID NO: 49274 - protein, 154 aa, Homo sapiens
  Payload ID: 9858
  Gene Symbol: MADD
  Gene Name: MAP-kinase activating death domain
  ENSP ID: ENSP00000398167
MWRIFTGSLLVEEKSSALLHDLREIEAWIYRLLRSPVPVSGQKRVDIEVLPQELQPALTFALPDPSRFTLVDFPLHLPLELLGVDACLQVLTCILLEHKVVLQSRDYNALSMSVMAFVAMIYPLEYMFPVIPLLPTCMASAEQLLLAPTPYIIG

SEQ ID NO: 49275 - protein, 135 aa, Homo sapiens
  Payload ID: 9858
  Gene Symbol: MADD
  Gene Name: MAP-kinase activating death domain
  ENSP ID: ENSP00000402364
MVQKKKFCPRLLDYLVIVGARHPSSDSVAQTPELLRRYPLEDHTEFPLPPDVVFFCQPEGCLSVRQRRMSLRDDTSFVFTLTDKDTGVTRYGICVNFYRSFQKRISKEKGEGGAGSRGKEGTHATCASEEGGTES

SEQ ID NO: 49276 - protein, 136 aa, Homo sapiens
  Payload ID: 9858
  Gene Symbol: MADD
  Gene Name: MAP-kinase activating death domain
  ENSP ID: ENSP00000413116
MVQKKKFCPRLLDYLVIVGARHPSSDSVAQTPELLRRYPLEDHTEFPLPPDVVFFCQPEGCLSVRQRRMSLRDDTSFVFTLTDKDTGVTRYGICVNFYRSFQKRISKEKGEGGAGSRGKEGTHATCASEEGGTESS

SEQ ID NO: 49277 - protein, 199 aa, Homo sapiens
  Payload ID: 9858
  Gene Symbol: MADD
  Gene Name: MAP-kinase activating death domain
  ENSP ID: ENSP00000489300
  MOD_RES (1)..(1): Any amino acid
XGDIFFMEVCDDCVVLRSNIGTVYERWWYEKLINMTYCPKTKVLCLWRRNGSETQLNKFYTKKCRELYYCVKDSMERAAARQQSIKPGPELGGEFPVQDLKTGEGGLLQVTLEGINLKFMHNQERKVFIELNHIKKCNTVRGVFVLEEFVPEIKEVVSHKYKTPMAHEICYSVLCLFSYVAAVHSSEEDLRTPPRPVSS

SEQ ID NO: 49278 - protein, 195 aa, Homo sapiens
  Payload ID: 9859
  Gene Symbol: MARCKSL1
  Gene Name: MARCKS-like 1
  Uniprot ID: P49006
  ENSP ID: ENSP00000362638
MGSQSSKAPRGDVTAEEAAGASPAKANGQENGHVKSNGDLSPKGEGESPPVNGTDEAAGATGDAIEPAPPSQGAEAKGEVPPKETPKKKKKFSFKKPFKLSGLSFKRNRKEGGGDSSASSPTEEEQEQGEIGACSDEGTAQEGKAAATPESQEPQAKGAEASAASEEEAGPQATEPSTPSGPESGPTPASAEQNE

SEQ ID NO: 49279 - protein, 189 aa, Homo sapiens
  Payload ID: 9860
  Gene Symbol: MZB1
  Gene Name: marginal zone B and B1 cell-specific protein
  Uniprot ID: Q8WU39
  ENSP ID: ENSP00000303920
MRLSLPLLLLLLGAWAIPGGLGDRAPLTATAPQLDDEEMYSAHMPAHLRCDACRAVAYQMWQNLAKAETKLHTSNSGGRRELSELVYTDVLDRSCSRNWQDYGVREVDQVKRLTGPGLSEGPEPSISVMVTGGPWPTRLSRTCLHYLGEFGEDQIYEAHQQGRGALEALLCGGPQGACSEKVSATREEL

SEQ ID NO: 49280 - protein, 75 aa, Homo sapiens
  Payload ID: 9860
  Gene Symbol: MZB1
  Gene Name: marginal zone B and B1 cell-specific protein
  Uniprot ID: Q8WU39
  ENSP ID: ENSP00000415420
MRLSLPLLLLLLGAWAIPGGLGDRAPLTATAPQLDDEEMYSAHMPAHLRCDACRAVAYQRLCSYPPHLPLTEQQS

SEQ ID NO: 49281 - protein, 123 aa, Homo sapiens
  Payload ID: 9860
  Gene Symbol: MZB1
  Gene Name: marginal zone B and B1 cell-specific protein
  Uniprot ID: Q8WU39
  ENSP ID: ENSP00000423205
MRLSLPLLLLLLGAWAIPGGLGDRAPLTATAPQLDDEEMYSAHMPAHLRCDACRAVAYQSLLVPDVAKSGKGRDQTSYLKLWGAAGAERVGLHGCPGPELLPELAGLRSSRSGPSETSHRPRT

SEQ ID NO: 49282 - protein, 60 aa, Homo sapiens
  Payload ID: 9860
  Gene Symbol: MZB1
  Gene Name: marginal zone B and B1 cell-specific protein
  ENSP ID: ENSP00000424481
  MOD_RES (1)..(1): Any amino acid
XSLPLLLLLLGAWAIPGGLGDRAPLTATAPQLDDEEMYSAHMPAHLRCDACRAVAYQAHP

SEQ ID NO: 49283 - protein, 76 aa, Homo sapiens
  Payload ID: 9860
  Gene Symbol: MZB1
  Gene Name: marginal zone B and B1 cell-specific protein
  ENSP ID: ENSP00000425850
MRLSLPLLLLLLGAWAIPGGLGDRAPLTATAPQLDDEEMYSAHMPAHLRCDACRAVAYQLRSSRSGPSETSHRPRT

SEQ ID NO: 49284 - protein, 2896 aa, Homo sapiens
  Payload ID: 9861
  Gene Symbol: MKI67
  Gene Name: marker of proliferation Ki-67
  Uniprot ID: P46013
  ENSP ID: ENSP00000357642
MWPTRRLVTIKRSGVDGPHFPLSLSTCLFGRGIECDIRIQLPVVSKQHCKIEIHEQEAILHNFSSTNPTQVNGSVIDEPVRLKHGDVITIIDRSFRYENESLQNGRKSTEFPRKIREQEPARRVSRSSFSSDPDESEGIPLKRRRVSFGGHLRPELFDENLPPNTPLKRGEAPTKRKSLVMHTPPVLKKIIKEQPQPSGKQESGSEIHVEVKAQSLVISPPAPSPRKTPVASDQRRRSCKTAPASSSKSQTEVPKRGGRKSGNLPSKRVSISRSQHDILQMICSKRRSGASEANLIVAKSWADVVKLGAKQTQTKVIKHGPQRSMNKRQRRPATPKKPVGEVHSQFSTGHANSPCTIIIGKAHTEKVHVPARPYRVLNNFISNQKMDFKEDLSGIAEMFKTPVKEQPQLTSTCHIAISNSENLLGKQFQGTDSGEEPLLPTSESFGGNVFFSAQNAAKQPSDKCSASPPLRRQCIRENGNVAKTPRNTYKMTSLETKTSDTETEPSKTVSTANRSGRSTEFRNIQKLPVESKSEETNTEIVECILKRGQKATLLQQRREGEMKEIERPFETYKENIELKENDEKMKAMKRSRTWGQKCAPMSDLTDLKSLPDTELMKDTARGQNLLQTQDHAKAPKSEKGKITKMPCQSLQPEPINTPTHTKQQLKASLGKVGVKEELLAVGKFTRTSGETTHTHREPAGDGKSIRTFKESPKQILDPAARVTGMKKWPRTPKEEAQSLEDLAGFKELFQTPGPSEESMTDEKTTKIACKSPPPESVDTPTSTKQWPKRSLRKADVEEEFLALRKLTPSAGKAMLTPKPAGGDEKDIKAFMGTPVQKLDLAGTLPGSKRQLQTPKEKAQALEDLAGFKELFQTPGHTEELVAAGKTTKIPCDSPQSDPVDTPTSTKQRPKRSIRKADVEGELLACRNLMPSAGKAMHTPKPSVGEEKDIIIFVGTPVQKLDLTENLTGSKRRPQTPKEEAQALEDLTGFKELFQTPGHTEEAVAAGKTTKMPCESSPPESADTPTSTRRQPKTPLEKRDVQKELSALKKLTQTSGETTHTDKVPGGEDKSINAFRETAKQKLDPAASVTGSKRHPKTKEKAQPLEDLAGLKELFQTPVCTDKPTTHEKTTKIACRSQPDPVDTPTSSKPQSKRSLRKVDVEEEFFALRKRTPSAGKAMHTPKPAVSGEKNIYAFMGTPVQKLDLTENLTGSKRRLQTPKEKAQALEDLAGFKELFQTRGHTEESMTNDKTAKVACKSSQPDPDKNPASSKRRLKTSLGKVGVKEELLAVGKLTQTSGETTHTHTEPTGDGKSMKAFMESPKQILDSAASLTGSKRQLRTPKGKSEVPEDLAGFIELFQTPSHTKESMTNEKTTKVSYRASQPDLVDTPTSSKPQPKRSLRKADTEEEFLAFRKQTPSAGKAMHTPKPAVGEEKDINTFLGTPVQKLDQPGNLPGSNRRLQTRKEKAQALEELTGFRELFQTPCTDNPTTDEKTTKKILCKSPQSDPADTPTNTKQRPKRSLKKADVEEEFLAFRKLTPSAGKAMHTPKAAVGEEKDINTFVGTPVEKLDLLGNLPGSKRRPQTPKEKAKALEDLAGFKELFQTPGHTEESMTDDKITEVSCKSPQPDPVKTPTSSKQRLKISLGKVGVKEEVLPVGKLTQTSGKTTQTHRETAGDGKSIKAFKESAKQMLDPANYGTGMERWPRTPKEEAQSLEDLAGFKELFQTPDHTEESTTDDKTTKIACKSPPPESMDTPTSTRRRPKTPLGKRDIVEELSALKQLTQTTHTDKVPGDEDKGINVFRETAKQKLDPAASVTGSKRQPRTPKGKAQPLEDLAGLKELFQTPICTDKPTTHEKTTKIACRSPQPDPVGTPTIFKPQSKRSLRKADVEEESLALRKRTPSVGKAMDTPKPAGGDEKDMKAFMGTPVQKLDLPGNLPGSKRWPQTPKEKAQALEDLAGFKELFQTPGTDKPTTDEKTTKIACKSPQPDPVDTPASTKQRPKRNLRKADVEEEFLALRKRTPSAGKAMDTPKPAVSDEKNINTFVETPVQKLDLLGNLPGSKRQPQTPKEKAEALEDLVGFKELFQTPGHTEESMTDDKITEVSCKSPQPESFKTSRSSKQRLKIPLVKVDMKEEPLAVSKLTRTSGETTQTHTEPTGDSKSIKAFKESPKQILDPAASVTGSRRQLRTRKEKARALEDLVDFKELFSAPGHTEESMTIDKNTKIPCKSPPPELTDTATSTKRCPKTRPRKEVKEELSAVERLTQTSGQSTHTHKEPASGDEGIKVLKQRAKKKPNPVEEEPSRRRPRAPKEKAQPLEDLAGFTELSETSGHTQESLTAGKATKIPCESPPLEVVDTTASTKRHLRTRVQKVQVKEEPSAVKFTQTSGETTDADKEPAGEDKGIKALKESAKQTPAPAASVTGSRRRPRAPRESAQAIEDLAGFKDPAAGHTEESMTDDKTTKIPCKSSPELEDTATSSKRRPRTRAQKVEVKEELLAVGKLTQTSGETTHTDKEPVGEGKGTKAFKQPAKRKLDAEDVIGSRRQPRAPKEKAQPLEDLASFQELSQTPGHTEELANGAADSFTSAPKQTPDSGKPLKISRRVLRAPKVEPVGDVVSTRDPVKSQSKSNTSLPPLPFKRGGGKDGSVTGTKRLRCMPAPEEIVEELPASKKQRVAPRARGKSSEPVVIMKRSLRTSAKRIEPAEELNSNDMKTNKEEHKLQDSVPENKGISLRSRRQNKTEAEQQITEVFVLAERIEINRNEKKPMKTSPEMDIQNPDDGARKPIPRDKVTENKRCLRSARQNESSQPKVAEESGGQKSAKVLMQNQKGKGEAGNSDSMCLRSRKTKSQPAASTLESKSVQRVTRSVKRCAENPKKAEDNVCVKKIRTRSHRDSEDI

SEQ ID NO: 49285 - protein, 3256 aa, Homo sapiens
  Payload ID: 9861
  Gene Symbol: MKI67
  Gene Name: marker of proliferation Ki-67
  Uniprot ID: P46013
  ENSP ID: ENSP00000357643
MWPTRRLVTIKRSGVDGPHFPLSLSTCLFGRGIECDIRIQLPVVSKQHCKIEIHEQEAILHNFSSTNPTQVNGSVIDEPVRLKHGDVITIIDRSFRYENESLQNGRKSTEFPRKIREQEPARRVSRSSFSSDPDEKAQDSKAYSKITEGKVSGNPQVHIKNVKEDSTADDSKDSVAQGTTNVHSSEHAGRNGRNAADPISGDFKEISSVKLVSRYGELKSVPTTQCLDNSKKNESPFWKLYESVKKELDVKSQKENVLQYCRKSGLQTDYATEKESADGLQGETQLLVSRKSRPKSGGSGHAVAEPASPEQELDQNKGKGRDVESVQTPSKAVGASFPLYEPAKMKTPVQYSQQQNSPQKHKNKDLYTTGRRESVNLGKSEGFKAGDKTLTPRKLSTRNRTPAKVEDAADSATKPENLSSKTRGSIPTDVEVLPTETEIHNEPFLTLWLTQVERKIQKDSLSKPEKLGTTAGQMCSGLPGLSSVDINNFGDSINESEGIPLKRRRVSFGGHLRPELFDENLPPNTPLKRGEAPTKRKSLVMHTPPVLKKIIKEQPQPSGKQESGSEIHVEVKAQSLVISPPAPSPRKTPVASDQRRRSCKTAPASSSKSQTEVPKRGGRKSGNLPSKRVSISRSQHDILQMICSKRRSGASEANLIVAKSWADVVKLGAKQTQTKVIKHGPQRSMNKRQRRPATPKKPVGEVHSQFSTGHANSPCTIIIGKAHTEKVHVPARPYRVLNNFISNQKMDFKEDLSGIAEMFKTPVKEQPQLTSTCHIAISNSENLLGKQFQGTDSGEEPLLPTSESFGGNVFFSAQNAAKQPSDKCSASPPLRRQCIRENGNVAKTPRNTYKMTSLETKTSDTETEPSKTVSTANRSGRSTEFRNIQKLPVESKSEETNTEIVECILKRGQKATLLQQRREGEMKEIERPFETYKENIELKENDEKMKAMKRSRTWGQKCAPMSDLTDLKSLPDTELMKDTARGQNLLQTQDHAKAPKSEKGKITKMPCQSLQPEPINTPTHTKQQLKASLGKVGVKEELLAVGKFTRTSGETTHTHREPAGDGKSIRTFKESPKQILDPAARVTGMKKWPRTPKEEAQSLEDLAGFKELFQTPGPSEESMTDEKTTKIACKSPPPESVDTPTSTKQWPKRSLRKADVEEEFLALRKLTPSAGKAMLTPKPAGGDEKDIKAFMGTPVQKLDLAGTLPGSKRQLQTPKEKAQALEDLAGFKELFQTPGHTEELVAAGKTTKIPCDSPQSDPVDTPTSTKQRPKRSIRKADVEGELLACRNLMPSAGKAMHTPKPSVGEEKDIIIFVGTPVQKLDLTENLTGSKRRPQTPKEEAQALEDLTGFKELFQTPGHTEEAVAAGKTTKMPCESSPPESADTPTSTRRQPKTPLEKRDVQKELSALKKLTQTSGETTHTDKVPGGEDKSINAFRETAKQKLDPAASVTGSKRHPKTKEKAQPLEDLAGLKELFQTPVCTDKPTTHEKTTKIACRSQPDPVDTPTSSKPQSKRSLRKVDVEEEFFALRKRTPSAGKAMHTPKPAVSGEKNIYAFMGTPVQKLDLTENLTGSKRRLQTPKEKAQALEDLAGFKELFQTRGHTEESMTNDKTAKVACKSSQPDPDKNPASSKRRLKTSLGKVGVKEELLAVGKLTQTSGETTHTHTEPTGDGKSMKAFMESPKQILDSAASLTGSKRQLRTPKGKSEVPEDLAGFIELFQTPSHTKESMTNEKTTKVSYRASQPDLVDTPTSSKPQPKRSLRKADTEEEFLAFRKQTPSAGKAMHTPKPAVGEEKDINTFLGTPVQKLDQPGNLPGSNRRLQTRKEKAQALEELTGFRELFQTPCTDNPTTDEKTTKKILCKSPQSDPADTPTNTKQRPKRSLKKADVEEEFLAFRKLTPSAGKAMHTPKAAVGEEKDINTFVGTPVEKLDLLGNLPGSKRRPQTPKEKAKALEDLAGFKELFQTPGHTEESMTDDKITEVSCKSPQPDPVKTPTSSKQRLKISLGKVGVKEEVLPVGKLTQTSGKTTQTHRETAGDGKSIKAFKESAKQMLDPANYGTGMERWPRTPKEEAQSLEDLAGFKELFQTPDHTEESTTDDKTTKIACKSPPPESMDTPTSTRRRPKTPLGKRDIVEELSALKQLTQTTHTDKVPGDEDKGINVFRETAKQKLDPAASVTGSKRQPRTPKGKAQPLEDLAGLKELFQTPICTDKPTTHEKTTKIACRSPQPDPVGTPTIFKPQSKRSLRKADVEEESLALRKRTPSVGKAMDTPKPAGGDEKDMKAFMGTPVQKLDLPGNLPGSKRWPQTPKEKAQALEDLAGFKELFQTPGTDKPTTDEKTTKIACKSPQPDPVDTPASTKQRPKRNLRKADVEEEFLALRKRTPSAGKAMDTPKPAVSDEKNINTFVETPVQKLDLLGNLPGSKRQPQTPKEKAEALEDLVGFKELFQTPGHTEESMTDDKITEVSCKSPQPESFKTSRSSKQRLKIPLVKVDMKEEPLAVSKLTRTSGETTQTHTEPTGDSKSIKAFKESPKQILDPAASVTGSRRQLRTRKEKARALEDLVDFKELFSAPGHTEESMTIDKNTKIPCKSPPPELTDTATSTKRCPKTRPRKEVKEELSAVERLTQTSGQSTHTHKEPASGDEGIKVLKQRAKKKPNPVEEEPSRRRPRAPKEKAQPLEDLAGFTELSETSGHTQESLTAGKATKIPCESPPLEVVDTTASTKRHLRTRVQKVQVKEEPSAVKFTQTSGETTDADKEPAGEDKGIKALKESAKQTPAPAASVTGSRRRPRAPRESAQAIEDLAGFKDPAAGHTEESMTDDKTTKIPCKSSPELEDTATSSKRRPRTRAQKVEVKEELLAVGKLTQTSGETTHTDKEPVGEGKGTKAFKQPAKRKLDAEDVIGSRRQPRAPKEKAQPLEDLASFQELSQTPGHTEELANGAADSFTSAPKQTPDSGKPLKISRRVLRAPKVEPVGDVVSTRDPVKSQSKSNTSLPPLPFKRGGGKDGSVTGTKRLRCMPAPEEIVEELPASKKQRVAPRARGKSSEPVVIMKRSLRTSAKRIEPAEELNSNDMKTNKEEHKLQDSVPENKGISLRSRRQNKTEAEQQITEVFVLAERIEINRNEKKPMKTSPEMDIQNPDDGARKPIPRDKVTENKRCLRSARQNESSQPKVAEESGGQKSAKVLMQNQKGKGEAGNSDSMCLRSRKTKSQPAASTLESKSVQRVTRSVKRCAENPKKAEDNVCVKKIRTRSHRDSEDI

SEQ ID NO: 49286 - protein, 3255 aa, Homo sapiens
  Payload ID: 9861
  Gene Symbol: MKI67
  Gene Name: marker of proliferation Ki-67
  ENSP ID: ENSP00000479215
MWPTRRLVTIKRSGVDGPHFPLSLSTCLFGRGIECDIRIQLPVVSKQHCKIEIHEQEAILHNFSSTNPTQVNGSVIDEPVRLKHGDVITIIDRSFRYENESLQNGRKSTEFPRKIREQEPARRVSRSSFSSDPDEKAQDSKAYSKITEGKVSGNPQVHIKNVKEDSTADDSKDSVAQGTTNVHSSEHAGRNGRNAADPISGDFKEISSVKLVSRYGELKSVPTTQCLDNSKKNESPFWKLYESVKKELDVKSQKENVLQYCRKSGLQTDYATEKESADGLQGETQLLVSRKSRPKSGGSGHAVAEPASPEQELDQNKGKGRDVESVQTPSKAVGASFPLYEPAKMKTPVQYSQQQNSPQKHKNKDLYTTGRRESVNLGKSEGFKAGDKTLTPRKLSTRNRTPAKVEDAADSATKPENLSSKTRGSIPTDVEVLPTETEIHNEPFLTLWLTQVERKIQKDSLSKPEKLGTTAGQMCSGLPGLSSVDINNFGDSINESEGIPLKRRRVSFGGHLRPELFDENLPPNTPLKRGEAPTKRKSLVMHTPPVLKKIIKEQPQPSGKQESGSEIHVEVKAQSLVISPPAPSPRKTPVASDQRRRSCKTAPASSSKSQTEVPKRGGERVATCLQRVSISRSQHDILQMICSKRRSGASEANLIVAKSWADVVKLGAKQTQTKVIKHGPQRSMNKRQRRPATPKKPVGEVHSQFSTGHANSPCTIIIGKAHTEKVHVPARPYRVLNNFISNQKMDFKEDLSGIAEMFKTPVKEQPQLTSTCHIAISNSENLLGKQFQGTDSGEEPLLPTSESFGGNVFFSAQNAAKQPSDKCSASPPLRRQCIRENGNVAKTPRNTYKMTSLETKTSDTETEPSKTVSTANRSGRSTEFRNIQKLPVESKSEETNTEIVECILKRGQKATLLQQRREGEMKEIERPFETYKENIELKENDEKMKAMKRSRTWGQKCAPMSDLTDLKSLPDTELMKDTARGQNLLQTQDHAKAPKSEKGKITKMPCQSLQPEPINTPTHTKQQLKASLGKVGVKEELLAVGKFTRTSGETTHTHREPAGDGKSIRTFKESPKQILDPAARVTGMKKWPRTPKEEAQSLEDLAGFKELFQTPGPSEESMTDEKTTKIACKSPPPESVDTPTSTKQWPKRSLRKADVEEEFLALRKLTPSAGKAMLTPKPAGGDEKDIKAFMGTPVQKLDLAGTLPGSKRQLQTPKEKAQALEDLAGFKELFQTPGHTEELVAAGKTTKIPCDSPQSDPVDTPTSTKQRPKRSIRKADVEGELLACRNLMPSAGKAMHTPKPSVGEEKDIIIFVGTPVQKLDLTENLTGSKRRPQTPKEEAQALEDLTGFKELFQTPGHTEEAVAAGKTTKMPCESSPPESADTPTSTRRQPKTPLEKRDVQKELSALKKLTQTSGETTHTDKVPGGEDKSINAFRETAKQKLDPAASVTGSKRHPKTKEKAQPLEDLAGLKELFQTPVCTDKPTTHEKTTKIACRSQPDPVDTPTSSKPQSKRSLRKVDVEEEFFALRKRTPSAGKAMHTPKPAVSGEKNIYAFMGTPVQKLDLTENLTGSKRRLQTPKEKAQALEDLAGFKELFQTRGHTEESMTNDKTAKVACKSSQPDPDKNPASSKRRLKTSLGKVGVKEELLAVGKLTQTSGETTHTHTEPTGDGKSMKAFMESPKQILDSAASLTGSKRQLRTPKGKSEVPEDLAGFIELFQTPSHTKESMTNEKTTKVSYRASQPDLVDTPTSSKPQPKRSLRKADTEEEFLAFRKQTPSAGKAMHTPKPAVGEEKDINTFLGTPVQKLDQPGNLPGSNRRLQTRKEKAQALEELTGFRELFQTPCTDNPTTDEKTTKKILCKSPQSDPADTPTNTKQRPKRSLKKADVEEEFLAFRKLTPSAGKAMHTPKAAVGEEKDINTFVGTPVEKLDLLGNLPGSKRRPQTPKEKAKALEDLAGFKELFQTPGHTEESMTDDKITEVSCKSPQPDPVKTPTSSKQRLKISLGKVGVKEEVLPVGKLTQTSGKTTQTHRETAGDGKSIKAFKESAKQMLDPANYGTGMERWPRTPKEEAQSLEDLAGFKELFQTPDHTEESTTDDKTTKIACKSPPPESMDTPTSTRRRPKTPLGKRDIVEELSALKQLTQTTHTDKVPGDEDKGINVFRETAKQKLDPAASVTGSKRQPRTPKGKAQPLEDLAGLKELFQTPICTDKPTTHEKTTKIACRSPQPDPVGTPTIFKPQSKRSLRKADVEEESLALRKRTPSVGKAMDTPKPAGGDEKDMKAFMGTPVQKLDLPGNLPGSKRWPQTPKEKAQALEDLAGFKELFQTPGTDKPTTDEKTTKIACKSPQPDPVDTPASTKQRPKRNLRKADVEEEFLALRKRTPSAGKAMDTPKPAVSDEKNINTFVETPVQKLDLLGNLPGSKRQPQTPKEKAEALEDLVGFKELFQTPGHTEESMTDDKITEVSCKSPQPESFKTSRSSKQRLKIPLVKVDMKEEPLAVSKLTRTSGETTQTHTEPTGDSKSIKAFKESPKQILDPAASVTGSRRQLRTRKEKARALEDLVDFKELFSAPGHTEESMTIDKNTKIPCKSPPPELTDTATSTKRCPKTRPRKEVKEELSAVERLTQTSGQSTHTHKEPASGDEGIKVLKQRAKKKPNPVEEEPSRRRPRAPKEKAQPLEDLAGFTELSETSGHTQESLTAGKATKIPCESPPLEVVDTTASTKRHLRTRVQKVQVKEEPSAVKFTQTSGETTDADKEPAGEDKGIKALKESAKQTPAPAASVTGSRRRPRAPRESAQAIEDLAGFKDPAAGHTEESMTDDKTTKIPCKSSPELEDTATSSKRRPRTRAQKVEVKEELLAVGKLTQTSGETTHTDKEPVGEGKGTKAFKQPAKRKLDAEDVIGSRRQPRAPKEKAQPLEDLASFQELSQTPGHTEELANGAADSFTSAPKQTPDSGKPLKISRRVLRAPKVEPVGDVVSTRDPVKSQSKSNTSLPPLPFKRGGGKDGSVTGTKRLRCMPAPEEIVEELPASKKQRVAPRARGKSSEPVVIMKRSLRTSAKRIEPAEELNSNDMKTNKEEHKLQDSVPENKGISLRSRRQNKTEAEQQITEVFVLAERIEINRNEKKPMKTSPEMDIQNPDDGARKPIPRDKVTENKRCLRSARQNESSQPKVAEESGGQKSAKVLMQNQKGKGEAGNSDSMCLRSRKTKSQPAASTLESKSVQRVTRSVKRCAENPKKAEDNVCVKKIRTRSHRDSEDI

SEQ ID NO: 49287 - protein, 173 aa, Homo sapiens
  Payload ID: 9862
  Gene Symbol: MARVELD1
  Gene Name: MARVEL domain containing 1
  Uniprot ID: Q9BSK0
  ENSP ID: ENSP00000441365
MLPPPPRQPPPQARAARGAVRLQRPFLRSPLGVLRLLQLLAGAAFWITIATSKYQGPVHFALFVSVLFWLLTLGLYFLTLLGKHELVPVLGSRWLMVNVAHDVLAAALYGAATGIMSDQMQRHSYCNLKDYPLPCAYHAFLAAAVCGGVCHGLYLLSALYGCGRRCQGKQEVA

SEQ ID NO: 49288 - protein, 558 aa, Homo sapiens
  Payload ID: 9863
  Gene Symbol: MARVELD2
  Gene Name: MARVEL domain containing 2
  Uniprot ID: Q8N4S9
  ENSP ID: ENSP00000323264
MSNDGRSRNRDRRYDEVPSDLPYQDTTIRTHPTLHDSERAVSADPLPPPPLPLQPPFGPDFYSSDTEEPAIAPDLKPVRRFVPDSWKNFFRGKKKDPEWDKPVSDIRYISDGVECSPPASPARPNHRSPLNSCKDPYGGSEGTFSSRKEADAVFPRDPYGSLDRHTQTVRTYSEKVEEYNLRYSYMKSWAGLLRILGVVELLLGAGVFACVTAYIHKDSEWYNLFGYSQPYGMGGVGGLGSMYGGYYYTGPKTPFVLVVAGLAWITTIIILVLGMSMYYRTILLDSNWWPLTEFGINVALFILYMAAAIVYVNDTNRGGLCYYPLFNTPVNAVFCRVEGGQIAAMIFLFVTMIVYLISALVCLKLWRHEAARRHREYMEQQEINEPSLSSKRKMCEMATSGDRQRDSEVNFKELRTAKMKPELLSGHIPPGHIPKPIVMPDYVAKYPVIQTDDERERYKAVFQDQFSEYKELSAEVQAVLRKFDELDAVMSRLPHHSESRQEHERISRIHEEFKKKKNDPTFLEKKERCDYLKNKLSHIKQRIQEYDKVMNWDVQGYS

SEQ ID NO: 49289 - protein, 546 aa, Homo sapiens
  Payload ID: 9863
  Gene Symbol: MARVELD2
  Gene Name: MARVEL domain containing 2
  Uniprot ID: Q8N4S9
  ENSP ID: ENSP00000396244
MSNDGRSRNRDRRYDEVPSDLPYQDTTIRTHPTLHDSERAVSADPLPPPPLPLQPPFGPDFYSSDTEEPAIAPDLKPVRRFVPDSWKNFFRGKKKDPEWDKPVSDIRYISDGVECSPPASPARPNHRSPLNSCKDPYGGSEGTFSSRKEADAVFPRDPYGSLDRHTQTVRTYSEKVEEYNLRYSYMKSWAGLLRILGVVELLLGAGVFACVTAYIHKDSEWYNLFGYSQPYGMGGVGGLGSMYGGYYYTGPKTPFVLVVAGLAWITTIIILVLGMSMYYRTILLDSNWWPLTEFGINVALFILYMAAAIVYVNDTNRGGLCYYPLFNTPVNAVFCRVEGGQIAAMIFLFVTMIVYLISALVCLKLWRHEAARRHREYMEQQECEMATSGDRQRDSEVNFKELRTAKMKPELLSGHIPPGHIPKPIVMPDYVAKYPVIQTDDERERYKAVFQDQFSEYKELSAEVQAVLRKFDELDAVMSRLPHHSESRQEHERISRIHEEFKKKKNDPTFLEKKERCDYLKNKLSHIKQRIQEYDKVMNWDVQGYS

SEQ ID NO: 49290 - protein, 442 aa, Homo sapiens
  Payload ID: 9863
  Gene Symbol: MARVELD2
  Gene Name: MARVEL domain containing 2
  ENSP ID: ENSP00000398922
MSNDGRSRNRDRRYDEVPSDLPYQDTTIRTHPTLHDSERAVSADPLPPPPLPLQPPFGPDFYSSDTEEPAIAPDLKPVRRFVPDSWKNFFRGKKKDPEWDKPVSDIRYISDGVECSPPASPARPNHRSPLNSCKDPYGGSEGTFSSRKEADAVFPRDPYGSLDRHTQTVRTYSEKVEEYNLRYSYMKSWAGLLRILGVVELLLGAGVFACVTAYIHKDSEWYNLFGYSQPYGMGGVGGLGSIALVCLKLWRHEAARRHREYMEQQEINEPSLSSKRKMCEMATSGDRQRDSEVNFKELRTAKMKPELLSGHIPPGHIPKPIVMPDYVAKYPVIQTDDERERYKAVFQDQFSEYKELSAEVQAVLRKFDELDAVMSRLPHHSESRQEHERISRIHEEFKKKKNDPTFLEKKERCDYLKNKLSHIKQRIQEYDKVMNWDVQGYS

SEQ ID NO: 49291 - protein, 442 aa, Homo sapiens; identical to SEQ ID NO: 49290
  Payload ID: 9863
  Gene Symbol: MARVELD2
  Gene Name: MARVEL domain containing 2
  ENSP ID: ENSP00000414776

SEQ ID NO: 49292 - protein, 145 aa, Homo sapiens
  Payload ID: 9863
  Gene Symbol: MARVELD2
  Gene Name: MARVEL domain containing 2
  ENSP ID: ENSP00000421902
MSNDGRSRNRDRRYDEVPSDLPYQDTTIRTHPTLHDSERAVSADPLPPPPLPLQPPFGPDFYSSDTEEPAIAPDLKPVRRFVPDSWKNFFRGKKKDPEWDKPVSDIRYISDGVECSPPASPARPNHRSPLNSCKDPYGGSEGTFS

SEQ ID NO: 49293 - protein, 516 aa, Homo sapiens
  Payload ID: 9863
  Gene Symbol: MARVELD2
  Gene Name: MARVEL domain containing 2
  ENSP ID: ENSP00000423490
MSNDGRSRNRDRRYDEVPSDLPYQDTTIRTHPTLHDSERAVSADPLPPPPLPLQPPFGPDFYSSDTEEPAIAPDLKPVRRFVPDSWKNFFRGKKKDPEWDKPVSDIRYISDGVECSPPASPARPNHRSPLNSCKDPYGGSEGTFSSRKEADAVFPRDPYGSLDRHTQTVRTYSEKVEEYNLRYSYMKSWAGLLRILGVVELLLGAGVFACVTAYIHKDSEWYNLFGYSQPYGMGGVGGLGSMYGGYYYTGPKTPFVLVVAGLAWITTIIILVLGMSMYYRTILLDSNWWPLTEFGINVALFILYMAAAIVYVNDTNRGGLCYYPLFNTPVNAVFCRVEGGQIAAMIFLFVTMIVYLISALVCLKLWRHEAARRHREYMEQQEINEPSLSSKRKMCEMATSGDRQRDSEVNFKELRTAKMKPELLSGHIPPGHIPKPIVMPDYVAKYPVIQTDDERERYKAVFQDQFSEYKELSAEVQAVLRKFDELDAVMSRLPHHSESRQEHERISRIHEEFKKK

SEQ ID NO: 49294 - protein, 442 aa, Homo sapiens
  Payload ID: 9863
  Gene Symbol: MARVELD2
  Gene Name: MARVEL domain containing 2
  ENSP ID: ENSP00000477520
MSNDGRSRNRDRRYDEVPSDLPYQDTTIRTHPILHDSERAVSADPLPPPPLPLQPPFGPDFYSSDTEEPAIAPDLKPVRRFVPDSWKNFFRGKKKDPEWDKPVSDIRYISDGVECSPPASPARPNHRSPLNSCKDPYGGSEGTFSSRKEADAVFPRDPYGSLDRHTQTVRTYSEKVEEYNLRYSYMKSWAGLLRILGVVELLLGAGVFACVTAYIHKDSEWYNLFGYSQPYGMGGVGGLGSIALVCLKLWRHEAARRHREYMEQQEINEPSLSSKRKMCEMATSGDRQRDSEVNFKELRTAKMKPELLSGHIPPGHIPKPIVMPDYVAKYPVIQTDDERERYKAVFQDQFSEYKELSAEVQAVLRKFDELDAVMSRLPHHSESRQEHERISRIHEEFKKKKNDPTFLEKKERCDYLKNKLSHIKQRIQEYDKVMNWDVQGYS

SEQ ID NO: 49295 - protein, 546 aa, Homo sapiens
  Payload ID: 9863
  Gene Symbol: MARVELD2
  Gene Name: MARVEL domain containing 2
  Uniprot ID: Q8N4S9
  ENSP ID: ENSP00000480044
MSNDGRSRNRDRRYDEVPSDLPYQDTTIRTHPILHDSERAVSADPLPPPPLPLQPPFGPDFYSSDTEEPAIAPDLKPVRRFVPDSWKNFFRGKKKDPEWDKPVSDIRYISDGVECSPPASPARPNHRSPLNSCKDPYGGSEGTFSSRKEADAVFPRDPYGSLDRHTQTVRTYSEKVEEYNLRYSYMKSWAGLLRILGVVELLLGAGVFACVTAYIHKDSEWYNLFGYSQPYGMGGVGGLGSMYGGYYYTGPKTPFVLVVAGLAWITTIIILVLGMSMYYRTILLDSNWWPLTEFGINVALFILYMAAAIVYVNDTNRGGLCYYPLFNTPVNAVFCRVEGGQIAAMIFLFVTMIVYLISALVCLKLWRHEAARRHREYMEQQECEMATSGDRQRDSEVNFKELRTAKMKPELLSGHIPPGHIPKPIVMPDYVAKYPVIQTDDERERYKAVFQDQFSEYKELSAEVQAVLRKFDELDAVMSRLPHHSESRQEHERISRIHEEFKKKKNDPTFLEKKERCDYLKNKLSHIKQRIQEYDKVMNWDVQGYS

SEQ ID NO: 49296 - protein, 558 aa, Homo sapiens
  Payload ID: 9863
  Gene Symbol: MARVELD2
  Gene Name: MARVEL domain containing 2
  Uniprot ID: Q8N4S9
  ENSP ID: ENSP00000480068
MSNDGRSRNRDRRYDEVPSDLPYQDTTIRTHPILHDSERAVSADPLPPPPLPLQPPFGPDFYSSDTEEPAIAPDLKPVRRFVPDSWKNFFRGKKKDPEWDKPVSDIRYISDGVECSPPASPARPNHRSPLNSCKDPYGGSEGTFSSRKEADAVFPRDPYGSLDRHTQTVRTYSEKVEEYNLRYSYMKSWAGLLRILGVVELLLGAGVFACVTAYIHKDSEWYNLFGYSQPYGMGGVGGLGSMYGGYYYTGPKTPFVLVVAGLAWITTIIILVLGMSMYYRTILLDSNWWPLTEFGINVALFILYMAAAIVYVNDTNRGGLCYYPLFNTPVNAVFCRVEGGQIAAMIFLFVTMIVYLISALVCLKLWRHEAARRHREYMEQQEINEPSLSSKRKMCEMATSGDRQRDSEVNFKELRTAKMKPELLSGHIPPGHIPKPIVMPDYVAKYPVIQTDDERERYKAVFQDQFSEYKELSAEVQAVLRKFDELDAVMSRLPHHSESRQEHERISRIHEEFKKKKNDPTFLEKKERCDYLKNKLSHIKQRIQEYDKVMNWDVQGYS

SEQ ID NO: 49297 - protein, 145 aa, Homo sapiens
  Payload ID: 9863
  Gene Symbol: MARVELD2
  Gene Name: MARVEL domain containing 2
  ENSP ID: ENSP00000480310
MSNDGRSRNRDRRYDEVPSDLPYQDTTIRTHPILHDSERAVSADPLPPPPLPLQPPFGPDFYSSDTEEPAIAPDLKPVRRFVPDSWKNFFRGKKKDPEWDKPVSDIRYISDGVECSPPASPARPNHRSPLNSCKDPYGGSEGTFS

SEQ ID NO: 49298 - protein, 516 aa, Homo sapiens
  Payload ID: 9863
  Gene Symbol: MARVELD2
  Gene Name: MARVEL domain containing 2
  ENSP ID: ENSP00000480479
MSNDGRSRNRDRRYDEVPSDLPYQDTTIRTHPILHDSERAVSADPLPPPPLPLQPPFGPDFYSSDTEEPAIAPDLKPVRRFVPDSWKNFFRGKKKDPEWDKPVSDIRYISDGVECSPPASPARPNHRSPLNSCKDPYGGSEGTFSSRKEADAVFPRDPYGSLDRHTQTVRTYSEKVEEYNLRYSYMKSWAGLLRILGVVELLLGAGVFACVTAYIHKDSEWYNLFGYSQPYGMGGVGGLGSMYGGYYYTGPKTPFVLVVAGLAWITTIIILVLGMSMYYRTILLDSNWWPLTEFGINVALFILYMAAAIVYVNDTNRGGLCYYPLFNTPVNAVFCRVEGGQIAAMIFLFVTMIVYLISALVCLKLWRHEAARRHREYMEQQEINEPSLSSKRKMCEMATSGDRQRDSEVNFKELRTAKMKPELLSGHIPPGHIPKPIVMPDYVAKYPVIQTDDERERYKAVFQDQFSEYKELSAEVQAVLRKFDELDAVMSRLPHHSESRQEHERISRIHEEFKKK

SEQ ID NO: 49299 - protein, 442 aa, Homo sapiens; identical to SEQ ID NO: 49294
  Payload ID: 9863
  Gene Symbol: MARVELD2
  Gene Name: MARVEL domain containing 2
  ENSP ID: ENSP00000484889

SEQ ID NO: 49300 - protein, 401 aa, Homo sapiens
  Payload ID: 9864
  Gene Symbol: MARVELD3
  Gene Name: MARVEL domain containing 3
  Uniprot ID: Q96A59
  ENSP ID: ENSP00000268485
MEDPSGAREPRARPRERDPGRRPHPDQGRTHDRPRDRPGDPRRKRSSDGNRRRDGDRDPERDQERDGNRDRNRDRERERERERDPDRGPRRDTHRDAGPRAGEHGVWEKPRQSRTRDGARGLTWDAAAPPGPAPWEAPEPPQPQRKGDPGRRRPESEPPSERYLPSTPRPGREEVEYYQSEAEGLLECHKCKYLCTGRACCQMLEVLLNLLILACSSVSYSSTGGYTGITSLGGIYYYQFGGAYSGFDGADGEKAQQLDVQFYQLKLPMVTVAMACSGALTALCCLFVAMGVLRVPWHCPLLLVTEGLLDMLIAGGYIPALYFYFHYLSAAYGSPVCKERQALYQSKGYSGFGCSFHGADIGAGIFAALGIVVFALGAVLAIKGYRKVRKLKEKPAEMFEF

SEQ ID NO: 49301 - protein, 410 aa, Homo sapiens
  Payload ID: 9864
  Gene Symbol: MARVELD3
  Gene Name: MARVEL domain containing 3
  Uniprot ID: Q96A59
  ENSP ID: ENSP00000299952
MEDPSGAREPRARPRERDPGRRPHPDQGRTHDRPRDRPGDPRRKRSSDGNRRRDGDRDPERDQERDGNRDRNRDRERERERERDPDRGPRRDTHRDAGPRAGEHGVWEKPRQSRTRDGARGLTWDAAAPPGPAPWEAPEPPQPQRKGDPGRRRPESEPPSERYLPSTPRPGREEVEYYQSEAEGLLECHKCKYLCTGRGVVQIVEVVLNGMVLICIVASYFVLAGFSASFSSGGGFGNNYYSPFEGTELEQVRQLDQQYTILRSPLIYGGVAVSLGLGVLTMGVLLQGAKSRTMLSGKWLLTEAAFSLLAAVGYCTGIGVYLHVALQINSTDTCKTRERLYARKGLTWMDCQLAGTDGAAATFACLLVIMYGASVVLALRSYREQKRYKGSREQPGSYSDAPEYLWSGTL

SEQ ID NO: 49302 - protein, 60 aa, Homo sapiens
  Payload ID: 9864
  Gene Symbol: MARVELD3
  Gene Name: MARVEL domain containing 3
  ENSP ID: ENSP00000455814
MPQMQILVHWESLLPNAGGSPELADPGLQLCVLQFHRGLHGHHQLGGHLLLSVRRGLQWL

SEQ ID NO: 49303 - protein, 148 aa, Homo sapiens
  Payload ID: 9864
  Gene Symbol: MARVELD3
  Gene Name: MARVEL domain containing 3
  Uniprot ID: Q96A59
  ENSP ID: ENSP00000455845
MEDPSGAREPRARPRERDPGRRPHPDQGRTHDRPRDRPGDPRRKRSSDGNRRRDGDRDPERDQERDGNRDRNRDRERERERERDPDRGPRRDTHRDAGPRAVNPLRRDICPRPPGLDERRWNITSQRRKDSWNATNANTCALGEVWCR

SEQ ID NO: 49304 - protein, 219 aa, Homo sapiens
  Payload ID: 9864
  Gene Symbol: MARVELD3
  Gene Name: MARVEL domain containing 3
  ENSP ID: ENSP00000462555
MEDPSGAREPRARPRERDPGRRPHPDQGRTHDRPRDRPGDPRRKRSSDGNRRRDGDRDPERDQERDGNRDRNRDRERERERERDPDRGPRRDTHRDAGPRAGEHGVWEKPRQSRTRDGARGLTWDAAAPPGPAPWEAPEPPQPQRKGDPGRRRPESEPPSERYLPSTPRPGREEVEYYQSEAEGLLECHKCKYLCTGRGEPFCRLFDHLLSLVVLEGMV

SEQ ID NO: 49305 - protein, 378 aa, Homo sapiens
  Payload ID: 9865
  Gene Symbol: MAS1L
  Gene Name: MAS1 proto-oncogene like, G protein-coupled receptor
  Uniprot ID: P35410
  ENSP ID: ENSP00000366331
MVWGKICWFSQRAGWTVFAESQISLSCSLCLHSGDQEAQNPNLVSQLCGVFLQNETNETIHMQMSMAVGQQALPLNIIAPKAVLVSLCGVLLNGTVFWLLCCGATNPYMVYILHLVAADVIYLCCSAVGFLQVTLLTYHGVVFFIPDFLAILSPFSFEVCLCLLVAISTERCVCVLFPIWYRCHRPKYTSNVVCTLIWGLPFCINIVKSLFLTYWKHVKACVIFLKLSGLFHAILSLVMCVSSLTLLIRFLCCSQQQKATRVYAVVQISAPMFLLWALPLSVAPLITDFKMFVTTSYLISLFLIINSSANPIIYFFVGSLRKKRLKESLRVILQRALADKPEVGRNKKAAGIDPMEQPHSTQHVENLLPREHRVDVET

SEQ ID NO: 49306 - protein, 378 aa, Homo sapiens; identical to SEQ ID NO: 49305
  Payload ID: 9865
  Gene Symbol: MAS1L
  Gene Name: MAS1 proto-oncogene like, G protein-coupled receptor
  Uniprot ID: P35410
  ENSP ID: ENSP00000373041

SEQ ID NO: 49307 - protein, 378 aa, Homo sapiens; identical to SEQ ID NO: 49305
  Payload ID: 9865
  Gene Symbol: MAS1L
  Gene Name: MAS1 proto-oncogene like, G protein-coupled receptor
  Uniprot ID: P35410
  ENSP ID: ENSP00000373139

SEQ ID NO: 49308 - protein, 378 aa, Homo sapiens; identical to SEQ ID NO: 49305
  Payload ID: 9865
  Gene Symbol: MAS1L
  Gene Name: MAS1 proto-oncogene like, G protein-coupled receptor
  Uniprot ID: P35410
  ENSP ID: ENSP00000392071

SEQ ID NO: 49309 - protein, 378 aa, Homo sapiens; identical to SEQ ID NO: 49305
  Payload ID: 9865
  Gene Symbol: MAS1L
  Gene Name: MAS1 proto-oncogene like, G protein-coupled receptor
  Uniprot ID: P35410
  ENSP ID: ENSP00000399042

SEQ ID NO: 49310 - protein, 378 aa, Homo sapiens; identical to SEQ ID NO: 49305
  Payload ID: 9865
  Gene Symbol: MAS1L
  Gene Name: MAS1 proto-oncogene like, G protein-coupled receptor
  Uniprot ID: P35410
  ENSP ID: ENSP00000405030

SEQ ID NO: 49311 - protein, 378 aa, Homo sapiens; identical to SEQ ID NO: 49305
  Payload ID: 9865
  Gene Symbol: MAS1L
  Gene Name: MAS1 proto-oncogene like, G protein-coupled receptor
  Uniprot ID: P35410
  ENSP ID: ENSP00000405164

SEQ ID NO: 49312 - protein, 378 aa, Homo sapiens; identical to SEQ ID NO: 49305
  Payload ID: 9865
  Gene Symbol: MAS1L
  Gene Name: MAS1 proto-oncogene like, G protein-coupled receptor
  Uniprot ID: P35410
  ENSP ID: ENSP00000410649

SEQ ID NO: 49313 - protein, 325 aa, Homo sapiens
  Payload ID: 9866
  Gene Symbol: MAS1
  Gene Name: MAS1 proto-oncogene, G protein-coupled receptor
  Uniprot ID: P04201
  ENSP ID: ENSP00000252660
MDGSNVTSFVVEEPTNISTGRNASVGNAHRQIPIVHWVIMSISPVGFVENGILLWFLCFRMRRNPFTVYITHLSIADISLLFCIFILSIDYALDYELSSGHYYTIVTLSVTFLFGYNTGLYLLTAISVERCLSVLYPIWYRCHRPKYQSALVCALLWALSCLVTTMEYVMCIDREEESHSRNDCRAVIIFIAILSFLVFTPLMLVSSTILVVKIRKNTWASHSSKLYIVIMVTIIIFLIFAMPMRLLYLLYYEYWSTFGNLHHISLLFSTINSSANPFIYFFVGSSKKKRFKESLKVVLTRAFKDEMQPRRQKDNCNTVTVETVV

SEQ ID NO: 49314 - protein, 321 aa, Homo sapiens
  Payload ID: 9867
  Gene Symbol: MRGPRD
  Gene Name: MAS-related GPR, member D
  Uniprot ID: Q8TDS7
  ENSP ID: ENSP00000310631
MNQTLNSSGTVESALNYSRGSTVHTAYLVLSSLAMFTCLCGMAGNSMVIWLLGFRMHRNPFCIYILNLAAADLLFLFSMASTLSLETQPLVNTTDKVHELMKRLMYFAYTVGLSLLTAISTQRCLSVLFPIWFKCHRPRHLSAWVCGLLWTLCLLMNGLTSSFCSKFLKFNEDRCFRVDMVQAALIMGVLTPVMTLSSLTLFVWVRRSSQQWRRQPTRLFVVVLASVLVFLICSLPLSIYWFVLYWLSLPPEMQVLCFSLSRLSSSVSSSANPVIYFLVGSRRSHRLPTRSLGTVLQQALREEPELEGGETPTVGTNEMGA

SEQ ID NO: 49315 - protein, 312 aa, Homo sapiens
  Payload ID: 9868
  Gene Symbol: MRGPRE
  Gene Name: MAS-related GPR, member E
  Uniprot ID: Q86SM8
  ENSP ID: ENSP00000374482
MMEPREAGQHVGAANGAQEDVAFNLIILSLTEGLGLGGLLGNGAVLWLLSSNVYRNPFAIYLLDVACADLIFLGCHMVAIVPDLLQGRLDFPGFVQTSLATLRFFCYIVGLSLLAAVSVEQCLAALFPAWYSCRRPRHLTTCVCALTWALCLLLHLLLSGACTQFFGEPSRHLCRTLWLVAAVLLALLCCTMCGASLMLLLRVERGPQRPPPRGFPGLILLTVLLFLFCGLPFGIYWLSRNLLWYIPHYFYHFSFLMAAVHCAAKPVVYFCLGSAQGRRLPLRLVLQRALGDEAELGAVRETSRRGLVDIAA

SEQ ID NO: 49316 - protein, 343 aa, Homo sapiens
  Payload ID: 9869
  Gene Symbol: MRGPRF
  Gene Name: MAS-related GPR, member F
  Uniprot ID: Q96AM1
  ENSP ID: ENSP00000309782
MAGNCSWEAHPGNRNKMCPGLSEAPELYSRGFLTIEQIAMLPPPAVMNYIFLLLCLCGLVGNGLVLWFFGFSIKRNPFSIYFLHLASADVGYLFSKAVFSILNTGGFLGTFADYIRSVCRVLGLCMFLTGVSLLPAVSAERCASVIFPAWYWRRRPKRLSAVVCALLWVLSLLVTCLHNYFCVFLGRGAPGAACRHMDIFLGILLFLLCCPLMVLPCLALILHVECRARRRQRSAKLNHVILAMVSVFLVSSIYLGIDWFLFWVFQIPAPFPEYVTDLCICINSSAKPIVYFLAGRDKSQRLWEPLRVVFQRALRDGAELGEAGGSTPNTVTMEMQCPPGNAS

SEQ ID NO: 49317 - protein, 104 aa, Homo sapiens
  Payload ID: 9869
  Gene Symbol: MRGPRF
  Gene Name: MAS-related GPR, member F
  ENSP ID: ENSP00000323414
MAGNCSWEAHPGNRNKVSATGGGPWSCPDGCGWEGQTQPSISSPIPPFLAPLSSSGPTVGSGLLWAMWPGTSSLDPPTLLSSSVRQAPGLDLKVPRCADTVVAL

SEQ ID NO: 49318 - protein, 343 aa, Homo sapiens; identical to SEQ ID NO: 49316
  Payload ID: 9869
  Gene Symbol: MRGPRF
  Gene Name: MAS-related GPR, member F
  Uniprot ID: Q96AM1
  ENSP ID: ENSP00000403660

SEQ ID NO: 49319 - protein, 289 aa, Homo sapiens
  Payload ID: 9870
  Gene Symbol: MRGPRG
  Gene Name: MAS-related GPR, member G
  Uniprot ID: Q86SM5
  ENSP ID: ENSP00000330612
MFGLFGLWRTFDSVVFYLTLIVGLGGPVGNGLVLWNLGFRIKKGPFSIYLLHLAAADFLFLSCRVGFSVAQAALGAQDTLYFVLTFLWFAVGLWLLAAFSVERCLSDLFPACYQGCRPRHASAVLCALVWTPTLPAVPLPANACGLLRNSACPLVCPRYHVASVTWFLVLARVAWTAGVVLFVWVTCCSTRPRPRLYGIVLGALLLLFFCGLPSVFYWSLQPLLNFLLPVFSPLATLLACVNSSSKPLIYSGLGRQPGKREPLRSVLRRALGEGAELGARGQSLPMGLL

SEQ ID NO: 49320 - protein, 322 aa, Homo sapiens
  Payload ID: 9871
  Gene Symbol: MRGPRX1
  Gene Name: MAS-related GPR, member X1
  Uniprot ID: Q96LB2
  ENSP ID: ENSP00000305766
MDPTISTLDTELTPINGTEETLCYKQTLSLTVLTCIVSLVGLTGNAVVLWLLGCRMRRNAFSIYILNLAAADFLFLSGRLIYSLLSFISIPHTISKILYPVMMFSYFAGLSFLSAVSTERCLSVLWPIWYRCHRPTHLSAVVCVLLWALSLLRSILEWMLCGFLFSGADSAWCQTSDFITVAWLIFLCVVLCGSSLVLLIRILCGSRKIPLTRLYVTILLTVLVFLLCGLPFGIQFFLFLWIHVDREVLFCHVHLVSIFLSALNSSANPIIYFFVGSFRQRQNRQNLKLVLQRALQDASEVDEGGGQLPEEILELSGSRLEQ

SEQ ID NO: 49321 - protein, 330 aa, Homo sapiens
  Payload ID: 9872
  Gene Symbol: MRGPRX2
  Gene Name: MAS-related GPR, member X2
  Uniprot ID: Q96LB1
  ENSP ID: ENSP00000333800
MDPTTPAWGTESTTVNGNDQALLLLCGKETLIPVFLILFIALVGLVGNGFVLWLLGFRMRRNAFSVYVLSLAGADFLFLCFQIINCLVYLSNFFCSISINFPSFFTTVMTCAYLAGLSMLSTVSTERCLSVLWPIWYRCRRPRHLSAVVCVLLWALSLLLSILEGKFCGFLFSDGDSGWCQTFDFITAAWLIFLFMVLCGSSLALLVRILCGSRGLPLTRLYLTILLTVLVFLLCGLPFGIQWFLILWIWKDSDVLFCHIHPVSVVLSSLNSSANPIIYFFVGSFRKQWRLQQPILKLALQRALQDIAEVDHSEGCFRQGTPEMSRSSLV

SEQ ID NO: 49322 - protein, 322 aa, Homo sapiens
  Payload ID: 9873
  Gene Symbol: MRGPRX3
  Gene Name: MAS-related GPR, member X3
  Uniprot ID: Q96LB0
  ENSP ID: ENSP00000379571
MDSTIPVLGTELTPINGREETPCYKQTLSFTGLTCIVSLVALTGNAVVLWLLGCRMRRNAVSIYILNLVAADFLFLSGHIICSPLRLINIRHPISKILSPVMTFPYFIGLSMLSAISTERCLSILWPIWYHCRRPRYLSSVMCVLLWALSLLRSILEWMFCDFLFSGANSVWCETSDFITIAWLVFLCVVLCGSSLVLLVRILCGSRKMPLTRLYVTILLTVLVFLLCGLPFGIQWALFSRIHLDWKVLFCHVHLVSIFLSALNSSANPIIYFFVGSFRQRQNRQNLKLVLQRALQDTPEVDEGGGWLPQETLELSGSRLEQ

SEQ ID NO: 49323 - protein, 246 aa, Homo sapiens
  Payload ID: 9873
  Gene Symbol: MRGPRX3
  Gene Name: MAS-related GPR, member X3
  ENSP ID: ENSP00000436242
MDSTIPVLGTELTPINGREETPCYKQTLSFTGLTCIVSLVALTGNAVVLWLLGCRMRRNAVSIYILNLVAADFLFLSGHIICSPLRLINIRHPISKILSPVMTFPYFIGLSMLSAISTERCLSILWPIWYHCRRPRYLSSVMCVLLWALSLLRSILEWMFCDFLFSGANSVWCETSDFITIAWLVFLCVVLCGSSLVLLVRILCGSRKMPLTRLYVTILLTVLVFLLCGLPFGIQWALFSRIHLDW

SEQ ID NO: 49324 - protein, 322 aa, Homo sapiens; identical to SEQ ID NO: 49322
  Payload ID: 9873
  Gene Symbol: MRGPRX3
  Gene Name: MAS-related GPR, member X3
  Uniprot ID: Q96LB0
  ENSP ID: ENSP00000481943

SEQ ID NO: 49325 - protein, 322 aa, Homo sapiens
  Payload ID: 9874
  Gene Symbol: MRGPRX4
  Gene Name: MAS-related GPR, member X4
  Uniprot ID: Q96LA9
  ENSP ID: ENSP00000314042
MDPTVPVFGTKLTPINGREETPCYNQTLSFTVLTCIISLVGLTGNAVVLWLLGYRMRRNAVSIYILNLAAADFLFLSFQIIRLPLRLINISHLIRKILVSVMTFPYFTGLSMLSAISTERCLSVLWPIWYRCRRPTHLSAVVCVLLWGLSLLFSMLEWRFCDFLFSGADSSWCETSDFIPVAWLIFLCVVLCVSSLVLLVRILCGSRKMPLTRLYVTILLTVLVFLLCGLPFGILGALIYRMHLNLEVLYCHVYLVCMSLSSLNSSANPIIYFFVGSFRQRQNRQNLKLVLQRALQDKPEVDKGEGQLPEESLELSGSRLGP

SEQ ID NO: 49326 - protein, 322 aa, Homo sapiens
  Payload ID: 9874
  Gene Symbol: MRGPRX4
  Gene Name: MAS-related GPR, member X4
  ENSP ID: ENSP00000482346
MDPTVPVFGTKLTPINGREETPCYNQTLSFTVLTCIISLVGLTGNAVVLWLLGYRMRRNAVSIYILNLAAADFLFLSFQIIRLPLRLINISHLIRKILVSVMTFPYFTGLSMLSAISTERCLSVLWPIWYRCRRPTHLSAVVCVLLWGLSLLFSMLEWRFCDFLFSGADSSWCETSDFIPVAWLIFLCVVLCVSSLVLLVRILCGSRKMPLTRLYVTILLTVLVFLLCGLPFGILGALIYRMHLNLEVLYCHVQPVSDVLSSLNSSANPIIYFFMGSFRQRQNWQNLKLVLQKALQDTPEVDEGGGRLPQETLEMSGSRLEQ

SEQ ID NO: 49327 - protein, 89 aa, Homo sapiens
  Payload ID: 9875
  Gene Symbol: MILR1
  Gene Name: mast cell immunoglobulin-like receptor 1
  ENSP ID: ENSP00000474420
  MOD_RES (1)..(1): Any amino acid
XKAMRNNVPRDRGDTAMEVGIYANILEKQAKEESVPEVGSRPCVSTAQDEAKHSQELQYATPVFQEVAPREQEACDSYKSGYVYSELNF

SEQ ID NO: 49328 - protein, 253 aa, Homo sapiens
  Payload ID: 9875
  Gene Symbol: MILR1
  Gene Name: mast cell immunoglobulin-like receptor 1
  Uniprot ID: Q7Z6M3
  ENSP ID: ENSP00000477504
MWSHLNRLLFWSIFSSVTCRKAVLDCEAMKTNDPVTSPVLNIMVIQTETDRHITLHCLSVNGSLPINYTFFENHVAISPAISKYDREPAEFNLTKKNPGEEEEYRCEAKNRLPNYATYSHPVTMPSTGGDSCPFCLKLLLPGLLLLLVVIILILAFWVLPKYKTRKAMRNNVPRDRGDTAMEVGIYANILEKQAKEESVPEVGSRPCVSTAQDEAKHSQELQYATPVFQEVAPREQEACDSYKSGYVYSELNF

SEQ ID NO: 49329 - protein, 186 aa, Homo sapiens
  Payload ID: 9875
  Gene Symbol: MILR1
  Gene Name: mast cell immunoglobulin-like receptor 1
  ENSP ID: ENSP00000479516
MWSHLNRLLFWSIFSSVTCRKAVLDCEAMKTNEFPSPCLDSKTKVVMKGQNVSMFCSHKNKSLQITYSLFRRKTHLGTQDGKGEPAIFNLSITEAHESGPYKCKAQVTSCSKYSRDFSFTIVDPVTSPVLNIMVIQTETDRHITLHCLSVNGSLPINYTFFENHVAISPAISKYDREPAEFNLTKK

SEQ ID NO: 49330 - protein, 343 aa, Homo sapiens
  Payload ID: 9875
  Gene Symbol: MILR1
  Gene Name: mast cell immunoglobulin-like receptor 1
  Uniprot ID: Q7Z6M3
  ENSP ID: ENSP00000480749
MWSHLNRLLFWSIFSSVTCRKAVLDCEAMKTNEFPSPCLDSKTKVVMKGQNVSMFCSHKNKSLQITYSLFRRKTHLGTQDGKGEPAIFNLSITEAHESGPYKCKAQVTSCSKYSRDFSFTIVDPVTSPVLNIMVIQTETDRHITLHCLSVNGSLPINYTFFENHVAISPAISKYDREPAEFNLTKKNPGEEEEYRCEAKNRLPNYATYSHPVTMPSTGGDSCPFCLKLLLPGLLLLLVVIILILAFWVLPKYKTRKAMRNNVPRDRGDTAMEVGIYANILEKQAKEESVPEVGSRPCVSTAQDEAKHSQELQYATPVFQEVAPREQEACDSYKSGYVYSELNF

SEQ ID NO: 49331 - protein, 248 aa, Homo sapiens
  Payload ID: 9875
  Gene Symbol: MILR1
  Gene Name: mast cell immunoglobulin-like receptor 1
  Uniprot ID: Q7Z6M3
  ENSP ID: ENSP00000481318
MWSHLNRLLFWSIFSSVTCRKAVLDCEAMKTNEFPSPCLDSKTKVVMKGQNVSMFCSHKNKSLQITYSLFRRKTHLGTQDGKGEPAIFNLSITEAHESGPYKCKAQVTSCSKYSRDFSFTIVGGDSCPFCLKLLLPGLLLLLVVIILILAFWVLPKYKTRKAMRNNVPRDRGDTAMEVGIYANILEKQAKEESVPEVGSRPCVSTAQDEAKHSQELQYATPVFQEVAPREQEACDSYKSGYVYSELNF

SEQ ID NO: 49332 - protein, 343 aa, Homo sapiens; identical to SEQ ID NO: 49330
  Payload ID: 9875
  Gene Symbol: MILR1
  Gene Name: mast cell immunoglobulin-like receptor 1
  Uniprot ID: Q7Z6M3
  ENSP ID: ENSP00000482801

SEQ ID NO: 49333 - protein, 89 aa, Homo sapiens; identical to SEQ ID NO: 49327
  Payload ID: 9875
  Gene Symbol: MILR1
  Gene Name: mast cell immunoglobulin-like receptor 1
  ENSP ID: ENSP00000484073
  MOD_RES (1)..(1): Any amino acid

SEQ ID NO: 49334 - protein, 187 aa, Homo sapiens
  Payload ID: 9876
  Gene Symbol: MCEMP1
  Gene Name: mast cell-expressed membrane protein 1
  Uniprot ID: Q8IX19
  ENSP ID: ENSP00000329920
MEVEEIYKHQEVKMQAPAFRDKKQGVSAKNQGAHDPDYENITLAFKNQDHAKGGHSRPTSQVPAQCRPPSDSTQVPCWLYRAILSLYILLALAFVLCIILSAFIMVKNAEMSKELLGFKRELWNVSNSVQACEERQKRGWDSVQQSITMVRSKIDRLETTLAGIKNIDTKVQKILEVLQKMPQSSPQ

SEQ ID NO: 49335 - protein, 144 aa, Homo sapiens
  Payload ID: 9876
  Gene Symbol: MCEMP1
  Gene Name: mast cell-expressed membrane protein 1
  ENSP ID: ENSP00000471413
MQAPAFRDKKQGVSAKNQVPAQCRPPSDSTQVPCWLYRAILSLYILLALAFVLCIILSAFIMVKNAEMSKELLGFKRELWNVSNSVQACEERQKRGWDSVQQSITMVRSKIDRLETTLAGIKNIDTKVQKILEVLQKMPQSSPQ

SEQ ID NO: 49336 - protein, 774 aa, Homo sapiens
  Payload ID: 9877
  Gene Symbol: MAMLD1
  Gene Name: mastermind-like domain containing 1
  Uniprot ID: Q13495
  ENSP ID: ENSP00000262858
MDDWKSRLVIKSMLPHFAMVGNRQEPRKLQESGKKPSWMEEEDLSFLYKSSPGRKHQGTVKRRQEEDHFQFPDMADGGYPNKIKRPCLEDVTLAMGPGAHPSTACAELQVPPLTINPSPAAMGVAGQSLLLENNPMNGNIMGSPFVVPQTTEVGLKGPTVPYYEKINSVPAVDQELQELLEELTKIQDPSPNELDLEKILGTKPEEPLVLDHPQATLSTTPKPSVQMSHLESLASSKEFASSCSQVTGMSLQIPSSSTGISYSIPSTSKQIVSPSSSMAQSKSQVQAMLPVALPPLPVPQWHHAHQLKALAASKQGSATKQQGPTPSWSGLPPPGLSPPYRPVPSPHPPPLPLPPPPPPFSPQSLMVSCMSSNTLSGSTLRGSPNALLSSMTSSSNAALGPAMPYAPEKLPSPALTQQPQFGPQSSILANLMSSTIKTPQGHLMSALPASNPGPSPPYRPEKLSSPGLPQQSFTPQCSLIRSLTPTSNLLSQQQQQQQQQQQANVIFKPISSNSSKTLSMIMQQGMASSSPGATEPFTFGNTKPLSHFVSEPGPQKMPSMPTTSRQPSLLHYLQQPTPTQASSATASSTATATLQLQQQQQQQQQQPDHSSFLLQQMMQQPQRFQRSVASDSMPALPRQGCCHLFAWTSAASSVKPQHQHGNSFTSRQDPQPGDVSPSNITHVDKACKLGEARHPQVSLGRQPPSCQALGSESFLPGSSFAHELARVTSSYSTSEAAPWGSWDPKAWRQVPAPLLPSCDATARGTEIRSYGNDP

SEQ ID NO: 49337 - protein, 136 aa, Homo sapiens
  Payload ID: 9877
  Gene Symbol: MAMLD1
  Gene Name: mastermind-like domain containing 1
  ENSP ID: ENSP00000351765
MDDWKSRLVIKSMLPHFAMVGNRQEPRKLQESGKKPSWMEEEDLSFLYKSSPGRKHQGTVKRRQEEDHFQFPDMADGGYPNKIKRPCLEDVTLAMGPGAHPSTACAELQVPPLTINPSPAAMGVAGQSLLLENNPM

SEQ ID NO: 49338 - protein, 774 aa, Homo sapiens; identical to SEQ ID NO: 49336
  Payload ID: 9877
  Gene Symbol: MAMLD1
  Gene Name: mastermind-like domain containing 1
  Uniprot ID: Q13495
  ENSP ID: ENSP00000359428

SEQ ID NO: 49339 - protein, 749 aa, Homo sapiens
  Payload ID: 9877
  Gene Symbol: MAMLD1
  Gene Name: mastermind-like domain containing 1
  Uniprot ID: Q13495
  ENSP ID: ENSP00000397438
MDDWKSRLVIKSMLPHFAMVGNRQEPRKLQESGTVKRRQEEDHFQFPDMADGGYPNKIKRPCLEDVTLAMGPGAHPSTACAELQVPPLTINPSPAAMGVAGQSLLLENNPMNGNIMGSPFVVPQTTEVGLKGPTVPYYEKINSVPAVDQELQELLEELTKIQDPSPNELDLEKILGTKPEEPLVLDHPQATLSTTPKPSVQMSHLESLASSKEFASSCSQVTGMSLQIPSSSTGISYSIPSTSKQIVSPSSSMAQSKSQVQAMLPVALPPLPVPQWHHAHQLKALAASKQGSATKQQGPTPSWSGLPPPGLSPPYRPVPSPHPPPLPLPPPPPPFSPQSLMVSCMSSNTLSGSTLRGSPNALLSSMTSSSNAALGPAMPYAPEKLPSPALTQQPQFGPQSSILANLMSSTIKTPQGHLMSALPASNPGPSPPYRPEKLSSPGLPQQSFTPQCSLIRSLTPTSNLLSQQQQQQQQQQQANVIFKPISSNSSKTLSMIMQQGMASSSPGATEPFTFGNTKPLSHFVSEPGPQKMPSMPTTSRQPSLLHYLQQPTPTQASSATASSTATATLQLQQQQQQQQQQPDHSSFLLQQMMQQPQRFQRSVASDSMPALPRQGCCHLFAWTSAASSVKPQHQHGNSFTSRQDPQPGDVSPSNITHVDKACKLGEARHPQVSLGRQPPSCQALGSESFLPGSSFAHELARVTSSYSTSEAAPWGSWDPKAWRQVPAPLLPSCDATARGTEIRSYGNDP

SEQ ID NO: 49340 - protein, 998 aa, Homo sapiens
  Payload ID: 9877
  Gene Symbol: MAMLD1
  Gene Name: mastermind-like domain containing 1
  Uniprot ID: Q13495
  ENSP ID: ENSP00000414517
MDDWKSRLVIKSMLPHFAMVGNRQEPRKLQESGTVKRRQEEDHFQFPDMADGGYPNKIKRPCLEDVTLAMGPGAHPSTACAELQVPPLTINPSPAAMGVAGQSLLLENNPMNGNIMGSPFVVPQTTEVGLKGPTVPYYEKINSVPAVDQELQELLEELTKIQDPSPNELDLEKILGTKPEEPLVLDHPQATLSTTPKPSVQMSHLESLASSKEFASSCSQVTGMSLQIPSSSTGISYSIPSTSKQIVSPSSSMAQSKSQVQAMLPVALPPLPVPQWHHAHQLKALAASKQGSATKQQGPTPSWSGLPPPGLSPPYRPVPSPHPPPLPLPPPPPPFSPQSLMVSCMSSNTLSGSTLRGSPNALLSSMTSSSNAALGPAMPYAPEKLPSPALTQQPQFGPQSSILANLMSSTIKTPQGHLMSALPASNPGPSPPYRPEKLSSPGLPQQSFTPQCSLIRSLTPTSNLLSQQQQQQQQQQQANVIFKPISSNSSKTLSMIMQQGMASSSPGATEPFTFGNTKPLSHFVSEPGPQKMPSMPTTSRQPSLLHYLQQPTPTQASSATASSTATATLQLQQQQQQQQQQPDHSSFLLQQMMQQPQRFQRSVASDSMPALPRQQEEQRSGLMAMTPERQNAYISQQMSPFEAVQEQVTSKCSRIKASPPSSKHLMPPRTGLLQNNLSPGMIPLTRHQSCEGMGVISPTLGKRQGIFTSSPQCPILSHSGQTPLGRLDSVCQHMQSPKATPPEVPLPGFCPSSLGTQSLSPHQLRRPSVPRMPTAFNNAAWVTAAAAVTTAVSGKTPLSQVDNSVQQHSPSGQACLQRPSDWEAQVPAAMGTQVPLANNPSFSLLGSQSLRQSPVQGPVPVANTTKFLQQGMASFSPLSPIQGIEPPSYVAAAATAAAASAVAASQFPGPFDRTDIPPELPPADFLRQPQPPLNDLISSPDCNEVDFIEALLKGSCVSPDEDWVCNLRLIDDILEQHAAAQNATAQNSGQVTQDAGAL

SEQ ID NO: 49341 - protein, 1016 aa, Homo sapiens
  Payload ID: 9878
  Gene Symbol: MAML1
  Gene Name: mastermind-like transcriptional coactivator 1
  Uniprot ID: Q92585
  ENSP ID: ENSP00000292599
MVLPTCPMAEFALPRHSAVMERLRRRIELCRRHHSTCEARYEAVSPERLELERQHTFALHQRCIQAKAKRAGKHRQPPAATAPAPAAPAPRLDAADGPEHGRPATHLHDTVKRNLDSATSPQNGDQQNGYGDLFPGHKKTRREAPLGVAISSNGLPPASPLGQSDKPSGADALQSSGKHSLGLDSLNKKRLADSSLHLNGGSNPSESFPLSLNKELKQEPVEDLPCMITGTVGSISQSNLMPDLNLNEQEWKELIEELNRSVPDEDMKDLFNEDFEEKKDPESSGSATQTPLAQDINIKTEFSPAAFEQEQLGSPQVRAGSAGQTFLGPSSAPVSTDSPSLGGSQTLFHTSGQPRADNPSPNLMPASAQAQNAQRALAGVVLPSQGPGGASELSSAHQLQQIAAKQKREQMLQNPQQATPAPAPGQMSTWQQTGPSHSSLDVPYPMEKPASPSSYKQDFTNSKLLMMPSVNKSSPRPGGPYLQPSHVNLLSHQPPSNLNQNSANNQGSVLDYGNTKPLSHYKADCGQGSPGSGQSKPALMAYLPQQLSHISHEQNSLFLMKPKPGNMPFRSLVPPGQEQNPSSVPVQAQATSVGTQPPAVSVASSHNSSPYLSSQQQAAVMKQHQLLLDQQKQREQQQKHLQQQQFLQRQQHLLAEQEKQQFQRHLTRPPPQYQDPTQGSFPQQVGQFTGSSAAVPGMNTLGPSNSSCPRVFPQAGNLMPMGPGHASVSSLPTNSGQQDRGVAQFPGSQNMPQSSLYGMASGITQIVAQPPPQATNGHAHIPRQTNVGQNTSVSAAYGQNSLGSSGLSQQHNKGTLNPGLTKPPVPRVSPAMGGQNSSWQHQGMPNLSGQTPGNSNVSPFTAASSFHMQQQAHLKMSSPQFSQAVPNRPMAPMSSAAAVGSLLPPVSAQQRTSAPAPAPPPTAPQQGLPGLSPAGPELGAFSQSPASQMGGRAGLHCTQAYPVRTAGQELPFAYSGQPGGSGLSSVAGHTDLIDSLLKNRTSEEWMSDLDDLLGSQ

SEQ ID NO: 49342 - protein, 1156 aa, Homo sapiens
  Payload ID: 9879
  Gene Symbol: MAML2
  Gene Name: mastermind-like transcriptional coactivator 2
  Uniprot ID: Q8IZL2
  ENSP ID: ENSP00000434552
MGDTAPPQAPAGGLGGASGAGLLGGGSVTPRVHSAIVERLRARIAVCRQHHLSCEGRYERGRAESSDRERESTLQLLSLVQHGQGARKAGKHTKATATAATTTAPPPPPAAPPAASQAAATAAPPPPPDYHHHHQQHLLNSSNNGGSGGINGEQQPPASTPGDQRNSALIALQGSLKRKQVVNLSPANSKRPNGFVDNSFLDIKRIRVGENLSAGQGGLQINNGQSQIMSGTLPMSQAPLRKTNTLPSHTHSPGNGLFNMGLKEVKKEPGETLSCSKHMDGQMTQENIFPNRYGDDPGEQLMDPELQELFNELTNISVPPMSDLELENMINATIKQDDPFNIDLGQQSQRSTPRPSLPMEKIVIKSEYSPGLTQGPSGSPQLRPPSAGPAFSMANSALSTSSPIPSVPQSQAQPQTGSGASRALPSWQEVSHAQQLKQIAANRQQHARMQQHQQQHQPTNWSALPSSAGPSPGPFGQEKIPSPSFGQQTFSPQSSPMPGVAGGSGQSKVMANYMYKAGPSAQGGHLDVLMQQKPQDLSRSFINNPHPAMEPRQGNTKPLFHFNSDQANQQMPSVLPSQNKPSLLHYTQQQQQQQQQQQQQQQQQQQQQQQQQQQQQQQQQQSSISAQQQQQQQSSISAQQQQQQQQQQQQQQQQQQQQQQQQQQQPSSQPAQSLPSQPLLRSPLPLQQKLLLQQMQNQPIAGMGYQVSQQQRQDQHSVVGQNTGPSPSPNPCSNPNTGSGYMNSQQSLLNQQLMGKKQTLQRQIMEQKQQLLLQQQMLADAEKIAPQDQINRHLSRPPPDYKDQRRNVGNMQPTAQYSGGSSTISLNSNQALANPVSTHTILTPNSSLLSTSHGTRMPSLSTAVQNMGMYGNLPCNQPNTYSVTSGMNQLTQQRNPKQLLANQNNPMMPRPPTLGPSNNNNVATFGAGSVGNSQQLRPNLTHSMASMPPQRTSNVMITSNTTAPNWASQEGTSKQQEALTSAGVRFPTGTPAAYTPNQSLQQAVGSQQFSQRAVAPPNQLTPAVQMRPMNQMSQTLNGQTMGPLRGLNLRPNQLSTQILPNLNQSGTGLNQSRTGINQPPSLTPSNFPSPNQSSRAFQGTDHSSDLAFDFLSQQNDNMGPALNSDADFIDSLLKTEPGNDDWMKDINLDEILGNNS

SEQ ID NO: 49343 - protein, 986 aa, Homo sapiens
  Payload ID: 9879
  Gene Symbol: MAML2
  Gene Name: mastermind-like transcriptional coactivator 2
  ENSP ID: ENSP00000483371
QLQGSLKRKQVVNLSPANSKRPNGFVDNSFLDIKRIRVGENLSAGQGGLQINNGQSQIMSGTLPMSQAPLRKTNTLPSHTHSPGNGLFNMGLKEVKKEPGETLSCSKHMDGQMTQENIFPNRYGDDPGEQLMDPELQELFNELTNISVPPMSDLELENMINATIKQDDPFNIDLGQQSQRSTPRPSLPMEKIVIKSEYSPGLTQGPSGSPQLRPPSAGPAFSMANSALSTSSPIPSVPQSQAQPQTGSGASRALPSWQEVSHAQQLKQIAANRQQHARMQQHQQQHQPTNWSALPSSAGPSPGPFGQEKIPSPSFGQQTFSPQSSPMPGVAGGSGQSKVMANYMYKAGPSAQGGHLDVLMQQKPQDLSRSFINNPHPAMEPRQGNTKPLFHFNSDQANQQMPSVLPSQNKPSLLHYTQQQQQQQQQQQQQQQQQQQQQQQQQQQQQQQQQQSSISAQQQQQQQSSISAQQQQQQQQQQQQQQQQQQQQQQQQQQQPSSQPAQSLPSQPLLRSPLPLQQKLLLQQMQNQPIAGMGYQVSQQQRQDQHSVVGQNTGPSPSPNPCSNPNTGSGYMNSQQSLLNQQLMGKKQTLQRQIMEQKQQLLLQQQMLADAEKIAPQDQINRHLSRPPPDYKDQRRNVGNMQPTAQYSGGSSTISLNSNQALANPVSTHTILTPNSSLLSTSHGTRMPSLSTAVQNMGMYGNLPCNQPNTYSVTSGMNQLTQQRNPKQLLANQNNPMMPRPPTLGPSNNNNVATFGAGSVGNSQQLRPNLTHSMASMPPQRTSNVMITSNTTAPNWASQEGTSKQQEALTSAGVRFPTGTPAAYTPNQSLQQAVGSQQFSQRAVAPPNQLTPAVQMRPMNQMSQTLNGQTMGPLRGLNLRPNQLSTQILPNLNQSGTGLNQSRTGINQPPSLTPSNFPSPNQSSRAFQGTDHSSDLAFDFLSQQNDNMGPALNSDADFIDSLLKTEPGNDDWMKDINLDEILGNNS

SEQ ID NO: 49344 - protein, 276 aa, Homo sapiens
  Payload ID: 9880
  Gene Symbol: MAML3
  Gene Name: mastermind-like transcriptional coactivator 3
  ENSP ID: ENSP00000381913
MSPAEQLKQMAAQQQQRAKLMQQKQQQQQQQQQQQQQQHSNQTSNWSPLGPPSSPYGAAFTAEKPNSPMMYPQAFNNQNPIVPPMANNLQKTTMNNYLPQNHMNMINQQPNNLGTNSLNKQHNILTYGNTKPLTHFNADLSQRMTPPVANPNKNPLMPYIQQQQQQQQQQQQQQQQQQPPPPQLQAPRAHLSEDQKRLLLMKQKGVMNQPMAYAALPSHGQVSVKVTHSSSSSCGAFDCRCVMFYKSTVVGSNCLQKTSLHPQVVARFGVFFFHFS

SEQ ID NO: 49345 - protein, 1138 aa, Homo sapiens
  Payload ID: 9880
  Gene Symbol: MAML3
  Gene Name: mastermind-like transcriptional coactivator 3
  Uniprot ID: Q96JK9
  ENSP ID: ENSP00000421180
MGDFAAPAAAANGSSICINSSLNSSLGGAGIGVNNTPNSTPAAPSSNHPAAGGCGGSGGPGGGSAAVPKHSTVVERLRQRIEGCRRHHVNCENRYQQAQVEQLELERRDTVSLYQRTLEQRAKKSGAGTGKQQHPSKPQQDAEAASAEQRNHTLIMLQETVKRKLEGARSPLNGDQQNGACDGNFSPTSKRIRKDISAGMEAINNLPSNMPLPSASPLHQLDLKPSLPLQNSGTHTPGLLEDLSKNGRLPEIKLPVNGCSDLEDSFTILQSKDLKQEPLDDPTCIDTSETSLSNQNKLFSDINLNDQEWQELIDELANTVPEDDIQDLFNEDFEEKKEPEFSQPATETPLSQESASVKSDPSHSPFAHVSMGSPQARPSSSGPPFSTVSTATSLPSVASTPAAPNPASSPANCAVQSPQTPNQAHTPGQAPPRPGNGYLLNPAAVTVAGSASGPVAVPSSDMSPAEQLKQMAAQQQQRAKLMQQKQQQQQQQQQQQQQQQQQQQQQQQQQHSNQTSNWSPLGPPSSPYGAAFTAEKPNSPMMYPQAFNNQNPIVPPMANNLQKTTMNNYLPQNHMNMINQQPNNLGTNSLNKQHNILTYGNTKPLTHFNADLSQRMTPPVANPNKNPLMPYIQQQQQQQQQQQQQQQQQQPPPPQLQAPRAHLSEDQKRLLLMKQKGVMNQPMAYAALPSHGQEQHPVGLPRTTGPMQSSVPPGSGGMVSGASPAGPGFLGSQPQAAIMKQMLIDQRAQLIEQQKQQFLREQRQQQQQQQQQILAEQQLQQSHLPRQHLQPQRNPYPVQQVNQFQGSPQDIAAVRSQAALQSMRTSRLMAQNAGMMGIGPSQNPGTMATAAAQSEMGLAPYSTTPTSQPGMYNMSTGMTQMLQHPNQSGMSITHNQAQGPRQPASGQGVGMVSGFGQSMLVNSAITQQHPQMKGPVGQALPRPQAPPRLQSLMGTVQQGAQSWQQRSLQGMPGRTSGELGPFNNGASYPLQAGQPRLTKQHFPQGLSQSVVDANTGTVRTLNPAAMGRQMMPSLPGQQGTSQARPMVMSGLSQGVPGMPAFSQPPAQQQIPSGSFAPSSQSQAYERNAPQDVSYNYSGDGAGGSFPGLPDGADLVDSIIKGGPGDEWMQELDELFGNP

SEQ ID NO: 49346 - protein, 186 aa, Homo sapiens
  Payload ID: 9880
  Gene Symbol: MAML3
  Gene Name: mastermind-like transcriptional coactivator 3
  ENSP ID: ENSP00000422783
  MOD_RES (1)..(1): Any amino acid
XRAKKSGAGTGKQQHPSKPQQDAEAASAEQRNHTLIMEQHPVGLPRTTGPMQSSVPPGSGGMVSGASPAGPGFLGSQPQAAIMKQMLIDQRAQLIEQQKQQFLREQRQQQQQQQQQILAEQQLQQSHLPRQHLQPQRNPYPVQQVNQFQGSPQDIAAVRSQAALQSMRTSRLMAQNAGMMGIGPSQ

SEQ ID NO: 49347 - protein, 651 aa, Homo sapiens
  Payload ID: 9881
  Gene Symbol: MELK
  Gene Name: maternal embryonic leucine zipper kinase
  Uniprot ID: Q14680
  ENSP ID: ENSP00000298048
MKDYDELLKYYELHETIGTGGFAKVKLACHILTGEMVAIKIMDKNTLGSDLPRIKTEIEALKNLRHQHICQLYHVLETANKIFMVLEYCPGGELFDYIISQDRLSEEETRVVFRQIVSAVAYVHSQGYAHRDLKPENLLFDEYHKLKLIDFGLCAKPKGNKDYHLQTCCGSLAYAAPELIQGKSYLGSEADVWSMGILLYVLMCGFLPFDDDNVMALYKKIMRGKYDVPKWLSPSSILLLQQMLQVDPKKRISMKNLLNHPWIMQDYNYPVEWQSKNPFIHLDDDCVTELSVHHRNNRQTMEDLISLWQYDHLTATYLLLLAKKARGKPVRLRLSSFSCGQASATPFTDIKSNNWSLEDVTASDKNYVAGLIDYDWCEDDLSTGAATPRTSQFTKYWTESNGVESKSLTPALCRTPANKLKNKENVYTPKSAVKNEEYFMFPEPKTPVNKNQHKREILTTPNRYTTPSKARNQCLKETPIKIPVNSTGTDKLMTGVISPERRCRSVELDLNQAHMEETPKRKGAKVFGSLERGLDKVITVLTRSKRKGSARDGPRRLKLHYNVTTTRLVNPDQLLNEIMSILPKKHVDFVQKGYTLKCQTQSDFGKVTMQFELEVCQLQKPDVVGIRRQRLKGDAWVYKRLVEDILSSCKV

SEQ ID NO: 49348 - protein, 610 aa, Homo sapiens
  Payload ID: 9881
  Gene Symbol: MELK
  Gene Name: maternal embryonic leucine zipper kinase
  Uniprot ID: Q14680
  ENSP ID: ENSP00000437804
MKDYDELLKYYELHETIGTGGFAKVKLACHILTGEMVAIKIMDKNTLGSDLPRIKTEIEALKNLRHQHICQLYHVLETANKIFMVLEYCPGGELFDYIISQDRLSEEETRVVFRQIVSAVAYVHSQGYAHRDLKPENLLFDEYHKLKLIDFGLCAKPKGNKDYHLQTCCGSLAYAAPELIQGKSYLGSEADVWSMGILLYVLMCGFLPFDDDNVMALYKKIMRGKYDVPKWLSPSSILLLQQMLQVDPKKRISMKNLLNHPWIMQDYNYPVEWQSKNPFIHLDDDCVTELSVHHRNNRQTMEDLISLWQYDHLTATYLLLLAKKARGKPVRLRLSSFSCGQASATPFTDIKFTKYWTESNGVESKSLTPALCRTPANKLKNKENVYTPKSAVKNEEYFMFPEPKTPVNKNQHKREILTTPNRYTTPSKARNQCLKETPIKIPVNSTGTDKLMTGVISPERRCRSVELDLNQAHMEETPKRKGAKVFGSLERGLDKVITVLTRSKRKGSARDGPRRLKLHYNVTTTRLVNPDQLLNEIMSILPKKHVDFVQKGYTLKCQTQSDFGKVTMQFELEVCQLQKPDVVGIRRQRLKGDAWVYKRLVEDILSSCKV

SEQ ID NO: 49349 - protein, 520 aa, Homo sapiens
  Payload ID: 9881
  Gene Symbol: MELK
  Gene Name: maternal embryonic leucine zipper kinase
  Uniprot ID: Q14680
  ENSP ID: ENSP00000439184
MVLEENLLFDEYHKLKLIDFGLCAKPKGNKDYHLQTCCGSLAYAAPELIQGKSYLGSEADVWSMGILLYVLMCGFLPFDDDNVMALYKKIMRGKYDVPKWLSPSSILLLQQMLQVDPKKRISMKNLLNHPWIMQDYNYPVEWQSKNPFIHLDDDCVTELSVHHRNNRQTMEDLISLWQYDHLTATYLLLLAKKARGKPVRLRLSSFSCGQASATPFTDIKSNNWSLEDVTASDKNYVAGLIDYDWCEDDLSTGAATPRTSQFTKYWTESNGVESKSLTPALCRTPANKLKNKENVYTPKSAVKNEEYFMFPEPKTPVNKNQHKREILTTPNRYTTPSKARNQCLKETPIKIPVNSTGTDKLMTGVISPERRCRSVELDLNQAHMEETPKRKGAKVFGSLERGLDKVITVLTRSKRKGSARDGPRRLKLHYNVTTTRLVNPDQLLNEIMSILPKKHVDFVQKGYTLKCQTQSDFGKVTMQFELEVCQLQKPDVVGIRRQRLKGDAWVYKRLVEDILSSCKV

SEQ ID NO: 49350 - protein, 603 aa, Homo sapiens
  Payload ID: 9881
  Gene Symbol: MELK
  Gene Name: maternal embryonic leucine zipper kinase
  Uniprot ID: Q14680
  ENSP ID: ENSP00000439792
MKDYDELLKYYELHETIGTGGFAKVKLACHILTGEMVAIKIMDKNTLGSDLPRIKTEIEALKNLRHQHICQLYHVLETANKIFMVLEENLLFDEYHKLKLIDFGLCAKPKGNKDYHLQTCCGSLAYAAPELIQGKSYLGSEADVWSMGILLYVLMCGFLPFDDDNVMALYKKIMRGKYDVPKWLSPSSILLLQQMLQVDPKKRISMKNLLNHPWIMQDYNYPVEWQSKNPFIHLDDDCVTELSVHHRNNRQTMEDLISLWQYDHLTATYLLLLAKKARGKPVRLRLSSFSCGQASATPFTDIKSNNWSLEDVTASDKNYVAGLIDYDWCEDDLSTGAATPRTSQFTKYWTESNGVESKSLTPALCRTPANKLKNKENVYTPKSAVKNEEYFMFPEPKTPVNKNQHKREILTTPNRYTTPSKARNQCLKETPIKIPVNSTGTDKLMTGVISPERRCRSVELDLNQAHMEETPKRKGAKVFGSLERGLDKVITVLTRSKRKGSARDGPRRLKLHYNVTTTRLVNPDQLLNEIMSILPKKHVDFVQKGYTLKCQTQSDFGKVTMQFELEVCQLQKPDVVGIRRQRLKGDAWVYKRLVEDILSSCKV

SEQ ID NO: 49351 - protein, 619 aa, Homo sapiens
  Payload ID: 9881
  Gene Symbol: MELK
  Gene Name: maternal embryonic leucine zipper kinase
  Uniprot ID: Q14680
  ENSP ID: ENSP00000441596
MMNFSNIMNYMKLLGQSDLPRIKTEIEALKNLRHQHICQLYHVLETANKIFMVLEYCPGGELFDYIISQDRLSEEETRVVFRQIVSAVAYVHSQGYAHRDLKPENLLFDEYHKLKLIDFGLCAKPKGNKDYHLQTCCGSLAYAAPELIQGKSYLGSEADVWSMGILLYVLMCGFLPFDDDNVMALYKKIMRGKYDVPKWLSPSSILLLQQMLQVDPKKRISMKNLLNHPWIMQDYNYPVEWQSKNPFIHLDDDCVTELSVHHRNNRQTMEDLISLWQYDHLTATYLLLLAKKARGKPVRLRLSSFSCGQASATPFTDIKSNNWSLEDVTASDKNYVAGLIDYDWCEDDLSTGAATPRTSQFTKYWTESNGVESKSLTPALCRTPANKLKNKENVYTPKSAVKNEEYFMFPEPKTPVNKNQHKREILTTPNRYTTPSKARNQCLKETPIKIPVNSTGTDKLMTGVISPERRCRSVELDLNQAHMEETPKRKGAKVFGSLERGLDKVITVLTRSKRKGSARDGPRRLKLHYNVTTTRLVNPDQLLNEIMSILPKKHVDFVQKGYTLKCQTQSDFGKVTMQFELEVCQLQKPDVVGIRRQRLKGDAWVYKRLVEDILSSCKV

SEQ ID NO: 49352 - protein, 580 aa, Homo sapiens
  Payload ID: 9881
  Gene Symbol: MELK
  Gene Name: maternal embryonic leucine zipper kinase
  Uniprot ID: Q14680
  ENSP ID: ENSP00000443550
MMNFSNIMNYMKLLGQYCPGGELFDYIISQDRLSEEETRVVFRQIVSAVAYVHSQGYAHRDLKPENLLFDEYHKLKLIDFGLCAKPKGNKDYHLQTCCGSLAYAAPELIQGKSYLGSEADVWSMGILLYVLMCGFLPFDDDNVMALYKKIMRGKYDVPKWLSPSSILLLQQMLQVDPKKRISMKNLLNHPWIMQDYNYPVEWQSKNPFIHLDDDCVTELSVHHRNNRQTMEDLISLWQYDHLTATYLLLLAKKARGKPVRLRLSSFSCGQASATPFTDIKSNNWSLEDVTASDKNYVAGLIDYDWCEDDLSTGAATPRTSQFTKYWTESNGVESKSLTPALCRTPANKLKNKENVYTPKSAVKNEEYFMFPEPKTPVNKNQHKREILTTPNRYTTPSKARNQCLKETPIKIPVNSTGTDKLMTGVISPERRCRSVELDLNQAHMEETPKRKGAKVFGSLERGLDKVITVLTRSKRKGSARDGPRRLKLHYNVTTTRLVNPDQLLNEIMSILPKKHVDFVQKGYTLKCQTQSDFGKVTMQFELEVCQLQKPDVVGIRRQRLKGDAWVYKRLVEDILSSCKV

SEQ ID NO: 49353 - protein, 580 aa, Homo sapiens
  Payload ID: 9881
  Gene Symbol: MELK
  Gene Name: maternal embryonic leucine zipper kinase
  Uniprot ID: Q14680
  ENSP ID: ENSP00000445452
MKDYDELLKYYELHETIGTGGFAKVKLACHILTGEMVAIKIMDKNTLGSDLPRIKTEIEALKNLRHQHICQLYHVLETANKIFMVLEGNKDYHLQTCCGSLAYAAPELIQGKSYLGSEADVWSMGILLYVLMCGFLPFDDDNVMALYKKIMRGKYDVPKWLSPSSILLLQQMLQVDPKKRISMKNLLNHPWIMQDYNYPVEWQSKNPFIHLDDDCVTELSVHHRNNRQTMEDLISLWQYDHLTATYLLLLAKKARGKPVRLRLSSFSCGQASATPFTDIKSNNWSLEDVTASDKNYVAGLIDYDWCEDDLSTGAATPRTSQFTKYWTESNGVESKSLTPALCRTPANKLKNKENVYTPKSAVKNEEYFMFPEPKTPVNKNQHKREILTTPNRYTTPSKARNQCLKETPIKIPVNSTGTDKLMTGVISPERRCRSVELDLNQAHMEETPKRKGAKVFGSLERGLDKVITVLTRSKRKGSARDGPRRLKLHYNVTTTRLVNPDQLLNEIMSILPKKHVDFVQKGYTLKCQTQSDFGKVTMQFELEVCQLQKPDVVGIRRQRLKGDAWVYKRLVEDILSSCKV

SEQ ID NO: 49354 - protein, 165 aa, Homo sapiens
  Payload ID: 9881
  Gene Symbol: MELK
  Gene Name: maternal embryonic leucine zipper kinase
  ENSP ID: ENSP00000486459
MVLEYCPGGELFDYIISQDRLSEEETRVVFRQIVSAVAYVHSQGYAHRDLKPENLLFDEYHKLKLIDFGLCAKPKGNKDYHLQTCCGSLAYAAPELIQGKSYLGSEMEFHCVAQAGVQWRDLGSLQPPTLGFKRFSCLSLPSSWDCRCLEHGHTVICSYVWISTI

SEQ ID NO: 49355 - protein, 129 aa, Homo sapiens
  Payload ID: 9881
  Gene Symbol: MELK
  Gene Name: maternal embryonic leucine zipper kinase
  ENSP ID: ENSP00000486558
MVLEYCPGGELFDYIISQDRLSEEETRVVFRQIVSAVAYVHSQGYAHRDLKPENLLFDEYHKLKLIDFGLCAKPKGNKDYHLQTCCGSLAYAAPELIQGKSYLGSEMFGAWAYCYMFLCVDFYHLMMIM

SEQ ID NO: 49356 - protein, 157 aa, Homo sapiens
  Payload ID: 9881
  Gene Symbol: MELK
  Gene Name: maternal embryonic leucine zipper kinase
  ENSP ID: ENSP00000486717
MVLEYCPGGELFDYIISQDRLSEEETRVVFRQIVSAVAYVHSQGYAHRDLKPENLLFDEYHKLKLIDFGLCAKPKGNKDYHLQTCCGSLAYAAPELIQGKSYLGSEAGVQWRDLGSLQPPTLGFKRFSCLSLPSSWDCRCLEHGHTVICSYVWISTI

SEQ ID NO: 49357 - protein, 215 aa, Homo sapiens
  Payload ID: 9881
  Gene Symbol: MELK
  Gene Name: maternal embryonic leucine zipper kinase
  ENSP ID: ENSP00000487536
MKDYDELLKYYELHETIGTGGFAKVKLACHILTGEMVAIKIMDKNTLGSDLPRIKTEIEALKNLRHQHICQLYHVLETANKIFMVLEENLLFDEYHKLKLIDFGLCAKPKGNKDYHLQTCCGSLAYAAPELIQGKSYLGSEADVWSMGILLYVLMCGFLPFDDDNVMALYKKIMRGKYDVPKWLSPSSILLLQQMLQVDPKKRISMKNLLNHPWI

SEQ ID NO: 49358 - protein, 496 aa, Homo sapiens
  Payload ID: 9882
  Gene Symbol: MATN1
  Gene Name: matrilin 1, cartilage matrix protein
  Uniprot ID: P21941
  ENSP ID: ENSP00000362870
MRVLSGTSLMLCSLLLLLQALCSPGLAPQSRGHLCRTRPTDLVFVVDSSRSVRPVEFEKVKVFLSQVIESLDVGPNATRVGMVNYASTVKQEFSLRAHVSKAALLQAVRRIQPLSTGTMTGLAIQFAITKAFGDAEGGRSRSPDISKVVIVVTDGRPQDSVQDVSARARASGVELFAIGVGSVDKATLRQIASEPQDEHVDYVESYSVIEKLSRKFQEAFCVVSDLCATGDHDCEQVCISSPGSYTCACHEGFTLNSDGKTCNVCSGGGGSSATDLVFLIDGSKSVRPENFELVKKFISQIVDTLDVSDKLAQVGLVQYSSSVRQEFPLGRFHTKKDIKAAVRNMSYMEKGTMTGAALKYLIDNSFTVSSGARPGAQKVGIVFTDGRSQDYINDAAKKAKDLGFKMFAVGVGNAVEDELREIASEPVAEHYFYTADFKTINQIGKKLQKKICVEEDPCACESLVKFQAKVEGLLQALTRKLEAVSKRLAILENTVV

SEQ ID NO: 49359 - protein, 956 aa, Homo sapiens
  Payload ID: 9883
  Gene Symbol: MATN2
  Gene Name: matrilin 2
  Uniprot ID: O00339
  ENSP ID: ENSP00000254898
MEKMLAGCFLLILGQIVLLPAEARERSRGRSISRGRHARTHPQTALLESSCENKRADLVFIIDSSRSVNTHDYAKVKEFIVDILQFLDIGPDVTRVGLLQYGSTVKNEFSLKTFKRKSEVERAVKRMRHLSTGTMTGLAIQYALNIAFSEAEGARPLRENVPRVIMIVTDGRPQDSVAEVAAKARDTGILIFAIGVGQVDFNTLKSIGSEPHEDHVFLVANFSQIETLTSVFQKKLCTAHMCSTLEHNCAHFCINIPGSYVCRCKQGYILNSDQTTCRIQDLCAMEDHNCEQLCVNVPGSFVCQCYSGYALAEDGKRCVAVDYCASENHGCEHECVNADGSYLCQCHEGFALNPDKKTCTKIDYCASSNHGCQHECVNTDDSYSCHCLKGFTLNPDKKTCRRINYCALNKPGCEHECVNMEESYYCRCHRGYTLDPNGKTCSRVDHCAQQDHGCEQLCLNTEDSFVCQCSEGFLINEDLKTCSRVDYCLLSDHGCEYSCVNMDRSFACQCPEGHVLRSDGKTCAKLDSCALGDHGCEHSCVSSEDSFVCQCFEGYILREDGKTCRRKDVCQAIDHGCEHICVNSDDSYTCECLEGFRLAEDGKRCRRKDVCKSTHHGCEHICVNNGNSYICKCSEGFVLAEDGRRCKKCTEGPIDLVFVIDGSKSLGEENFEVVKQFVTGIIDSLTISPKAARVGLLQYSTQVHTEFTLRNFNSAKDMKKAVAHMKYMGKGSMTGLALKHMFERSFTQGEGARPLSTRVPRAAIVFTDGRAQDDVSEWASKAKANGITMYAVGVGKAIEEELQEIASEPTNKHLFYAEDFSTMDEISEKLKKGICEALEDSDGRQDSPAGELPKTVQQPTESEPVTINIQDLLSCSNFAVQHRYLFEEDNLLRSTQKLSHSTKPSGSPLEEKHDQCKCENLIMFQNLANEEVRKLTQRLEEMTQRMEALENRLRYR

SEQ ID NO: 49360 - protein, 672 aa, Homo sapiens
  Payload ID: 9883
  Gene Symbol: MATN2
  Gene Name: matrilin 2
  Uniprot ID: O00339
  ENSP ID: ENSP00000429010
MEDHNCEQLCVNVPGSFVCQCYSGYALAEDGKRCVAVDYCASENHGCEHECVNADGSYLCQCHEGFALNPDKKTCTKIDYCASSNHGCQHECVNTDDSYSCHCLKGFTLNPDKKTCRRINYCALNKPGCEHECVNMEESYYCRCHRGYTLDPNGKTCSRVDHCAQQDHGCEQLCLNTEDSFVCQCSEGFLINEDLKTCSRVDYCLLSDHGCEYSCVNMDRSFACQCPEGHVLRSDGKTCAKLDSCALGDHGCEHSCVSSEDSFVCQCFEGYILREDGKTCRRKDVCQAIDHGCEHICVNSDDSYTCECLEGFRLAEDGKRCRRKDVCKSTHHGCEHICVNNGNSYICKCSEGFVLAEDGRRCKKCTEGPIDLVFVIDGSKSLGEENFEVVKQFVTGIIDSLTISPKAARVGLLQYSTQVHTEFTLRNFNSAKDMKKAVAHMKYMGKGSMTGLALKHMFERSFTQGEGARPLSTRVPRAAIVFTDGRAQDDVSEWASKAKANGITMYAVGVGKAIEEELQEIASEPTNKHLFYAEDFSTMDEISEKLKKGICEALEDSDGRQDSPAGELPKTVQQPTESEPVTINIQDLLSCSNFAVQHRYLFEEDNLLRSTQKLSHSTKPSGSPLEEKHDQCKCENLIMFQNLANEEVRKLTQRLEEMTQRMEALENRLRYR

SEQ ID NO: 49361 - protein, 115 aa, Homo sapiens
  Payload ID: 9883
  Gene Symbol: MATN2
  Gene Name: matrilin 2
  ENSP ID: ENSP00000429042
MEDHNCEQLCVNVPGSFVCQCYSGYALAEDGKRCVAVDYCASENHGCEHECVNADGSYLCQCHEGFALNPDKKTCTKIDYCASSNHGCQHECVNTDDSYSCHCLKGFTLNPDKKT

SEQ ID NO: 49362 - protein, 155 aa, Homo sapiens
  Payload ID: 9883
  Gene Symbol: MATN2
  Gene Name: matrilin 2
  ENSP ID: ENSP00000429256
  MOD_RES (1)..(1): Any amino acid
XVDYCLLSDHGCEYSCVNMDRSFACQCPEGHVLRSDGKTCAKLDSCALGDHGCEHSCVSSEDSFVCQCFEGYILREDGKTCRRKDVCQAIDHGCEHICVNSDDSYTCECLEGFRLAEDGKRCRSKMSANQPTMAANTFVLIMGIPTSANAQRDLF

SEQ ID NO: 49363 - protein, 131 aa, Homo sapiens
  Payload ID: 9883
  Gene Symbol: MATN2
  Gene Name: matrilin 2
  ENSP ID: ENSP00000429354
  MOD_RES (1)..(1): Any amino acid
XEDSDGRQDSPAGELPKTVQQPTESEPVTINIQDLLSCSNFAVQHRYLFEEDNLLRSTQKLSHSTKPSGSPLEEKHDQCKCENLIMFQNLANEEVRKLTQRYILFLHYASVWNAKNIIKTSHTLCRFYQLK

SEQ ID NO: 49364 - protein, 720 aa, Homo sapiens
  Payload ID: 9883
  Gene Symbol: MATN2
  Gene Name: matrilin 2
  ENSP ID: ENSP00000429622
  MOD_RES (1)..(1): Any amino acid
XAEVAAKARDTGILIFAIGVGQVDFNTLKSIGSEPHEDHVFLVANFSQIETLTSVFQKKLCTAHMCSTLEHNCAHFCINIPGSYVCRCKQGYILNSDQTTCRTVDYCASENHGCEHECVNADGSYLCQCHEGFALNPDKKTCTKIDYCASSNHGCQHECVNTDDSYSCHCLKGFTLNPDKKTCRRINYCALNKPGCEHECVNMEESYYCRCHRGYTLDPNGKTCSRVDHCAQQDHGCEQLCLNTEDSFVCQCSEGFLINEDLKTCSRVDYCLLSDHGCEYSCVNMDRSFACQCPEGHVLRSDGKTCAKLDSCALGDHGCEHSCVSSEDSFVCQCFEGYILREDGKTCRRKDVCQAIDHGCEHICVNSDDSYTCECLEGFRLAEDGKRCRRKDVCKSTHHGCEHICVNNGNSYICKCSEGFVLAEDGRRCKKCTEGPIDLVFVIDGSKSLGEENFEVVKQFVTGIIDSLTISPKAARVGLLQYSTQVHTEFTLRNFNSAKDMKKAVAHMKYMGKGSMTGLALKHMFERSFTQGEGARPLSTRVPRAAIVFTDGRAQDDVSEWASKAKANGITMYAVGVGKAIEEELQEIASEPTNKHLFYAEDFSTMDEISEKLKKGICEALEDSDGRQDSPAGELPKTVQQPTVQHRYLFEEDNLLRSTQKLSHSTKPSGSPLEEKHDQCKCENLIMFQNLANEEVRKLTQRLEEMTQRMEALENRLRYR

SEQ ID NO: 49365 - protein, 195 aa, Homo sapiens
  Payload ID: 9883
  Gene Symbol: MATN2
  Gene Name: matrilin 2
  ENSP ID: ENSP00000429825
QCYSGYALAEDGKRCVAVDYCASENHGCEHECVNADGSYLCQCHEGFALNPDKKTCTKIDYCASSNHGCQHECVNTDDSYSCHCLKGFTLNPDKKTCRSLPFFPSGINYCALNKPGCEHECVNMEESYYCRCHRGYTLDPNGKTCSRVDHCAQQDHGCEQLCLNTEDSFVCQCSEGFLINEDLKTCSRVDYCLLS

SEQ ID NO: 49366 - protein, 183 aa, Homo sapiens
  Payload ID: 9883
  Gene Symbol: MATN2
  Gene Name: matrilin 2
  ENSP ID: ENSP00000429885
  MOD_RES (1)..(1): Any amino acid
XDSCALGDHGCEHSCVSSEDSFVCQCFEGYILREDGKTCRRKDVCQAIDHGCEHICVNSDDSYTCECLEGFRLAEDGKRCRKCTEGPIDLVFVIDGSKSLGEENFEVVKQFVTGIIDSLTISPKAARVGLLQYSTQVHTEFTLRNFNSAKDMKKAVAHMKYMGKGSMTGLALKHMFERSFTQG

SEQ ID NO: 49367 - protein, 937 aa, Homo sapiens
  Payload ID: 9883
  Gene Symbol: MATN2
  Gene Name: matrilin 2
  Uniprot ID: O00339
  ENSP ID: ENSP00000429977
MEKMLAGCFLLILGQIVLLPAEARERSRGRSISRGRHARTHPQTALLESSCENKRADLVFIIDSSRSVNTHDYAKVKEFIVDILQFLDIGPDVTRVGLLQYGSTVKNEFSLKTFKRKSEVERAVKRMRHLSTGTMTGLAIQYALNIAFSEAEGARPLRENVPRVIMIVTDGRPQDSVAEVAAKARDTGILIFAIGVGQVDFNTLKSIGSEPHEDHVFLVANFSQIETLTSVFQKKLCTAHMCSTLEHNCAHFCINIPGSYVCRCKQGYILNSDQTTCRIQDLCAMEDHNCEQLCVNVPGSFVCQCYSGYALAEDGKRCVAVDYCASENHGCEHECVNADGSYLCQCHEGFALNPDKKTCTKIDYCASSNHGCQHECVNTDDSYSCHCLKGFTLNPDKKTCRRINYCALNKPGCEHECVNMEESYYCRCHRGYTLDPNGKTCSRVDHCAQQDHGCEQLCLNTEDSFVCQCSEGFLINEDLKTCSRVDYCLLSDHGCEYSCVNMDRSFACQCPEGHVLRSDGKTCAKLDSCALGDHGCEHSCVSSEDSFVCQCFEGYILREDGKTCRRKDVCQAIDHGCEHICVNSDDSYTCECLEGFRLAEDGKRCRRKDVCKSTHHGCEHICVNNGNSYICKCSEGFVLAEDGRRCKKCTEGPIDLVFVIDGSKSLGEENFEVVKQFVTGIIDSLTISPKAARVGLLQYSTQVHTEFTLRNFNSAKDMKKAVAHMKYMGKGSMTGLALKHMFERSFTQGEGARPLSTRVPRAAIVFTDGRAQDDVSEWASKAKANGITMYAVGVGKAIEEELQEIASEPTNKHLFYAEDFSTMDEISEKLKKGICEALEDSDGRQDSPAGELPKTVQQPTVQHRYLFEEDNLLRSTQKLSHSTKPSGSPLEEKHDQCKCENLIMFQNLANEEVRKLTQRLEEMTQRMEALENRLRYR

SEQ ID NO: 49368 - protein, 915 aa, Homo sapiens
  Payload ID: 9883
  Gene Symbol: MATN2
  Gene Name: matrilin 2
  Uniprot ID: O00339
  ENSP ID: ENSP00000430221
MEKMLAGCFLLILGQIVLLPAEARERSRGRSISRGRHARTHPQTALLESSCENKRADLVFIIDSSRSVNTHDYAKVKEFIVDILQFLDIGPDVTRVGLLQYGSTVKNEFSLKTFKRKSEVERAVKRMRHLSTGTMTGLAIQYALNIAFSEAEGARPLRENVPRVIMIVTDGRPQDSVAEVAAKARDTGILIFAIGVGQVDFNTLKSIGSEPHEDHVFLVANFSQIETLTSVFQKKLCTAHMCSTLEHNCAHFCINIPGSYVCRCKQGYILNSDQTTCRIQDLCAMEDHNCEQLCVNVPGSFVCQCYSGYALAEDGKRCVAVDYCASENHGCEHECVNADGSYLCQCHEGFALNPDKKTCTRINYCALNKPGCEHECVNMEESYYCRCHRGYTLDPNGKTCSRVDHCAQQDHGCEQLCLNTEDSFVCQCSEGFLINEDLKTCSRVDYCLLSDHGCEYSCVNMDRSFACQCPEGHVLRSDGKTCAKLDSCALGDHGCEHSCVSSEDSFVCQCFEGYILREDGKTCRRKDVCQAIDHGCEHICVNSDDSYTCECLEGFRLAEDGKRCRRKDVCKSTHHGCEHICVNNGNSYICKCSEGFVLAEDGRRCKKCTEGPIDLVFVIDGSKSLGEENFEVVKQFVTGIIDSLTISPKAARVGLLQYSTQVHTEFTLRNFNSAKDMKKAVAHMKYMGKGSMTGLALKHMFERSFTQGEGARPLSTRVPRAAIVFTDGRAQDDVSEWASKAKANGITMYAVGVGKAIEEELQEIASEPTNKHLFYAEDFSTMDEISEKLKKGICEALEDSDGRQDSPAGELPKTVQQPTESEPVTINIQDLLSCSNFAVQHRYLFEEDNLLRSTQKLSHSTKPSGSPLEEKHDQCKCENLIMFQNLANEEVRKLTQRLEEMTQRMEALENRLRYR

SEQ ID NO: 49369 - protein, 176 aa, Homo sapiens
  Payload ID: 9883
  Gene Symbol: MATN2
  Gene Name: matrilin 2
  ENSP ID: ENSP00000430358
  MOD_RES (1)..(1): Any amino acid
XFTQGEGARPLSTRVPRAAIVFTDGRAQDDVSEWASKAKANGITMYAVGVGKAIEEELQEIASEPTNKHLFYAEDFSTMDEISEKLKKGICEALEDSDGRQDSPAGELPKTVQQPTVQHRYLFEEDNLLRSTQKLSHSTKPSGSPLEEKHDQCKCENLIMFQNLANEEQRSSLSAL

SEQ ID NO: 49370 - protein, 181 aa, Homo sapiens
  Payload ID: 9883
  Gene Symbol: MATN2
  Gene Name: matrilin 2
  ENSP ID: ENSP00000430396
  MOD_RES (1)..(1): Any amino acid
XSIGSEPHEDHVFLVANFSQIETLTSVFQKKLCIQDLCAMEDHNCEQLCVNVPGSFVCQCYSGYALAEDGKRCVAVDYCASENHGCEHECVNADGSYLCQCHEGFALNPDKKTCTKIDYCASSNHGCQHECVNTDDSYSCHCLKGFTLNPDKKTCRRINYCALNKPGCEHECVNMEESYYC

SEQ ID NO: 49371 - protein, 956 aa, Homo sapiens; identical to SEQ ID NO: 49359
  Payload ID: 9883
  Gene Symbol: MATN2
  Gene Name: matrilin 2
  Uniprot ID: O00339
  ENSP ID: ENSP00000430487

SEQ ID NO: 49372 - protein, 486 aa, Homo sapiens
  Payload ID: 9884
  Gene Symbol: MATN3
  Gene Name: matrilin 3
  Uniprot ID: O15232
  ENSP ID: ENSP00000383894
MPRPAPARRLPGLLLLLWPLLLLPSAAPDPVARPGFRRLETRGPGGSPGRRPSPAAPDGAPASGTSEPGRARGAGVCKSRPLDLVFIIDSSRSVRPLEFTKVKTFVSRIIDTLDIGPADTRVAVVNYASTVKIEFQLQAYTDKQSLKQAVGRITPLSTGTMSGLAIQTAMDEAFTVEAGAREPSSNIPKVAIIVTDGRPQDQVNEVAARAQASGIELYAVGVDRADMASLKMMASEPLEEHVFYVETYGVIEKLSSRFQETFCALDPCVLGTHQCQHVCISDGEGKHHCECSQGYTLNADKKTCSALDRCALNTHGCEHICVNDRSGSYHCECYEGYTLNEDRKTCSAQDKCALGTHGCQHICVNDRTGSHHCECYEGYTLNADKKTCSVRDKCALGSHGCQHICVSDGAASYHCDCYPGYTLNEDKKTCSATEEARRLVSTEDACGCEATLAFQDKVSSYLQRLNTKLDDILEKLKINEYGQIHR

SEQ ID NO: 49373 - protein, 444 aa, Homo sapiens
  Payload ID: 9884
  Gene Symbol: MATN3
  Gene Name: matrilin 3
  Uniprot ID: O15232
  ENSP ID: ENSP00000398753
MPRPAPARRLPGLLLLLWPLLLLPSAAPDPVARPGFRRLETRGPGGSPGRRPSPAAPDGAPASGTSEPGRARGAGVCKSRPLDLVFIIDSSRSVRPLEFTKVKTFVSRIIDTLDIGPADTRVAVVNYASTVKIEFQLQAYTDKQSLKQAVGRITPLSTGTMSGLAIQTAMDEAFTVEAGAREPSSNIPKVAIIVTDGRPQDQVNEVAARAQASGIELYAVGVDRADMASLKMMASEPLEEHVFYVETYGVIEKLSSRFQETFCALDRCALNTHGCEHICVNDRSGSYHCECYEGYTLNEDRKTCSAQDKCALGTHGCQHICVNDRTGSHHCECYEGYTLNADKKTCSVRDKCALGSHGCQHICVSDGAASYHCDCYPGYTLNEDKKTCSATEEARRLVSTEDACGCEATLAFQDKVSSYLQRLNTKLDDILEKLKINEYGQIHR

SEQ ID NO: 49374 - protein, 499 aa, Homo sapiens
  Payload ID: 9885
  Gene Symbol: MATN4
  Gene Name: matrilin 4
  ENSP ID: ENSP00000243983
MRGLLCWPVLLLLLQPWETQLQLTGPRCHTGPLDLVFVIDSSRSVRPFEFETMRQFLMGLLRGLNVGPNATRVGVIQYSSQVQSVFPLRAFSRREDMERAIRDLVPLAQGTMTGLAIQYAMNVAFSVAEGARPPEERVPRVAVIVTDGRPQDRVAEVAAQARARGIEIYAVGVQRADVGSLRAMASPPLDEHVFLVESFDLIQEFGLQFQSRLCVRDLCNGVDHGCEFQCVSEGLSYRCLCPEGRQLQADGKSCNRCREGHVDLVLLVDGSKSVRPQNFELVKRFVNQIVDFLDVSPEGTRVGLVQFSSRVRTEFPLGRYGTAAEVKQAVLAVEYMERGTMTGLALRHMVEHSFSEAQGARPRALNVPRVGLVFTDGRSQDDISVWAARAKEEGIVMYAVGVGKAVEAELREIASEPAELHVSYAPDFGTMTHLLENLRGSICPEEGISAGTELRSPCECESLVEFQGRTLGALESLTLNLAQLTARLEDLENQLANQK

SEQ ID NO: 49375 - protein, 540 aa, Homo sapiens
  Payload ID: 9885
  Gene Symbol: MATN4
  Gene Name: matrilin 4
  Uniprot ID: O95460
  ENSP ID: ENSP00000353819
MRGLLCWPVLLLLLQPWETQLQLTGPRCHTGPLDLVFVIDSSRSVRPFEFETMRQFLMGLLRGLNVGPNATRVGVIQYSSQVQSVFPLRAFSRREDMERAIRDLVPLAQGTMTGLAIQYAMNVAFSVAEGARPPEERVPRVAVIVTDGRPQDRVAEVAAQARARGIEIYAVGVQRADVGSLRAMASPPLDEHVFLVESFDLIQEFGLQFQSRLCAIDYCSFGNHSCQHECVSTPGGPRCHCREGHDLQPDGRSCQVRDLCNGVDHGCEFQCVSEGLSYRCLCPEGRQLQADGKSCNRCREGHVDLVLLVDGSKSVRPQNFELVKRFVNQIVDFLDVSPEGTRVGLVQFSSRVRTEFPLGRYGTAAEVKQAVLAVEYMERGTMTGLALRHMVEHSFSEAQGARPRALNVPRVGLVFTDGRSQDDISVWAARAKEEGIVMYAVGVGKAVEAELREIASEPAELHVSYAPDFGTMTHLLENLRGSICPEEGISAGTELRSPCECESLVEFQGRTLGALESLTLNLAQLTARLEDLENQLANQK

SEQ ID NO: 49376 - protein, 622 aa, Homo sapiens
  Payload ID: 9885
  Gene Symbol: MATN4
  Gene Name: matrilin 4
  Uniprot ID: O95460
  ENSP ID: ENSP00000361840
MRGLLCWPVLLLLLQPWETQLQLTGPRCHTGPLDLVFVIDSSRSVRPFEFETMRQFLMGLLRGLNVGPNATRVGVIQYSSQVQSVFPLRAFSRREDMERAIRDLVPLAQGTMTGLAIQYAMNVAFSVAEGARPPEERVPRVAVIVTDGRPQDRVAEVAAQARARGIEIYAVGVQRADVGSLRAMASPPLDEHVFLVESFDLIQEFGLQFQSRLCGKDQCAEGGHGCQHQCVNAWAMFHCTCNPGYKLAADNKSCLAIDLCAEGTHGCEHHCVNSPGSYFCHCQVGFVLQQDQRSCRAIDYCSFGNHSCQHECVSTPGGPRCHCREGHDLQPDGRSCQVRDLCNGVDHGCEFQCVSEGLSYRCLCPEGRQLQADGKSCNRCREGHVDLVLLVDGSKSVRPQNFELVKRFVNQIVDFLDVSPEGTRVGLVQFSSRVRTEFPLGRYGTAAEVKQAVLAVEYMERGTMTGLALRHMVEHSFSEAQGARPRALNVPRVGLVFTDGRSQDDISVWAARAKEEGIVMYAVGVGKAVEAELREIASEPAELHVSYAPDFGTMTHLLENLRGSICPEEGISAGTELRSPCECESLVEFQGRTLGALESLTLNLAQLTARLEDLENQLANQK

SEQ ID NO: 49377 - protein, 581 aa, Homo sapiens
  Payload ID: 9885
  Gene Symbol: MATN4
  Gene Name: matrilin 4
  Uniprot ID: O95460
  ENSP ID: ENSP00000361842
MRGLLCWPVLLLLLQPWETQLQLTGPRCHTGPLDLVFVIDSSRSVRPFEFETMRQFLMGLLRGLNVGPNATRVGVIQYSSQVQSVFPLRAFSRREDMERAIRDLVPLAQGTMTGLAIQYAMNVAFSVAEGARPPEERVPRVAVIVTDGRPQDRVAEVAAQARARGIEIYAVGVQRADVGSLRAMASPPLDEHVFLVESFDLIQEFGLQFQSRLCAIDLCAEGTHGCEHHCVNSPGSYFCHCQVGFVLQQDQRSCRAIDYCSFGNHSCQHECVSTPGGPRCHCREGHDLQPDGRSCQVRDLCNGVDHGCEFQCVSEGLSYRCLCPEGRQLQADGKSCNRCREGHVDLVLLVDGSKSVRPQNFELVKRFVNQIVDFLDVSPEGTRVGLVQFSSRVRTEFPLGRYGTAAEVKQAVLAVEYMERGTMTGLALRHMVEHSFSEAQGARPRALNVPRVGLVFTDGRSQDDISVWAARAKEEGIVMYAVGVGKAVEAELREIASEPAELHVSYAPDFGTMTHLLENLRGSICPEEGISAGTELRSPCECESLVEFQGRTLGALESLTLNLAQLTARLEDLENQLANQK

SEQ ID NO: 49378 - protein, 581 aa, Homo sapiens; identical to SEQ ID NO: 49377
  Payload ID: 9885
  Gene Symbol: MATN4
  Gene Name: matrilin 4
  Uniprot ID: O95460
  ENSP ID: ENSP00000440328

SEQ ID NO: 49379 - protein, 847 aa, Homo sapiens
  Payload ID: 9886
  Gene Symbol: MATR3
  Gene Name: matrin 3
  Uniprot ID: P43243
  ENSP ID: ENSP00000378284
MSKSFQQSSLSRDSQGHGRDLSAAGIGLLAAATQSLSMPASLGRMNQGTARLASLMNLGMSSSLNQQGAHSALSSASTSSHNLQSIFNIGSRGPLPLSSQHRGDADQASNILASFGLSARDLDELSRYPEDKITPENLPQILLQLKRRRTEEGPTLSYGRDGRSATREPPYRVPRDDWEEKRHFRRDSFDDRGPSLNPVLDYDHGSRSQESGYYDRMDYEDDRLRDGERCRDDSFFGETSHNYHKFDSEYERMGRGPGPLQERSLFEKKRGAPPSSNIEDFHGLLPKGYPHLCSICDLPVHSNKEWSQHINGASHSRRCQLLLEIYPEWNPDNDTGHTMGDPFMLQQSTNPAPGILGPPPPSFHLGGPAVGPRGNLGAGNGNLQGPRHMQKGRVETSRVVHIMDFQRGKNLRYQLLQLVEPFGVISNHLILNKINEAFIEMATTEDAQAAVDYYTTTPALVFGKPVRVHLSQKYKRIKKPEGKPDQKFDQKQELGRVIHLSNLPHSGYSDSAVLKLAEPYGKIKNYILMRMKSQAFIEMETREDAMAMVDHCLKKALWFQGRCVKVDLSEKYKKLVLRIPNRGIDLLKKDKSRKRSYSPDGKESPSDKKSKTDGSQKTESSTEGKEQEEKSGEDGEKDTKDDQTEQEPNMLLESEDELLVDEEEAAALLESGSSVGDETDLANLGDVASDGKKEPSDKAVKKDGSASAAAKKKLKKVDKIEELDQENEAALENGIKNEENTEPGAESSENADDPNKDTSENADGQSDENKDDYTIPDEYRIGPYQPNVPVGIDYVIPKTGFYCKLCSLFYTNEEVAKNTHCSSLPHYQKLKKFLNKLAEERRQKKET

SEQ ID NO: 49380 - protein, 77 aa, Homo sapiens
  Payload ID: 9886
  Gene Symbol: MATR3
  Gene Name: matrin 3
  ENSP ID: ENSP00000421145
MSKSFQQSSLSRDSQGHGRDLSAAGIGLLAAATQSLSMPASLGRMNQGTARLASLMNLGMSSSLNQQGAHSALSSAS

SEQ ID NO: 49381 - protein, 334 aa, Homo sapiens
  Payload ID: 9886
  Gene Symbol: MATR3
  Gene Name: matrin 3
  ENSP ID: ENSP00000422054
  MOD_RES (1)..(1): Any amino acid
XERCRDDSFFGETSHNYHKFDSEYERMGRGPGPLQERSLFEKKRGAPPSSNIEDFHGLLPKGYPHLCSICDLPVHSNKEWSQHINGASHSRRCQLLLEMGDPFMLQQSTNPAPGILGPPPPSFHLGGPAVGPRGNLGAGNGNLQGPRHMQKGRVETSRVVHIMDFQRGKNLRYQLLQLVEPFGVISNHLILNKINEAFIEMATTEDAQAAVDYYTTTPALVFGKPVRVHLSQKYKRIKKPEGKPDQKFDQKQELGRVIHLSNLPHSGYSDSAVLKLAEPYGKIKNYILMRMKSQAFIEMETREDAMAMVDHCLKKALWFQGRCVKVDLSEKYKK

SEQ ID NO: 49382 - protein, 78 aa, Homo sapiens
  Payload ID: 9886
  Gene Symbol: MATR3
  Gene Name: matrin 3
  ENSP ID: ENSP00000422137
MSKSFQQSSLSRDSQGHGRDLSAAGIGLLAAATQSLSMPASLGRMNQGTARLASLMNLGMSSSLNQQGAHSALSSAST

SEQ ID NO: 49383 - protein, 87 aa, Homo sapiens
  Payload ID: 9886
  Gene Symbol: MATR3
  Gene Name: matrin 3
  ENSP ID: ENSP00000422590
MSKSFQQSSLSRDSQGHGRDLSAAGIGLLAAATQSLSMPASLGRMNQGTARLASLMNLGMSSSLNQQGAHSALSSASTSSHNLQSIF

SEQ ID NO: 49384 - protein, 121 aa, Homo sapiens
  Payload ID: 9886
  Gene Symbol: MATR3
  Gene Name: matrin 3
  ENSP ID: ENSP00000422649
MDFQRGKNLRYQLLQLVEPFGVISNHLILNKINEAFIEMATTEDAQAAVDYYTTTPALVFGKPVRVHLSQKYKRIKKPEGKPDQKFDQKQELGRVIHLSNLPHSGYSDSAVLKLAEPYGKI

SEQ ID NO: 49385 - protein, 109 aa, Homo sapiens
  Payload ID: 9886
  Gene Symbol: MATR3
  Gene Name: matrin 3
  ENSP ID: ENSP00000422700
MGDPFMLQQSTNPAPGILGPPPPSFHLGGPAVGPRGNLGAGNGNLQGPRHMQKGRVETSRVVHIMDFQRGKNLRYQLLQLVEPFGVISNHLILNKINEAFIEMATTEDA

SEQ ID NO: 49386 - protein, 433 aa, Homo sapiens
  Payload ID: 9886
  Gene Symbol: MATR3
  Gene Name: matrin 3
  ENSP ID: ENSP00000423290
MSKSFQQSSLSRDSQGHGRDLSAAGIGLLAAATQSLSMPASLGRMNQGTARLASLMNLGMSSSLNQQGAHSALSSASTSSHNLQSIFNIGSRGPLPLSSQHRGDADQASNILASFGLSARDLDELSRYPEDKITPENLPQILLQLKRRRTEEGPTLSYGRDGRSATREPPYRVPRDDWEEKRHFRRDSFDDRGPSLNPVLDYDHGSRSQESGYYDRMDYEDDRLRDGERCRDDSFFGETSHNYHKFDSEYERMGRGPGPLQERSLFEKKRGAPPSSNIEDFHGLLPKGYPHLCSICDLPVHSNKEWSQHINGASHSRRCQLLLEIYPEWNPDNDTGHTMGDPFMLQQSTNPAPGILGPPPPSFHLGGPAVGPRGNLGAGNGNLQGPRHMQKGRVETSRVVHIMDFQRGKNLRYQLLQLVEPFGVISNHLILNK

SEQ ID NO: 49387 - protein, 559 aa, Homo sapiens
  Payload ID: 9886
  Gene Symbol: MATR3
  Gene Name: matrin 3
  Uniprot ID: P43243
  ENSP ID: ENSP00000423587
MLGAQWRRNQPSRAAEEWSQHINGASHSRRCQLLLEIYPEWNPDNDTGHTMGDPFMLQQSTNPAPGILGPPPPSFHLGGPAVGPRGNLGAGNGNLQGPRHMQKGRVETSRVVHIMDFQRGKNLRYQLLQLVEPFGVISNHLILNKINEAFIEMATTEDAQAAVDYYTTTPALVFGKPVRVHLSQKYKRIKKPEGKPDQKFDQKQELGRVIHLSNLPHSGYSDSAVLKLAEPYGKIKNYILMRMKSQAFIEMETREDAMAMVDHCLKKALWFQGRCVKVDLSEKYKKLVLRIPNRGIDLLKKDKSRKRSYSPDGKESPSDKKSKTDGSQKTESSTEGKEQEEKSGEDGEKDTKDDQTEQEPNMLLESEDELLVDEEEAAALLESGSSVGDETDLANLGDVASDGKKEPSDKAVKKDGSASAAAKKKLKKVDKIEELDQENEAALENGIKNEENTEPGAESSENADDPNKDTSENADGQSDENKDDYTIPDEYRIGPYQPNVPVGIDYVIPKTGFYCKLCSLFYTNEEVAKNTHCSSLPHYQKLKKFLNKLAEERRQKKET

SEQ ID NO: 49388 - protein, 86 aa, Homo sapiens
  Payload ID: 9886
  Gene Symbol: MATR3
  Gene Name: matrin 3
  ENSP ID: ENSP00000424646
MGDPFMLQQSTNPAPGILGPPPPSFHLGGPAVGPRGNLGAGNGNLQGPRHMQKGRVETSRVVHIMDFQRGKNLRYQLLQLVEPFGV

SEQ ID NO: 49389 - protein, 124 aa, Homo sapiens
  Payload ID: 9886
  Gene Symbol: MATR3
  Gene Name: matrin 3
  ENSP ID: ENSP00000425150
MGDPFMLQQSTNPAPGILGPPPPSFHLGGPAVGPRGNLGAGNGNLQGPRHMQKGRVETSRVVHIMDFQRGKNLRYQLLQLVEPFGVISNHLILNKINEAFIEMATTEDAQAAVDYYTTTPALVF

SEQ ID NO: 49390 - protein, 9 aa, Homo sapiens
  Payload ID: 9886
  Gene Symbol: MATR3
  Gene Name: matrin 3
  ENSP ID: ENSP00000425167
MSKSFQQSS

SEQ ID NO: 49391 - protein, 509 aa, Homo sapiens
  Payload ID: 9886
  Gene Symbol: MATR3
  Gene Name: matrin 3
  ENSP ID: ENSP00000426030
MGDPFMLQQSTNPAPGILGPPPPSFHLGGPAVGPRGNLGAGNGNLQGPRHMQKGRVETSRVVHIMDFQRGKNLRYQLLQLVEPFGVISNHLILNKINEAFIEMATTEDAQAAVDYYTTTPALVFGKPVRVHLSQKYKRIKKPEGKPDQKFDQKQELGRVIHLSNLPHSGYSDSAVLKLAEPYGKIKNYILMRMKSQAFIEMETREDAMAMVDHCLKKALWFQGRCVKVDLSEKYKKLVLRIPNRGIDLLKKDKSRKRSYSPDGKESPSDKKSKTDGSQKTESSTEGKEQEEKSGEDGEKDTKDDQTEQEPNMLLESEDELLVDEEEAAALLESGSSVGDETDLANLGDVASDGKKEPSDKAVKKDGSASAAAKKKLKKVDKIEELDQENEAALENGIKNEENTEPGAESSENADDPNKDTSENADGQSDENKDDYTIPDEYRIGPYQPNVPVGIDYVIPKTGFYCKLCSLFYTNEEVAKNTHCSSLPHYQKLKKFLNKLAEERRQKKET

SEQ ID NO: 49392 - protein, 794 aa, Homo sapiens
  Payload ID: 9886
  Gene Symbol: MATR3
  Gene Name: matrin 3
  ENSP ID: ENSP00000426743
MSKSFQQSSLSRDSQGHGRDLSAAGIGLLAAATQSLSMPASLGRMNQGTARLASLMNLGMSSSLNQQGAHSALSSASTSSHNLQSIFNIGSRGPLPLSSQHRGDADQASNILASFGLSARDLDELSRYPEDKITPENLPQILLQLKRRRTEEGPTLSYGRDGRSATREPPYRVPRDDWEEKRHFRRDSFDDRGPSLNPVLDYDHGSRSQESGYYDRMDYEDDRLRDGERCRDDSFFGETSHNYHKFDSEYERMGRGPGPLQERSLFEKKRGAPPSSNIEDFHGLLPKGYPHLCSICDLPVHSNKEWSQHINGASHSRRCQLLLEIYPEWNPDNDTGHTMGDPFMLQQSTNPAPGILGPPPPSFHLGGPAVGPRGNLGAGNGNLQGPRHMQKGRVETSRVVHIMDFQRGKNLRYQLLQLVEPFGVISNHLILNKINEAFIEMATTEDAQAAVDYYTTTPALVFGKPVRVHLSQKYKRIKKPEGKPDQKFDQKQELGRVIHLSNLPHSGYSDSAVLKLAEPYGKIKNYILMRMKSQAFIEMETREDAMAMVDHCLKKALWFQGRCVKVDLSEKYKKLVLRIPNRGIDLLKKDKSRKRSYSPDGKESPSDKKSKTDGSQKTESSTEGKEQEEKSGEDGEKDTKDDQTEQEPNMLLESEDELLVDEEEAAALLESGSSVGDETDLANLGDVASDGKKEPSDKAVKKDGSASAAAKKKLKKVDKIEELDQENEAALENGIKNEENTEPGAESSENADDPNKDTSENADGQSDENKDDYTIPDEYRIGPYQPNVPVEISE

SEQ ID NO: 49393 - protein, 100 aa, Homo sapiens
  Payload ID: 9886
  Gene Symbol: MATR3
  Gene Name: matrin 3
  ENSP ID: ENSP00000426801
MSKSFQQSSLSRDSQGHGRDLSAAGIGLLAAATQSLSMPASLGRMNQGTARLASLMNLGMSSSLNQQGAHSALSSASTSSHNLQSIFNIGSRGPLPLSSQ

SEQ ID NO: 49394 - protein, 172 aa, Homo sapiens
  Payload ID: 9886
  Gene Symbol: MATR3
  Gene Name: matrin 3
  ENSP ID: ENSP00000427557
MLGAQWRRNQPSRAAEVSGPGGKHAAGQGPRVRREILGEEEWSQHINGASHSRRCQLLLEIYPEWNPDNDTGHTMGDPFMLQQSTNPAPGILGPPPPSFHLGGPAVGPRGNLGAGNGNLQGPRHMQKGRVETSRVVHIMDFQRGKNLRYQLLQLVEPFGVISNHLILNKINE

SEQ ID NO: 49395 - protein, 847 aa, Homo sapiens; identical to SEQ ID NO: 49379
  Payload ID: 9887
  Gene Symbol:
  Gene Name: matrin 3 [Source:EntrezGene
  Acc:9782]
  ENSP ID: ENSP00000354346

SEQ ID NO: 49396 - protein, 895 aa, Homo sapiens
  Payload ID: 9887
  Gene Symbol:
  Gene Name: matrin 3 [Source:EntrezGene
  Acc:9782]
  ENSP ID: ENSP00000378279
MSKSFQQSSLSRDSQGHGRDLSAAGIGLLAAATQSLSMPASLGRMNQGTARLASLMNLGMSSSLNQQGAHSALSSASTSSHNLQSIFNIGSRGPLPLSSQHRGDADQASNILASFGLSARDLDELSRYPEDKITPENLPQILLQLKRRRTEEGPTLSYGRDGRSATREPPYRVPRDDWEEKRHFRRDSFDDRGPSLNPVLDYDHGSRSQESGYYDRMDYEDDRLRDGERCRDDSFFGETSHNYHKFDSEYERMGRGPGPLQERSLFEKKRGAPPSSNIEDFHGLLPKGYPHLCSICDLPVHSNKEWSQHINGASHSRRCQLLLEIYPEWNPDNDTGHTMGDPFMLQQSTNPAPGILGPPPPSFHLGGPAVGPRGNLGAGNGNLQGPRHMQKGRVETSRVVHIMDFQRGKNLRYQLLQLVEPFGVISNHLILNKINEAFIEMATTEDAQAAVDYYTTTPALVFGKPVRVHLSQKYKRIKKPEGKPDQKFDQKQELGRVIHLSNLPHSGYSDSAVLKLAEPYGKIKNYILMRMKSQAFIEMETREDAMAMVDHCLKKALWFQGRCVKVDLSEKYKKLVLRIPNRGIDLLKKDKSRKRSYSPDGKESPSDKKSKTDGSQKTESSTEGKEQEEKSGEDGEKDTKDDQTEQEPNMLLESEDELLVDEEEAAALLESGSSVGDETDLANLGDVASDGKKEPSDKAVKKDGSASAAAKKKLKKRRFPGSMEGFVTLDEVGDEEDSELQKLRKSGMAFKSGDKNDDGLVEIKVDKIEELDQENEAALENGIKNEENTEPGAESSENADDPNKDTSENADGQSDENKDDYTIPDEYRIGPYQPNVPVGIDYVIPKTGFYCKLCSLFYTNEEVAKNTHCSSLPHYQKLKKFLNKLAEERRQKKET

SEQ ID NO: 49397 - protein, 509 aa, Homo sapiens; identical to SEQ ID NO: 49391
  Payload ID: 9887
  Gene Symbol:
  Gene Name: matrin 3 [Source:EntrezGene
  Acc:9782]
  ENSP ID: ENSP00000421218

SEQ ID NO: 49398 - protein, 81 aa, Homo sapiens
  Payload ID: 9887
  Gene Symbol:
  Gene Name: matrin 3 [Source:EntrezGene
  Acc:9782]
  ENSP ID: ENSP00000421666
MGDPFMLQQSTNPAPGILGPPPPSFHLGGPAVGPRGNLGAGNGNLQGPRHMQKGRVETSRVVHIMDFQRGKNLRYQLLQLV

SEQ ID NO: 49399 - protein, 107 aa, Homo sapiens
  Payload ID: 9887
  Gene Symbol:
  Gene Name: matrin 3 [Source:EntrezGene
  Acc:9782]
  ENSP ID: ENSP00000422233
MSKSFQQSSLSRDSQGHGRDLSAAGIGLLAAATQSLSMPASLGRMNQGTARLASLMNLGMSSSLNQQGAHSALSSASTSSHNLQSIFNIGSRGPLPLSSQHRGDADQ

SEQ ID NO: 49400 - protein, 895 aa, Homo sapiens; identical to SEQ ID NO: 49396
  Payload ID: 9887
  Gene Symbol:
  Gene Name: matrin 3 [Source:EntrezGene
  Acc:9782]
  ENSP ID: ENSP00000422319

SEQ ID NO: 49401 - protein, 63 aa, Homo sapiens
  Payload ID: 9887
  Gene Symbol:
  Gene Name: matrin 3 [Source:EntrezGene
  Acc:9782]
  ENSP ID: ENSP00000423521
MQLQEWSQHINGASHSRRCQLLLEIYPEWNPDNDTGHTMGDPFMLQQSTNPAPGILGPPPPSF

SEQ ID NO: 49402 - protein, 847 aa, Homo sapiens; identical to SEQ ID NO: 49379
  Payload ID: 9887
  Gene Symbol:
  Gene Name: matrin 3 [Source:EntrezGene
  Acc:9782]
  Uniprot ID: P43243
  ENSP ID: ENSP00000423533

SEQ ID NO: 49403 - protein, 6 aa, Homo sapiens
  Payload ID: 9887
  Gene Symbol:
  Gene Name: matrin 3 [Source:EntrezGene
  Acc:9782]
  ENSP ID: ENSP00000423695
MGDPFM

SEQ ID NO: 49404 - protein, 47 aa, Homo sapiens
  Payload ID: 9887
  Gene Symbol:
  Gene Name: matrin 3 [Source:EntrezGene
  Acc:9782]
  ENSP ID: ENSP00000424431
MSKSFQQSSLSRDSQGHGRDLSAAGIGLLAAATQSLSMPASLGRMNQ

SEQ ID NO: 49405 - protein, 99 aa, Homo sapiens
  Payload ID: 9887
  Gene Symbol:
  Gene Name: matrin 3 [Source:EntrezGene
  Acc:9782]
  ENSP ID: ENSP00000427168
MSKSFQQSSLSRDSQGHGRDLSAAGIGLLAAATQSLSMPASLGRMNQGTARLASLMNLGMSSSLNQQGAHSALSSASTSSHNLQSIFNIGSRGPLPLSS

SEQ ID NO: 49406 - protein, 283 aa, Homo sapiens
  Payload ID: 9887
  Gene Symbol:
  Gene Name: matrin 3 [Source:EntrezGene
  Acc:9782]
  ENSP ID: ENSP00000480093
MSKSFQQSSLSRDSQGHGRDLSAAGIGLLAAATQSLSMLLESEDELLVDEEEAAALLESGSSVGDETDLANLGDVASDGKKEPSDKAVKKDGSASAAAKKKLKKRRFPGSMEGFVTLDEVGDEEDSELQKLRKSGMAFKSGDKNDDGLVEIKVDKIEELDQENEAALENGIKNEENTEPGAESSENADDPNKDTSENADGQSDENKDDYTIPDEYRIGPYQPNVPVGIDYVIPKTGFYCKLCSLFYTNEEVAKNTHCSSLPHYQKLKKFLNKLAEERRQKKET

SEQ ID NO: 49407 - protein, 847 aa, Homo sapiens; identical to SEQ ID NO: 49379
  Payload ID: 9887
  Gene Symbol:
  Gene Name: matrin 3 [Source:EntrezGene
  Acc:9782]
  Uniprot ID: P43243
  ENSP ID: ENSP00000482895

SEQ ID NO: 49408 - protein, 525 aa, Homo sapiens
  Payload ID: 9888
  Gene Symbol: MEPE
  Gene Name: matrix extracellular phosphoglycoprotein
  Uniprot ID: Q9NQ76
  ENSP ID: ENSP00000354341
MRVFCVGLLLFSVTWAAPTFQPQTEKTKQSCVEEQRQEEKNKDNIGFHHLGKRINQELSSKENIVQERKKDLSLSEASENKGSSKSQNYFTNRQRLNKEYSISNKENTHNGLRMSIYPKSTGNKGFEDGDDAISKLHDQEEYGAALIRNNMQHIMGPVTAIKLLGEENKENTPRNVLNIIPASMNYAKAHSKDKKKPQRDSQAQKSPVKSKSTHRIQHNIDYLKHLSKVKKIPSDFEGSGYTDLQERGDNDISPFSGDGQPFKDIPGKGEATGPDLEGKDIQTGFAGPSEAESTHLDTKKPGYNEIPEREENGGNTIGTRDETAKEADAVDVSLVEGSNDIMGSTNFKELPGREGNRVDAGSQNAHQGKVEFHYPPAPSKEKRKEGSSDAAESTNYNEIPKNGKGSTRKGVDHSNRNQATLNEKQRFPSKGKSQGLPIPSRGLDNEIKNEMDSFNGPSHENIITHGRKYHYVPHRQNNSTRNKGMPQGKGSWGRQPHSNRRFSSRRRDDSSESSDSGSSSESDGD

SEQ ID NO: 49409 - protein, 556 aa, Homo sapiens
  Payload ID: 9888
  Gene Symbol: MEPE
  Gene Name: matrix extracellular phosphoglycoprotein
  Uniprot ID: Q9NQ76
  ENSP ID: ENSP00000378534
MRVFCVGLLLFSVTWAAPTFQPQTEKTKQSCVEEQRITYKGHYEKHGHYVFKCVYMSPEKKNQTDVKQEEKNKDNIGFHHLGKRINQELSSKENIVQERKKDLSLSEASENKGSSKSQNYFTNRQRLNKEYSISNKENTHNGLRMSIYPKSTGNKGFEDGDDAISKLHDQEEYGAALIRNNMQHIMGPVTAIKLLGEENKENTPRNVLNIIPASMNYAKAHSKDKKKPQRDSQAQKSPVKSKSTHRIQHNIDYLKHLSKVKKIPSDFEGSGYTDLQERGDNDISPFSGDGQPFKDIPGKGEATGPDLEGKDIQTGFAGPSEAESTHLDTKKPGYNEIPEREENGGNTIGTRDETAKEADAVDVSLVEGSNDIMGSTNFKELPGREGNRVDAGSQNAHQGKVEFHYPPAPSKEKRKEGSSDAAESTNYNEIPKNGKGSTRKGVDHSNRNQATLNEKQRFPSKGKSQGLPIPSRGLDNEIKNEMDSFNGPSHENIITHGRKYHYVPHRQNNSTRNKGMPQGKGSWGRQPHSNRRFSSRRRDDSSESSDSGSSSESDGD

SEQ ID NO: 49410 - protein, 525 aa, Homo sapiens; identical to SEQ ID NO: 49408
  Payload ID: 9888
  Gene Symbol: MEPE
  Gene Name: matrix extracellular phosphoglycoprotein
  Uniprot ID: Q9NQ76
  ENSP ID: ENSP00000416984

SEQ ID NO: 49411 - protein, 96 aa, Homo sapiens
  Payload ID: 9888
  Gene Symbol: MEPE
  Gene Name: matrix extracellular phosphoglycoprotein
  ENSP ID: ENSP00000421430
MRVFCVGLLLFSVTWAAPTFQPQTEKTKQSCVEEQRAPQASLLQNSGSQNLPDPHPMPRPTSRSASGPVAAGVILMDLSRKKKTKTILVFTIWARE

SEQ ID NO: 49412 - protein, 501 aa, Homo sapiens
  Payload ID: 9888
  Gene Symbol: MEPE
  Gene Name: matrix extracellular phosphoglycoprotein
  ENSP ID: ENSP00000422747
MSPEKKNQTDVKQEEKNKDNIGFHHLGKRINQELSSKENIVQERKKDLSLSEASENKGSSKSQNYFTNRQRLNKEYSISNKENTHNGLRMSIYPKSTGNKGFEDGDDAISKLHDQEEYGAALIRNNMQHIMGPVTAIKLLGEENKENTPRNVLNIIPASMNYAKAHSKDKKKPQRDSQAQKSPVKSKSTHRIQHNIDYLKHLSKVKKIPSDFEGSGYTDLQERGDNDISPFSGDGQPFKDIPGKGEATGPDLEGKDIQTGFAGPSEAESTHLDTKKPGYNEIPEREENGGNTIGTRDETAKEADAVDVSLVEGSNDIMGSTNFKELPGREGNRVDAGSQNAHQGKVEFHYPPAPSKEKRKEGSSDAAESTNYNEIPKNGKGSTRKGVDHSNRNQATLNEKQRFPSKGKSQGLPIPSRGLDNEIKNEMDSFNGPSHENIITHGRKYHYVPHRQNNSTRNKGMPQGKGSWGRQPHSNRRFSSRRRDDSSESSDSGSSSESDGD

SEQ ID NO: 49413 - protein, 412 aa, Homo sapiens
  Payload ID: 9888
  Gene Symbol: MEPE
  Gene Name: matrix extracellular phosphoglycoprotein
  Uniprot ID: Q9NQ76
  ENSP ID: ENSP00000443491
MSIYPKSTGNKGFEDGDDAISKLHDQEEYGAALIRNNMQHIMGPVTAIKLLGEENKENTPRNVLNIIPASMNYAKAHSKDKKKPQRDSQAQKSPVKSKSTHRIQHNIDYLKHLSKVKKIPSDFEGSGYTDLQERGDNDISPFSGDGQPFKDIPGKGEATGPDLEGKDIQTGFAGPSEAESTHLDTKKPGYNEIPEREENGGNTIGTRDETAKEADAVDVSLVEGSNDIMGSTNFKELPGREGNRVDAGSQNAHQGKVEFHYPPAPSKEKRKEGSSDAAESTNYNEIPKNGKGSTRKGVDHSNRNQATLNEKQRFPSKGKSQGLPIPSRGLDNEIKNEMDSFNGPSHENIITHGRKYHYVPHRQNNSTRNKGMPQGKGSWGRQPHSNRRFSSRRRDDSSESSDSGSSSESDGD

SEQ ID NO: 49414 - protein, 412 aa, Homo sapiens; identical to SEQ ID NO: 49413
  Payload ID: 9888
  Gene Symbol: MEPE
  Gene Name: matrix extracellular phosphoglycoprotein
  Uniprot ID: Q9NQ76
  ENSP ID: ENSP00000453994

SEQ ID NO: 49415 - protein, 128 aa, Homo sapiens
  Payload ID: 9889
  Gene Symbol: MGP
  Gene Name: matrix Gla protein
  Uniprot ID: P08493
  ENSP ID: ENSP00000228938
MKSLILLAILAALAVVTLCYGEWQKEENFGFDIVSVLSLNWHRAQESHESMESYELNPFINRRNANTFISPQQRWRAKVQERIRERSKPVHELNREACDDYRLCERYAMVYGYNAAYNRYFRKRRGTK

SEQ ID NO: 49416 - protein, 74 aa, Homo sapiens
  Payload ID: 9889
  Gene Symbol: MGP
  Gene Name: matrix Gla protein
  ENSP ID: ENSP00000445436
  MOD_RES (1)..(1): Any amino acid
XSHESMESYELRSENALSLSTSSIGKPVMTTDFANATPWFMDTMLPIIATSGSAEGPNETEGRKKISFFLEAGT

SEQ ID NO: 49417 - protein, 103 aa, Homo sapiens
  Payload ID: 9889
  Gene Symbol: MGP
  Gene Name: matrix Gla protein
  Uniprot ID: P08493
  ENSP ID: ENSP00000445907
MKSLILLAILAALAVVTLCYESHESMESYELNPFINRRNANTFISPQQRWRAKVQERIRERSKPVHELNREACDDYRLCERYAMVYGYNAAYNRYFRKRRGTK

SEQ ID NO: 49418 - protein, 469 aa, Homo sapiens
  Payload ID: 9890
  Gene Symbol: MMP1
  Gene Name: matrix metallopeptidase 1
  Uniprot ID: P03956
  ENSP ID: ENSP00000322788
MHSFPPLLLLLFWGVVSHSFPATLETQEQDVDLVQKYLEKYYNLKNDGRQVEKRRNSGPVVEKLKQMQEFFGLKVTGKPDAETLKVMKQPRCGVPDVAQFVLTEGNPRWEQTHLTYRIENYTPDLPRADVDHAIEKAFQLWSNVTPLTFTKVSEGQADIMISFVRGDHRDNSPFDGPGGNLAHAFQPGPGIGGDAHFDEDERWTNNFREYNLHRVAAHELGHSLGLSHSTDIGALMYPSYTFSGDVQLAQDDIDGIQAIYGRSQNPVQPIGPQTPKACDSKLTFDAITTIRGEVMFFKDRFYMRTNPFYPEVELNFISVFWPQLPNGLEAAYEFADRDEVRFFKGNKYWAVQGQNVLHGYPKDIYSSFGFPRTVKHIDAALSEENTGKTYFFVANKYWRYDEYKRSMDPGYPKMIAHDFPGIGHKVDAVFMKDGFFYFFHGTRQYKFDPKTKRILTLQKANSWFNCRKN

SEQ ID NO: 49419 - protein, 476 aa, Homo sapiens
  Payload ID: 9891
  Gene Symbol: MMP10
  Gene Name: matrix metallopeptidase 10
  Uniprot ID: P09238
  ENSP ID: ENSP00000279441
MMHLAFLVLLCLPVCSAYPLSGAAKEEDSNKDLAQQYLEKYYNLEKDVKQFRRKDSNLIVKKIQGMQKFLGLEVTGKLDTDTLEVMRKPRCGVPDVGHFSSFPGMPKWRKTHLTYRIVNYTPDLPRDAVDSAIEKALKVWEEVTPLTFSRLYEGEADIMISFAVKEHGDFYSFDGPGHSLAHAYPPGPGLYGDIHFDDDEKWTEDASGTNLFLVAAHELGHSLGLFHSANTEALMYPLYNSFTELAQFRLSQDDVNGIQSLYGPPPASTEEPLVPTKSVPSGSEMPAKCDPALSFDAISTLRGEYLFFKDRYFWRRSHWNPEPEFHLISAFWPSLPSYLDAAYEVNSRDTVFIFKGNEFWAIRGNEVQAGYPRGIHTLGFPPTIRKIDAAVSDKEKKKTYFFAADKYWRFDENSQSMEQGFPRLIADDFPGVEPKVDAVLQAFGFFYFFSGSSQFEFDPNARMVTHILKSNSWLHC

SEQ ID NO: 49420 - protein, 181 aa, Homo sapiens
  Payload ID: 9891
  Gene Symbol: MMP10
  Gene Name: matrix metallopeptidase 10
  ENSP ID: ENSP00000441485
MMHLAFLVLLCLPVCSAYPLSGAAKEEDSNKDLAQQYLEKYYNLEKDVKQFRRKDSNLIVKKIQGMQKFLGLEVTGKLDTDTLEVMRKPRCGVPDVGHFSSFPGMPKWRKTHLTYRIVNYTPDLPRDAVDSAIEKALKVWEEVTPLTFSRLYEGEADIMISFAVKGHSLAHAYPPGPGLYG

SEQ ID NO: 49421 - protein, 488 aa, Homo sapiens
  Payload ID: 9892
  Gene Symbol: MMP11
  Gene Name: matrix metallopeptidase 11
  Uniprot ID: P24347
  ENSP ID: ENSP00000215743
MAPAAWLRSAAARALLPPMLLLLLQPPPLLARALPPDAHHLHAERRGPQPWHAALPSSPAPAPATQEAPRPASSLRPPRCGVPDPSDGLSARNRQKRFVLSGGRWEKTDLTYRILRFPWQLVQEQVRQTMAEALKVWSDVTPLTFTEVHEGRADIMIDFARYWHGDDLPFDGPGGILAHAFFPKTHREGDVHFDYDETWTIGDDQGTDLLQVAAHEFGHVLGLQHTTAAKALMSAFYTFRYPLSLSPDDCRGVQHLYGQPWPTVTSRTPALGPQAGIDTNEIAPLEPDAPPDACEASFDAVSTIRGELFFFKAGFVWRLRGGQLQPGYPALASRHWQGLPSPVDAAFEDAQGHIWFFQGAQYWVYDGEKPVLGPAPLTELGLVRFPVHAALVWGPEKNKIYFFRGRDYWRFHPSTRRVDSPVPRRATDWRGVPSEIDAAFQDADGYAYFLRGRLYWKFDPVKVKALEGFPRLVGPDFFGCAEPANTFL

SEQ ID NO: 49422 - protein, 354 aa, Homo sapiens
  Payload ID: 9892
  Gene Symbol: MMP11
  Gene Name: matrix metallopeptidase 11
  ENSP ID: ENSP00000408070
MAPAAWLRSAAARALLPPMLLLLLQPPPLLARALPPDAHHLHAERRGPQPWHAALPSSPAPAPATQEAPRPASSLRPPRCGVPDPSDGLSARNRQKRILRFPWQLVQEQVRQTMAEALKVWSDVTPLTFTEVHEGRADIMIDFARYWHGDDLPFDGPGGILAHAFFPKTHREGDVHFDYDETWTIGDDQGTDLLQVAAHEFGHVLGLQHTTAAKALMSAFYTFRYPLSLSPDDCRGVQHLYGQPWPTVTSRTPALGPQAGIDTNEIAPLEPDAPPDACEASFDAVSTIRGELFFFKAGFVWRLRGGQLQPGYPALASRHWQGLPSPVDAAFEDAQGHIWFFQGTTGVSTPAPGV

SEQ ID NO: 49423 - protein, 113 aa, Homo sapiens
  Payload ID: 9892
  Gene Symbol: MMP11
  Gene Name: matrix metallopeptidase 11
  ENSP ID: ENSP00000409860
MAPAAWLRSAAARALLPPMLLLLLQPPPLLARALPPDAHHLHAERRGPQPWHAALPSSPAPAPATQEAPRPASSLRPPRCGVPDPSDGLSARNRQKRFVLSGGRWEKTDLTYR

SEQ ID NO: 49424 - protein, 170 aa, Homo sapiens
  Payload ID: 9892
  Gene Symbol: MMP11
  Gene Name: matrix metallopeptidase 11
  ENSP ID: ENSP00000412107
  MOD_RES (1)..(1): Any amino acid
XAHEFGHVLGLQHTTAAKALMSAFYTFRYPLSLSPDDCRGVQHLYGQPWPTVTSRTPALGPQAGIDTNEIAPLEPDAPPDACEASFDAVSTIRGELFFFKAGFVWRLRGGQLQPGYPALASRHWQGLPSPVDAAFEDAQGHIWFFQELGFPSSTGRDESLEHCRCQGLHK

SEQ ID NO: 49425 - protein, 488 aa, Homo sapiens; identical to SEQ ID NO: 49421
  Payload ID: 9892
  Gene Symbol: MMP11
  Gene Name: matrix metallopeptidase 11
  Uniprot ID: P24347
  ENSP ID: ENSP00000483349

SEQ ID NO: 49426 - protein, 170 aa, Homo sapiens; identical to SEQ ID NO: 49424
  Payload ID: 9892
  Gene Symbol: MMP11
  Gene Name: matrix metallopeptidase 11
  ENSP ID: ENSP00000486195
  MOD_RES (1)..(1): Any amino acid

SEQ ID NO: 49427 - protein, 354 aa, Homo sapiens; identical to SEQ ID NO: 49422
  Payload ID: 9892
  Gene Symbol: MMP11
  Gene Name: matrix metallopeptidase 11
  ENSP ID: ENSP00000486551

SEQ ID NO: 49428 - protein, 470 aa, Homo sapiens
  Payload ID: 9893
  Gene Symbol: MMP12
  Gene Name: matrix metallopeptidase 12
  Uniprot ID: P39900
  ENSP ID: ENSP00000458585
MKFLLILLLQATASGALPLNSSTSLEKNNVLFGERYLEKFYGLEINKLPVTKMKYSGNLMKEKIQEMQHFLGLKVTGQLDTSTLEMMHAPRCGVPDVHHFREMPGGPVWRKHYITYRINNYTPDMNREDVDYAIRKAFQVWSNVTPLKFSKINTGMADILVVFARGAHGDFHAFDGKGGILAHAFGPGSGIGGDAHFDEDEFWTTHSGGTNLFLTAVHEIGHSLGLGHSSDPKAVMFPTYKYVDINTFRLSADDIRGIQSLYGDPKENQRLPNPDNSEPALCDPNLSFDAVTTVGNKIFFFKDRFFWLKVSERPKTSVNLISSLWPTLPSGIEAAYEIEARNQVFLFKDDKYWLISNLRPEPNYPKSIHSFGFPNFVKKIDAAVFNPRFYRTYFFVDNQYWRYDERRQMMDPGYPKLITKNFQGIGPKIDAVFYSKNKYYYFFQGSNQFEYDFLLQRITKTLKSNSWFGC

SEQ ID NO: 49429 - protein, 471 aa, Homo sapiens
  Payload ID: 9894
  Gene Symbol: MMP13
  Gene Name: matrix metallopeptidase 13
  Uniprot ID: P45452
  ENSP ID: ENSP00000260302
MHPGVLAAFLFLSWTHCRALPLPSGGDEDDLSEEDLQFAERYLRSYYHPTNLAGILKENAASSMTERLREMQSFFGLEVTGKLDDNTLDVMKKPRCGVPDVGEYNVFPRTLKWSKMNLTYRIVNYTPDMTHSEVEKAFKKAFKVWSDVTPLNFTRLHDGIADIMISFGIKEHGDFYPFDGPSGLLAHAFPPGPNYGGDAHFDDDETWTSSSKGYNLFLVAAHEFGHSLGLDHSKDPGALMFPIYTYTGKSHFMLPDDDVQGIQSLYGPGDEDPNPKHPKTPDKCDPSLSLDAITSLRGETMIFKDRFFWRLHPQQVDAELFLTKSFWPELPNRIDAAYEHPSHDLIFIFRGRKFWALNGYDILEGYPKKISELGLPKEVKKISAAVHFEDTGKTLLFSGNQVWRYDDTNHIMDKDYPRLIEEDFPGIGDKVDAVYEKNGYIYFFNGPIQFEYSIWSNRIVRVMPANSILWC

SEQ ID NO: 49430 - protein, 489 aa, Homo sapiens
  Payload ID: 9894
  Gene Symbol: MMP13
  Gene Name: matrix metallopeptidase 13
  ENSP ID: ENSP00000339672
MHPGVLAAFLFLSWTHCRALPLPSGGDEDDLSEEDLQFAERYLRSYYHPTNLAGILKENAASSMTERLREMQSFFGLEVTGKLDDNTLDVMKKPRCGVPDVGEYNVFPRTLKWSKMNLTYRIVNYTPDMTHSEVEKAFKKAFKVWSDVTPLNFTRLHDGIADIMISFGIKEHGDFYPFDGPSGLLAHAFPPGPNYGGDAHFDDDETWTSSSKGYNLFLVAAHEFGHSLGLDHSKDPGALMFPIYTYTGKSHFMLPDDDVQGIQSLYGPGDEDPNPKHPKTPDKCDPSLSLDAITSLRGETMIFKDRFFWRLHPQQVDAELFLTKSFWPELPNRIDAAYEHPSHDLIFIFRGRKFWALNGYDILEGYPKKISELGLPKEVKKISAAVHFEDTGKTLLFSGNQVWRYDDTNHIMDKDYPRLIEEDFPGIGDKVDAVYEKNESHSVTQAGVHCRNLSSLQPPPPGFKRFSCLSLWSSWDYRLYLFFQRTHTV

SEQ ID NO: 49431 - protein, 383 aa, Homo sapiens [sequence omitted]

SEQ ID NO: 49432 - protein, 582 aa, Homo sapiens
  Payload ID: 9895
  Gene Symbol: MMP14
  Gene Name: matrix metallopeptidase 14 (membrane-inserted)
  Uniprot ID: P50281
  ENSP ID: ENSP00000308208
MSPAPRPPRCLLLPLLTLGTALASLGSAQSSSFSPEAWLQQYGYLPPGDLRTHTQRSPQSLSAAIAAMQKFYGLQVTGKADADTMKAMRRPRCGVPDKFGAEIKANVRRKRYAIQGLKWQHNEITFCIQNYTPKVGEYATYEAIRKAFRVWESATPLRFREVPYAYIREGHEKQADIMIFFAEGFHGDSTPFDGEGGFLAHAYFPGPNIGGDTHFDSAEPWTVRNEDLNGNDIFLVAVHELGHALGLEHSSDPSAIMAPFYQWMDTENFVLPDDDRRGIQQLYGGESGFPTKMPPQPRTTSRPSVPDKPKNPTYGPNICDGNFDTVAMLRGEMFVFKERWFWRVRNNQVMDGYPMPIGQFWRGLPASINTAYERKDGKFVFFKGDKHWVFDEASLEPGYPKHIKELGRGLPTDKIDAALFWMPNGKTYFFRGNKYYRFNEELRAVDSEYPKNIKVWEGIPESPRGSFMGSDEVFTYFYKGNKYWKFNNQKLKVEPGYPKSALRDWMGCPSGGRPDEGTEEETEVIIIEVDEEGGGAVSAAAVVLPVLLLLLVLAVGLAVFFFRRHGTPRRLLYCQRSLLDKV

SEQ ID NO: 49433 - protein, 194 aa, Homo sapiens
  Payload ID: 9895
  Gene Symbol: MMP14
  Gene Name: matrix metallopeptidase 14 (membrane-inserted)
  ENSP ID: ENSP00000446989
MRESLLFLRLPSSPALSRRRALRWALRPPRVAQAFSGRVCGQAWLQQYGYLPPGDLRTHTQRSPQSLSAAIAAMQKFYGLQVTGKADADTMKAMRRPRCGVPDKFGAEIKANVRRKRYAIQGLKWQHNEITFCIQNYTPKVGEYATYEAIRKAFRVWESATPLRFREVPYAYIREGHEKQADIMIFFAEGFHGD

SEQ ID NO: 49434 - protein, 71 aa, Homo sapiens
  Payload ID: 9895
  Gene Symbol: MMP14
  Gene Name: matrix metallopeptidase 14 (membrane-inserted)
  ENSP ID: ENSP00000450323
MSPAPRPPRCLLLPLLTLGTALASLGSAQSSSFSPESLEELYNWGELPLPRFPWALLSALEPPDKHLDSAQ

SEQ ID NO: 49435 - protein, 669 aa, Homo sapiens
  Payload ID: 9896
  Gene Symbol: MMP15
  Gene Name: matrix metallopeptidase 15 (membrane-inserted)
  Uniprot ID: P51511
  ENSP ID: ENSP00000219271
MGSDPSAPGRPGWTGSLLGDREEAARPRLLPLLLVLLGCLGLGVAAEDAEVHAENWLRLYGYLPQPSRHMSTMRSAQILASALAEMQRFYGIPVTGVLDEETKEWMKRPRCGVPDQFGVRVKANLRRRRKRYALTGRKWNNHHLTFSIQNYTEKLGWYHSMEAVRRAFRVWEQATPLVFQEVPYEDIRLRRQKEADIMVLFASGFHGDSSPFDGTGGFLAHAYFPGPGLGGDTHFDADEPWTFSSTDLHGNNLFLVAVHELGHALGLEHSSNPNAIMAPFYQWKDVDNFKLPEDDLRGIQQLYGTPDGQPQPTQPLPTVTPRRPGRPDHRPPRPPQPPPPGGKPERPPKPGPPVQPRATERPDQYGPNICDGDFDTVAMLRGEMFVFKGRWFWRVRHNRVLDNYPMPIGHFWRGLPGDISAAYERQDGRFVFFKGDRYWLFREANLEPGYPQPLTSYGLGIPYDRIDTAIWWEPTGHTFFFQEDRYWRFNEETQRGDPGYPKPISVWQGIPASPKGAFLSNDAAYTYFYKGTKYWKFDNERLRMEPGYPKSILRDFMGCQEHVEPGPRWPDVARPPFNPHGGAEPGADSAEGDVGDGDGDFGAGVNKDGGSRVVVQMEEVARTVNVVMVLVPLLLLLCVLGLTYALVQMQRKGAPRVLLYCKRSLQEWV

SEQ ID NO: 49436 - protein, 97 aa, Homo sapiens
  Payload ID: 9896
  Gene Symbol: MMP15
  Gene Name: matrix metallopeptidase 15 (membrane-inserted)
  ENSP ID: ENSP00000457084
  MOD_RES (1)..(1): Any amino acid
XSTDLHGNNLFLVAVHELGHALGLEHSSNPNAIMAPFYQWKDVDNFKLPEDDLRGIQQLYGAWAVTSGLCMPLSSPWPMRSRHCCHPHFVDEEPKAQ

SEQ ID NO: 49437 - protein, 607 aa, Homo sapiens
  Payload ID: 9897
  Gene Symbol: MMP16
  Gene Name: matrix metallopeptidase 16 (membrane-inserted)
  Uniprot ID: P51512
  ENSP ID: ENSP00000286614
MILLTFSTGRRLDFVHHSGVFFLQTLLWILCATVCGTEQYFNVEVWLQKYGYLPPTDPRMSVLRSAETMQSALAAMQQFYGINMTGKVDRNTIDWMKKPRCGVPDQTRGSSKFHIRRKRYALTGQKWQHKHITYSIKNVTPKVGDPETRKAIRRAFDVWQNVTPLTFEEVPYSELENGKRDVDITIIFASGFHGDSSPFDGEGGFLAHAYFPGPGIGGDTHFDSDEPWTLGNPNHDGNDLFLVAVHELGHALGLEHSNDPTAIMAPFYQYMETDNFKLPNDDLQGIQKIYGPPDKIPPPTRPLPTVPPHRSIPPADPRKNDRPKPPRPPTGRPSYPGAKPNICDGNFNTLAILRREMFVFKDQWFWRVRNNRVMDGYPMQITYFWRGLPPSIDAVYENSDGNFVFFKGNKYWVFKDTTLQPGYPHDLITLGSGIPPHGIDSAIWWEDVGKTYFFKGDRYWRYSEEMKTMDPGYPKPITVWKGIPESPQGAFVHKENGFTYFYKGKEYWKFNNQILKVEPGYPRSILKDFMGCDGPTDRVKEGHSPPDDVDIVIKLDNTASTVKAIAIVIPCILALCLLVLVYTVFQFKRKGTPRHILYCKRSMQEWV

SEQ ID NO: 49438 - protein, 168 aa, Homo sapiens
  Payload ID: 9897
  Gene Symbol: MMP16
  Gene Name: matrix metallopeptidase 16 (membrane-inserted)
  ENSP ID: ENSP00000429147
MRDGRYCRRAVLKPGPLSRAGYLRTGRRLDFVHHSGVFFLQTLLWILCATVCGTEQYFNVEVWLQKYGYLPPTDPRMSVLRSAETMQSALAAMQQFYGINMTGKVDRNTIDWMKKPRCGVPDQTRGSSKFHIRRKRYALTGQKWQHKHITYSIKNVTPKVGDPETRKA

SEQ ID NO: 49439 - protein, 603 aa, Homo sapiens
  Payload ID: 9898
  Gene Symbol: MMP17
  Gene Name: matrix metallopeptidase 17 (membrane-inserted)
  Uniprot ID: Q9ULZ9
  ENSP ID: ENSP00000353767
MRRRAARGPGPPPPGPGLSRLPLPLLLLLALGTRGGCAAPAPAPRAEDLSLGVEWLSRFGYLPPADPTTGQLQTQEELSKAITAMQQFGGLEATGILDEATLALMKTPRCSLPDLPVLTQARRRRQAPAPTKWNKRNLSWRVRTFPRDSPLGHDTVRALMYYALKVWSDIAPLNFHEVAGSAADIQIDFSKADHNDGYPFDGPGGTVAHAFFPGHHHTAGDTHFDDDEAWTFRSSDAHGMDLFAVAVHEFGHAIGLSHVAAAHSIMRPYYQGPVGDPLRYGLPYEDKVRVWQLYGVRESVSPTAQPEEPPLLPEPPDNRSSAPPRKDVPHRCSTHFDAVAQIRGEAFFFKGKYFWRLTRDRHLVSLQPAQMHRFWRGLPLHLDSVDAVYERTSDHKIVFFKGDRYWVFKDNNVEEGYPRPVSDFSLPPGGIDAAFSWAHNDRTYFFKDQLYWRYDDHTRHMDPGYPAQSPLWRGVPSTLDDAMRWSDGASYFFRGQEYWKVLDGELEVAPGYPQSTARDWLVCGDSQADGSVAAGVDAAEGPRAPPGQHDQSRSEDGYEVCSCTSGASSPPGAPGPLVAATMLLLLPPLSPGALWTAAQALTL

SEQ ID NO: 49440 - protein, 118 aa, Homo sapiens
  Payload ID: 9898
  Gene Symbol: MMP17
  Gene Name: matrix metallopeptidase 17 (membrane-inserted)
  ENSP ID: ENSP00000439542
MHRFWRGLPLHLDSVDAVYERTSDHKIVFFKGDRYWVFKDNNVEEGYPRPVSDFSLPPGGIDAAFSWAHNDRTYFFKDQLYWRYDDHTRHMDPGYPAQSPLWRGVPSTLDDAMRWSDG

SEQ ID NO: 49441 - protein, 519 aa, Homo sapiens
  Payload ID: 9898
  Gene Symbol: MMP17
  Gene Name: matrix metallopeptidase 17 (membrane-inserted)
  Uniprot ID: Q9ULZ9
  ENSP ID: ENSP00000441106
MQQFGGLEATGILDEATLALMKTPRCSLPDLPVLTQARRRRQAPAPTKWNKRNLSWRVRTFPRDSPLGHDTVRALMYYALKVWSDIAPLNFHEVAGSAADIQIDFSKADHNDGYPFDGPGGTVAHAFFPGHHHTAGDTHFDDDEAWTFRSSDAHGMDLFAVAVHEFGHAIGLSHVAAAHSIMRPYYQGPVGDPLRYGLPYEDKVRVWQLYGVRESVSPTAQPEEPPLLPEPPDNRSSAPPRKDVPHRCSTHFDAVAQIRGEAFFFKGKYFWRLTRDRHLVSLQPAQMHRFWRGLPLHLDSVDAVYERTSDHKIVFFKGDRYWVFKDNNVEEGYPRPVSDFSLPPGGIDAAFSWAHNDRTYFFKDQLYWRYDDHTRHMDPGYPAQSPLWRGVPSTLDDAMRWSDGASYFFRGQEYWKVLDGELEVAPGYPQSTARDWLVCGDSQADGSVAAGVDAAEGPRAPPGQHDQSRSEDGYEVCSCTSGASSPPGAPGPLVAATMLLLLPPLSPGALWTAAQALTL

SEQ ID NO: 49442 - protein, 115 aa, Homo sapiens
  Payload ID: 9898
  Gene Symbol: MMP17
  Gene Name: matrix metallopeptidase 17 (membrane-inserted)
  ENSP ID: ENSP00000441710
MQQFGGLEATGILDEATLALMKTPRCSLPDLPVLTQARRRRQAPAPTKWNKRNLSWRVRTFPRDSPLGHDTVRALMYYALKVWSDIAPLNFHEVAGSAADIQIDFSKADHNDGYP

SEQ ID NO: 49443 - protein, 302 aa, Homo sapiens
  Payload ID: 9898
  Gene Symbol: MMP17
  Gene Name: matrix metallopeptidase 17 (membrane-inserted)
  ENSP ID: ENSP00000442104
MYYALKVWSDIAPLNFHEVAGSAADIQIDFSKADHNDGYPFDGPGGTVAHAFFPGHHHTAGDTHFDDDEAWTFRSSDAHGMDLFAVAVHEFGHAIGLSHVAAAHSIMRPYYQGPVGDPLRYGLPYEDKVRVWQLYGVRESVSPTAQPEEPPLLPEPPDNRSSAPPRKDVPHRCSTHFDAVAQIRGEAFFFKGKYFWRLTRDRHLVSLQPAQMHRFWRGLPLHLDSVDAVYERTSDHKIVFFKGDRYWVFKDNNVEEGYPRPVSDFSLPPGGIDAAFSWAHNDRTYFFKDQLYWRYDDHTRHM

SEQ ID NO: 49444 - protein, 39 aa, Homo sapiens
  Payload ID: 9898
  Gene Symbol: MMP17
  Gene Name: matrix metallopeptidase 17 (membrane-inserted)
  ENSP ID: ENSP00000443727
MHRFWRGLPLHLDSVDAVYERTSDHKIVFFKGPAVLALR

SEQ ID NO: 49445 - protein, 169 aa, Homo sapiens
  Payload ID: 9898
  Gene Symbol: MMP17
  Gene Name: matrix metallopeptidase 17 (membrane-inserted)
  ENSP ID: ENSP00000444603
MKTPRCSLPDLPVLTQARRRRQAPAPTKWNKRNLSWRVRTFPRDSPLGHDTVRALMYYALKVWSDIAPLNFHEVAGSAADIQIDFSKADHNDGYPFDGPGGTVAHAFFPGHHHTAGDTHFDDDEAWTFRSSDAHGMDLFAVAVHEFGHAIGLSHVAAAHSIMRPYYQGP

SEQ ID NO: 49446 - protein, 143 aa, Homo sapiens
  Payload ID: 9898
  Gene Symbol: MMP17
  Gene Name: matrix metallopeptidase 17 (membrane-inserted)
  ENSP ID: ENSP00000445620
MDPGYPAQSPLWRGVPSTLDDAMRWSDGASYFFRGQEYWKVLDGELEVAPGYPQSTARDWLVCGDSQADGSVAAGVDAAEGPRAPPGQHDQSRSEDGYEVCSCTSGASSPPGAPGPLVAATMLLLLPPLSPGALWTAAQALTL

SEQ ID NO: 49447 - protein, 508 aa, Homo sapiens
  Payload ID: 9899
  Gene Symbol: MMP19
  Gene Name: matrix metallopeptidase 19
  Uniprot ID: Q99542
  ENSP ID: ENSP00000313437
MNCQQLWLGFLLPMTVSGRVLGLAEVAPVDYLSQYGYLQKPLEGSNNFKPEDITEALRAFQEASELPVSGQLDDATRARMRQPRCGLEDPFNQKTLKYLLLGRWRKKHLTFRILNLPSTLPPHTARAALRQAFQDWSNVAPLTFQEVQAGAADIRLSFHGRQSSYCSNTFDGPGRVLAHADIPELGSVHFDEDEFWTEGTYRGVNLRIIAAHEVGHALGLGHSRYSQALMAPVYEGYRPHFKLHPDDVAGIQALYGKKSPVIRDEEEEETELPTVPPVPTEPSPMPDPCSSELDAMMLGPRGKTYAFKGDYVWTVSDSGPGPLFRVSALWEGLPGNLDAAVYSPRTQWIHFFKGDKVWRYINFKMSPGFPKKLNRVEPNLDAALYWPLNQKVFLFKGSGYWQWDELARTDFSSYPKPIKGLFTGVPNQPSAAMSWQDGRVYFFKGKVYWRLNQQLRVEKGYPRNISHNWMHCRPRTIDTTPSGGNTTPSGTGITLDTTLSATETTFEY

SEQ ID NO: 49448 - protein, 305 aa, Homo sapiens
  Payload ID: 9899
  Gene Symbol: MMP19
  Gene Name: matrix metallopeptidase 19
  Uniprot ID: Q99542
  ENSP ID: ENSP00000386625
MNCQQLWLGFLLPMTVSGRVLGLAEVAPVDYLSQYGYLQKPLEGSNNFKPEDITEALRAFQEASELPVSGQLDDATRARMRQPRCGLEDPFNQKTLKYLLLGRWRKKHLTFRILNLPSTLPPHTARAALRQAFQDWSNVAPLTFQEVQAGAADIRLSFHGRQSSYCSNTFDGPGKKSPVIRDEEEEETELPTVPPVPTEPSPMPDPCSSELDAMMLGEAPPLQAVGRRWGQPADPEAWTNGSDMGLQHEQWRAPWEDLCFQGGLCVDCIRFRTGPLVPSVCPLGGAPRKPGCCCLLASNTMDSLL

SEQ ID NO: 49449 - protein, 63 aa, Homo sapiens
  Payload ID: 9899
  Gene Symbol: MMP19
  Gene Name: matrix metallopeptidase 19
  Uniprot ID: Q99542
  ENSP ID: ENSP00000446776
MNCQQLWLGFLLPMTVSGRVLGLAEVAPVDYLSQYGYLQKPLEGSNNFKPEDITEALSLRSAG

SEQ ID NO: 49450 - protein, 485 aa, Homo sapiens
  Payload ID: 9899
  Gene Symbol: MMP19
  Gene Name: matrix metallopeptidase 19
  ENSP ID: ENSP00000446979
MNCQQLWLGFLLPMTVSGRVLGLAEVAPVDYLSQYGYLQKPLEGSNNFKPEDITEALRAFQEASELPVSGQLDDATRARMRQPRCGLEDPFNQKTLKYLLLARAALRQAFQDWSNVAPLTFQEVQAGAADIRLSFHGRQSSYCSNTFDGPGRVLAHADIPELGSVHFDEDEFWTEGTYRGVNLRIIAAHEVGHALGLGHSRYSQALMAPVYEGYRPHFKLHPDDVAGIQALYGKKSPVIRDEEEEETELPTVPPVPTEPSPMPDPCSSELDAMMLGPRGKTYAFKGDYVWTVSDSGPGPLFRVSALWEGLPGNLDAAVYSPRTQWIHFFKGDKVWRYINFKMSPGFPKKLNRVEPNLDAALYWPLNQKVFLFKGSGYWQWDELARTDFSSYPKPIKGLFTGVPNQPSAAMSWQDGRVYFFKGKVYWRLNQQLRVEKGYPRNISHNWMHCRPRTIDTTPSGGNTTPSGTGITLDTTLSATETTFEY

SEQ ID NO: 49451 - protein, 81 aa, Homo sapiens
  Payload ID: 9899
  Gene Symbol: MMP19
  Gene Name: matrix metallopeptidase 19
  ENSP ID: ENSP00000447363
MNCQQLWLGFLLPMTVSGRVLGLAEVAPVDYLSQYGYLQKPLEGSNNFKPEDITEALRESPGPCRHPRAGQCALRRRRVLD

SEQ ID NO: 49452 - protein, 108 aa, Homo sapiens
  Payload ID: 9899
  Gene Symbol: MMP19
  Gene Name: matrix metallopeptidase 19
  ENSP ID: ENSP00000449752
MNCQQLWLGFLLPMTVSGRVLGLAEVAPVDYLSQYGYLQKPLEGSNNFKPEDITEALRPLEKEAPDFPHLEPALHPSTPHSPGSPASSLPGLEQCGSLDLPRGAGWCG

SEQ ID NO: 49453 - protein, 660 aa, Homo sapiens
  Payload ID: 9900
  Gene Symbol: MMP2
  Gene Name: matrix metallopeptidase 2
  Uniprot ID: P08253
  ENSP ID: ENSP00000219070
MEALMARGALTGPLRALCLLGCLLSHAAAAPSPIIKFPGDVAPKTDKELAVQYLNTFYGCPKESCNLFVLKDTLKKMQKFFGLPQTGDLDQNTIETMRKPRCGNPDVANYNFFPRKPKWDKNQITYRIIGYTPDLDPETVDDAFARAFQVWSDVTPLRFSRIHDGEADIMINFGRWEHGDGYPFDGKDGLLAHAFAPGTGVGGDSHFDDDELWTLGEGQVVRVKYGNADGEYCKFPFLFNGKEYNSCTDTGRSDGFLWCSTTYNFEKDGKYGFCPHEALFTMGGNAEGQPCKFPFRFQGTSYDSCTTEGRTDGYRWCGTTEDYDRDKKYGFCPETAMSTVGGNSEGAPCVFPFTFLGNKYESCTSAGRSDGKMWCATTANYDDDRKWGFCPDQGYSLFLVAAHEFGHAMGLEHSQDPGALMAPIYTYTKNFRLSQDDIKGIQELYGASPDIDLGTGPTPTLGPVTPEICKQDIVFDGIAQIRGEIFFFKDRFIWRTVTPRDKPMGPLLVATFWPELPEKIDAVYEAPQEEKAVFFAGNEYWIYSASTLERGYPKPLTSLGLPPDVQRVDAAFNWSKNKKTYIFAGDKFWRYNEVKKKMDPGFPKLIADAWNAIPDNLDAVVDLQGGGHSYFFKGAYYLKLENQSLKSVKFGSIKSDWLGC

SEQ ID NO: 49454 - protein, 610 aa, Homo sapiens
  Payload ID: 9900
  Gene Symbol: MMP2
  Gene Name: matrix metallopeptidase 2
  Uniprot ID: P08253
  ENSP ID: ENSP00000394237
MQYLNTFYGCPKESCNLFVLKDTLKKMQKFFGLPQTGDLDQNTIETMRKPRCGNPDVANYNFFPRKPKWDKNQITYRIIGYTPDLDPETVDDAFARAFQVWSDVTPLRFSRIHDGEADIMINFGRWEHGDGYPFDGKDGLLAHAFAPGTGVGGDSHFDDDELWTLGEGQVVRVKYGNADGEYCKFPFLFNGKEYNSCTDTGRSDGFLWCSTTYNFEKDGKYGFCPHEALFTMGGNAEGQPCKFPFRFQGTSYDSCTTEGRTDGYRWCGTTEDYDRDKKYGFCPETAMSTVGGNSEGAPCVFPFTFLGNKYESCTSAGRSDGKMWCATTANYDDDRKWGFCPDQGYSLFLVAAHEFGHAMGLEHSQDPGALMAPIYTYTKNFRLSQDDIKGIQELYGASPDIDLGTGPTPTLGPVTPEICKQDIVFDGIAQIRGEIFFFKDRFIWRTVTPRDKPMGPLLVATFWPELPEKIDAVYEAPQEEKAVFFAGNEYWIYSASTLERGYPKPLTSLGLPPDVQRVDAAFNWSKNKKTYIFAGDKFWRYNEVKKKMDPGFPKLIADAWNAIPDNLDAVVDLQGGGHSYFFKGAYYLKLENQSLKSVKFGSIKSDWLGC

SEQ ID NO: 49455 - protein, 584 aa, Homo sapiens
  Payload ID: 9900
  Gene Symbol: MMP2
  Gene Name: matrix metallopeptidase 2
  Uniprot ID: P08253
  ENSP ID: ENSP00000444143
MQKFFGLPQTGDLDQNTIETMRKPRCGNPDVANYNFFPRKPKWDKNQITYRIIGYTPDLDPETVDDAFARAFQVWSDVTPLRFSRIHDGEADIMINFGRWEHGDGYPFDGKDGLLAHAFAPGTGVGGDSHFDDDELWTLGEGQVVRVKYGNADGEYCKFPFLFNGKEYNSCTDTGRSDGFLWCSTTYNFEKDGKYGFCPHEALFTMGGNAEGQPCKFPFRFQGTSYDSCTTEGRTDGYRWCGTTEDYDRDKKYGFCPETAMSTVGGNSEGAPCVFPFTFLGNKYESCTSAGRSDGKMWCATTANYDDDRKWGFCPDQGYSLFLVAAHEFGHAMGLEHSQDPGALMAPIYTYTKNFRLSQDDIKGIQELYGASPDIDLGTGPTPTLGPVTPEICKQDIVFDGIAQIRGEIFFFKDRFIWRTVTPRDKPMGPLLVATFWPELPEKIDAVYEAPQEEKAVFFAGNEYWIYSASTLERGYPKPLTSLGLPPDVQRVDAAFNWSKNKKTYIFAGDKFWRYNEVKKKMDPGFPKLIADAWNAIPDNLDAVVDLQGGGHSYFFKGAYYLKLENQSLKSVKFGSIKSDWLGC

SEQ ID NO: 49456 - protein, 201 aa, Homo sapiens
  Payload ID: 9900
  Gene Symbol: MMP2
  Gene Name: matrix metallopeptidase 2
  ENSP ID: ENSP00000456096
MQKFFGLPQTGDLDQNTIETMRKPRCGNPDVANYNFFPRKPKWDKNQITYRIIGYTPDLDPETVDDAFARAFQVWSDVTPLRFSRIHDGEADIMINFGRWEHGDGYPFDGKDGLLAHAFAPGTGVGGDSHFDDDELWTLGEGQVVRVKYGNADGEYCKFPFLFNGKEYNSCTDTGRSDGFLWCSTTYNFEKDGKYGFCPHE

SEQ ID NO: 49457 - protein, 251 aa, Homo sapiens
  Payload ID: 9900
  Gene Symbol: MMP2
  Gene Name: matrix metallopeptidase 2
  ENSP ID: ENSP00000456518
GTTEDYDRDKKYGFCPETGYSLFLVAAHEFGHAMGLEHSQDPGALMAPIYTYTKNFRLSQDDIKGIQELYGASPDIDLGTGPTPTLGPVTPEICKQDIVFDGIAQIRGEIFFFKDRFIWRTVTPRDKPMGPLLVATFWPELPEKIDAVYEAPQEEKAVFFAGNEYWIYSASTLERGYPKPLTSLGLPPDVQRVDAAFNWSKNKKTYIFAGDKFWRYNEVKKKMDPGFPKLIADAWNAIPDNLDAVVDLQGG

SEQ ID NO: 49458 - protein, 118 aa, Homo sapiens
  Payload ID: 9900
  Gene Symbol: MMP2
  Gene Name: matrix metallopeptidase 2
  ENSP ID: ENSP00000457949
MQKFFGLPQTGDLDQNTIETMRKPRCGNPDVANYNFFPRKPKWDKNQITYRIIGYTPDLDPETVDDAFARAFQVWSDVTPLRFSRIHDGEADIMINFGRWEHGDGYPFDGKDGLLAHA

SEQ ID NO: 49459 - protein, 584 aa, Homo sapiens; identical to SEQ ID NO: 49455
  Payload ID: 9900
  Gene Symbol: MMP2
  Gene Name: matrix metallopeptidase 2
  Uniprot ID: P08253
  ENSP ID: ENSP00000461421

SEQ ID NO: 49460 - protein, 22 aa, Homo sapiens
  Payload ID: 9900
  Gene Symbol: MMP2
  Gene Name: matrix metallopeptidase 2
  ENSP ID: ENSP00000461915
  MOD_RES (1)..(1): Any amino acid
XLENQSLKSVKFGSIKSDWLGC

SEQ ID NO: 49461 - protein, 483 aa, Homo sapiens
  Payload ID: 9901
  Gene Symbol: MMP20
  Gene Name: matrix metallopeptidase 20
  Uniprot ID: O60882
  ENSP ID: ENSP00000260228
MKVLPASGLAVFLIMALKFSTAAPSLVAASPRTWRNNYRLAQAYLDKYYTNKEGHQIGEMVARGSNSMIRKIKELQAFFGLQVTGKLDQTTMNVIKKPRCGVPDVANYRLFPGEPKWKKNTLTYRISKYTPSMSSVEVDKAVEMALQAWSSAVPLSFVRINSGEADIMISFENGDHGDSYPFDGPRGTLAHAFAPGEGLGGDTHFDNAEKWTMGTNGFNLFTVAAHEFGHALGLAHSTDPSALMYPTYKYKNPYGFHLPKDDVKGIQALYGPRKVFLGKPTLPHAPHHKPSIPDLCDSSSSFDAVTMLGKELLLFKDRIFWRRQVHLRTGIRPSTITSSFPQLMSNVDAAYEVAERGTAYFFKGPHYWITRGFQMQGPPRTIYDFGFPRHVQQIDAAVYLREPQKTLFFVGDEYYSYDERKRKMEKDYPKNTEEEFSGVNGQIDAAVELNGYIYFFSGPKTYKYDTEKEDVVSVVKSSSWIGC

SEQ ID NO: 49462 - protein, 569 aa, Homo sapiens
  Payload ID: 9902
  Gene Symbol: MMP21
  Gene Name: matrix metallopeptidase 21
  Uniprot ID: Q8N119
  ENSP ID: ENSP00000357798
MLAASIFRPTLLLCWLAAPWPTQPESLFHSRDRSDLEPSPLRQAKPIADLHAAQRFLSRYGWSGVWAAWGPSPEGPPETPKGAALAEAVRRFQRANALPASGELDAATLAAMNRPRCGVPDMRPPPPSAPPSPPGPPPRARSRRSPRAPLSLSRRGWQPRGYPDGGAAQAFSKRTLSWRLLGEALSSQLSVADQRRIVALAFRMWSEVTPLDFREDLAAPGAAVDIKLGFGRGRHLGCPRAFDGSGQEFAHAWRLGDIHFDDDEHFTPPTSDTGISLLKVAVHEIGHVLGLPHTYRTGSIMQPNYIPQEPAFELDWSDRKAIQKLYGSCEGSFDTAFDWIRKERNQYGEVMVRFSTYFFRNSWYWLYENRNNRTRYGDPIQILTGWPGIPTHNIDAFVHIWTWKRDERYFFQGNQYWRYDSDKDQALTEDEQGKSYPKLISEGFPGIPSPLDTAFYDRRQKLIYFFKESLVFAFDVNRNRVLNSYPKRITEVFPAVIPQNHPFRNIDSAYYSYAYNSIFFFKGNAYWKVVNDKDKQQNSWLPANGLFPKKFISEKWFDVCDVHISTLNM

SEQ ID NO: 49463 - protein, 390 aa, Homo sapiens
  Payload ID: 9903
  Gene Symbol: MMP23B
  Gene Name: matrix metallopeptidase 23B
  Uniprot ID: O75900
  ENSP ID: ENSP00000348308
MGRGARVPSEAPGAGVERRWLGAALVALCLLPALVLLARLGAPAVPAWSAAQGDVAALGLSAVPPTRVPGPLAPRRRRYTLTPARLRWDHFNLTYRILSFPRNLLSPRETRRALAAAFRMWSDVSPFSFREVAPEQPSDLRIGFYPINHTDCLVSALHHCFDGPTGELAHAFFPPHGGIHFDDSEYWVLGPTRYSWKKGVWLTDLVHVAAHEIGHALGLMHSQHGRALMHLNATLRGWKALSQDELWGLHRLYGCLDRLFVCASWARRGFCDARRRLMKRLCPSSCDFCYEFPFPTVATTPPPPRTKTRLVPEGRNVTFRCGQKILHKKGKVYWYKDQEPLEFSYPGYLALGEAHLSIIANAVNEGTYTCVVRRQQRVLTTYSWRVRVRG

SEQ ID NO: 49464 - protein, 386 aa, Homo sapiens
  Payload ID: 9903
  Gene Symbol: MMP23B
  Gene Name: matrix metallopeptidase 23B
  ENSP ID: ENSP00000367945
MGRGARVPSEAPGAGVERRWLGAALVALCLLPALVLLARLGAPAVPAWSAAQGDVAALGLSAVPPTRVPGPLAPRRRRYTLTPARLRWDHFNLTYRILSFPRNLLSPRETRRALAAAFRMWSDVSPFSFREVAPEQPSDLRIGGRPPPPRPGPARPASQPRAPPRLLPDQPHGLPGLRAAPLLRRPHGGAGPRLLPPARRHPLRRQRVLGPGPHALQLEERRVAHGPGARGGPRDRPRAGPDALTTRPGAHAPERHAARLEGVVPGRAVGAAPALRMPRQAVRVRVLGAEGLLRRSPAAHEEALPQQLRLLLRIPLPHGGHHPTAPQDQNQAGARGQERDLPLRPEDPPQERESVLVQGPGAPGVLLPRLPGPGRGAPEHHRQRRQ

SEQ ID NO: 49465 - protein, 242 aa, Homo sapiens
  Payload ID: 9903
  Gene Symbol: MMP23B
  Gene Name: matrix metallopeptidase 23B
  ENSP ID: ENSP00000405867
  MOD_RES (1)..(1): Any amino acid
XHTDCLVSALHHCFDGPTGELAHAFFPPHGGIHFDDSEYWVLGPTRYSWKKGVWLTDLVHVAAHEIGHALGLMHSQHGRALMHLNATLRGWKALSQDELWGLHRLYGESLCRAGGRGPGGPEPGRAPHAPDRMPRQAVRVRVLGAEGLLRRSPAAHEEALPQQLRLLLRIPLPHGGHHPTAPQDQNQAGARGQERDLPLRPEDPPQERESVLVQGPGAPGVLLPRLPGPGRGAPEHHRQRRQ

SEQ ID NO: 49466 - protein, 238 aa, Homo sapiens
  Payload ID: 9903
  Gene Symbol: MMP23B
  Gene Name: matrix metallopeptidase 23B
  ENSP ID: ENSP00000423780
MGRGARVPSEAPGAGVERRWLGAALVALCLLPALVLLARLGAPAVPAWSAAQGDVAALGLSAVPPTRVPGPLAPRRRRYTLTPARLRWDHFNLTYRILSFPRNLLSPRETRRALAAAFRMWSDVSPFSFREVAPEQPSDLRIGFYPINHTDCLVSALHHCFDGPTGELAHAFFPPHGGIHFDDSEYWVLGPTRYSWKKGDRPGWPPGGLSSAAQWAAAVGLWGRRQEGPSGVVAATGV

SEQ ID NO: 49467 - protein, 166 aa, Homo sapiens
  Payload ID: 9903
  Gene Symbol: MMP23B
  Gene Name: matrix metallopeptidase 23B
  ENSP ID: ENSP00000424976
MGRGARVPSEAPGAGVERRWLGAALVALCLLPALVLLARLGAPAVPAWSAAQSIFRGSFWSWGPSPMPPTHAFFPEGRRRCAGPLGGPPHPGPGPTGPPQTPLHADSSQAALGPLQPHLQDPLLPAEPAEPAGDAAGPSCRLPHVERRVPLQLPRGGPRAAQRPPD

SEQ ID NO: 49468 - protein, 265 aa, Homo sapiens
  Payload ID: 9903
  Gene Symbol: MMP23B
  Gene Name: matrix metallopeptidase 23B
  ENSP ID: ENSP00000426293
GDVAALGLSAVPPTRVPGPLAPRRRRYTLTPARLRWDHFNLTYRLLPDQPHGLPGLRAAPLLRRPHGGAGPRLLPPARRHPLRRQRVLGPGPHALQLEERRVAHGPGARGGPRDRPRAGPDALTTRPGAHAPERHAARLEGVVPGRAVGAAPALRMPRQAVRVRVLGAEGLLRRSPAAHEEALPQQLRLLLRIPLPHGGHHPTAPQDQNQAGARGQERDLPLRPEDPPQERESVLVQGPGAPGVLLPRLPGPGRGAPEHHRQRRQ

SEQ ID NO: 49469 - protein, 258 aa, Homo sapiens
  Payload ID: 9903
  Gene Symbol: MMP23B
  Gene Name: matrix metallopeptidase 23B
  ENSP ID: ENSP00000426857
TTRTAWSPRCTTASTAPRGSWPTPSSPRTAASTSTTASTGSWAPRATAGRKVTVQAGLLEASPLQHSGLPRSGFGADGRRDLPGWWLPLESSRRVAHGPGARGGPRDRPRAGPDALTTRPGAHAPERHAARLEGVVPGRAVGAAPALRMPRQAVRVRVLGAEGLLRRSPAAHEEALPQQLRLLLRIPLPHGGHHPTAPQDQNQAGARGQERDLPLRPEDPPQERESVLVQGPGAPGVLLPRLPGPGRGAPEHHRQRRQ

SEQ ID NO: 49470 - protein, 87 aa, Homo sapiens
  Payload ID: 9903
  Gene Symbol: MMP23B
  Gene Name: matrix metallopeptidase 23B
  ENSP ID: ENSP00000462142
PRTKTRLVPEGRNVTFRCGQKILHKKGKVYWYKDQEPLEFSYPGYLALGEAHLSIIANAVNEGTYTCVVRRQQRVLTTYSWRVRVRG

SEQ ID NO: 49471 - protein, 390 aa, Homo sapiens; identical to SEQ ID NO: 49463
  Payload ID: 9903
  Gene Symbol: MMP23B
  Gene Name: matrix metallopeptidase 23B
  Uniprot ID: O75900
  ENSP ID: ENSP00000482367

SEQ ID NO: 49472 - protein, 386 aa, Homo sapiens; identical to SEQ ID NO: 49464
  Payload ID: 9903
  Gene Symbol: MMP23B
  Gene Name: matrix metallopeptidase 23B
  ENSP ID: ENSP00000482664

SEQ ID NO: 49473 - protein, 645 aa, Homo sapiens
  Payload ID: 9904
  Gene Symbol: MMP24
  Gene Name: matrix metallopeptidase 24 (membrane-inserted)
  Uniprot ID: Q9Y5R2
  ENSP ID: ENSP00000246186
MPRSRGGRAAPGPPPPPPPPGQAPRWSRWRVPGRLLLLLLPALCCLPGAARAAAAAAGAGNRAAVAVAVARADEAEAPFAGQNWLKSYGYLLPYDSRASALHSAKALQSAVSTMQQFYGIPVTGVLDQTTIEWMKKPRCGVPDHPHLSRRRRNKRYALTGQKWRQKHITYSIHNYTPKVGELDTRKAIRQAFDVWQKVTPLTFEEVPYHEIKSDRKEADIMIFFASGFHGDSSPFDGEGGFLAHAYFPGPGIGGDTHFDSDEPWTLGNANHDGNDLFLVAVHELGHALGLEHSSDPSAIMAPFYQYMETHNFKLPQDDLQGIQKIYGPPAEPLEPTRPLPTLPVRRIHSPSERKHERQPRPPRPPLGDRPSTPGTKPNICDGNFNTVALFRGEMFVFKDRWFWRLRNNRVQEGYPMQIEQFWKGLPARIDAAYERADGRFVFFKGDKYWVFKEVTVEPGYPHSLGELGSCLPREGIDTALRWEPVGKTYFFKGERYWRYSEERRATDPGYPKPITVWKGIPQAPQGAFISKEGYYTYFYKGRDYWKFDNQKLSVEPGYPRNILRDWMGCNQKEVERRKERRLPQDDVDIMVTINDVPGSVNAVAVVIPCILSLCILVLVYTIFQFKNKTGPQPVTYYKRPVQEWV

SEQ ID NO: 49474 - protein, 562 aa, Homo sapiens
  Payload ID: 9905
  Gene Symbol: MMP25
  Gene Name: matrix metallopeptidase 25
  Uniprot ID: Q9NPA2
  ENSP ID: ENSP00000337816
MRLRLRLLALLLLLLAPPARAPKPSAQDVSLGVDWLTRYGYLPPPHPAQAQLQSPEKLRDAIKVMQRFAGLPETGRMDPGTVATMRKPRCSLPDVLGVAGLVRRRRRYALSGSVWKKRTLTWRVRSFPQSSQLSQETVRVLMSYALMAWGMESGLTFHEVDSPQGQEPDILIDFARAFHQDSYPFDGLGGTLAHAFFPGEHPISGDTHFDDEETWTFGSKDGEGTDLFAVAVHEFGHALGLGHSSAPNSIMRPFYQGPVGDPDKYRLSQDDRDGLQQLYGKAPQTPYDKPTRKPLAPPPQPPASPTHSPSFPIPDRCEGNFDAIANIRGETFFFKGPWFWRLQPSGQLVSPRPARLHRFWEGLPAQVRVVQAAYARHRDGRILLFSGPQFWVFQDRQLEGGARPLTELGLPPGEEVDAVFSWPQNGKTYLVRGRQYWRYDEAAARPDPGYPRDLSLWEGAPPSPDDVTVSNAGDTYFFKGAHYWRFPKNSIKTEPDAPQPMGPNWLDCPAPSSGPRAPRPPKATPVSETCDCQCELNQAAGRWPAPIPLLLLPLLVGGVASR

SEQ ID NO: 49475 - protein, 183 aa, Homo sapiens
  Payload ID: 9905
  Gene Symbol: MMP25
  Gene Name: matrix metallopeptidase 25
  ENSP ID: ENSP00000482854
MDPGTVATMRKPRCSLPDVLGVAGLVRRRRRYALSGSVWKKRTLTWRVRSFPQSSQLSQETVRVLMSYALMAWGMESGLTFHEVDSPQGQEPDILIDFARAFHQDSYPFDGLGGTLAHAFFPGEHPISGDTHFDDEETWTFGSKASQQLEQELAGGSPVDEELGFSRGWRVNPLGPGSPERLS

SEQ ID NO: 49476 - protein, 261 aa, Homo sapiens
  Payload ID: 9906
  Gene Symbol: MMP26
  Gene Name: matrix metallopeptidase 26
  Uniprot ID: Q9NRE1
  ENSP ID: ENSP00000300762
MQLVILRVTIFLPWCFAVPVPPAADHKGWDFVEGYFHQFFLTKKESPLLTQETQTQLLQQFHRNGTDLLDMQMHALLHQPHCGVPDGSDTSISPGRCKWNKHTLTYRIINYPHDMKPSAVKDSIYNAVSIWSNVTPLIFQQVQNGDADIKVSFWQWAHEDGWPFDGPGGILGHAFLPNSGNPGVVHFDKNEHWSASDTGYNLFLVATHEIGHSLGLQHSGNQSSIMYPTYWYHDPRTFQLSADDIQRIQHLYGEKCSSDIP

SEQ ID NO: 49477 - protein, 261 aa, Homo sapiens; identical to SEQ ID NO: 49476
  Payload ID: 9906
  Gene Symbol: MMP26
  Gene Name: matrix metallopeptidase 26
  Uniprot ID: Q9NRE1
  ENSP ID: ENSP00000369753

SEQ ID NO: 49478 - protein, 513 aa, Homo sapiens
  Payload ID: 9907
  Gene Symbol: MMP27
  Gene Name: matrix metallopeptidase 27
  Uniprot ID: Q9H306
  ENSP ID: ENSP00000260229
MKRLLLLFLFFITFSSAFPLVRMTENEENMQLAQAYLNQFYSLEIEGNHLVQSKNRSLIDDKIREMQAFFGLTVTGKLDSNTLEIMKTPRCGVPDVGQYGYTLPGWRKYNLTYRIINYTPDMARAAVDEAIQEGLEVWSKVTPLKFTKISKGIADIMIAFRTRVHGRCPRYFDGPLGVLGHAFPPGPGLGGDTHFDEDENWTKDGAGFNLFLVAAHEFGHALGLSHSNDQTALMFPNYVSLDPRKYPLSQDDINGIQSIYGGLPKEPAKPKEPTIPHACDPDLTFDAITTFRREVMFFKGRHLWRIYYDITDVEFELIASFWPSLPADLQAAYENPRDKILVFKDENFWMIRGYAVLPDYPKSIHTLGFPGRVKKIDAAVCDKTTRKTYFFVGIWCWRFDEMTQTMDKGFPQRVVKHFPGISIRVDAAFQYKGFFFFSRGSKQFEYDIKTKNITRIMRTNTWFQCKEPKNSSFGFDINKEKAHSGGIKILYHKSLSLFIFGIVHLLKNTSIYQ

SEQ ID NO: 49479 - protein, 520 aa, Homo sapiens
  Payload ID: 9908
  Gene Symbol: MMP28
  Gene Name: matrix metallopeptidase 28
  Uniprot ID: Q9H239
  ENSP ID: ENSP00000473853
MVARVGLLLRALQLLLWGHLDAQPAERGGQELRKEAEAFLEKYGYLNEQVPKAPTSTRFSDAIRAFQWVSQLPVSGVLDRATLRQMTRPRCGVTDTNSYAAWAERISDLFARHRTKMRRKKRFAKQGNKWYKQHLSYRLVNWPEHLPEPAVRGAVRAAFQLWSNVSALEFWEAPATGPADIRLTFFQGDHNDGLGNAFDGPGGALAHAFLPRRGEAHFDQDERWSLSRRRGRNLFVVLAHEIGHTLGLTHSPAPRALMAPYYKRLGRDALLSWDDVLAVQSLYGKPLGGSVAVQLPGKLFTDFETWDSYSPQGRRPETQGPKYCHSSFDAITVDRQQQLYIFKGSHFWEVAADGNVSEPRPLQERWVGLPPNIEAAAVSLNDGDFYFFKGGRCWRFRGPKPVWGLPQLCRAGGLPRHPDAALFFPPLRRLILFKGARYYVLARGGLQVEPYYPRSLQDWGGIPEEVSGALPRPDGSIIFFRDDRYWRLDQAKLQATTSGRWATELPWMGCWHANSGSALF

SEQ ID NO: 49480 - protein, 393 aa, Homo sapiens
  Payload ID: 9908
  Gene Symbol: MMP28
  Gene Name: matrix metallopeptidase 28
  ENSP ID: ENSP00000479124
MVARVGLLLRALQLLLWGHLDAQPAERGGQELRKEAEAFLEKYGYLNEQVPKAPTSTRFSDAIRAFQWVSQLPVSGVLDRATLRQMTRPRCGVTDTNSYAAWAERISDLFARHRTKMRRKKRFAKQGNKWYKQHLSYRLVNWPEHLPEPAVRGAVRAAFQLWSNVSALEFWEAPATGPADIRLTFFQGDHNDGLGNAFDGPGGALAHAFLPRRGEAHFDQDERWSLSRRRGRNLFVVLAHEIGHTLGLTHSPAPRALMAPYYKRLGRDALLSWDDVLAVQSLYGKPLGGSVAVQLPGKLFTDFETWDSYSPQGRRPETQGPKYCHSSFDAITVDRQQQLYIFKGSHFWEVAADGNVSEPRPLQERWVGLPPNIEAAAVSLNDGDFYFFKVQSV

SEQ ID NO: 49481 - protein, 510 aa, Homo sapiens
  Payload ID: 9908
  Gene Symbol: MMP28
  Gene Name: matrix metallopeptidase 28
  ENSP ID: ENSP00000481051
MVARVGLLLRALQLLLWGHLDAQPAERGGQELRKEAEAFLEKYGYLNEQVPKAPTSTRFSDAIRAFQWVSQLPVSGVLDRATLRQMTRPRCGVTDTNSYAAWAERISDLFARHRTKMRRKKRFAKQGNKWYKQHLSYRLVNWPEHLPEPAVRGAVRAAFQLWSNVSALEFWEAPATGPADIRLTFFQGDHNDGLGNAFDGPGGALAHAFLPRRGEAHFDQDERWSLSRRRGRNLFVVLAHEIGHTLGLTHSPAPRALMAPYYKRLGRDALLSWDDVLAVQSLYGKPLGGSVAVQLPGKLFTDFETWDSYSPQGRRPETQGPKYCHSSFDAITVGSHFWEVAADGNVSEPRPLQERWVGLPPNIEAAAVSLNDGDFYFFKGGRCWRFRGPKPVWGLPQLCRAGGLPRHPDAALFFPPLRRLILFKGARYYVLARGGLQVEPYYPRSLQDWGGIPEEVSGALPRPDGSIIFFRDDRYWRLDQAKLQATTSGRWATELPWMGCWHANSGSALF

SEQ ID NO: 49482 - protein, 89 aa, Homo sapiens
  Payload ID: 9908
  Gene Symbol: MMP28
  Gene Name: matrix metallopeptidase 28
  ENSP ID: ENSP00000482385
DFETWDSYSPQGRRPETQGPKYCHSSFDAITVDRQQQLYIFKGSHFWEVAADGNVSEPRPLQERWVGLPPNIEAAAVSLNDGDFYFFKA

SEQ ID NO: 49483 - protein, 393 aa, Homo sapiens; identical to SEQ ID NO: 49480
  Payload ID: 9908
  Gene Symbol: MMP28
  Gene Name: matrix metallopeptidase 28
  ENSP ID: ENSP00000483299

SEQ ID NO: 49484 - protein, 130 aa, Homo sapiens
  Payload ID: 9908
  Gene Symbol: MMP28
  Gene Name: matrix metallopeptidase 28
  Uniprot ID: Q9H239
  ENSP ID: ENSP00000483539
MVARVGLLLRALQLLLWGHLDAQPAERGGQELRKEAEAFLEKYGYLNEQVPKAPTSTRFSDAIRAFQWVSQLPVSGVLDRATLRQMTRPRCGVTDTNSYAAWAERISDLFARHRTKMRRKKRFAKQGEHC

SEQ ID NO: 49485 - protein, 520 aa, Homo sapiens; identical to SEQ ID NO: 49479
  Payload ID: 9908
  Gene Symbol: MMP28
  Gene Name: matrix metallopeptidase 28
  Uniprot ID: Q9H239
  ENSP ID: ENSP00000484430

SEQ ID NO: 49486 - protein, 189 aa, Homo sapiens
  Payload ID: 9908
  Gene Symbol: MMP28
  Gene Name: matrix metallopeptidase 28
  ENSP ID: ENSP00000484562
KYGYLNEQVPKAPTSTRFSDAIRAFQWVSQLPVSGVLDRATLRQMTRPRCGVTDTNSYAAWAERISDLFARHRTKMRRKKRFAKQGGALAHAFLPRRGEAHFDQDERWSLSRRRGRNLFVVLAHEIGHTLGLTHSPAPRALMAPYYKRLGRDALLSWDDVLAVQSLYGKPLGGSVAVQLPGKLFTDFET

SEQ ID NO: 49487 - protein, 88 aa, Homo sapiens
  Payload ID: 9908
  Gene Symbol: MMP28
  Gene Name: matrix metallopeptidase 28
  ENSP ID: ENSP00000487783
DFETWDSYSPQGRRPETQGPKYCHSSFDAITVDRQQQLYIFKGSHFWEVAADGNVSEPRPLQERWVGLPPNIEAAAVSLNDGDFYFFK

SEQ ID NO: 49488 - protein, 189 aa, Homo sapiens; identical to SEQ ID NO: 49486
  Payload ID: 9908
  Gene Symbol: MMP28
  Gene Name: matrix metallopeptidase 28
  ENSP ID: ENSP00000487847

SEQ ID NO: 49489 - protein, 130 aa, Homo sapiens; identical to SEQ ID NO: 49484
  Payload ID: 9908
  Gene Symbol: MMP28
  Gene Name: matrix metallopeptidase 28
  Uniprot ID: Q9H239
  ENSP ID: ENSP00000488096

SEQ ID NO: 49490 - protein, 510 aa, Homo sapiens; identical to SEQ ID NO: 49481
  Payload ID: 9908
  Gene Symbol: MMP28
  Gene Name: matrix metallopeptidase 28
  ENSP ID: ENSP00000488159

SEQ ID NO: 49491 - protein, 477 aa, Homo sapiens
  Payload ID: 9909
  Gene Symbol: MMP3
  Gene Name: matrix metallopeptidase 3
  Uniprot ID: P08254
  ENSP ID: ENSP00000299855
MKSLPILLLLCVAVCSAYPLDGAARGEDTSMNLVQKYLENYYDLKKDVKQFVRRKDSGPVVKKIREMQKFLGLEVTGKLDSDTLEVMRKPRCGVPDVGHFRTFPGIPKWRKTHLTYRIVNYTPDLPKDAVDSAVEKALKVWEEVTPLTFSRLYEGEADIMISFAVREHGDFYPFDGPGNVLAHAYAPGPGINGDAHFDDDEQWTKDTTGTNLFLVAAHEIGHSLGLFHSANTEALMYPLYHSLTDLTRFRLSQDDINGIQSLYGPPPDSPETPLVPTEPVPPEPGTPANCDPALSFDAVSTLRGEILIFKDRHFWRKSLRKLEPELHLISSFWPSLPSGVDAAYEVTSKDLVFIFKGNQFWAIRGNEVRAGYPRGIHTLGFPPTVRKIDAAISDKEKNKTYFFVEDKYWRFDEKRNSMEPGFPKQIAEDFPGIDSKIDAVFEEFGFFYFFTGSSQLEFDPNAKKVTHTLKSNSWLNC

SEQ ID NO: 49492 - protein, 99 aa, Homo sapiens
  Payload ID: 9909
  Gene Symbol: MMP3
  Gene Name: matrix metallopeptidase 3
  ENSP ID: ENSP00000398346
  MOD_RES (1)..(1): Any amino acid
XNQFWAIRGNEVRAGYPRGIHTLGFPPTVRKIDAAISDKEKNKTYFFVEDKYWRFDEKRNSMEPGFPKQIAEDFPGIDSKIDAVFEEFDRAGTECCLHS

SEQ ID NO: 49493 - protein, 42 aa, Homo sapiens
  Payload ID: 9909
  Gene Symbol: MMP3
  Gene Name: matrix metallopeptidase 3
  ENSP ID: ENSP00000435255
MKSLPILLLLCVAVCSAYPLDGAAREISRKLLRPQKRCETVC

SEQ ID NO: 49494 - protein, 267 aa, Homo sapiens
  Payload ID: 9910
  Gene Symbol: MMP7
  Gene Name: matrix metallopeptidase 7
  Uniprot ID: P09237
  ENSP ID: ENSP00000260227
MRLTVLCAVCLLPGSLALPLPQEAGGMSELQWEQAQDYLKRFYLYDSETKNANSLEAKLKEMQKFFGLPITGMLNSRVIEIMQKPRCGVPDVAEYSLFPNSPKWTSKVVTYRIVSYTRDLPHITVDRLVSKALNMWGKEIPLHFRKVVWGTADIMIGFARGAHGDSYPFDGPGNTLAHAFAPGTGLGGDAHFDEDERWTDGSSLGINFLYAATHELGHSLGMGHSSDPNAVMYPTYGNGDPQNFKLSQDDIKGIQKLYGKRSNSRKK

SEQ ID NO: 49495 - protein, 467 aa, Homo sapiens [sequence omitted]

SEQ ID NO: 49496 - protein, 344 aa, Homo sapiens
  Payload ID: 9911
  Gene Symbol: MMP8
  Gene Name: matrix metallopeptidase 8
  ENSP ID: ENSP00000401004
  MOD_RES (1)..(1): Any amino acid
XKEKNTKTVQDYLEKFYQLPSNQYQSTRKNGTNVIVEKLKEMQRFFGLNVTGKPNEETLDMMKKPRCGVPDSGGFMLTPGNPKWERTNLTYRIRNYTPQLSEAEVERAIKDAFELWSVASPLIFTRISQGEADINIAFYQRDHGDNSPFDGPNGILAHAFQPGQGIGGDAHFDAEETWTNTSANYNLFLVAAHEFGHSLGLAHSSDPGALMYPNYAFRETSNYSLPQDDIDGIQAIYGLSSNPIQPTGPSTPKPCDPSLTFDAITTLRGEILFFKDRYFWRRHPQLQRVEMNFISLFWPSLPTGIQAAYEDFDRDLIFLFKDMITKDNSWSQVIPKAYQVPFQE

SEQ ID NO: 49497 - protein, 36 aa, Homo sapiens
  Payload ID: 9911
  Gene Symbol: MMP8
  Gene Name: matrix metallopeptidase 8
  ENSP ID: ENSP00000431431
MFSLKTLPFLLLLHVQISKAFPVSSKEKNTKTVQNK

SEQ ID NO: 49498 - protein, 43 aa, Homo sapiens
  Payload ID: 9911
  Gene Symbol: MMP8
  Gene Name: matrix metallopeptidase 8
  ENSP ID: ENSP00000431938
MFSLKTLPFLLLLHVQISKAFPVSSKEKNTKTVQRQKYLKSDK

SEQ ID NO: 49499 - protein, 56 aa, Homo sapiens
  Payload ID: 9911
  Gene Symbol: MMP8
  Gene Name: matrix metallopeptidase 8
  ENSP ID: ENSP00000433812
MFSLKTLPFLLLLHVQISKAFPVSSKEKNTKTVQHKAISEANQMQPPDLGLPSLQN

SEQ ID NO: 49500 - protein, 56 aa, Homo sapiens; identical to SEQ ID NO: 49499
  Payload ID: 9911
  Gene Symbol: MMP8
  Gene Name: matrix metallopeptidase 8
  ENSP ID: ENSP00000437173

SEQ ID NO: 49501 - protein, 707 aa, Homo sapiens
  Payload ID: 9912
  Gene Symbol: MMP9
  Gene Name: matrix metallopeptidase 9
  Uniprot ID: P14780
  ENSP ID: ENSP00000361405
MSLWQPLVLVLLVLGCCFAAPRQRQSTLVLFPGDLRTNLTDRQLAEEYLYRYGYTRVAEMRGESKSLGPALLLLQKQLSLPETGELDSATLKAMRTPRCGVPDLGRFQTFEGDLKWHHHNITYWIQNYSEDLPRAVIDDAFARAFALWSAVTPLTFTRVYSRDADIVIQFGVAEHGDGYPFDGKDGLLAHAFPPGPGIQGDAHFDDDELWSLGKGVVVPTRFGNADGAACHFPFIFEGRSYSACTTDGRSDGLPWCSTTANYDTDDRFGFCPSERLYTQDGNADGKPCQFPFIFQGQSYSACTTDGRSDGYRWCATTANYDRDKLFGFCPTRADSTVMGGNSAGELCVFPFTFLGKEYSTCTSEGRGDGRLWCATTSNFDSDKKWGFCPDQGYSLFLVAAHEFGHALGLDHSSVPEALMYPMYRFTEGPPLHKDDVNGIRHLYGPRPEPEPRPPTTTTPQPTAPPTVCPTGPPTVHPSERPTAGPTGPPSAGPTGPPTAGPSTATTVPLSPVDDACNVNIFDAIAEIGNQLYLFKDGKYWRFSEGRGSRPQGPFLIADKWPALPRKLDSVFEERLSKKLFFFSGRQVWVYTGASVLGPRRLDKLGLGADVAQVTGALRSGRGKMLLFSGRRLWRFDVKAQMVDPRSASEVDRMFPGVPLDTHDVFQYREKAYFCQDRFYWRVSSRSELNQVDQVGYVTYDILQCPED

SEQ ID NO: 49502 - protein, 2828 aa, Homo sapiens
  Payload ID: 9913
  Gene Symbol: MXRA5
  Gene Name: matrix-remodelling associated 5
  Uniprot ID: Q9NR99
  ENSP ID: ENSP00000217939
MPKRAHWGALSVVLILLWGHPRVALACPHPCACYVPSEVHCTFRSLASVPAGIAKHVERINLGFNSIQALSETSFAGLTKLELLMIHGNEIPSIPDGALRDLSSLQVFKFSYNKLRVITGQTLQGLSNLMRLHIDHNKIEFIHPQAFNGLTSLRLLHLEGNLLHQLHPSTFSTFTFLDYFRLSTIRHLYLAENMVRTLPASMLRNMPLLENLYLQGNPWTCDCEMRWFLEWDAKSRGILKCKKDKAYEGGQLCAMCFSPKKLYKHEIHKLKDMTCLKPSIESPLRQNRSRSIEEEQEQEEDGGSQLILEKFQLPQWSISLNMTDEHGNMVNLVCDIKKPMDVYKIHLNQTDPPDIDINATVALDFECPMTRENYEKLWKLIAYYSEVPVKLHRELMLSKDPRVSYQYRQDADEEALYYTGVRAQILAEPEWVMQPSIDIQLNRRQSTAKKVLLSYYTQYSQTISTKDTRQARGRSWVMIEPSGAVQRDQTVLEGGPCQLSCNVKASESPSIFWVLPDGSILKAPMDDPDSKFSILSSGWLRIKSMEPSDSGLYQCIAQVRDEMDRMVYRVLVQSPSTQPAEKDTVTIGKNPGESVTLPCNALAIPEAHLSWILPNRRIINDLANTSHVYMLPNGTLSIPKVQVSDSGYYRCVAVNQQGADHFTVGITVTKKGSGLPSKRGRRPGAKALSRVREDIVEDEGGSGMGDEENTSRRLLHPKDQEVFLKTKDDAINGDKKAKKGRRKLKLWKHSEKEPETNVAEGRRVFESRRRINMANKQINPERWADILAKVRGKNLPKGTEVPPLIKTTSPPSLSLEVTPPFPAISPPSASPVQTVTSAEESSADVPLLGEEEHVLGTISSASMGLEHNHNGVILVEPEVTSTPLEEVVDDLSEKTEEITSTEGDLKGTAAPTLISEPYEPSPTLHTLDTVYEKPTHEETATEGWSAADVGSSPEPTSSEYEPPLDAVSLAESEPMQYFDPDLETKSQPDEDKMKEDTFAHLTPTPTIWVNDSSTSQLFEDSTIGEPGVPGQSHLQGLTDNIHLVKSSLSTQDTLLIKKGMKEMSQTLQGGNMLEGDPTHSRSSESEGQESKSITLPDSTLGIMSSMSPVKKPAETTVGTLLDKDTTTATTTPRQKVAPSSTMSTHPSRRRPNGRRRLRPNKFRHRHKQTPPTTFAPSETFSTQPTQAPDIKISSQVESSLVPTAWVDNTVNTPKQLEMEKNAEPTSKGTPRRKHGKRPNKHRYTPSTVSSRASGSKPSPSPENKHRNIVTPSSETILLPRTVSLKTEGPYDSLDYMTTTRKIYSSYPKVQETLPVTYKPTSDGKEIKDDVATNVDKHKSDILVTGESITNAIPTSRSLVSTMGEFKEESSPVGFPGTPTWNPSRTAQPGRLQTGIPVTTSGENLTDPPLLKELEDVDFTSEFLSSLTVSTPFHQEEAGSSTTLSSIKVEVASSQAETTTLDQDHLETTVAILLSETRPQNHTPTAARMKEPASSSPSTILMSLGQTTTTKPALPSPRISQASRDSKENVFLNYVGNPETEATPVNNEGTQHMSGPNELSTPSSDQDAFNLSTKLELEKQVFGSRSLPRGPDSQRQDGRVHASHQLTRVPAKPILPTATVRLPEMSTQSASRYFVTSQSPRHWTNKPEITTYPSGALPENKQFTTPRLSSTTIPLPLHMSKPSIPSKFTDRRTDQFNGYSKVFGNNNIPEARNPVGKPPSPRIPHYSNGRLPFFTNKTLSFPQLGVTRRPQIPTSPAPVMRERKVIPGSYNRIHSHSTFHLDFGPPAPPLLHTPQTTGSPSTNLQNIPMVSSTQSSISFITSSVQSSGSFHQSSSKFFAGGPPASKFWSLGEKPQILTKSPQTVSVTAETDTVFPCEATGKPKPFVTWTKVSTGALMTPNTRIQRFEVLKNGTLVIRKVQVQDRGQYMCTASNLHGLDRMVVLLSVTVQQPQILASHYQDVTVYLGDTIAMECLAKGTPAPQISWIFPDRRVWQTVSPVEGRITLHENRTLSIKEASFSDRGVYKCVASNAAGADSLAIRLHVAALPPVIHQEKLENISLPPGLSIHIHCTAKAAPLPSVRWVLGDGTQIRPSQFLHGNLFVFPNGTLYIRNLAPKDSGRYECVAANLVGSARRTVQLNVQRAAANARITGTSPRRTDVRYGGTLKLDCSASGDPWPRILWRLPSKRMIDALFSFDSRIKVFANGTLVVKSVTDKDAGDYLCVARNKVGDDYVVLKVDVVMKPAKIEHKEENDHKVFYGGDLKVDCVATGLPNPEISWSLPDGSLVNSFMQSDDSGGRTKRYVVFNNGTLYFNEVGMREEGDYTCFAENQVGKDEMRVRVKVVTAPATIRNKTYLAVQVPYGDVVTVACEAKGEPMPKVTWLSPTNKVIPTSSEKYQIYQDGTLLIQKAQRSDSGNYTCLVRNSAGEDRKTVWIHVNVQPPKINGNPNPITTVREIAAGGSRKLIDCKAEGIPTPRVLWAFPEGVVLPAPYYGNRITVHGNGSLDIRSLRKSDSVQLVCMARNEGGEARLILQLTVLEPMEKPIFHDPISEKITAMAGHTISLNCSAAGTPTPSLVWVLPNGTDLQSGQQLQRFYHKADGMLHISGLSSVDAGAYRCVARNAAGHTERLVSLKVGLKPEANKQYHNLVSIINGETLKLPCTPPGAGQGRFSWTLPNGMHLEGPQTLGRVSLLDNGTLTVREASVFDRGTYVCRMETEYGPSVTSIPVIVIAYPPRITSEPTPVIYTRPGNTVKLNCMAMGIPKADITWELPDKSHLKAGVQARLYGNRFLHPQGSLTIQHATQRDAGFYKCMAKNILGSDSKTTYIHVF

SEQ ID NO: 49503 - protein, 204 aa, Homo sapiens
  Payload ID: 9914
  Gene Symbol: MXRA7
  Gene Name: matrix-remodelling associated 7
  Uniprot ID: P84157
  ENSP ID: ENSP00000348050
MEAPAELLAALPALATALALLLAWLLVRRGAAASPEPARAPPEPAPPAEATGAPAPSRPCAPEPAASPAGPEEPGEPAGLGELGEPAGPGEPEGPGDPAAAPAEAEEQAVEARQEEEQDLDGEKGPSSEGPEEEDGEGFSFKYSPGKLRGNQYKKMMTKEELEEEQRVQKEQLAAIFKLMKDNKETFGEMSDGDVQEQLRLYDM

SEQ ID NO: 49504 - protein, 177 aa, Homo sapiens
  Payload ID: 9914
  Gene Symbol: MXRA7
  Gene Name: matrix-remodelling associated 7
  Uniprot ID: P84157
  ENSP ID: ENSP00000364176
MEAPAELLAALPALATALALLLAWLLVRRGAAASPEPARAPPEPAPPAEATGAPAPSRPCAPEPAASPAGPEEPGEPAGLGELGEPAGPGEPEGPGDPAAAPAEAEEQAVEARQEEEQDLDGEKGPSSEGPEEEDGEGFSFKYSPGKLRGNQYKKMMTKEELEEEQRIELTSDLTSL

SEQ ID NO: 49505 - protein, 170 aa, Homo sapiens
  Payload ID: 9914
  Gene Symbol: MXRA7
  Gene Name: matrix-remodelling associated 7
  Uniprot ID: P84157
  ENSP ID: ENSP00000391466
MEAPAELLAALPALATALALLLAWLLVRRGAAASPEPARAPPEPAPPAEATGAPAPSRPCAPEPAASPAGPEEPGEPAGLGELGEPAGPGEPEGPGDPAAAPAEAEEQAVEARQEEEQDLDGEKGPSSEGPEEEDGEGFSFKYSPGKLRGNQYKKMMTKEELEEEQRTEE

SEQ ID NO: 49506 - protein, 213 aa, Homo sapiens
  Payload ID: 9914
  Gene Symbol: MXRA7
  Gene Name: matrix-remodelling associated 7
  ENSP ID: ENSP00000465103
MDTERVGDGKQHRRKQSQRLRWPCCLALVPDRHPSQLSSCTLCLLAAASQWESWAHFSKWHTEASTGTHLGKAKAEGLGCTVKNTPQLSICEPSHFGPSFVHSPHLLVDHDHRAGAATGRGQAGPSRASSVSPTFCPPTTSHHPVCAKGTDPVLVLQEEEQDLDGEKGPSSEGPEEEDGEGFSFKYSPGKLRGNQYKKMMTKEELEEEQRTEE

SEQ ID NO: 49507 - protein, 15 aa, Homo sapiens
  Payload ID: 9914
  Gene Symbol: MXRA7
  Gene Name: matrix-remodelling associated 7
  ENSP ID: ENSP00000466376
MMTKEELEEEQRTEE

SEQ ID NO: 49508 - protein, 22 aa, Homo sapiens
  Payload ID: 9914
  Gene Symbol: MXRA7
  Gene Name: matrix-remodelling associated 7
  ENSP ID: ENSP00000467510
MMTKEELEEEQRIELTSDLTSL

SEQ ID NO: 49509 - protein, 15 aa, Homo sapiens
  Payload ID: 9914
  Gene Symbol: MXRA7
  Gene Name: matrix-remodelling associated 7
  ENSP ID: ENSP00000468020
MMTKEELEEEQRTEE

SEQ ID NO: 49510 - protein, 442 aa, Homo sapiens
  Payload ID: 9915
  Gene Symbol: MXRA8
  Gene Name: matrix-remodelling associated 8
  Uniprot ID: Q9BRK3
  ENSP ID: ENSP00000307887
MALPSRILLWKLVLLQSSAVLLHSGSSVPAAAGSSVVSESAVSWEAGARAVLRCQSPRMVWTQDRLHDRQRVLHWDLRGPGGGPARRLLDLYSAGEQRVYEARDRGRLELSASAFDDGNFSLLIRAVEETDAGLYTCNLHHHYCHLYESLAVRLEVTDGPPATPAYWDGEKEVLAVARGAPALLTCVNRGHVWTDRHVEEAQQVVHWDRQPPGVPHDRADRLLDLYASGERRAYGPLFLRDRVAVGADAFERGDFSLRIEPLEVADEGTYSCHLHHHYCGLHERRVFHLTVAEPHAEPPPRGSPGNGSSHSGAPGPDPTLARGHNVINVIVPESRAHFFQQLGYVLATLLLFILLLVTVLLAARRRRGGYEYSDQKSGKSKGKDVNLAEFAVAAGDQMLYRSEDIQLDYKNNILKERAELAHSPLPAKYIDLDKGFRKENCK

SEQ ID NO: 49511 - protein, 341 aa, Homo sapiens
  Payload ID: 9915
  Gene Symbol: MXRA8
  Gene Name: matrix-remodelling associated 8
  Uniprot ID: Q9BRK3
  ENSP ID: ENSP00000344998
MALPSRILLWKLVLLQSSAVLLHSAVEETDAGLYTCNLHHHYCHLYESLAVRLEVTDGPPATPAYWDGEKEVLAVARGAPALLTCVNRGHVWTDRHVEEAQQVVHWDRQPPGVPHDRADRLLDLYASGERRAYGPLFLRDRVAVGADAFERGDFSLRIEPLEVADEGTYSCHLHHHYCGLHERRVFHLTVAEPHAEPPPRGSPGNGSSHSGAPGPDPTLARGHNVINVIVPESRAHFFQQLGYVLATLLLFILLLVTVLLAARRRRGGYEYSDQKSGKSKGKDVNLAEFAVAAGDQMLYRSEDIQLDYKNNILKERAELAHSPLPAKYIDLDKGFRKENCK

SEQ ID NO: 49512 - protein, 450 aa, Homo sapiens
  Payload ID: 9915
  Gene Symbol: MXRA8
  Gene Name: matrix-remodelling associated 8
  Uniprot ID: Q9BRK3
  ENSP ID: ENSP00000399229
MALPSRILLWKLVLLQSSAVLLHSGSSVPAAAGSSVVSESAVSWEAGARAVLRCQSPRMVWTQDRLHDRQRVLHWDLRGPGGGPARRLLDLYSAGEQRVYEARDRGRLELSASAFDDGNFSLLIRAVEETDAGLYTCNLHHHYCHLYESLAVRLEVTDGPPATPAYWDGEKEVLAVARGAPALLTCVNRGHVWTDRHVEEAQQVVHWDRQPPGVPHDRADRLLDLYASGERRAYGPLFLRDRVAVGADAFERGDFSLRIEPLEVADEGTYSCHLHHHYCGLHERRVFHLTVAEPHAEPPPRGSPGNGSSHSGAPGPDPTLARGHNVINVIVPESRAHFFQQLGYVLATLLLFILLLVTVLLAARRRRGGYEYSDQKSGKSKGKDVNLAEFAVAAGDQMLYRSEDIQLASSPPTDYKNNILKERAELAHSPLPAKYIDLDKDPSGLCPLGA

SEQ ID NO: 49513 - protein, 433 aa, Homo sapiens
  Payload ID: 9915
  Gene Symbol: MXRA8
  Gene Name: matrix-remodelling associated 8
  Uniprot ID: Q9BRK3
  ENSP ID: ENSP00000436135
MIRCAATGSAVLLHSGSSVPAAAGSSVVSESAVSWEAGARAVLRCQSPRMVWTQDRLHDRQRVLHWDLRGPGGGPARRLLDLYSAGEQRVYEARDRGRLELSASAFDDGNFSLLIRAVEETDAGLYTCNLHHHYCHLYESLAVRLEVTDGPPATPAYWDGEKEVLAVARGAPALLTCVNRGHVWTDRHVEEAQQVVHWDRQPPGVPHDRADRLLDLYASGERRAYGPLFLRDRVAVGADAFERGDFSLRIEPLEVADEGTYSCHLHHHYCGLHERRVFHLTVAEPHAEPPPRGSPGNGSSHSGAPGPDPTLARGHNVINVIVPESRAHFFQQLGYVLATLLLFILLLVTVLLAARRRRGGYEYSDQKSGKSKGKDVNLAEFAVAAGDQMLYRSEDIQLDYKNNILKERAELAHSPLPAKYIDLDKGFRKENCK

SEQ ID NO: 49514 - protein, 107 aa, Homo sapiens
  Payload ID: 9916
  Gene Symbol: MTCP1
  Gene Name: mature T-cell proliferation 1
  Uniprot ID: P56278
  ENSP ID: ENSP00000355058
MAGEDVGAPPDHLWVHQEGIYRDEYQRTWVAVVEEETSFLRARVQQIQVPLGDAARPSHLLTSQLPLMWQLYPEERYMDNNSRLWQIQHHLMVRGVQELLLKLLPDD

SEQ ID NO: 49515 - protein, 107 aa, Homo sapiens; identical to SEQ ID NO: 49514
  Payload ID: 9916
  Gene Symbol: MTCP1
  Gene Name: mature T-cell proliferation 1
  Uniprot ID: P56278
  ENSP ID: ENSP00000358488

SEQ ID NO: 49516 - protein, 9 aa, Homo sapiens
  Payload ID: 9916
  Gene Symbol: MTCP1
  Gene Name: mature T-cell proliferation 1
  ENSP ID: ENSP00000427132
LLLKLLPDD

SEQ ID NO: 49517 - protein, 131 aa, Homo sapiens
  Payload ID: 9917
  Gene Symbol: MTURN
  Gene Name: maturin, neural progenitor differentiation regulator homolog (Xenopus)
  Uniprot ID: Q8N3F0
  ENSP ID: ENSP00000324204
MDFQQLADVAEKWCSNTPFELIATEETERRMDFYADPGVSFYVLCPDNGCGDNFHVWSESEDCLPFLQLAQDYISSCGKKTLHEVLEKVFKSFRPLLGLPDADDDAFEEYSADVEEEEPEADHPQMGVSQQ

SEQ ID NO: 49518 - protein, 98 aa, Homo sapiens
  Payload ID: 9917
  Gene Symbol: MTURN
  Gene Name: maturin, neural progenitor differentiation regulator homolog (Xenopus)
  Uniprot ID: Q8N3F0
  ENSP ID: ENSP00000324755
MATHCPLYCVGADLMMNRAGEHVWSESEDCLPFLQLAQDYISSCGKKTLHEVLEKVFKSFRPLLGLPDADDDAFEEYSADVEEEEPEADHPQMGVSQQ

SEQ ID NO: 49519 - protein, 90 aa, Homo sapiens
  Payload ID: 9917
  Gene Symbol: MTURN
  Gene Name: maturin, neural progenitor differentiation regulator homolog (Xenopus)
  Uniprot ID: Q8N3F0
  ENSP ID: ENSP00000386490
MDFQQLADVAEKWCSNTPFELIATEETERRMDFYADPGVSFYVLCPDNGCGDNFLLGLPDADDDAFEEYSADVEEEEPEADHPQMGVSQQ

SEQ ID NO: 49520 - protein, 76 aa, Homo sapiens
  Payload ID: 9917
  Gene Symbol: MTURN
  Gene Name: maturin, neural progenitor differentiation regulator homolog (Xenopus)
  ENSP ID: ENSP00000415658
MIPWVEWNFLQVLEALMDKMPTSGVFLAGPLESVPGQHVWSESEDCLPFLQLAQDYISSCGKKTLHEVLEKVFKSF

SEQ ID NO: 49521 - protein, 613 aa, Homo sapiens
  Payload ID: 9918
  Gene Symbol: MAU2
  Gene Name: MAU2 sister chromatid cohesion factor
  Uniprot ID: Q9Y6X3
  ENSP ID: ENSP00000262815
MAAQAAAAAQAAAAQAAQAEAADSWYLALLGFAEHFRTSSPPKIRLCVHCLQAVFPFKPPQRIEARTHLQLGSVLYHHTKNSEQARSHLEKAWLISQQIPQFEDVKFEAASLLSELYCQENSVDAAKPLLRKAIQISQQTPYWHCRLLFQLAQLHTLEKDLVSACDLLGVGAEYARVVGSEYTRALFLLSKGMLLLMERKLQEVHPLLTLCGQIVENWQGNPIQKESLRVFFLVLQVTHYLDAGQVKSVKPCLKQLQQCIQTISTLHDDEILPSNPADLFHWLPKEHMCVLVYLVTVMHSMQAGYLEKAQKYTDKALMQLEKLKMLDCSPILSSFQVILLEHIIMCRLVTGHKATALQEISQVCQLCQQSPRLFSNHAAQLHTLLGLYCVSVNCMDNAEAQFTTALRLTNHQELWAFIVTNLASVYIREGNRHQEVLYSLLERINPDHSFPVSSHCLRAAAFYVRGLFSFFQGRYNEAKRFLRETLKMSNAEDLNRLTACSLVLLGHIFYVLGNHRESNNMVVPAMQLASKIPDMSVQLWSSALLRDLNKACGNAMDAHEAAQMHQNFSQQLLQDHIEACSLPEHNLITWTDGPPPVQFQAQNGPNTSLASLL

SEQ ID NO: 49522 - protein, 183 aa, Homo sapiens
  Payload ID: 9918
  Gene Symbol: MAU2
  Gene Name: MAU2 sister chromatid cohesion factor
  ENSP ID: ENSP00000477034
KIRLCVHCLQAVFPFKPPQRIEARTHLQLGSVLYHHTKNSEQARSHLEKANSVDAAKPLLRKAIQISQQTPYWHCRLLFQLAQLHTLEKDLVSACDLLGVGAEYARVVGSEYTRALFLLSKGMLLLMERKLQEVHPLLTLCGQIVENWQGNPIQKESLRVFFLVLQVTHYLDAGQVKSVKPCL

SEQ ID NO: 49523 - protein, 235 aa, Homo sapiens
  Payload ID: 9918
  Gene Symbol: MAU2
  Gene Name: MAU2 sister chromatid cohesion factor
  ENSP ID: ENSP00000477436
AIQISQQTPYWHCRLLFQLAQLHTLEKDLVSACDLLGVGAEYARVVGSEYTRALFLLSKGMLLLMERKLQEVHPLLTLCGQIVENWQGNPIQKESLRVFFLVLQVTHYLDAGQVKSVKPCLKQLQQCIQTISTLHDDEILPSNPADLFHWLPKEHMCVLVYLVTVMHSMQAGYLEKAQKYTDKALMQLEKLKSKSVLDCSPILSSFQVILLEHIIMCRLVTGHKATALQEISQVC

SEQ ID NO: 49524 - protein, 221 aa, Homo sapiens
  Payload ID: 9919
  Gene Symbol: MXD1
  Gene Name: MAX dimerization protein 1
  Uniprot ID: Q05195
  ENSP ID: ENSP00000264444
MAAAVRMNIQMLLEAADYLERREREAEHGYASMLPYNNKDRDALKRRNKSKKNNSSSRSTHNEMEKNRRAHLRLCLEKLKGLVPLGPESSRHTTLSLLTKAKLHIKKLEDCDRKAVHQIDQLQREQRHLKRQLEKLGIERIRMDSIGSTVSSERSDSDREEIDVDVESTDYLTGDLDWSSSSVSDSDERGSMQSLGSDEGYSSTSIKRIKLQDSHKACLGL

SEQ ID NO: 49525 - protein, 73 aa, Homo sapiens
  Payload ID: 9919
  Gene Symbol: MXD1
  Gene Name: MAX dimerization protein 1
  ENSP ID: ENSP00000386523
MLPYNNKDRDALKRRNKSKKNNSSSRRAHLRLCLEKLKGLVPLGPESSRHTTLSLLTKAKLHIKDKYPQHWRC

SEQ ID NO: 49526 - protein, 181 aa, Homo sapiens
  Payload ID: 9919
  Gene Symbol: MXD1
  Gene Name: MAX dimerization protein 1
  ENSP ID: ENSP00000410672
MLPYNNKDRDALKRRNKSKKNNSSSRSTHNEMEKNRRAHLRLCLEKLKGLVPLGPESSRHTTLSLLTKAKLHIKKLEDCDRKAVHQIDQLQREQRHLKRQLEKLGIERIRMDSIGSTVSSERSDSDREEIDVDVESTDYLTGDLDWSSSSVSDSDERGSMQSLGSDEGYSSTSIKRIKLQD

SEQ ID NO: 49527 - protein, 211 aa, Homo sapiens
  Payload ID: 9919
  Gene Symbol: MXD1
  Gene Name: MAX dimerization protein 1
  Uniprot ID: Q05195
  ENSP ID: ENSP00000443935
MAAAVRMNIQMLLEAADYLERREREAEHGYASMLPYNNKDRDALKRRNKSKKNNSSSRRAHLRLCLEKLKGLVPLGPESSRHTTLSLLTKAKLHIKKLEDCDRKAVHQIDQLQREQRHLKRQLEKLGIERIRMDSIGSTVSSERSDSDREEIDVDVESTDYLTGDLDWSSSSVSDSDERGSMQSLGSDEGYSSTSIKRIKLQDSHKACLGL

SEQ ID NO: 49528 - protein, 388 aa, Homo sapiens
  Payload ID: 9920
  Gene Symbol: MXD3
  Gene Name: MAX dimerization protein 3
  Uniprot ID: Q9BW11
  ENSP ID: ENSP00000389716
MEPLASNIQVLLQAAEFLERREREAEHGYASLCPHRSPGPIHRRKKRPPQAPGAQDSGRSVHNELEKRRRAQLKRCLERLKQQMPLGADCARYTTLSLLRRARMHIQKLEDQEQRARQLKERLRSKQQSLQRQLEQLRGLAGAAERERLRADSLDSSGLSSERSDSDQGECPEAEGLCGPRGEPGLLTGPLPAQRSWRWMWRAWCLGVRPSCCGASSPARSTATRTAAAPGYDVPHPGRASALYSCQAHLPGRSPPQAFRAARSHLLEWTKRTLVWEQVLPKHPAAGCQAGPLEGKGQDSSGPPWTPAGQAAWARAQAFGSAAPKGTGSLLGLFPSWTRPPAFASHKLYSIFIKSLFHNFPSIVLPNENGGTPNHRPTGRGNNISSHH

SEQ ID NO: 49529 - protein, 206 aa, Homo sapiens
  Payload ID: 9920
  Gene Symbol: MXD3
  Gene Name: MAX dimerization protein 3
  Uniprot ID: Q9BW11
  ENSP ID: ENSP00000401867
MEPLASNIQVLLQAAEFLERREREAEHGYASLCPHRSPGPIHRRKKRPPQAPGAQDSGRSVHNELEKRRRAQLKRCLERLKQQMPLGADCARYTTLSLLRRARMHIQKLEDQEQRARQLKERLRSKQQSLQRQLEQLRGLAGAAERERLRADSLDSSGLSSERSDSDQEELEVDVESLVFGGEAELLRGFVAGQEHSYSHGGGAWL

SEQ ID NO: 49530 - protein, 193 aa, Homo sapiens
  Payload ID: 9920
  Gene Symbol: MXD3
  Gene Name: MAX dimerization protein 3
  Uniprot ID: Q9BW11
  ENSP ID: ENSP00000416921
MEPLASNIQVLLQAAEFLERREREAEHGYASLCPHRSPGPIHRRKKRPPQAPGAQDSGRSVHNELEKRRRAQLKRCLERLKQQMPLGADCARYTTLSLLRRARMHIQKLEDQEQRARQLKERLRSKQQSLQRQLEQLRGLAGAAERERLRADSLDSSGLSSERSDSDQVLPNENGGTPNHRPTGRGNNISSHH

SEQ ID NO: 49531 - protein, 206 aa, Homo sapiens; identical to SEQ ID NO: 49529
  Payload ID: 9920
  Gene Symbol: MXD3
  Gene Name: MAX dimerization protein 3
  Uniprot ID: Q9BW11
  ENSP ID: ENSP00000421463

SEQ ID NO: 49532 - protein, 124 aa, Homo sapiens
  Payload ID: 9920
  Gene Symbol: MXD3
  Gene Name: MAX dimerization protein 3
  ENSP ID: ENSP00000425029
MEPLASNIQVLLQAAEFLERREREAEHGYASLCPHRSPGPIHRRKKRPPQAPGAQDSGRRAQLKRCLERLKQQMPLGADCARYTTLSLLRRARMHIQKLEDQEQRARQLKERLRSKQQSLQRQL

SEQ ID NO: 49533 - protein, 74 aa, Homo sapiens
  Payload ID: 9920
  Gene Symbol: MXD3
  Gene Name: MAX dimerization protein 3
  ENSP ID: ENSP00000427104
MPLGADCARYTTLSLLRRARMHIQKLEDQEQRARQLKERLRSKQQSLQRQLEQLRGLAGAAERERLRADSLDSS

SEQ ID NO: 49534 - protein, 209 aa, Homo sapiens
  Payload ID: 9921
  Gene Symbol: MXD4
  Gene Name: MAX dimerization protein 4
  Uniprot ID: Q14582
  ENSP ID: ENSP00000337889
MELNSLLILLEAAEYLERRDREAEHGYASVLPFDGDFAREKTKAAGLVRKAPNNRSSHNELEKHRRAKLRLYLEQLKQLVPLGPDSTRHTTLSLLKRAKVHIKKLEEQDRRALSIKEQLQQEHRFLKRRLEQLSVQSVERVRTDSTGSAVSTDDSEQEVDIEGMEFGPGELDSVGSSSDADDHYSLQSGTGGDSGFGPHCRRLGRPALS

SEQ ID NO: 49535 - protein, 107 aa, Homo sapiens
  Payload ID: 9921
  Gene Symbol: MXD4
  Gene Name: MAX dimerization protein 4
  ENSP ID: ENSP00000421209
MELNSLLILLEAAEYLERRDREAEHGYASVLPFDGDFAREKTKAAGLVRKAPNNSGILGGPGALAGLWGPAWTRKVAWSWERGPPASLSSRQMLWHTLWCWELCARV

SEQ ID NO: 49536 - protein, 82 aa, Homo sapiens
  Payload ID: 9921
  Gene Symbol: MXD4
  Gene Name: MAX dimerization protein 4
  ENSP ID: ENSP00000422660
  MOD_RES (1)..(1): Any amino acid
XLPFDGDFAREKTKAAGLVRKAPNNRSSHNELEKHRCSVISKAVCSRTSPAPHPRDRIPGTQRLSHILHCSPRALTLPMRLG

SEQ ID NO: 49537 - protein, 228 aa, Homo sapiens
  Payload ID: 9922
  Gene Symbol: MXI1
  Gene Name: MAX interactor 1, dimerization protein
  Uniprot ID: P50539
  ENSP ID: ENSP00000239007
MERVKMINVQRLLEAAEFLERRERECEHGYASSFPSMPSPRLQHSKPPRRLSRAQKHSSGSSNTSTANRSTHNELEKNRRAHLRLCLERLKVLIPLGPDCTRHTTLGLLNKAKAHIKKLEEAERKSQHQLENLEREQRFLKWRLEQLQGPQEMERIRMDSIGSTISSDRSDSEREEIEVDVESTEFSHGEVDNISTTSISDIDDHSSLPSIGSDEGYSSASVKLSFTS

SEQ ID NO: 49538 - protein, 295 aa, Homo sapiens
  Payload ID: 9922
  Gene Symbol: MXI1
  Gene Name: MAX interactor 1, dimerization protein
  Uniprot ID: P50539
  ENSP ID: ENSP00000331152
MGKRGRPRKEARCEGAGLAPAAPPAVPPAVAAPQPPALPEDPAGAKPRCPFSDIFNTSENSMEKHINTFLQNVQILLEAASYLEQIEKENKKCEHGYASSFPSMPSPRLQHSKPPRRLSRAQKHSSGSSNTSTANRSTHNELEKNRRAHLRLCLERLKVLIPLGPDCTRHTTLGLLNKAKAHIKKLEEAERKSQHQLENLEREQRFLKWRLEQLQGPQEMERIRMDSIGSTISSDRSDSEREEIEVDVESTEFSHGEVDNISTTSISDIDDHSSLPSIGSDEGYSSASVKLSFTS

SEQ ID NO: 49539 - protein, 182 aa, Homo sapiens
  Payload ID: 9922
  Gene Symbol: MXI1
  Gene Name: MAX interactor 1, dimerization protein
  Uniprot ID: P50539
  ENSP ID: ENSP00000354606
MPSPRLQHSKPPRRLSRAQKHSSGSSNTSTANRRAHLRLCLERLKVLIPLGPDCTRHTTLGLLNKAKAHIKKLEEAERKSQHQLENLEREQRFLKWRLEQLQGPQEMERIRMDSIGSTISSDRSDSEREEIEVDVESTEFSHGEVDNISTTSISDIDDHSSLPSIGSDEGYSSASVKLSFTS

SEQ ID NO: 49540 - protein, 192 aa, Homo sapiens
  Payload ID: 9922
  Gene Symbol: MXI1
  Gene Name: MAX interactor 1, dimerization protein
  Uniprot ID: P50539
  ENSP ID: ENSP00000358625
MPSPRLQHSKPPRRLSRAQKHSSGSSNTSTANRSTHNELEKNRRAHLRLCLERLKVLIPLGPDCTRHTTLGLLNKAKAHIKKLEEAERKSQHQLENLEREQRFLKWRLEQLQGPQEMERIRMDSIGSTISSDRSDSEREEIEVDVESTEFSHGEVDNISTTSISDIDDHSSLPSIGSDEGYSSASVKLSFTS

SEQ ID NO: 49541 - protein, 218 aa, Homo sapiens
  Payload ID: 9922
  Gene Symbol: MXI1
  Gene Name: MAX interactor 1, dimerization protein
  ENSP ID: ENSP00000376842
MERVKMINVQRLLEAAEFLERRERECEHGYASSFPSMPSPRLQHSKPPRRLSRAQKHSSGSSNTSTANRRAHLRLCLERLKVLIPLGPDCTRHTTLGLLNKAKAHIKKLEEAERKSQHQLENLEREQRFLKWRLEQLQGPQEMERIRMDSIGSTISSDRSDSEREEIEVDVESTEFSHGEVDNISTTSISDIDDHSSLPSIGSDEGYSSASVKLSFTS

SEQ ID NO: 49542 - protein, 226 aa, Homo sapiens
  Payload ID: 9922
  Gene Symbol: MXI1
  Gene Name: MAX interactor 1, dimerization protein
  ENSP ID: ENSP00000398981
MGKRGRPRKEARCEGAGLAPAAPPAVPPAVAAPQPPALPEDPAGAKPRCPFSDIFNTSENSMEKHINTFLQNVQILLEAASYLEQIEKENKKCEHGYASSFPSMPSPRLQHSKPPRRLSRAQKHSSGSSNTSTANRRAHLRLCLERLKVLIPLGPDCTRHTTLGLLNKAKAHIKKLEEAERKSQHQLENLEREQRFLKWRLEQLQGPQEMERIRMDSIGSTISSDR

SEQ ID NO: 49543 - protein, 118 aa, Homo sapiens
  Payload ID: 9922
  Gene Symbol: MXI1
  Gene Name: MAX interactor 1, dimerization protein
  ENSP ID: ENSP00000407711
MPSPRLQHSKPPRRLSRAQKHSSGSSNTSTANRSTHNELEKNRRAHLRLCLERLKVLIPLGPDCTRHTTLGLLNKAKAHIKKLEEAERKSQHQLENLEREQRFLKWRLEQLQGPQEME

SEQ ID NO: 49544 - protein, 582 aa, Homo sapiens
  Payload ID: 9923
  Gene Symbol: MNT
  Gene Name: MAX network transcriptional repressor
  Uniprot ID: Q99583
  ENSP ID: ENSP00000174618
MSIETLLEAARFLEWQAQQQQRAREEQERLRLEQEREQEQKKANSLARLAHTLPVEEPRMEAPPLPLSPPAPPPAPPPPLATPAPLTVIPIPVVTNSPQPLPPPPPLPAAAQPLPLAPRQPALVGAPGLSIKEPAPLPSRPQVPTPAPLLPDSKATIPPNGSPKPLQPLPTPVLTIAPHPGVQPQLAPQQPPPPTLGTLKLAPAEEVKSSEQKKRPGGIGTREVHNKLEKNRRAHLKECFETLKRNIPNVDDKKTSNLSVLRTALRYIQSLKRKEKEYEHEMERLAREKIATQQRLAELKHELSQWMDVLEIDRVLRQTGQPEDDQASTSTASEGEDNIDEDMEEDRAGLGPPKLSHRPQPELLKSTLPPPSTTPAPLPPHPHPHPHSVALPPAHLPVQQQQPQQKTPLPAPPPPPAAPAQTLVPAPAHLVATAGGGSTVIAHTATTHASVIQTVNHVLQGPGGKHIAHIAPSAPSPAVQLAPATPPIGHITVHPATLNHVAHLGSQLPLYPQPVAVSHIAHTLSHQQVNGTAGLGPPATVMAKPAVGAQVVHHPQLVGQTVLNPVTMVTMPSFPVSTLKLA

SEQ ID NO: 49545 - protein, 33 aa, Homo sapiens
  Payload ID: 9923
  Gene Symbol: MNT
  Gene Name: MAX network transcriptional repressor
  ENSP ID: ENSP00000476269
MSIETLLEAARFLEWQAQQQQRARVPEEEGEGI

SEQ ID NO: 49546 - protein, 410 aa, Homo sapiens
  Payload ID: 9924
  Gene Symbol: MBTD1
  Gene Name: mbt domain containing 1
  Uniprot ID: Q05BQ5
  ENSP ID: ENSP00000365561
MGTCWGDISENVRVEVPNTDCSLPTKVFWIAGIVKLAGYNALLRYEGFENDSGLDFWCNICGSDIHPVGWCAASGKPLVPPRTIQHKYTNWKAFLVKRLTGAKTLPPDFSQKVSESMQYPFKPCMRVEVVDKRHLCRTRVAVVESVIGGRLRLVYEESEDRTDDFWCHMHSPLIHHIGWSRSIGHRFKRSDITKKQDGHFDTPPHLFAKVKEVDQSGEWFKEGMKLEAIDPLNLSTICVATIRKVLADGFLMIGIDGSEAADGSDWFCYHATSPSIFPVGFCEINMIELTPPRGYTKLPFKWFDYLRETGSIAAPVKLFNKDVPNHGFRVGMKLEAVDLMEPRLICVATVTRIIHRLLRIHFDGWEEEYDQWVDCESPDLYPVGWCQLTGYQLQPPASQCKLVYRKGVLL

SEQ ID NO: 49547 - protein, 169 aa, Homo sapiens
  Payload ID: 9924
  Gene Symbol: MBTD1
  Gene Name: mbt domain containing 1
  Uniprot ID: Q05BQ5
  ENSP ID: ENSP00000386072
MFDGYDSCSEDTSSSSSSEESEEEVAPLPSNLPIIKNNGQVYTYPDGKSGMATCEMCGMVGVRDAFYSKTKRFCSVSCSRSYSSNSKKASILARLQGKPPTKKAKVLQKQPLVAKLAAYAQYQATLQNQAKTKAAVSMEGFSWGNYINSNSFIAAPVTCFKHGRRVAPR

SEQ ID NO: 49548 - protein, 628 aa, Homo sapiens
  Payload ID: 9924
  Gene Symbol: MBTD1
  Gene Name: mbt domain containing 1
  Uniprot ID: Q05BQ5
  ENSP ID: ENSP00000403946
MFDGYDSCSEDTSSSSSSEESEEEVAPLPSNLPIIKNNGQVYTYPDGKSGMATCEMCGMVGVRDAFYSKTKRFCSVSCSRSYSSNSKKASILARLQGKPPTKKAKVLQKQPLVAKLAAYAQYQATLQNQAKTKAAVSMEGFSWGNYINSNSFIAAPVTCFKHAPMGTCWGDISENVRVEVPNTDCSLPTKVFWIAGIVKLAGYNALLRYEGFENDSGLDFWCNICGSDIHPVGWCAASGKPLVPPRTIQHKYTNWKAFLVKRLTGAKTLPPDFSQKVSESMQYPFKPCMRVEVVDKRHLCRTRVAVVESVIGGRLRLVYEESEDRTDDFWCHMHSPLIHHIGWSRSIGHRFKRSDITKKQDGHFDTPPHLFAKVKEVDQSGEWFKEGMKLEAIDPLNLSTICVATIRKVLADGFLMIGIDGSEAADGSDWFCYHATSPSIFPVGFCEINMIELTPPRGYTKLPFKWFDYLRETGSIAAPVKLFNKDVPNHGFRVGMKLEAVDLMEPRLICVATVTRIIHRLLRIHFDGWEEEYDQWVDCESPDLYPVGWCQLTGYQLQPPASQSSRENQSASSKQKKKAKSQQYKGHKKMTTLQLKEELLDGEDYNFLQGASDQESNGSANFYIKQEP

SEQ ID NO: 49549 - protein, 89 aa, Homo sapiens
  Payload ID: 9924
  Gene Symbol: MBTD1
  Gene Name: mbt domain containing 1
  ENSP ID: ENSP00000467622
DVPNHGFRVGMKLEAVDLMEPRLICVATVTRIIHRLLRIHFDGWEEEYDQWVDCESPDLYPVGWCQLTGYQLQPPASQCKLVYRKGVLL

SEQ ID NO: 49550 - protein, 628 aa, Homo sapiens; identical to SEQ ID NO: 49548
  Payload ID: 9924
  Gene Symbol: MBTD1
  Gene Name: mbt domain containing 1
  Uniprot ID: Q05BQ5
  ENSP ID: ENSP00000468304

SEQ ID NO: 49551 - protein, 941 aa, Homo sapiens
  Payload ID: 9925
  Gene Symbol: MCF2
  Gene Name: MCF.2 cell line derived transforming sequence
  Uniprot ID: P10911
  ENSP ID: ENSP00000342204
MAEANPRRGKMRFRRNAASFPGNLHLVLVLRPTSFLQRTFTDIGFWFSQEDFMLKLPVVMLSSVSDLLTYIDDKQLTPELGGTLQYCHSEWIIFRNAIENFALTVKEMAQMLQSFGTELAETELPDDIPSIEEILAIRAERYHLLKNDITAVTKEGKILLTNLEVPDTEGAVSSRLECHRQISGDWQTINKLLTQVHDMETAFDGFWEKHQLKMEQYLQLWKFEQDFQQLVTEVEFLLNQQAELADVTGTIAQVKQKIKKLENLDENSQELLSKAQFVILHGHKLAANHHYALDLICQRCNELRYLSDILVNEIKAKRIQLSRTFKMHKLLQQARQCCDEGECLLANQEIDKFQSKEDAQKALQDIENFLEMALPFINYEPETLQYEFDVILSPELKVQMKTIQLKLENIRSIFENQQAGFRNLADKHVRPIQFVVPTPENLVTSGTPFFSSKQVGVGYSFFQACKLFSKGKKTWRQNQSNLKIEVVPDCQEKRSSGPSSSLDNGNSLDVLKNHVLNELIQTERVYVRELYTVLLGYRAEMDNPEMFDLMPPLLRNKKDILFGNMAEIYEFHNDIFLSSLENCAHAPERVGPCFLERKDDFQMYAKYCQNKPRSETIWRKYSECAFFQECQRKLKHRLRLDSYLLKPVQRITKYQLLLKELLKYSKDCEGSALLKKALDAMLDLLKSVNDSMHQIAINGYIGNLNELGKMIMQGGFSVWIGHKKGATKMKDLARFKPMQRHLFLYEKAIVFCKRRVESGEGSDRYPSYSFKHCWKMDEVGITEYVKGDNRKFEIWYGEKEEVYIVQASNVDVKMTWLKEIRNILLKQQELLTVKKRKQQDQLTERDKFQISLQQNDEKQQGAFISTEETELEHTSTVVEVCEAIASVQAEANTVWTEASQSAEISEEPAEWSSNYFYPTYDENEEENRPLMRPVSEMALLY

SEQ ID NO: 49552 - protein, 860 aa, Homo sapiens
  Payload ID: 9925
  Gene Symbol: MCF2
  Gene Name: MCF.2 cell line derived transforming sequence
  Uniprot ID: P10911
  ENSP ID: ENSP00000359605
MAEANPRRGKMRFRRNAASFPGNLHLVLVLRPTSFLQRTFTDIGFWFSQEDFMLKLPVVMLSSVSDLLTYIDDKQLTPELGGTLQYCHSEWIIFRNAIENFALTVKEMAQMLQSFGTELAETELPDDIPSIEEILAIRAERYHLLKNDITAVTKEGKILLTNLEVPDTEGAVSSRLECHRQISGDWQTINKLLTQVHDMETAFDGFWEKHQLKMEQYLQLWKFEQDFQQLVTEVEFLLNQQAELADVTGTIAQVKQKIKKLENLDENSQELLSKAQFVILHGHKLAANHHYALDLICQRCNELRYLSDILVNEIKAKRIQLSRTFKMHKLLQQARQCCDEGECLLANQEIDKFQSKEDAQKALQDIENFLEMALPFINYEPETLQYEFDVILSPELKVQMKTIQLKLENIRSIFENQQAGFRNLADKHVRPIQFVVPTPENLVTSGTPFFSSKQGKKTWRQNQSNLKIEVVPDCQEKRSSGPSSSLDNGNSLDVLKNHVLNELIQTERVYVRELYTVLLGYRAEMDNPEMFDLMPPLLRNKKDILFGNMAEIYEFHNDIFLSSLENCAHAPERVGPCFLERKDDFQMYAKYCQNKPRSETIWRKYSECAFFQECQRKLKHRLRLDSYLLKPVQRITKYQLLLKELLKYSKDCEGSALLKKALDAMLDLLKSVNDSMHQIAINGYIGNLNELGKMIMQGGFSVWIGHKKGATKMKDLARFKPMQRHLFLYEKAIVFCKRRVESGEGSDRYPSYSFKHCWKMDEVGITEYVKGDNRKFEIWYGEKEEVYIVQASNVDVKMTWLKEIRNILLKQQELLTVKKRKQQDQLTERDKFQISLQQNDEDLCRRWLSYIDEATMSNGK

SEQ ID NO: 49553 - protein, 925 aa, Homo sapiens
  Payload ID: 9925
  Gene Symbol: MCF2
  Gene Name: MCF.2 cell line derived transforming sequence
  Uniprot ID: P10911
  ENSP ID: ENSP00000359608
MAEANPRRGKMRFRRNAASFPGNLHLVLVLRPTSFLQRTFTDIGFWFSQEDFMLKLPVVMLSSVSDLLTYIDDKQLTPELGGTLQYCHSEWIIFRNAIENFALTVKEMAQMLQSFGTELAETELPDDIPSIEEILAIRAERYHLLKNDITAVTKEGKILLTNLEVPDTEGAVSSRLECHRQISGDWQTINKLLTQVHDMETAFDGFWEKHQLKMEQYLQLWKFEQDFQQLVTEVEFLLNQQAELADVTGTIAQVKQKIKKLENLDENSQELLSKAQFVILHGHKLAANHHYALDLICQRCNELRYLSDILVNEIKAKRIQLSRTFKMHKLLQQARQCCDEGECLLANQEIDKFQSKEDAQKALQDIENFLEMALPFINYEPETLQYEFDVILSPELKVQMKTIQLKLENIRSIFENQQAGFRNLADKHVRPIQFVVPTPENLVTSGTPFFSSKQGKKTWRQNQSNLKIEVVPDCQEKRSSGPSSSLDNGNSLDVLKNHVLNELIQTERVYVRELYTVLLGYRAEMDNPEMFDLMPPLLRNKKDILFGNMAEIYEFHNDIFLSSLENCAHAPERVGPCFLERKDDFQMYAKYCQNKPRSETIWRKYSECAFFQECQRKLKHRLRLDSYLLKPVQRITKYQLLLKELLKYSKDCEGSALLKKALDAMLDLLKSVNDSMHQIAINGYIGNLNELGKMIMQGGFSVWIGHKKGATKMKDLARFKPMQRHLFLYEKAIVFCKRRVESGEGSDRYPSYSFKHCWKMDEVGITEYVKGDNRKFEIWYGEKEEVYIVQASNVDVKMTWLKEIRNILLKQQELLTVKKRKQQDQLTERDKFQISLQQNDEKQQGAFISTEETELEHTSTVVEVCEAIASVQAEANTVWTEASQSAEISEEPAEWSSNYFYPTYDENEEENRPLMRPVSEMALLY

SEQ ID NO: 49554 - protein, 985 aa, Homo sapiens
  Payload ID: 9925
  Gene Symbol: MCF2
  Gene Name: MCF.2 cell line derived transforming sequence
  Uniprot ID: P10911
  ENSP ID: ENSP00000397055
MQDIAFLSGGRGKDNAWIITFPENCNFRCIPEEVIAKVLTYLTSIARQNGSDSRFTIILDRRLDTWSSLKISLQKISASFPGNLHLVLVLRPTSFLQRTFTDIGFWFSQEDFMLKLPVVMLSSVSDLLTYIDDKQLTPELGGTLQYCHSEWIIFRNAIENFALTVKEMAQMLQSFGTELAETELPDDIPSIEEILAIRAERYHLLKNDITAVTKEGKILLTNLEVPDTEGAVSSRLECHRQISGDWQTINKLLTQVHDMETAFDGFWEKHQLKMEQYLQLWKFEQDFQQLVTEVEFLLNQQAELADVTGTIAQVKQKIKKLENLDENSQELLSKAQFVILHGHKLAANHHYALDLICQRCNELRYLSDILVNEIKAKRIQLSRTFKMHKLLQQARQCCDEGECLLANQEIDKFQSKEDAQKALQDIENFLEMALPFINYEPETLQYEFDVILSPELKVQMKTIQLKLENIRSIFENQQAGFRNLADKHVRPIQFVVPTPENLVTSGTPFFSSKQGKKTWRQNQSNLKIEVVPDCQEKRSSGPSSSLDNGNSLDVLKNHVLNELIQTERVYVRELYTVLLGYRAEMDNPEMFDLMPPLLRNKKDILFGNMAEIYEFHNDIFLSSLENCAHAPERVGPCFLERKDDFQMYAKYCQNKPRSETIWRKYSECAFFQECQRKLKHRLRLDSYLLKPVQRITKYQLLLKELLKYSKDCEGSALLKKALDAMLDLLKSVNDSMHQIAINGYIGNLNELGKMIMQGGFSVWIGHKKGATKMKDLARFKPMQRHLFLYEKAIVFCKRRVESGEGSDRYPSYSFKHCWKMDEVGITEYVKGDNRKFEIWYGEKEEVYIVQASNVDVKMTWLKEIRNILLKQQELLTVKKRKQQDQLTERDKFQISLQQNDEKQQGAFISTEETELEHTSTVVEVCEAIASVQAEANTVWTEASQSAEISEEPAEWSSNYFYPTYDENEEENRPLMRPVSEMALLY

SEQ ID NO: 49555 - protein, 429 aa, Homo sapiens
  Payload ID: 9925
  Gene Symbol: MCF2
  Gene Name: MCF.2 cell line derived transforming sequence
  ENSP ID: ENSP00000403271
  MOD_RES (1)..(1): Any amino acid
XHVLNELIQTERVYVRELYTVLLGYRAEMDNPEMFDLMPPLLRNKKDILFGNMAEIYEFHNDIFLSSLENCAHAPERVGPCFLERKDDFQMYAKYCQNKPRSETIWRKYSECAFFQECQRKLKHRLRLDSYLLKPVQRITKYQLLLKELLKYSKDCEGSALLKKALDAMLDLLKSVNDSMHQIAINGYIGNLNELGKMIMQGGFSVWIGHKKGATKMKDLARFKPMQRHLFLYEKAIVFCKRRVESGEGSDRYPSYSFKHCWKMDEVGITEYVKGDNRKFEIWYGEKEEVYIVQASNVDVKMTWLKEIRNILLKQQELLTVKKRKQQDQLTERDKFQISLQQNDEKQQGAFISTEETELEHTSTVVEVCEAIASVQAEANTVWTEASQSAEISEEPAEWSSNYFYPTYDENEEENRPLMRPVSEMALLY

SEQ ID NO: 49556 - protein, 528 aa, Homo sapiens
  Payload ID: 9925
  Gene Symbol: MCF2
  Gene Name: MCF.2 cell line derived transforming sequence
  ENSP ID: ENSP00000405848
VQMKTIQLKLENIRSIFENQQAGFRNLADKHVRPIQFVVPTPENLVTSGTPFFSSKQGKKTWRQNQSNLKIEVVPDCQEKRSSGPSSSLDNGNSLDVLKNHVLNELIQTERVYVRELYTVLLGYRAEMDNPEMFDLMPPLLRNKKDILFGNMAEIYEFHNDIFLSSLENCAHAPERVGPCFLERKDDFQMYAKYCQNKPRSETIWRKYSECAFFQECQRKLKHRLRLDSYLLKPVQRITKYQLLLKELLKYSKDCEGSALLKKALDAMLDLLKSVNDSMHQIAINGYIGNLNELGKMIMQGGFSVWIGHKKGATKMKDLARFKPMQRHLFLYEKAIVFCKRRVESGEGSDRYPSYSFKHCWKMDEVGITEYVKGDNRKFEIWYGEKEEVYIVQASNVDVKMTWLKEIRNILLKQQELLTVKKRKQQDQLTERDKFQISLQQNDEKQQGAFISTEETELEHTSTVVEVCEAIASVQAEANTVWTEASQSAEISEEPAEWSSNYFYPTYDENEEENRPLMRPVSEMALLY

SEQ ID NO: 49557 - protein, 985 aa, Homo sapiens; identical to SEQ ID NO: 49554
  Payload ID: 9925
  Gene Symbol: MCF2
  Gene Name: MCF.2 cell line derived transforming sequence
  Uniprot ID: P10911
  ENSP ID: ENSP00000427745

SEQ ID NO: 49558 - protein, 1001 aa, Homo sapiens
  Payload ID: 9925
  Gene Symbol: MCF2
  Gene Name: MCF.2 cell line derived transforming sequence
  Uniprot ID: P10911
  ENSP ID: ENSP00000430276
MQDIAFLSGGRGKDNAWIITFPENCNFRCIPEEVIAKVLTYLTSIARQNGSDSRFTIILDRRLDTWSSLKISLQKISASFPGNLHLVLVLRPTSFLQRTFTDIGFWFSQEDFMLKLPVVMLSSVSDLLTYIDDKQLTPELGGTLQYCHSEWIIFRNAIENFALTVKEMAQMLQSFGTELAETELPDDIPSIEEILAIRAERYHLLKNDITAVTKEGKILLTNLEVPDTEGAVSSRLECHRQISGDWQTINKLLTQVHDMETAFDGFWEKHQLKMEQYLQLWKFEQDFQQLVTEVEFLLNQQAELADVTGTIAQVKQKIKKLENLDENSQELLSKAQFVILHGHKLAANHHYALDLICQRCNELRYLSDILVNEIKAKRIQLSRTFKMHKLLQQARQCCDEGECLLANQEIDKFQSKEDAQKALQDIENFLEMALPFINYEPETLQYEFDVILSPELKVQMKTIQLKLENIRSIFENQQAGFRNLADKHVRPIQFVVPTPENLVTSGTPFFSSKQVGVGYSFFQACKLFSKGKKTWRQNQSNLKIEVVPDCQEKRSSGPSSSLDNGNSLDVLKNHVLNELIQTERVYVRELYTVLLGYRAEMDNPEMFDLMPPLLRNKKDILFGNMAEIYEFHNDIFLSSLENCAHAPERVGPCFLERKDDFQMYAKYCQNKPRSETIWRKYSECAFFQECQRKLKHRLRLDSYLLKPVQRITKYQLLLKELLKYSKDCEGSALLKKALDAMLDLLKSVNDSMHQIAINGYIGNLNELGKMIMQGGFSVWIGHKKGATKMKDLARFKPMQRHLFLYEKAIVFCKRRVESGEGSDRYPSYSFKHCWKMDEVGITEYVKGDNRKFEIWYGEKEEVYIVQASNVDVKMTWLKEIRNILLKQQELLTVKKRKQQDQLTERDKFQISLQQNDEKQQGAFISTEETELEHTSTVVEVCEAIASVQAEANTVWTEASQSAEISEEPAEWSSNYFYPTYDENEEENRPLMRPVSEMALLY

SEQ ID NO: 49559 - protein, 821 aa, Homo sapiens
  Payload ID: 9925
  Gene Symbol: MCF2
  Gene Name: MCF.2 cell line derived transforming sequence
  Uniprot ID: P10911
  ENSP ID: ENSP00000438155
MAEANPRRGKMRFRRNAASFPGNLHLVLVLRPTSFLQRTFTDIGFWFSQEDFMLKLPAIENFALTVKEMAQMLQSFGTELAETELPDDIPSIEEILAIRAERYHLLKNDITAVTKEGKILLTNLEVPDTEGAVSSRLECHRQISGDWQTINKLLTQVHDMETAFDGFWEKHQLKMEQYLQLWKFEQDFQQLVTEVEFLLNQQAELADVTGTIAQVKQKIKKLENLDENSQELLSKAQFVILHGHKLAANHHYALDLICQRCNELRYLSDILVNEIKAKRIQLSRTFKMHKLLQQARQCCDEGECLLANQEIDKFQSKEDAQKALQDIENFLEMALPFINYEPETLQYEFDVILSPELKVQMKTIQLKLENIRSIFENQQAGFRNLADKHVRPIQFVVPTPENLVTSGTPFFSSKQGKKTWRQNQSNLKIEVVPDCQEKRSSGPSSSLDNGNSLDVLKNHVLNELIQTERVYVRELYTVLLGYRAEMDNPEMFDLMPPLLRNKKDILFGNMAEIYEFHNDIFLSSLENCAHAPERVGPCFLERKDDFQMYAKYCQNKPRSETIWRKYSECAFFQECQRKLKHRLRLDSYLLKPVQRITKYQLLLKELLKYSKDCEGSALLKKALDAMLDLLKSVNDSMHQIAINGYIGNLNELGKMIMQGGFSVWIGHKKGATKMKDLARFKPMQRHLFLYEKAIVFCKRRVESGEGSDRYPSYSFKHCWKMDEVGITEYVKGDNRKFEIWYGEKEEVYIVQASNVDVKMTWLKEIRNILLKQQELLTVKKRKQQDQLTERDKFQISLQQNDEDLCRRWLSYIDEATMSNGK

SEQ ID NO: 49560 - protein, 296 aa, Homo sapiens
  Payload ID: 9926
  Gene Symbol: MCF2L
  Gene Name: MCF.2 cell line derived transforming sequence-like
  ENSP ID: ENSP00000261963
  MOD_RES (1)..(1): Any amino acid
XHLFLHEKAVLFCKKREENGEGYEKAPSYSYKQSLNMAAVGITENVKGDAKKFEIWYNAREEVYIVQAPTPEIKAAWVNEIRKVLTSQLQACREASQHRALEQSQSLPLPAPTSTSPSRGNSRNIKKLEERKTDPLSLEGYVSSAPLTKPPEKGKGWSKTSHSLEAPEDDGGWSSAEEQINSSDAEEDGGLGPKKLVPGKYTVVADHEKGGPDALRVRSGDVVELVQEGDEGLWYVRDPTTGKEGWVPASSLSVRLGPSGSAQCLSSSESSPGSAVLSNSSSCSEGGQAPFSDLQG

SEQ ID NO: 49561 - protein, 984 aa, Homo sapiens
  Payload ID: 9926
  Gene Symbol: MCF2L
  Gene Name: MCF.2 cell line derived transforming sequence-like
  Uniprot ID: O15068
  ENSP ID: ENSP00000364747
MTVRRLSLLCRDLWALWLLLKAGADEIMHQDIVPLCAADIQDQLKKRFAYLSGGRGQDGSPVITFPDYPAFSEIPDKEFQNVMTYLTSIPSLQDAGIGFILVIDRRRDKWTSVKASVLRIAASFPANLQLVLVLRPTGFFQRTLSDIAFKFNRDDFKMKVPVIMLSSVPDLHGYIDKSQLTEDLGGTLDYCHSRWLCQRTAIESFALMVKQTAQMLQSFGTELAETELPNDVQSTSSVLCAHTEKKDKAKEDLRLALKEGHSVLESLRELQAEGSEPSVNQDQLDNQATVQRLLAQLNETEAAFDEFWAKHQQKLEQCLQLRHFEQGFREVKAILDAASQKIATFTDIGNSLAHVEHLLRDLASFEEKSGVAVERARALSLDGEQLIGNKHYAVDSIRPKCQELRHLCDQFSAEIARRRGLLSKSLELHRRLETSMKWCDEGIYLLASQPVDKCQSQDGAEAALQEIEKFLETGAENKIQELNAIYKEYESILNQDLMEHVRKVFQKQASMEEVFHRRQASLKKLAARQTRPVQPVAPRPEALAKSPCPSPGIRRGSENSSSEGGALRRGPYRRAKSEMSESRQGRGSAGEEEESLAILRRHVMSELLDTERAYVEELLCVLEGYAAEMDNPLMAHLLSTGLHNKKDVLFGNMEEIYHFHNRIFLRELENYTDCPELVGRCFLERMEDFQIYEKYCQNKPRSESLWRQCSDCPFFQECQRKLDHKLSLDSYLLKPVQRITKYQLLLKEMLKYSRNCEGAEDLQEALSSILGILKAVNDSMHLIAITGYDGNLGDLGKLLMQGSFSVWTDHKRGHTKVKELARFKPMQRHLFLHEKAVLFCKKREENGEGYEKAPSYSYKQSLNMAAVGITENVKGDAKKFEIWYNAREEVYIVQAPTPEIKAAWVNEIRKVLTSQLQACREASQHRALEQSQSLPLPAPTSTSPSRGNSRNIKKLEERKTDPLSLEGYVSSAPLTKPPEKGKEP

SEQ ID NO: 49562 - protein, 1123 aa, Homo sapiens
  Payload ID: 9926
  Gene Symbol: MCF2L
  Gene Name: MCF.2 cell line derived transforming sequence-like
  Uniprot ID: O15068
  ENSP ID: ENSP00000364754
MTVRRLSLLCRDLWALWLLLKAGADEIMHQDIVPLCAADIQDQLKKRFAYLSGGRGQDGSPVITFPDYPAFSEIPDKEFQNVMTYLTSIPSLQDAGIGFILVIDRRRDKWTSVKASVLRIAASFPANLQLVLVLRPTGFFQRTLSDIAFKFNRDDFKMKVPVIMLSSVPDLHGYIDKSQLTEDLGGTLDYCHSRWLCQRTAIESFALMVKQTAQMLQSFGTELAETELPNDVQSTSSVLCAHTEKKDKAKEDLRLALKEGHSVLESLRELQAEGSEPSVNQDQLDNQATVQRLLAQLNETEAAFDEFWAKHQQKLEQCLQLRHFEQGFREVKAILDAASQKIATFTDIGNSLAHVEHLLRDLASFEEKSGVAVERARALSLDGEQLIGNKHYAVDSIRPKCQELRHLCDQFSAEIARRRGLLSKSLELHRRLETSMKWCDEGIYLLASQPVDKCQSQDGAEAALQEIEKFLETGAENKIQELNAIYKEYESILNQDLMEHVRKVFQKQASMEEVFHRRQASLKKLAARQTRPVQPVAPRPEALAKSPCPSPGIRRGSENSSSEGGALRRGPYRRAKSEMSESRQGRGSAGEEEESLAILRRHVMSELLDTERAYVEELLCVLEGYAAEMDNPLMAHLLSTGLHNKKDVLFGNMEEIYHFHNRIFLRELENYTDCPELVGRCFLERMEDFQIYEKYCQNKPRSESLWRQCSDCPFFQECQRKLDHKLSLDSYLLKPVQRITKYQLLLKEMLKYSRNCEGAEDLQEALSSILGILKAVNDSMHLIAITGYDGNLGDLGKLLMQGSFSVWTDHKRGHTKVKELARFKPMQRHLFLHEKAVLFCKKREENGEGYEKAPSYSYKQSLNMAAVGITENVKGDAKKFEIWYNAREEVYIVQAPTPEIKAAWVNEIRKVLTSQLQACREASQHRALEQSQSLPLPAPTSTSPSRGNSRNIKKLEERKTDPLSLEGYVSSAPLTKPPEKGKGWSKTSHSLEAPEDDGGWSSAEEQINSSDAEEDGGLGPKKLVPGKYTVVADHEKGGPDALRVRSGDVVELVQEGDEGLWYVRDPTTGKEGWVPASSLSVRLGPSGSAQCLSSSESSPGSAVLSNSSSCSEGGQAPFSDLQG

SEQ ID NO: 49563 - protein, 1137 aa, Homo sapiens
  Payload ID: 9926
  Gene Symbol: MCF2L
  Gene Name: MCF.2 cell line derived transforming sequence-like
  Uniprot ID: O15068
  ENSP ID: ENSP00000364758
MFDCWRFILCKRPGSNSYSSPQRPNEAKKEETDHQIDVSDVIRLVQDTPEATAMATDEIMHQDIVPLCAADIQDQLKKRFAYLSGGRGQDGSPVITFPDYPAFSEIPDKEFQNVMTYLTSIPSLQDAGIGFILVIDRRRDKWTSVKASVLRIAASFPANLQLVLVLRPTGFFQRTLSDIAFKFNRDDFKMKVPVIMLSSVPDLHGYIDKSQLTEDLGGTLDYCHSRWLCQRTAIESFALMVKQTAQMLQSFGTELAETELPNDVQSTSSVLCAHTEKKDKAKEDLRLALKEGHSVLESLRELQAEGSEPSVNQDQLDNQATVQRLLAQLNETEAAFDEFWAKHQQKLEQCLQLRHFEQGFREVKAILDAASQKIATFTDIGNSLAHVEHLLRDLASFEEKSGVAVERARALSLDGEQLIGNKHYAVDSIRPKCQELRHLCDQFSAEIARRRGLLSKSLELHRRLETSMKWCDEGIYLLASQPVDKCQSQDGAEAALQEIEKFLETGAENKIQELNAIYKEYESILNQDLMEHVRKVFQKQASMEEVFHRRQASLKKLAARQTRPVQPVAPRPEALAKSPCPSPGIRRGSENSSSEGGALRRGPYRRAKSEMSESRQGRGSAGEEEESLAILRRHVMSELLDTERAYVEELLCVLEGYAAEMDNPLMAHLLSTGLHNKKDVLFGNMEEIYHFHNRIFLRELENYTDCPELVGRCFLERMEDFQIYEKYCQNKPRSESLWRQCSDCPFFQECQRKLDHKLSLDSYLLKPVQRITKYQLLLKEMLKYSRNCEGAEDLQEALSSILGILKAVNDSMHLIAITGYDGNLGDLGKLLMQGSFSVWTDHKRGHTKVKELARFKPMQRHLFLHEKAVLFCKKREENGEGYEKAPSYSYKQSLNMAAVGITENVKGDAKKFEIWYNAREEVYIVQAPTPEIKAAWVNEIRKVLTSQLQACREASQHRALEQSQSLPLPAPTSTSPSRGNSRNIKKLEERKTDPLSLEGYVSSAPLTKPPEKGKGWSKTSHSLEAPEDDGGWSSAEEQINSSDAEEDGGLGPKKLVPGKYTVVADHEKGGPDALRVRSGDVVELVQEGDEGLWYVRDPTTGKEGWVPASSLSVRLGPSGSAQCLSSSGKAHVPRAHP

SEQ ID NO: 49564 - protein, 793 aa, Homo sapiens
  Payload ID: 9926
  Gene Symbol: MCF2L
  Gene Name: MCF.2 cell line derived transforming sequence-like
  ENSP ID: ENSP00000380212
  MOD_RES (1)..(1): Any amino acid
XSQKIATFTDIGNSLAHVEHLLRDLASFEEKSGVAVERARALSLDGEQLIGNKHYAVDSIRPKCQELRHLCDQFSAEIARRRGLLSKSLELHRRLETSMKWCDEGIYLLASQPVDKCQSQDGAEAALQEIEKFLETGAENKIQELNAIYKEYESILNQDLMEHVRKVFQKQASMEEVFHRRQASLKKLAARQTRPVQPVAPRPEALAKSPCPSPGIRRGSENSSSEGGALRRGPYRRAKSEMSESRQGRGSAGEEEESLAILRRHVMSELLDTERAYVEELLCVLEGYAAEMDNPLMAHLLSTGLHNKKDVLFGNMEEIYHFHNRIFLRELENYTDCPELVGRCFLERMEDFQIYEKYCQNKPRSESLWRQCSDCPFFQECQRKLDHKLSLDSYLLKPVQRITKYQLLLKEMLKYSRNCEGAEDLQEALSSILGILKAVNDSMHLIAITGYDGNLGDLGKLLMQGSFSVWTDHKRGHTKVKELARFKPMQRHLFLHEKAVLFCKKREENGEGYEKAPSYSYKQSLNMAAVGITENVKGDAKKFEIWYNAREEVYIVQAPTPEIKAAWVNEIRKVLTSQLQACREASQHRALEQSQSLPLPAPTSTSPSRGNSRNIKKLEERKTDPLSLEGYVSSAPLTKPPEKGKASPTSPDKKAKRHEVKSDPTPFGVRGWSKTSHSLEAPEDDGGWSSAEEQINSSDAEEDGGLGPKKLVPGKYTVVADHEKGGPDALRVRSGDVVELVQEGDEGLWYVRDPTTGKEGWVPASSLSVRLGPSGSAQCLSSSGKAHVPRAHP

SEQ ID NO: 49565 - protein, 86 aa, Homo sapiens
  Payload ID: 9926
  Gene Symbol: MCF2L
  Gene Name: MCF.2 cell line derived transforming sequence-like
  ENSP ID: ENSP00000380216
MWLSQRVLPPLPFPADAWEPSEVLGIFSQHRSHATTSESLTWTSTGTSDARTGVILQDAGIGFILVIDRRRDKWTSVKASVLRIAN

SEQ ID NO: 49566 - protein, 136 aa, Homo sapiens
  Payload ID: 9926
  Gene Symbol: MCF2L
  Gene Name: MCF.2 cell line derived transforming sequence-like
  ENSP ID: ENSP00000380219
MTVRRLSLLCRDLWALWLLLKAGADEIMHQDIVPLCAADIQDQLKKRFAYLSGGRGQDGSPVITFPDYPAFSEIPDKEFQNVMTYLTSIPSGGQESSIRPVSCRLTWEGCRGGLSSDVLVPASRKMLRMSASHQTV

SEQ ID NO: 49567 - protein, 1096 aa, Homo sapiens
  Payload ID: 9926
  Gene Symbol: MCF2L
  Gene Name: MCF.2 cell line derived transforming sequence-like
  Uniprot ID: O15068
  ENSP ID: ENSP00000380225
MPLRGGAGPSPASHGPTHGPSDPRTCLPGRGAGGMRPHGRGALGCCGLCSFYTCHGAAGDEIMHQDIVPLCAADIQDQLKKRFAYLSGGRGQDGSPVITFPDYPAFSEIPDKEFQNVMTYLTSIPSLQDAGIGFILVIDRRRDKWTSVKASVLRIAASFPANLQLVLVLRPTGFFQRTLSDIAFKFNRDDFKMKVPVIMLSSVPDLHGYIDKSQLTEDLGGTLDYCHSRWLCQRTAIESFALMVKQTAQMLQSFGTELAETELPNDVQSTSSVLCAHTEKKDKAKEDLRLALKEGHSVLESLRELQAEGSEPSVNQDQLDNQATVQRLLAQLNETEAAFDEFWAKHQQKLEQCLQLRHFEQGFREVKAILDAASQKIATFTDIGNSLAHVEHLLRDLASFEEKSGVAVERARALSLDGEQLIGNKHYAVDSIRPKCQELRHLCDQFSAEIARRRGLLSKSLELHRRLETSMKWCDEGIYLLASQPVDKCQSQDGAEAALQEIEKFLETGAENKIQELNAIYKEYESILNQDLMEHVRKVFQKQASMEEVFHRRQASLKKLAARQTRPVQPVAPRPEALAKSPCPSPGIRRGSENSSSEGGALRRGPYRRAKSEMSESRQGRGSAGEEEESLAILRRHVMSELLDTERAYVEELLCVLEGYAAEMDNPLMAHLLSTGLHNKKDVLFGNMEEIYHFHNRIFLRELENYTDCPELVGRCFLERMEDFQIYEKYCQNKPRSESLWRQCSDCPFFQECQRKLDHKLSLDSYLLKPVQRITKYQLLLKEMLKYSRNCEGAEDLQEALSSILGILKAVNDSMHLIAITGYDGNLGDLGKLLMQGSFSVWTDHKRGHTKVKELARFKPMQRHLFLHEKAVLFCKKREENGEGYEKAPSYSYKQSLNMAAVGITENVKGDAKKFEIWYNAREEVYIVQAPTPEIKAAWVNEIRKVLTSQLQACREASQHRALEQSQSLPLPAPTSTSPSRGNSRNIKKLEERKTDPLSLEGYVSSAPLTKPPEKGKGWSKTSHSLEAPEDDGGWSSAEEQINSSDAEEDGGLGPKKLVPGKYTVVADHEKGGPDALRVRSGDVVELVQEGDEGLW

SEQ ID NO: 49568 - protein, 64 aa, Homo sapiens
  Payload ID: 9926
  Gene Symbol: MCF2L
  Gene Name: MCF.2 cell line derived transforming sequence-like
  ENSP ID: ENSP00000380230
MFDCWRFILCKRPGSNSYSSPQRPNEAKKEETDHQIDVSDVIRLVQDTPEATAMATEVSASRPQ

SEQ ID NO: 49569 - protein, 136 aa, Homo sapiens
  Payload ID: 9926
  Gene Symbol: MCF2L
  Gene Name: MCF.2 cell line derived transforming sequence-like
  ENSP ID: ENSP00000386551
MHQDIVPLCAADIQDQLKKRFAYLSGGRGQDGSPVITFPDYPAFSEIPDKEFQNVMTYLTSIPSLQDAGIGFILVIDRRRDKWTSVKASVLRIAASFPANLQLVLVLRPTGFFQRTLSDIAFKFNRDDFKMKVPVI

SEQ ID NO: 49570 - protein, 336 aa, Homo sapiens
  Payload ID: 9926
  Gene Symbol: MCF2L
  Gene Name: MCF.2 cell line derived transforming sequence-like
  ENSP ID: ENSP00000392953
  MOD_RES (1)..(1): Any amino acid
XENGEGYEKAPSYSYKQSLNMAAVGITENVKGDAKKFEIWYNAREEVYIVQAPTPEIKAAWVNEIRKVLTSQLQACREASQHRALEQSQSLPLPAPTSTSPSRGNSRNIKKLEERKTDPLSLEGYVSSAPLTKPPEKGKDDTVTSSASESSALSRKRFTLQGFANLKGQKASPTSPDKKAKRHEVKSDPTPFGVRGWSKTSHSLEAPEDDGGWSSAEEQINSSDAEEDGGLGPKKLVPGKYTVVADHEKGGPDALRVRSGDVVELVQEGDEGLWYVRDPTTGKEGWVPASSLSVRLGPSGSAQCLSSSESSPGSAVLSNSSSCSEGGQAPFSDLQG

SEQ ID NO: 49571 - protein, 97 aa, Homo sapiens
  Payload ID: 9926
  Gene Symbol: MCF2L
  Gene Name: MCF.2 cell line derived transforming sequence-like
  ENSP ID: ENSP00000395707
MGDGKAVRISVAEMKSYYLYSEWCSWLLSVAEDEIMHQDIVPLCAADIQDQLKKRFAYLSGGRGQDGSPVITFPDYPAFSEIPDKEFQNVMTYLTSI

SEQ ID NO: 49572 - protein, 87 aa, Homo sapiens
  Payload ID: 9926
  Gene Symbol: MCF2L
  Gene Name: MCF.2 cell line derived transforming sequence-like
  ENSP ID: ENSP00000395978
  MOD_RES (1)..(1): Any amino acid
XSAPLTKPPEKGKGWSKTSHSLEAPEDDGGWSSAEEQINSSDAEEDGGLGPKKLVPTQPPVEPTRGCTFLRGDSPHPPTLYVIECCH

SEQ ID NO: 49573 - protein, 1067 aa, Homo sapiens
  Payload ID: 9926
  Gene Symbol: MCF2L
  Gene Name: MCF.2 cell line derived transforming sequence-like
  Uniprot ID: O15068
  ENSP ID: ENSP00000397285
MAEKGASRGTLRRLWSLPRRRRGTAGRSRPDEIMHQDIVPLCAADIQDQLKKRFAYLSGGRGQDGSPVITFPDYPAFSEIPDKEFQNVMTYLTSIPSLQDAGIGFILVIDRRRDKWTSVKASVLRIAASFPANLQLVLVLRPTGFFQRTLSDIAFKFNRDDFKMKVPVIMLSSVPDLHGYIDKSQLTEDLGGTLDYCHSRWLCQRTAIESFALMVKQTAQMLQSFGTELAETELPNDVQSTSSVLCAHTEKKDKAKEDLRLALKEGHSVLESLRELQAEGSEPSVNQDQLDNQATVQRLLAQLNETEAAFDEFWAKHQQKLEQCLQLRHFEQGFREVKAILDAASQKIATFTDIGNSLAHVEHLLRDLASFEEKSGVAVERARALSLDGEQLIGNKHYAVDSIRPKCQELRHLCDQFSAEIARRRGLLSKSLELHRRLETSMKWCDEGIYLLASQPVDKCQSQDGAEAALQEIEKFLETGAENKIQELNAIYKEYESILNQDLMEHVRKVFQKQASMEEVFHRRQASLKKLAARQTRPVQPVAPRPEALAKSPCPSPGIRRGSENSSSEGGALRRGPYRRAKSEMSESRQGRGSAGEEEESLAILRRHVMSELLDTERAYVEELLCVLEGYAAEMDNPLMAHLLSTGLHNKKDVLFGNMEEIYHFHNRIFLRELENYTDCPELVGRCFLERMEDFQIYEKYCQNKPRSESLWRQCSDCPFFQECQRKLDHKLSLDSYLLKPVQRITKYQLLLKEMLKYSRNCEGAEDLQEALSSILGILKAVNDSMHLIAITGYDGNLGDLGKLLMQGSFSVWTDHKRGHTKVKELARFKPMQRHLFLHEKAVLFCKKREENGEGYEKAPSYSYKQSLNMAAVGITENVKGDAKKFEIWYNAREEVYIVQAPTPEIKAAWVNEIRKVLTSQLQACREASQHRALEQSQSLPLPAPTSTSPSRGNSRNIKKLEERKTDPLSLEGYVSSAPLTKPPEKGKGWSKTSHSLEAPEDDGGWSSAEEQINSSDAEEDGGLGPKKLVPGKYTVVADHEKGGPDALRVRSGDVVELVQEGDEGLW

SEQ ID NO: 49574 - protein, 66 aa, Homo sapiens
  Payload ID: 9926
  Gene Symbol: MCF2L
  Gene Name: MCF.2 cell line derived transforming sequence-like
  ENSP ID: ENSP00000398383
MFDCWRFILCKRPGSNSYSSPQRPNEAKKEETDHQIDVSDVIRLVQDTPEATAMATAPRRSQSPGL

SEQ ID NO: 49575 - protein, 189 aa, Homo sapiens
  Payload ID: 9926
  Gene Symbol: MCF2L
  Gene Name: MCF.2 cell line derived transforming sequence-like
  ENSP ID: ENSP00000404422
  MOD_RES (1)..(1): Any amino acid
XKKLEERKTDPLSLEGYVSSAPLTKPPEKGKASPTSPDKKAKRHEVKSDPTPFGVRGWSKTSHSLEAPEDDGGWSSAEEQINSSDAEEDGGLGPKKLVPGKYTVVADHEKGGPDALRVRSGDVVELVQEGDEGLWYVRDPTTGKEGWVPASSLSVRLGPSGSAQCLSSSESSPGSAVLSNSSSCSEGGQ

SEQ ID NO: 49576 - protein, 213 aa, Homo sapiens
  Payload ID: 9926
  Gene Symbol: MCF2L
  Gene Name: MCF.2 cell line derived transforming sequence-like
  ENSP ID: ENSP00000405996
TSTGTSDARTGVILQDAGIGFILVIDRRRDKWTSVKASVLRIAASFPANLQLVLVLRPTGFFQRTLSDIAFKFNRDDFKMKVPVIMLSSVPDLHGYIDKSQLTEDLGGTLDYCHSRWLCQRTAIESFALMVKQTAQMLQSFGTELAETELPNDVQSTSSVLCAHTEKKDKAKVHGGCSGWKLWGAPVSQKLRGAPVGSCGGSFVPAGVCVSST

SEQ ID NO: 49577 - protein, 317 aa, Homo sapiens
  Payload ID: 9926
  Gene Symbol: MCF2L
  Gene Name: MCF.2 cell line derived transforming sequence-like
  ENSP ID: ENSP00000407392
  MOD_RES (1)..(1): Any amino acid
XLGILKAVNDSMHLIAITGYDGNLGDLGKLLMQGSFSVWTDHKRGHTKVKELARFKPMQRHLFLHEKAVLFCKKREENGEGYEKAPSYSYKQSLNMAAVGITENVKGDAKKFEIWYNAREEVYIVQAPTPEIKAAWVNEIRKVLTSQLQACREASQHRALEQSQSLPLPAPTSTSPSRGNSRNIKKLEERKTDPLSLEGYVSSAPLTKPPEKGKDDTVTSSASESSALSRKRFTLQGFANLKASPTSPDKKAKRHEVKSDPTPFGVRGWSKTSHSLEAPEDDGGWSSAEEQINSSDAEEDGGLGPKKLVPGKYTVVA

SEQ ID NO: 49578 - protein, 151 aa, Homo sapiens
  Payload ID: 9926
  Gene Symbol: MCF2L
  Gene Name: MCF.2 cell line derived transforming sequence-like
  ENSP ID: ENSP00000411315
  MOD_RES (1)..(1): Any amino acid
XQAPTPEIKAAWVNEIRKVLTSQLQACREASQHRALEQSQSLPLPAPTSTSPSRGNSRNIKKLEERKTDPLSLEGYVSSAPLTKPPEKGKDDTVTSSASESSALSRKRFTLQGFANLKGQKGWSKTSHSLEAPEDDGGWSSAEEQINSSDA

SEQ ID NO: 49579 - protein, 1125 aa, Homo sapiens
  Payload ID: 9926
  Gene Symbol: MCF2L
  Gene Name: MCF.2 cell line derived transforming sequence-like
  Uniprot ID: O15068
  ENSP ID: ENSP00000440374
MRFWLRTEEMALEEMVQRLNAVSKHTDEIMHQDIVPLCAADIQDQLKKRFAYLSGGRGQDGSPVITFPDYPAFSEIPDKEFQNVMTYLTSIPSLQDAGIGFILVIDRRRDKWTSVKASVLRIAASFPANLQLVLVLRPTGFFQRTLSDIAFKFNRDDFKMKVPVIMLSSVPDLHGYIDKSQLTEDLGGTLDYCHSRWLCQRTAIESFALMVKQTAQMLQSFGTELAETELPNDVQSTSSVLCAHTEKKDKAKEDLRLALKEGHSVLESLRELQAEGSEPSVNQDQLDNQATVQRLLAQLNETEAAFDEFWAKHQQKLEQCLQLRHFEQGFREVKAILDAASQKIATFTDIGNSLAHVEHLLRDLASFEEKSGVAVERARALSLDGEQLIGNKHYAVDSIRPKCQELRHLCDQFSAEIARRRGLLSKSLELHRRLETSMKWCDEGIYLLASQPVDKCQSQDGAEAALQEIEKFLETGAENKIQELNAIYKEYESILNQDLMEHVRKVFQKQASMEEVFHRRQASLKKLAARQTRPVQPVAPRPEALAKSPCPSPGIRRGSENSSSEGGALRRGPYRRAKSEMSESRQGRGSAGEEEESLAILRRHVMSELLDTERAYVEELLCVLEGYAAEMDNPLMAHLLSTGLHNKKDVLFGNMEEIYHFHNRIFLRELENYTDCPELVGRCFLERMEDFQIYEKYCQNKPRSESLWRQCSDCPFFQECQRKLDHKLSLDSYLLKPVQRITKYQLLLKEMLKYSRNCEGAEDLQEALSSILGILKAVNDSMHLIAITGYDGNLGDLGKLLMQGSFSVWTDHKRGHTKVKELARFKPMQRHLFLHEKAVLFCKKREENGEGYEKAPSYSYKQSLNMAAVGITENVKGDAKKFEIWYNAREEVYIVQAPTPEIKAAWVNEIRKVLTSQLQACREASQHRALEQSQSLPLPAPTSTSPSRGNSRNIKKLEERKTDPLSLEGYVSSAPLTKPPEKGKGWSKTSHSLEAPEDDGGWSSAEEQINSSDAEEDGGLGPKKLVPGKYTVVADHEKGGPDALRVRSGDVVELVQEGDEGLWYVRDPTTGKEGWVPASSLSVRLGPSGSAQCLSSSESSPGSAVLSNSSSCSEGGQAPFSDLQG

SEQ ID NO: 49580 - protein, 93 aa, Homo sapiens
  Payload ID: 9926
  Gene Symbol: MCF2L
  Gene Name: MCF.2 cell line derived transforming sequence-like
  ENSP ID: ENSP00000471913
SPVITFPDYPAFSEIPDKEFQNVMTYLTSIPSILFMESAASEHWGQVAEALPFLPPGSARTAVTTSPRGPLPAPSQNVFPRSFSVTAVEFNSY

SEQ ID NO: 49581 - protein, 69 aa, Homo sapiens
  Payload ID: 9926
  Gene Symbol: MCF2L
  Gene Name: MCF.2 cell line derived transforming sequence-like
  ENSP ID: ENSP00000473071
  MOD_RES (1)..(1): Any amino acid
XSEIPDKEFQNVMTYLTSIPSLQDAGIGFILVIDRRRDKWTSVKASVLRIALRARCTESEPLHPGGSGI

SEQ ID NO: 49582 - protein, 1114 aa, Homo sapiens
  Payload ID: 9927
  Gene Symbol: MCF2L2
  Gene Name: MCF.2 cell line derived transforming sequence-like 2
  Uniprot ID: Q86YR7
  ENSP ID: ENSP00000328118
MLSCLKEEMPPQELTRRLATVITHVDEIMQQEVRPLMAVEIIEQLHRQFAILSGGRGEDGAPIITFPEFSGFKHIPDEDFLNVMTYLTSIPSVEAASIGFIVVIDRRRDKWSSVKASLTRIAVAFPGNLQLIFILRPSRFIQRTFTDIGIKYYRNEFKTKVPIIMVNSVSDLHGYIDKSQLTRELGGTLEYRHGQWVNHRTAIENFALTLKTTAQMLQTFGSCLATAELPRSMLSTEDLLMSHTRQRDKLQDELKLLGKQGTTLLSCIQEPATKCPNSKLNLNQLENVTTMERLLVQLDETEKAFSHFWSEHHLKLNQCLQLQHFEHDFCKAKLALDNLLEEQAEFTGIGDSVMHVEQILKEHKKLEEKSQEPLEKAQLLALVGDQLIQSHHYAADAIRPRCVELRHLCDDFINGNKKKWDILGKSLEFHRQLDKVSQWCEAGIYLLASQAVDKCQSREGVDIALNDIATFLGTVKEYPLLSPKEFYNEFELLLTLDAKAKAQKVLQRLDDVQEIFHKRQVSLMKLAAKQTRPVQPVAPHPESSPKWVSSKTSQPSTSVPLARPLRTSEEPYTETELNSRGKEDDETKFEVKSEEIFESHHERGNPELEQQARLGDLSPRRRIIRDLLETEEIYIKEIKSIIDGYITPMDFIWLKHLIPDVLQNNKDFLFGNIRELYEFHNRTFLKELEKCAENPELLAHCFLKRKEDLQIYFKYHKNLPRARAIWQECQDCAYFGVCQRQLDHNLPLFKYLKGPSQRLIKYQMLLKGLLDFESPEDMEIDPGELGGSAKDGPKRTKDSAFSTELQQALAVIEDLIKSCELAVDLAAVTECPDDIGKLGKLLLHGPFSVWTIHKDRYKMKDLIRFKPSQRQIYLFERGIVFCKIRMEPGDQGLSPHYSFKKTMKLMTLSIRQLGRGSHRKFEIASRNGLEKYILQAASKEIRDCWFSEISKLLMEQQNNIKDQGNPQFEMSTSKGSGAGSGPWIKNMERATTSKEDPASSTGGIKGCSSREFSSMDTFEDCEGAEDMEKESSALSLAGLFQSDDSHETCSSKSAFLERGESSQGEKEERDEEETATRSTEEERAGASTGRLAPAGATAGFQARALRPRTSAQES

SEQ ID NO: 49583 - protein, 711 aa, Homo sapiens
  Payload ID: 9927
  Gene Symbol: MCF2L2
  Gene Name: MCF.2 cell line derived transforming sequence-like 2
  Uniprot ID: Q86YR7
  ENSP ID: ENSP00000388190
MLSCLKEEMPPQELTRRLATVITHVDEIMQQEVRPLMAVEIIEQLHRQFAILSGGRGEDGAPIITFPEFSGFKHIPDEDFLNVMTYLTSIPSVEAASIGFIVVIDRRRDKWSSVKASLTRIAVAFPGNLQLIFILRPSRFIQRTFTDIGIKYYRNEFKTKVPIIMVNSVSDLHGYIDKSQLTRELGGTLEYRHGQWVNHRTAIENFALTLKTTAQMLQTFGSCLATAELPRSMLSTEDLLMSHTRQRDKLQDELKLLGKQGTTLLSCIQEPATKCPNSKLNLNQLENVTTMERLLVQLDETEKAFSHFWSEHHLKLNQCLQLQHFEHDFCKAKLALDNLLEEQAEFTGIGDSVMHVEQILKEHKKLEEKSQEPLEKAQLLALVGDQLIQSHHYAADAIRPRCVELRHLCDDFINGNKKKWDILGKSLEFHRQLDKVSQWCEAGIYLLASQAVDKCQSREGVDIALNDIATFLGTVKEYPLLSPKEFYNEFELLLTLDAKAKAQKVLQRLDDVQEIFHKRQVSLMKLAAKQTRPVQPVAPHPESSPKWVSSKTSQPSTSVPLARPLRTSEEPYTETELNSRGKEDDETKFEVKSEEIFESHHERGNPELEQQARLGDLSPRRRIIRDLLETEEIYIKEIKSIIDGYITPMDFIWLKHLIPDVLQNNKDFLFGNIRELYEFHNRTFLKELEKCAENPELLAHCFLKRVSLYSQ

SEQ ID NO: 49584 - protein, 628 aa, Homo sapiens
  Payload ID: 9927
  Gene Symbol: MCF2L2
  Gene Name: MCF.2 cell line derived transforming sequence-like 2
  Uniprot ID: Q86YR7
  ENSP ID: ENSP00000414131
MLSCLKEEMPPQELTRRLATVITHVDEIMQQEVRPLMAVEIIEQLHRQFAILSGGRGEDGAPIITFPEFSGFKHIPDEDFLNVMTYLTSIPSVEAASIGFIVVIDRRRDKWSSVKASLTRIAVAFPGNLQLIFILRPSRFIQRTFTDIGIKYYRNEFKTKVPIIMVNSVSDLHGYIDKSQLTRELGGTLEYRHGQWVNHRTAIENFALTLKTTAQMLQTFGSCLATAELPRSMLSTEDLLMSHTRQRDKLQDELKLLGKQGTTLLSCIQEPATKCPNSKLNLNQLENVTTMERLLVQLDETEKAFSHFWSEHHLKLNQCLQLQHFEHDFCKAKLALDNLLEEQAEFTGIGDSVMHVEQILKEHKKLEEKSQEPLEKAQLLALVGDQLIQSHHYAADAIRPRCVELRHLCDDFINGNKKKWDILGKSLEFHRQLDKVSQWCEAGIYLLASQAVDKCQSREGVDIALNDIATFLGTVKEYPLLSPKEFYNEFELLLTLDAKAKAQKVLQRLDDVQEIFHKRQVSLMKLAAKQTRPVQPVAPHPESSPKWVSSKTSQPSTSVPLARPLRTSEEPYTETELNSRGKEDDETKFEVKSEEIFESHHERGNPELEQQARLGDLSPRRYSSQYFK

SEQ ID NO: 49585 - protein, 124 aa, Homo sapiens
  Payload ID: 9927
  Gene Symbol: MCF2L2
  Gene Name: MCF.2 cell line derived transforming sequence-like 2
  ENSP ID: ENSP00000417345
MQQEVRPLMAVEIIEQLHRQFAILSGGRGEDGAPIITFPEFSGFKHIPDEDFLNVMTYLTSIPSVEAASIGFIVVIDRRRDKWSSVKASLTRIAVAFPGNLQLIFILRPSRFIQRTFTDIGIKY

SEQ ID NO: 49586 - protein, 1074 aa, Homo sapiens
  Payload ID: 9927
  Gene Symbol: MCF2L2
  Gene Name: MCF.2 cell line derived transforming sequence-like 2
  Uniprot ID: Q86YR7
  ENSP ID: ENSP00000420070
MLSCLKEEMPPQELTRRLATVITHVDEIMQQEVRPLMAVEIIEQLHRQFAILSGGRGEDGAPIITFPEFSGFKHIPDEDFLNVMTYLTSIPSVEAASIGFIVVIDRRRDKWSSVKASLTRIAVAFPGNLQLIFILRPSRFIQRTFTDIGIKYYRNEFKTKVPIIMVNSVSDLHGYIDKSQLTRELGGTLEYRHGQWVNHRTAIENFALTLKTTAQMLQTFGSCLATAELPRSMLSTEDLLMSHTRQRDKLQDELKLLGKQGTTLLSCIQEPATKCPNSKLNLNQLENVTTMERLLVQLDETEKAFSHFWSEHHLKLNQCLQLQHFEHDFCKAKLALDNLLEEQAEFTGIGDSVMHVEQILKEHKKLEEKSQEPLEKAQLLALVGDQLIQSHHYAADAIRPRCVELRHLCDDFINGNKKKWDILGKSLEFHRQLDKVSQWCEAGIYLLASQAVDKCQSREGVDIALNDIATFLGTVKEYPLLSPKEFYNEFELLLTLDAKAKAQKVLQRLDDVQEIFHKRQVSLMKLAAKQTRPVQPVAPHPESSPKWVSSKTSQPSTSVPLARPLRTSEEPYTETELNSRGKEDDETKFEVKSEEIFESHHERGNPELEQQARLGDLSPRRRIIRDLLETEEIYIKEIKSIIDGYITPMDFIWLKHLIPDVLQNNKDFLFGNIRELYEFHNRTFLKELEKCAENPELLAHCFLKRKEDLQIYFKYHKNLPRARAIWQECQDCAYFGVCQRQLDHNLPLFKYLKGPSQRLIKYQMLLKGLLDFESPEDMEIDPGELGGSAKDGPKRTKDSAFSTELQQALAVIEDLIKSCELAVDLAAVTECPDDIGKLGKLLLHGPFSVWTIHKDRYKMKDLIRFKPSQRQIYLFERGIVFCKIRMEPGDQGLSPHYSFKKTMKLMTLSIRQLGRGSHRKFEIASRNGLEKYILQAASKEIRDCWFSEISKLLMEQQNNIKDQGNPQFEMSTSKGSGAGSGPWIKNMERATTSKEDPASSTGGIKGCSSREFSSMDTFEDCEGAEDMEKESSALSLAGLFQSDDSHETCSSKSAFLERGESSQGEKEERDEEET

SEQ ID NO: 49587 - protein, 570 aa, Homo sapiens
  Payload ID: 9928
  Gene Symbol: MKKS
  Gene Name: McKusick-Kaufman syndrome
  Uniprot ID: Q9NPJ1
  ENSP ID: ENSP00000246062
MSRLEAKKPSLCKSEPLTTERVRTTLSVLKRIVTSCYGPSGRLKQLHNGFGGYVCTTSQSSALLSHLLVTHPILKILTASIQNHVSSFSDCGLFTAILCCNLIENVQRLGLTPTTVIRLNKHLLSLCISYLKSETCGCRIPVDFSSTQILLCLVRSILTSKPACMLTRKETEHVSALILRAFLLTIPENAEGHIILGKSLIVPLKGQRVIDSTVLPGILIEMSEVQLMRLLPIKKSTALKVALFCTTLSGDTSDTGEGTVVVSYGVSLENAVLDQLLNLGRQLISDHVDLVLCQKVIHPSLKQFLNMHRIIAIDRIGVTLMEPLTKMTGTQPIGSLGSICPNSYGSVKDVCTAKFGSKHFFHLIPNEATICSLLLCNRNDTAWDELKLTCQTALHVLQLTLKEPWALLGGGCTETHLAAYIRHKTHNDPESILKDDECTQTELQLIAEAFCSALESVVGSLEHDGGEILTDMKYGHLWSVQADSPCVANWPDLLSQCGCGLYNSQEELNWSFLRSTRRPFVPQSCLPHEAVGSASNLTLDCLTAKLSGLQVAVETANLILDLSYVIEDKN

SEQ ID NO: 49588 - protein, 570 aa, Homo sapiens; identical to SEQ ID NO: 49587
  Payload ID: 9928
  Gene Symbol: MKKS
  Gene Name: McKusick-Kaufman syndrome
  Uniprot ID: Q9NPJ1
  ENSP ID: ENSP00000382008

SEQ ID NO: 49589 - protein, 63 aa, Homo sapiens
  Payload ID: 9928
  Gene Symbol: MKKS
  Gene Name: McKusick-Kaufman syndrome
  ENSP ID: ENSP00000477297
MSLRNLWRDYKVLVVMVPLVGLIHLGWYRIKSSPVFQIPKNDDIPEQDSLGLSNLQKSQIQGK

SEQ ID NO: 49590 - protein, 714 aa, Homo sapiens
  Payload ID: 9929
  Gene Symbol: MDM1
  Gene Name: Mdm1 nuclear protein
  Uniprot ID: Q8TC05
  ENSP ID: ENSP00000302537
MPVRFKGLSEYQRNFLWKKSYLSESCNSSVGRKYPWAGLRSDQLGITKEPSFISKRRVPYHDPQISKSLEWNGAISESNVVASPEPEAPETPKSQEAEQKDVTQERVHSLEASRVPKRTRSHSADSRAEGASDVENNEGVTNHTPVNENVELEHSTKVLSENVDNGLDRLLRKKAGLTVVPSYNALRNSEYQRQFVWKTSKETAPAFAANQVFHNKSQFVPPFKGNSVIHETEYKRNFKGLSPVKEPKLRNDLRENRNLETVSPERKSNKIDDRLKLEAEMELKDLHQPKRKLTPWKHQRLGKVNSEYRAKFLSPAQYLYKAGAWTHVKGNMPNQVKELREKAEFYRKRVQGTHFSRDHLNQILSDSNCCWDVSSTTSSEGTVSSNIRALDLAGDPTSHKTLQKCPSTEPEEKGNIVEEQPQKNTTEKLGVSAPTIPVRRRLAWDTENTSEDVQKQPGEKEEEDDNEEEGDRKTGKQAFMGEQEKLDVREKSKADKMKEGSDSSVSSEKGGRLPTPKLRELGGIQRTHHDLTTPAVGGAVLVSPSKMKPPAPEQRKRMTSQDCLETSKNDFTKKESRAVSLLTSPAAGIKTVDPLPLREDSEDNIHKFAEATLPVSKIPKYPTNPPGQLPSPPHVPSYWHPSRRIQGSLRDPEFQHNVGKARMNNLQLPQHEAFNDEDEDRLSEISARSAASSLRAFQTLARAKKRKENFWGKT

SEQ ID NO: 49591 - protein, 30 aa, Homo sapiens
  Payload ID: 9929
  Gene Symbol: MDM1
  Gene Name: Mdm1 nuclear protein
  ENSP ID: ENSP00000350544
  MOD_RES (1)..(1): Any amino acid
XVSGLFKLWHELRKGRRISGMRKLRFTETE

SEQ ID NO: 49592 - protein, 69 aa, Homo sapiens
  Payload ID: 9929
  Gene Symbol: MDM1
  Gene Name: Mdm1 nuclear protein
  Uniprot ID: Q8TC05
  ENSP ID: ENSP00000377175
MPVRFKGLSEYQRNFLWKKSYLSESCNSSVGRKYPWAGLRSDQLGNQGRCRTKIQHSDISSLLILVCST

SEQ ID NO: 49593 - protein, 679 aa, Homo sapiens
  Payload ID: 9929
  Gene Symbol: MDM1
  Gene Name: Mdm1 nuclear protein
  Uniprot ID: Q8TC05
  ENSP ID: ENSP00000391006
MPVRFKGLSEYQRNFLWKKSYLSESCNSSVGRKYPWAGLRSDQLGITKEPSFISKRRVPYHDPQISKSLEWNGAISESNVVASPEPEAPETPKSQEAEQKDVTQERVHSLEASRVPKRTRSHSADSRAEGASDVENNEGVTNHTPVNENVELEHSTKVLSENVDNGVFHNKSQFVPPFKGNSVIHETEYKRNFKGLSPVKEPKLRNDLRENRNLETVSPERKSNKIDDRLKLEAEMELKDLHQPKRKLTPWKHQRLGKVNSEYRAKFLSPAQYLYKAGAWTHVKGNMPNQGSLNAMWYAEVKELREKAEFYRKRVQGTHFSRDHLNQILSDSNCCWDVSSTTSSEGTVSSNIRALDLAGDPTSHKTLQKCPSTEPEEKGNIVEEQPQKNTTEKLGVSAPTIPVRRRLAWDTENTSEDVQKQPGEKEEEDDNEEEGDRKTGKQAFMGEQEKLDVREKSKADKMKEGSDSSVSSEKGGRLPTPKLRELGGIQRTHHDLTTPAVGGAVLVSPSKMKPPAPEQRKRMTSQDCLETSKNDFTKKESRAVSLLTSPAAGIKTVDPLPLREDSEDNIHKFAEATLPVSKIPKYPTNPPGQLPSPPHVPSYWHPSRRIQGSLRDPEFQHNVGKARMNNLQLPQHEAFNDEDEDRLSEISARSAASSLRAFQTLARAKKRKENFWGKT

SEQ ID NO: 49594 - protein, 222 aa, Homo sapiens
  Payload ID: 9929
  Gene Symbol: MDM1
  Gene Name: Mdm1 nuclear protein
  Uniprot ID: Q8TC05
  ENSP ID: ENSP00000408694
MPVRFKGLSEYQRNFLWKKSYLSESCNSSVGRKYPWAGLRSDQLGITKEPSFISKRRVPYHDPQISKSLEWNGAISESNVVASPEPEAPETPKSQEAEQKDVTQERVHSLEASRVPKRTRSHSADSRAEGASDVENNEGVTNHTPVNENVELEHSTKVLSENVDNGVGIFTAFLFKSIEFFIGFIVISVILHFVFQNFPLLFSCLMSIRIVDNRLLTLVIVN

SEQ ID NO: 49595 - protein, 46 aa, Homo sapiens
  Payload ID: 9929
  Gene Symbol: MDM1
  Gene Name: Mdm1 nuclear protein
  ENSP ID: ENSP00000443815
MPVRFKGLSEYQRNFLWKKSYLSESCNSSVGRKYPWAGLRSDQLVG

SEQ ID NO: 49596 - protein, 121 aa, Homo sapiens
  Payload ID: 9929
  Gene Symbol: MDM1
  Gene Name: Mdm1 nuclear protein
  ENSP ID: ENSP00000445181
KESRAVSLLTSPAAGIKTVDPLPLREDSEDNIHKFAEATLPVSKIPKYPTNPPGQLPSPPHVPSYWHPSRRIQGSLRDPEFQHNDEDRLSEISARSAASSLRAFQTLARAKKRKENFWGKT

SEQ ID NO: 49597 - protein, 280 aa, Homo sapiens
  Payload ID: 9929
  Gene Symbol: MDM1
  Gene Name: Mdm1 nuclear protein
  ENSP ID: ENSP00000446000
MGLSEYQRNFLWKKSYLSESCNSSVGRKYPWAGLRSDQLGITKEPSFISKRRVPYHDPQISKSLEWNGAISESNVVASPEPEAPETPKSQEAEQKDVTQERVHSLEASRVPKRTRSHSADSRAEGASDVENNEGVTNHTPVNENVELEHSTKVLSENVDNGLDRLLRKKAGLTVVPSYNALRNSEYQRQFVWKTSKETAPAFAANQVFHNKSQFVPPFKGNSVIHETEYKRNFKGLSPVKEPKLRNDLRENRNLETVSPERKSNKIDDRLKLEAEMELKD

SEQ ID NO: 49598 - protein, 904 aa, Homo sapiens
  Payload ID: 9930
  Gene Symbol: MTBP
  Gene Name: MDM2 binding protein
  Uniprot ID: Q96DY7
  ENSP ID: ENSP00000303398
MDRYLLLVIWGEGKFPSAASREAEHGPEVSSGEGTENQPDFTAANVYHLLKRSISASINPEDSTFPACSVGGIPGSKKWFFAVQAIYGFYQFCSSDWQEIHFDTEKDKIEDVLQTNIEECLGAVECFEEEDSNSRESLSLADLYEEAAENLHQLSDKLPAPGRAMVDIILLLSDKDPPKLKDYLPTVGALKHLREWYSAKITIAGNHCEINCQKIAEYLSANVVSLEDLRNVIDSKELWRGKIQIWERKFGFEISFPEFCLKGVTLKNFSTSNLNTDFLAKKIIPSKDKNILPKVFHYYGPALEFVQMIKLSDLPSCYMSDIEFELGLTNSTKQNSVLLLEQISSLCSKVGALFVLPCTISNILIPPPNQLSSRKWKEYIAKKPKTISVPDVEVKGECSSYYLLLQGNGNRRCKATLIHSANQINGSFALNLIHGKMKTKTEEAKLSFPFDLLSLPHFSGEQIVQREKQLANVQVLALEECLKRRKLAKQPETVSVAELKSLLVLTRKHFLDYFDAVIPKMILRKMDKIKTFNILNDFSPVEPNSSSLMETNPLEWPERHVLQNLETFEKTKQKMRTGSLPHSSEQLLGHKEGPRDSITLLDAKELLKYFTSDGLPIGDLQPLPIQKGEKTFVLTPELSPGKLQVLPFEKASVCHYHGIEYCLDDRKALERDGGFSELQSRLIRYETQTTCTRESFPVPTVLSPLPSPVVSSDPGSVPDGEVLQNELRTEVSRLKRRSKDLNCLYPRKRLVKSESSESLLSQTTGNSNHYHHHVTSRKPQTERSLPVTCPLVPIPSCETPKLATKTSSGQKSMHESKTSRQIKESRSQKHTRILKEVVTETLKKHSITETHECFTACSQRLFEISKFYLKDLKTSRGLFEEMKKTANNNAVQVIDWVLEKTSKK

SEQ ID NO: 49599 - protein, 67 aa, Homo sapiens
  Payload ID: 9930
  Gene Symbol: MTBP
  Gene Name: MDM2 binding protein
  ENSP ID: ENSP00000428574
  MOD_RES (1)..(1): Any amino acid
XILKEVVTETLKKHSITETHECFTACSQRLFEISKFYLKDLKTSRGLFEEMKKTANNNAVQGIPCSC

SEQ ID NO: 49600 - protein, 329 aa, Homo sapiens
  Payload ID: 9930
  Gene Symbol: MTBP
  Gene Name: MDM2 binding protein
  Uniprot ID: Q96DY7
  ENSP ID: ENSP00000430771
MDRYLLLVIWGEGKFPSAASREAEHGPEVSSGEGTENQPDFTAANVYHLLKRSISASINPEDSTFPACSVGGIPGSKKWFFAVQAIYGFYQFCSSDWQEIHFDTEKDKIEDVLQTNIEECLGAVECFEEEDSNSRESLSLADLYEEAAENLHQLSDKLPAPGRAMVDIILLLSDKDPPKLKDYLPTVGALKHLREWYSAKITIAGNHCEINCQKIAEYLSANVVSLEDLRNVIDSKELWRGKIQIWERKFGFEISFPEFCLKGVTLKNFSTSNLNTDFLAKKIIPSKDKNILPKVFHYYGPALEFVQMIKLSDLPSCYMSDIEFEFTED

SEQ ID NO: 49601 - protein, 442 aa, Homo sapiens
  Payload ID: 9931
  Gene Symbol: MDM2
  Gene Name: MDM2 proto-oncogene, E3 ubiquitin protein ligase
  ENSP ID: ENSP00000258148
MVRSRQMCNTNMSVPTDGAVTTSQIPASEQETLVRPKPLLLKLLKSVGAQKDTYTMKEVLFYLGQYIMTKRLYDEKQQHIVYCSNDLLGDLFGVPSFSVKEHRKIYTMIYRNLVVVNQQEENSDELSGERQRKRHKSDSISLSFDESLALCVIREICCERSSSSESTGTPSNPDLDAGVSEHSGDWLDQDSVSDQFSVEFEVESLDSEDYSLSEEGQELSDEDDEVYQVTVYQAGESDTDSFEEDPEISLADYWKCTSCNEMNPPLPSHCNRCWALRENWLPEDKGKDKGEISEKAKLENSTQAEEGFDVPDCKKTIVNDSRESCVEENDDKITQASQSQESEDYSQPSTSSSIIYSSQEDVKEFEREETQDKEESVESSLPLNAIEPCVICQGRPKNGCIVHGKTGHLMACFTCAKKLKKRNKPCPVCRQPIQMIVLTYFP

SEQ ID NO: 49602 - protein, 497 aa, Homo sapiens
  Payload ID: 9931
  Gene Symbol: MDM2
  Gene Name: MDM2 proto-oncogene, E3 ubiquitin protein ligase
  Uniprot ID: Q00987
  ENSP ID: ENSP00000258149
MVRSRQMCNTNMSVPTDGAVTTSQIPASEQETLVRPKPLLLKLLKSVGAQKDTYTMKEVLFYLGQYIMTKRLYDEKQQHIVYCSNDLLGDLFGVPSFSVKEHRKIYTMIYRNLVVVNQQESSDSGTSVSENRCHLEGGSDQKDLVQELQEEKPSSSHLVSRPSTSSRRRAISETEENSDELSGERQRKRHKSDSISLSFDESLALCVIREICCERSSSSESTGTPSNPDLDAGVSEHSGDWLDQDSVSDQFSVEFEVESLDSEDYSLSEEGQELSDEDDEVYQVTVYQAGESDTDSFEEDPEISLADYWKCTSCNEMNPPLPSHCNRCWALRENWLPEDKGKDKGEISEKAKLENSTQAEEGFDVPDCKKTIVNDSRESCVEENDDKITQASQSQESEDYSQPSTSSSIIYSSQEDVKEFEREETQDKEESVESSLPLNAIEPCVICQGRPKNGCIVHGKTGHLMACFTCAKKLKKRNKPCPVCRQPIQMIVLTYFP

SEQ ID NO: 49603 - protein, 466 aa, Homo sapiens
  Payload ID: 9931
  Gene Symbol: MDM2
  Gene Name: MDM2 proto-oncogene, E3 ubiquitin protein ligase
  ENSP ID: ENSP00000266624
MCNTNMSVPTDGAVTTSQIPASEQETLVLFYLGQYIMTKRLYDEKQQHIVYCSNDLLGDLFGVPSFSVKEHRKIYTMIYRNLVVVNQQESSDSGTSVSENRCHLEGGSDQKDLVQELQEEKPSSSHLVSRPSTSSRRRAISETEENSDELSGERQRKRHKSDSISLSFDESLALCVIREICCERSSSSESTGTPSNPDLDAGVSEHSGDWLDQDSVSDQFSVEFEVESLDSEDYSLSEEGQELSDEDDEVYQVTVYQAGESDTDSFEEDPEISLADYWKCTSCNEMNPPLPSHCNRCWALRENWLPEDKGKDKGEISEKAKLENSTQAEEGFDVPDCKKTIVNDSRESCVEENDDKITQASQSQESEDYSQPSTSSSIIYSSQEDVKEFEREETQDKEESVESSLPLNAIEPCVICQGRPKNGCIVHGKTGHLMACFTCAKKLKKRNKPCPVCRQPIQMIVLTYFP

SEQ ID NO: 49604 - protein, 321 aa, Homo sapiens
  Payload ID: 9931
  Gene Symbol: MDM2
  Gene Name: MDM2 proto-oncogene, E3 ubiquitin protein ligase
  Uniprot ID: Q00987
  ENSP ID: ENSP00000299252
MCNTNMSVPTDGAVTTSQIPASEQETLVRPKPLLLKLLKSVGAQKDTYTMKEDLDAGVSEHSGDWLDQDSVSDQFSVEFEVESLDSEDYSLSEEGQELSDEDDEVYQVTVYQAGESDTDSFEEDPEISLADYWKCTSCNEMNPPLPSHCNRCWALRENWLPEDKGKDKGEISEKAKLENSTQAEEGFDVPDCKKTIVNDSRESCVEENDDKITQASQSQESEDYSQPSTSSSIIYSSQEDVKEFEREETQDKEESVESSLPLNAIEPCVICQGRPKNGCIVHGKTGHLMACFTCAKKLKKRNKPCPVCRQPIQMIVLTYFP

SEQ ID NO: 49605 - protein, 84 aa, Homo sapiens
  Payload ID: 9931
  Gene Symbol: MDM2
  Gene Name: MDM2 proto-oncogene, E3 ubiquitin protein ligase
  ENSP ID: ENSP00000310742
MVRSRQMCNTNMSVPTDGAVTTSQIPASEQETLVRPKPLLLKLLKSVGAQKDTYTMKEENIYHDLQELGSSQSAGIIGLRYICE

SEQ ID NO: 49606 - protein, 265 aa, Homo sapiens
  Payload ID: 9931
  Gene Symbol: MDM2
  Gene Name: MDM2 proto-oncogene, E3 ubiquitin protein ligase
  ENSP ID: ENSP00000335096
MSVPTDGAVTTSQIPASEQETLDLDAGVSEHSGDWLDQDSVSDQFSVEFEVESLDSEDYSLSEEGQELSDEDDEDYWKCTSCNEMNPPLPSHCNRCWALRENWLPEDKGKDKGEISEKAKLENSTQAEEGFDVPDCKKTIVNDSRESCVEENDDKITQASQSQESEDYSQPSTSSSIIYSSQEDVKEFEREETQDKEESVESSLPLNAIEPCVICQGRPKNGCIVHGKTGHLMACFTCAKKLKKRNKPCPVCRQPIQMIVLTYFP

SEQ ID NO: 49607 - protein, 321 aa, Homo sapiens; identical to SEQ ID NO: 49604
  Payload ID: 9931
  Gene Symbol: MDM2
  Gene Name: MDM2 proto-oncogene, E3 ubiquitin protein ligase
  Uniprot ID: Q00987
  ENSP ID: ENSP00000348637

SEQ ID NO: 49608 - protein, 296 aa, Homo sapiens
  Payload ID: 9931
  Gene Symbol: MDM2
  Gene Name: MDM2 proto-oncogene, E3 ubiquitin protein ligase
  Uniprot ID: Q00987
  ENSP ID: ENSP00000353611
MCNTNMSVPTDGAVTTSQIPASEQETLDLDAGVSEHSGDWLDQDSVSDQFSVEFEVESLDSEDYSLSEEGQELSDEDDEVYQVTVYQAGESDTDSFEEDPEISLADYWKCTSCNEMNPPLPSHCNRCWALRENWLPEDKGKDKGEISEKAKLENSTQAEEGFDVPDCKKTIVNDSRESCVEENDDKITQASQSQESEDYSQPSTSSSIIYSSQEDVKEFEREETQDKEESVESSLPLNAIEPCVICQGRPKNGCIVHGKTGHLMACFTCAKKLKKRNKPCPVCRQPIQMIVLTYFP

SEQ ID NO: 49609 - protein, 243 aa, Homo sapiens
  Payload ID: 9931
  Gene Symbol: MDM2
  Gene Name: MDM2 proto-oncogene, E3 ubiquitin protein ligase
  ENSP ID: ENSP00000377062
MCNTNMSVPTDGAVTTSQIPASEQETLVRPKPLLLKLLKSVGAQKDTYTMKEDYWKCTSCNEMNPPLPSHCNRCWALRENWLPEDKGKDKGEISEKAKLENSTQAEEGFDVPDCKKTIVNDSRESCVEENDDKITQASQSQESEDYSQPSTSSSIIYSSQEDVKEFEREETQDKEESVESSLPLNAIEPCVICQGRPKNGCIVHGKTGHLMACFTCAKKLKKRNKPCPVCRQPIQMIVLTYFP

SEQ ID NO: 49610 - protein, 243 aa, Homo sapiens; identical to SEQ ID NO: 49609
  Payload ID: 9931
  Gene Symbol: MDM2
  Gene Name: MDM2 proto-oncogene, E3 ubiquitin protein ligase
  ENSP ID: ENSP00000377064

SEQ ID NO: 49611 - protein, 218 aa, Homo sapiens
  Payload ID: 9931
  Gene Symbol: MDM2
  Gene Name: MDM2 proto-oncogene, E3 ubiquitin protein ligase
  Uniprot ID: Q00987
  ENSP ID: ENSP00000377065
MCNTNMSVPTDGAVTTSQIPASEQETLDYWKCTSCNEMNPPLPSHCNRCWALRENWLPEDKGKDKGEISEKAKLENSTQAEEGFDVPDCKKTIVNDSRESCVEENDDKITQASQSQESEDYSQPSTSSSIIYSSQEDVKEFEREETQDKEESVESSLPLNAIEPCVICQGRPKNGCIVHGKTGHLMACFTCAKKLKKRNKPCPVCRQPIQMIVLTYFP

SEQ ID NO: 49612 - protein, 256 aa, Homo sapiens
  Payload ID: 9931
  Gene Symbol: MDM2
  Gene Name: MDM2 proto-oncogene, E3 ubiquitin protein ligase
  ENSP ID: ENSP00000377067
MCNTNMSVPTDGAVTTSQIPASEQETLVRPKPLLLKLLKSVGAQKDTYTMKEVLFYLGQYIMTKRLYDEKQQHIVYCSNDLLGDLFGVPSFSVKEHRKIYTMIYRNLVVVNQQESSDSGTSVSENRCHLEGGSDQKDLVQELQEEKPSSSHLVSRPSTSSRRRAISETEENSDELSGERQRKRHKSDSISLSFDESLALCVIREICCERSSSSESTGTPSNPDLDAGVYQVTVYQAGESDTDSFEEDPEISLADYW

SEQ ID NO: 49613 - protein, 229 aa, Homo sapiens
  Payload ID: 9931
  Gene Symbol: MDM2
  Gene Name: MDM2 proto-oncogene, E3 ubiquitin protein ligase
  ENSP ID: ENSP00000377068
MCNTNMSVPTDGAVTTSQIPASEQETLVRPKPLLLKLLKSVGAQKDTYTMKERWSFTMLPRLVWNSWAQGICLPRPPKVLDLQVLFYLGQYIMTKRLYDEKQQHIVYCSNDLLGDLFGVPSFSVKEHRKIYTMIYRNLVVVNQQESSDSGTSVSENRCHLEGGSDQKDLVQELQEEKPSSSHLVSRPSTSSRRRAISETEENSDELSGERQRKRHKSDSISLSFDESLA

SEQ ID NO: 49614 - protein, 243 aa, Homo sapiens
  Payload ID: 9931
  Gene Symbol: MDM2
  Gene Name: MDM2 proto-oncogene, E3 ubiquitin protein ligase
  ENSP ID: ENSP00000410694
MCNTNMSVPTDGAVTTSQIPASEQETLVRPKPLLLKLLKSVGAQKDTYTMKEVLFYLGQYIMTKRLYDEKQQHIVYCSNDLLGDLFGVPSFSVKEHRKIYTMIYRNLVVVNQQESSDSGTSVSENRCHLEGGSDQKDLVQELQEEKPSSSHLVSRPSTSSRRRAISETEETQDKEESVESSLPLNAIEPCVICQGRPKNGCIVHGKTGHLMACFTCAKKLKKRNKPCPVCRQPIQMIVLTYFP

SEQ ID NO: 49615 - protein, 466 aa, Homo sapiens; identical to SEQ ID NO: 49603
  Payload ID: 9931
  Gene Symbol: MDM2
  Gene Name: MDM2 proto-oncogene, E3 ubiquitin protein ligase
  ENSP ID: ENSP00000417281

SEQ ID NO: 49616 - protein, 143 aa, Homo sapiens
  Payload ID: 9931
  Gene Symbol: MDM2
  Gene Name: MDM2 proto-oncogene, E3 ubiquitin protein ligase
  ENSP ID: ENSP00000427828
MCNTNMSVPTDGAVTTSQIPASEQETLVRPKPLLLKLLKSVGAQKDTYTMKEDLDAGVSEHSGDWLDQDSVSDQFSVEFEVESLDSEDYSLSEEGQELSDEDDEVYQVTVYQAGESDTDSFEEDPEISLADYWKCTSCNEMNP

SEQ ID NO: 49617 - protein, 70 aa, Homo sapiens
  Payload ID: 9931
  Gene Symbol: MDM2
  Gene Name: MDM2 proto-oncogene, E3 ubiquitin protein ligase
  ENSP ID: ENSP00000429021
MCNTNMSVPTDGAVTTSQIPASEQETLVRPKPLLLKLLKSVGAQKDTYTMKEDFLGIPGSQVKNFCTRDT

SEQ ID NO: 49618 - protein, 60 aa, Homo sapiens
  Payload ID: 9931
  Gene Symbol: MDM2
  Gene Name: MDM2 proto-oncogene, E3 ubiquitin protein ligase
  ENSP ID: ENSP00000429692
MCNTNMSVPTDGAVTTSQIPASEQETLVRPKPLLLKLLKSVGAQKDTYTMKENHRTQVHL

SEQ ID NO: 49619 - protein, 130 aa, Homo sapiens
  Payload ID: 9931
  Gene Symbol: MDM2
  Gene Name: MDM2 proto-oncogene, E3 ubiquitin protein ligase
  ENSP ID: ENSP00000430257
MCNTNMSVPTDGAVTTSQIPASEQETLVRPKPLLLKLLKSVGAQKDTYTMKEFEREETQDKEESVESSLPLNAIEPCVICQGRPKNGCIVHGKTGHLMACFTCAKKLKKRNKPCPVCRQPIQMIVLTYFP

SEQ ID NO: 49620 - protein, 49 aa, Homo sapiens
  Payload ID: 9931
  Gene Symbol: MDM2
  Gene Name: MDM2 proto-oncogene, E3 ubiquitin protein ligase
  ENSP ID: ENSP00000430906
MSVPTDGAVTTSQIPASEQETLENIYHDLQELGSSQSAGTIGNALHAMK

SEQ ID NO: 49621 - protein, 35 aa, Homo sapiens
  Payload ID: 9931
  Gene Symbol: MDM2
  Gene Name: MDM2 proto-oncogene, E3 ubiquitin protein ligase
  ENSP ID: ENSP00000431110
MCNTNMSVPTDGAVTTSQIPASEQETLNHRTQVHL

SEQ ID NO: 49622 - protein, 117 aa, Homo sapiens
  Payload ID: 9931
  Gene Symbol: MDM2
  Gene Name: MDM2 proto-oncogene, E3 ubiquitin protein ligase
  ENSP ID: ENSP00000439238
MCNTNMSVPTDGAVTTSQIPASEQETLVRPKPLLLKLLKSVGAQKDTYTMKEDLDAGVSEHSGDWLDQDSVSDQFSVEFEVESLDSEDYSLSEEGQELSDEDDEDYWKCTSCNEMNP

SEQ ID NO: 49623 - protein, 70 aa, Homo sapiens
  Payload ID: 9931
  Gene Symbol: MDM2
  Gene Name: MDM2 proto-oncogene, E3 ubiquitin protein ligase
  ENSP ID: ENSP00000441841
MCNTNMSVPTDGAVTTSQIPASEQETLVRPKPLLLKLLKSVGAQKDTYTMKEVLFYLGQYIMCKEAKEKE

SEQ ID NO: 49624 - protein, 78 aa, Homo sapiens
  Payload ID: 9931
  Gene Symbol: MDM2
  Gene Name: MDM2 proto-oncogene, E3 ubiquitin protein ligase
  ENSP ID: ENSP00000443450
MCNTNMSVPTDGAVTTSQIPASEQETLVRPKPLLLKLLKSVGAQKDTYTMKEENIYHDLQELGSSQSAGIIGLRYICE

SEQ ID NO: 49625 - protein, 78 aa, Homo sapiens; identical to SEQ ID NO: 49624
  Payload ID: 9931
  Gene Symbol: MDM2
  Gene Name: MDM2 proto-oncogene, E3 ubiquitin protein ligase
  ENSP ID: ENSP00000444028

SEQ ID NO: 49626 - protein, 257 aa, Homo sapiens
  Payload ID: 9931
  Gene Symbol: MDM2
  Gene Name: MDM2 proto-oncogene, E3 ubiquitin protein ligase
  ENSP ID: ENSP00000444430
MCNTNMSVPTDGAVTTSQIPASEQETLVRPKPLLLKLLKSVGAQKDTYTMKEVLFYLGQYIMTKRLYDEKQQHIVYCSNDLLGDLFGVPSFSVKEHRKIYTMIYRNLVVVNQQESSDSGTSVSENRCHLEGGSDQKDLVQELQEEKPSSSHLVSRPSTSSRRRAISETEENSDELSGERQRKRHKSDSISLSFDESLALCVIREICCERSSSSESTGTPSNPDLDAGVSEHSGDWLDQDSVSDQFSVEFEVESLDSE

SEQ ID NO: 49627 - protein, 84 aa, Homo sapiens
  Payload ID: 9931
  Gene Symbol: MDM2
  Gene Name: MDM2 proto-oncogene, E3 ubiquitin protein ligase
  ENSP ID: ENSP00000444566
MCNTNMSVPTDGAVTTSQIPASEQETLVRPKPLLLKLLKSVGAQKDTYTMKEKKIQMNYLVNDKENATNLIVFPFPLMKAWLCV

SEQ ID NO: 49628 - protein, 51 aa, Homo sapiens
  Payload ID: 9931
  Gene Symbol: MDM2
  Gene Name: MDM2 proto-oncogene, E3 ubiquitin protein ligase
  ENSP ID: ENSP00000444597
MCNTNMSVPTDGAVTTSQIPASEQETLVSKKVKTILSHQLLVALFIAAKKM

SEQ ID NO: 49629 - protein, 170 aa, Homo sapiens
  Payload ID: 9931
  Gene Symbol: MDM2
  Gene Name: MDM2 proto-oncogene, E3 ubiquitin protein ligase
  ENSP ID: ENSP00000445030
MCNTNMSVPTDGAVTTSQIPASEQETLVRPKPLLLKLLKSVGAQKDTYTMKEVLFYLGQYIMTKRLYDEKQQHIVYCSNDLLGDLFGVPSFSVKEHRKIYTMIYRNLVVVNQQESSDSGTSVSENRCHLEGGSDQKDLVQELQEEKPSSSHLVSRPSTSSRRRAISETGS

SEQ ID NO: 49630 - protein, 78 aa, Homo sapiens; identical to SEQ ID NO: 49624
  Payload ID: 9931
  Gene Symbol: MDM2
  Gene Name: MDM2 proto-oncogene, E3 ubiquitin protein ligase
  ENSP ID: ENSP00000445222

SEQ ID NO: 49631 - protein, 213 aa, Homo sapiens
  Payload ID: 9932
  Gene Symbol: MDM4
  Gene Name: MDM4, p53 regulator
  ENSP ID: ENSP00000356147
MPNFVVDWRVYTDSLFLTVDFGLCAEESSTSRKRTTEDDIPTLPTSEHKCIHSREDEDLIENLAQDETSRLDLGFEEWDVAGLPWWFLGNLRSNYTPRSNGSTDLQTNQDVGTAIVSDTTDDLWFLNESVSEQLGVGIKVEAADTEQTSEEVGKVSDKKVIEVGKNDDLEDSKSLSDDTDVEVTSEDEWQCTECKKFNSPSKRYCFRCWALRK

SEQ ID NO: 49632 - protein, 131 aa, Homo sapiens
  Payload ID: 9932
  Gene Symbol: MDM4
  Gene Name: MDM4, p53 regulator
  ENSP ID: ENSP00000356148
MTSFSTSAQCSTSDSACRISPGQINQVRPKLPLLKILHAAGAQGEMFTVKEVMHYLGQYIMVKQLYDQQEQHMVYCGGDLLGELLGRQSFSVKDPSPLYDMLRKNLVTLATATTEMGHLFCRISHALELAD

SEQ ID NO: 49633 - protein, 490 aa, Homo sapiens
  Payload ID: 9932
  Gene Symbol: MDM4
  Gene Name: MDM4, p53 regulator
  Uniprot ID: O15151
  ENSP ID: ENSP00000356150
MTSFSTSAQCSTSDSACRISPGQINQVRPKLPLLKILHAAGAQGEMFTVKEVMHYLGQYIMVKQLYDQQEQHMVYCGGDLLGELLGRQSFSVKDPSPLYDMLRKNLVTLATATTDAAQTLALAQDHSMDIPSQDQLKQSAEESSTSRKRTTEDDIPTLPTSEHKCIHSREDEDLIENLAQDETSRLDLGFEEWDVAGLPWWFLGNLRSNYTPRSNGSTDLQTNQDVGTAIVSDTTDDLWFLNESVSEQLGVGIKVEAADTEQTSEEVGKVSDKKVIEVGKNDDLEDSKSLSDDTDVEVTSEDEWQCTECKKFNSPSKRYCFRCWALRKDWYSDCSKLTHSLSTSDITAIPEKENEGNDVPDCRRTISAPVVRPKDAYIKKENSKLFDPCNSVEFLDLAHSSESQETISSMGEQLDNLSEQRTDTENMEDCQNLLKPCSLCEKRPRDGNIIHGRTGHLVTCFHCARRLKKAGASCPICKKEIQLVIKVFIA

SEQ ID NO: 49634 - protein, 164 aa, Homo sapiens
  Payload ID: 9932
  Gene Symbol: MDM4
  Gene Name: MDM4, p53 regulator
  Uniprot ID: O15151
  ENSP ID: ENSP00000356151
MTSFSTSAQCSTSDSACRISPGQINQENEGNDVPDCRRTISAPVVRPKDAYIKKENSKLFDPCNSVEFLDLAHSSESQETISSMGEQLDNLSEQRTDTENMEDCQNLLKPCSLCEKRPRDGNIIHGRTGHLVTCFHCARRLKKAGASCPICKKEIQLVIKVFIA

SEQ ID NO: 49635 - protein, 140 aa, Homo sapiens
  Payload ID: 9932
  Gene Symbol: MDM4
  Gene Name: MDM4, p53 regulator
  ENSP ID: ENSP00000375811
MTSFSTSAQCSTSDSACRISPGQINQVRPKLPLLKILHAAGAQGEMFTVKEVMHYLGQYIMVKQLYDQQEQHMVYCGGDLLGELLGRQSFSVKDPSPLYDMLRKNLVTLATATTAKCRGKFHFQKKNYRRRYPHTAYLRA

SEQ ID NO: 49636 - protein, 171 aa, Homo sapiens
  Payload ID: 9932
  Gene Symbol: MDM4
  Gene Name: MDM4, p53 regulator
  ENSP ID: ENSP00000395254
DLIENLAQDETSRLDLGFEEWDVAGLPWWFLGNLRSNYTPRSNGSTDLQTNQVIEVGKNDDLEDSKSLSDDTDVEVTSEDEWQCTECKKFNSPSKRYCFRCWALRKDWYSDCSKLTHSLSTSDITAIPEKENEGNDVPDCRRTISAPVVRPKDAYIKKENSKLFDPCNSVE

SEQ ID NO: 49637 - protein, 440 aa, Homo sapiens
  Payload ID: 9932
  Gene Symbol: MDM4
  Gene Name: MDM4, p53 regulator
  Uniprot ID: O15151
  ENSP ID: ENSP00000396840
MTSFSTSAQCSTSDSACRISPGQINQVRPKLPLLKILHAAGAQGEMFTVKEVMHYLGQYIMVKQLYDQQEQHMVYCGGDLLGELLGRQSFSVKDPSPLYDMLRKNLVTLATATTDAAQTLALAQDHSMDIPSQDQLKQSAEESSTSRKRTTEDDIPTLPTSEHKCIHSREDEDLIENLAQDETSRLDLGFEEWDVAGLPWWFLGNLRSNYTPRSNGSTDLQTNQVIEVGKNDDLEDSKSLSDDTDVEVTSEDEWQCTECKKFNSPSKRYCFRCWALRKDWYSDCSKLTHSLSTSDITAIPEKENEGNDVPDCRRTISAPVVRPKDAYIKKENSKLFDPCNSVEFLDLAHSSESQETISSMGEQLDNLSEQRTDTENMEDCQNLLKPCSLCEKRPRDGNIIHGRTGHLVTCFHCARRLKKAGASCPICKKEIQLVIKVFIA

SEQ ID NO: 49638 - protein, 140 aa, Homo sapiens; identical to SEQ ID NO: 49635
  Payload ID: 9932
  Gene Symbol: MDM4
  Gene Name: MDM4, p53 regulator
  ENSP ID: ENSP00000443816

SEQ ID NO: 49639 - protein, 267 aa, Homo sapiens
  Payload ID: 9932
  Gene Symbol: MDM4
  Gene Name: MDM4, p53 regulator
  ENSP ID: ENSP00000478080
MTSFSTSAQCSTSDSACRISPGQINQVRPKLPLLKILHAAGAQGEMFTVKEVIEVGKNDDLEDSKSLSDDTDVEVTSEDEWQCTECKKFNSPSKRYCFRCWALRKDWYSDCSKLTHSLSTSDITAIPEKENEGNDVPDCRRTISAPVVRPKDAYIKKENSKLFDPCNSVEFLDLAHSSESQETISSMGEQLDNLSEQRTDTENMEDCQNLLKPCSLCEKRPRDGNIIHGRTGHLVTCFHCARRLKKAGASCPICKKEIQLVIKVFIA

SEQ ID NO: 49640 - protein, 116 aa, Homo sapiens
  Payload ID: 9932
  Gene Symbol: MDM4
  Gene Name: MDM4, p53 regulator
  ENSP ID: ENSP00000478581
MTSFSTSAQCSTSDSACRISPGQINQVRPKLPLLKILHAAGAQGEMFTVKEVMHYLGQYIMVKQLYDQQEQHMVYCGGDLLGELLGRQSFSVKDPSPLYDMLRKNLVTLATATTGD

SEQ ID NO: 49641 - protein, 392 aa, Homo sapiens
  Payload ID: 9932
  Gene Symbol: MDM4
  Gene Name: MDM4, p53 regulator
  ENSP ID: ENSP00000482388
MTSFSTSAQCSTSDSACRISPGQINQDHSMDIPSQDQLKQSAEESSTSRKRTTEDDIPTLPTSEHKCIHSREDEDLIENLAQDETSRLDLGFEEWDVAGLPWWFLGNLRSNYTPRSNGSTDLQTNQDVGTAIVSDTTDDLWFLNESVSEQLGVGIKVEAADTEQTSEEVGKVSDKKVIEVGKNDDLEDSKSLSDDTDVEVTSEDEWQCTECKKFNSPSKRYCFRCWALRKDWYSDCSKLTHSLSTSDITAIPEKENEGNDVPDCRRTISAPVVRPKDAYIKKENSKLFDPCNSVEFLDLAHSSESQETISSMGEQLDNLSEQRTDTENMEDCQNLLKPCSLCEKRPRDGNIIHGRTGHLVTCFHCARRLKKAGASCPICKKEIQLVIKVFIA

SEQ ID NO: 49642 - protein, 153 aa, Homo sapiens
  Payload ID: 9932
  Gene Symbol: MDM4
  Gene Name: MDM4, p53 regulator
  ENSP ID: ENSP00000482479
MTSFSTSAQCSTSDSACRISPGQINQVRPKLPLLKILHAAGAQGEMFTVKEVMHYLGQYIMVKQLYDQQEQHMVYCGGDLLGELLGRQSFSVKDPSPLYDMLRKNLVTLATATTGSQYGYSKSRPTEAKCRGKFHFQKKNYRRRYPHTAYLRA

SEQ ID NO: 49643 - protein, 1116 aa, Homo sapiens
  Payload ID: 9933
  Gene Symbol: MECOM
  Gene Name: MDS1 and EVI1 complex locus
  Uniprot ID: Q03112
  ENSP ID: ENSP00000264674
MILDEFYNVKFCIDASQPDVGSWLKYIRFAGCYDQHNLVACQINDQIFYRVVADIAPGEELLLFMKSEDYPHETMAPDIHEERQYRCEDCDQLFESKAELADHQKFPCSTPHSAFSMVEEDFQQKLESENDLQEIHTIQECKECDQVFPDLQSLEKHMLSHTEEREYKCDQCPKAFNWKSNLIRHQMSHDSGKHYECENCAKQVFTDPSNLQRHIRSQHVGARAHACPECGKTFATSSGLKQHKHIHSSVKPFICEVCHKSYTQFSNLCRHKRMHADCRTQIKCKDCGQMFSTTSSLNKHRRFCEGKNHFAAGGFFGQGISLPGTPAMDKTSMVNMSHANPGLADYFGANRHPAGLTFPTAPGFSFSFPGLFPSGLYHRPPLIPASSPVKGLSSTEQTNKSQSPLMTHPQILPATQDILKALSKHPSVGDNKPVELQPERSSEERPFEKISDQSESSDLDDVSTPSGSDLETTSGSDLESDIESDKEKFKENGKMFKDKVSPLQNLASINNKKEYSNHSIFSPSLEEQTAVSGAVNDSIKAIASIAEKYFGSTGLVGLQDKKVGALPYPSMFPLPFFPAFSQSMYPFPDRDLRSLPLKMEPQSPGEVKKLQKGSSESPFDLTTKRKDEKPLTPVPSKPPVTPATSQDQPLDLSMGSRSRASGTKLTEPRKNHVFGGKKGSNVESRPASDGSLQHARPTPFFMDPIYRVEKRKLTDPLEALKEKYLRPSPGFLFHPQFQLPDQRTWMSAIENMAEKLESFSALKPEASELLQSVPSMFNFRAPPNALPENLLRKGKERYTCRYCGKIFPRSANLTRHLRTHTGEQPYRCKYCDRSFSISSNLQRHVRNIHNKEKPFKCHLCDRCFGQQTNLDRHLKKHENGNMSGTATSSPHSELESTGAILDDKEDAYFTEIRNFIGNSNHGSQSPRNVEERMNGSHFKDEKALVTSQNSDLLDDEEVEDEVLLDEEDEDNDITGKTGKEPVTSNLHEGNPEDDYEETSALEMSCKTSPVRYKEEEYKSGLSALDHIRHFTDSLKMRKMEDNQYSEAELSSFSTSHVPEELKQPLHRKSKSQAYAMMLSLSDKESLHSTSHSSSNVWHSMARAAAESSAIQSISHV

SEQ ID NO: 49644 - protein, 1052 aa, Homo sapiens
  Payload ID: 9933
  Gene Symbol: MECOM
  Gene Name: MDS1 and EVI1 complex locus
  ENSP ID: ENSP00000394302
MKSEDYPHETMAPDIHEERQYRCEDCDQLFESKAELADHQKFPCSTPHSAFSMVEEDFQQKLESENDLQEIHTIQECKECDQVFPDLQSLEKHMLSHTEEREYKCDQCPKAFNWKSNLIRHQMSHDSGKHYECENCAKQVFTDPSNLQRHIRSQHVGARAHACPECGKTFATSSGLKQHKHIHSSVKPFICEVCHKSYTQFSNLCRHKRMHADCRTQIKCKDCGQMFSTTSSLNKHRRFCEGKNHFAAGGFFGQGISLPGTPAMDKTSMVNMSHANPGLADYFGANRHPAGLTFPTAPGFSFSFPGLFPSGLYHRPPLIPASSPVKGLSSTEQTNKSQSPLMTHPQILPATQDILKALSKHPSVGDNKPVELQPERSSEERPFEKISDQSESSDLDDVSTPSGSDLETTSGSDLESDIESDKEKFKENGKMFKDKVSPLQNLASINNKKEYSNHSIFSPSLEEQTAVSGAVNDSIKAIASIAEKYFGSTGLVGLQDKKVGALPYPSMFPLPFFPAFSQSMYPFPDRDLRSLPLKMEPQSPGEVKKLQKGSSESPFDLTTKRKDEKPLTPVPSKPPVTPATSQDQPLDLSMGSRSRASGTKLTEPRKNHVFGGKKGSNVESRPASDGSLQHARPTPFFMDPIYRVEKRKLTDPLEALKEKYLRPSPGFLFHPQFQLPDQRTWMSAIENMAEKLESFSALKPEASELLQSVPSMFNFRAPPNALPENLLRKGKERYTCRYCGKIFPRSANLTRHLRTHTGEQPYRCKYCDRSFSISSNLQRHVRNIHNKEKPFKCHLCDRCFGQQTNLDRHLKKHENGNMSGTATSSPHSELESTGAILDDKEDAYFTEIRNFIGNSNHGSQSPRNVEERMNGSHFKDEKALVTSQNSDLLDDEEVEDEVLLDEEDEDNDITGKTGKEPVTSNLHEGNPEDDYEETSALEMSCKTSPVRYKEEEYKSGLSALDHIRHFTDSLKMRKMEDNQYSEAELSSFSTSHVPEELKQPLHRKSKSQAYAMMLSLSDKESLHSTSHSSSNVWHSMARAAAESSAIQSISHV

SEQ ID NO: 49645 - protein, 125 aa, Homo sapiens
  Payload ID: 9933
  Gene Symbol: MECOM
  Gene Name: MDS1 and EVI1 complex locus
  ENSP ID: ENSP00000417299
MKSEDYPHETMAPDIHEERQYRCEDCDQLFESKAELADHQKFPCSTPHSAFSMVEEDFQQKLESENDLQEIHTIQECKECDQVFPDLQSLEKHMLSHTEEREYKCDQCPKAFNWKSNLIRHQMSH

SEQ ID NO: 49646 - protein, 321 aa, Homo sapiens
  Payload ID: 9933
  Gene Symbol: MECOM
  Gene Name: MDS1 and EVI1 complex locus
  ENSP ID: ENSP00000417506
CDQLFESKAELADHQKFPCSTPHSAFSMVEEDFQQKLESENDLQEIHTIQECKECDQVFPDLQSLEKHMLSHTEEREYKCDQCPKAFNWKSNLIRHQMSHDSGKHYECENCAKVFTDPSNLQRHIRSQHVGARAHACPECGKTFATSSGLKQHKHIHSSVKPFISFSQSMYPFPDRDLRSLPLKMEPQSPGEVKKLQKGSSESPFDLTTKRKDEKPLTPVPSKPPVTPATSQDQPLDLSMGSRSRASGTKLTEPRKNHVFGGKKGSNVESRPASDGSLQHARPTPFFMDPIYRVEKRKLTDPLEALKEKYLRPSPGFLFHP

SEQ ID NO: 49647 - protein, 1230 aa, Homo sapiens
  Payload ID: 9933
  Gene Symbol: MECOM
  Gene Name: MDS1 and EVI1 complex locus
  ENSP ID: ENSP00000417899
MRSKGRARKLATNNECVYGNYPEIPLEEMPDADGVASTPSLNIQEPCSPATSSEAFTPKEGSPYKAPIYIPDDIPIPAEFELRESNMPGAGLGIWTKRKIEVGEKFGPYVGEQRSNLKDPSYGWEILDEFYNVKFCIDASQPDVGSWLKYIRFAGCYDQHNLVACQINDQIFYRVVADIAPGEELLLFMKSEDYPHETMAPDIHEERQYRCEDCDQLFESKAELADHQKFPCSTPHSAFSMVEEDFQQKLESENDLQEIHTIQECKECDQVFPDLQSLEKHMLSHTEEREYKCDQCPKAFNWKSNLIRHQMSHDSGKHYECENCAKVFTDPSNLQRHIRSQHVGARAHACPECGKTFATSSGLKQHKHIHSSVKPFICEVCHKSYTQFSNLCRHKRMHADCRTQIKCKDCGQMFSTTSSLNKHRRFCEGKNHFAAGGFFGQGISLPGTPAMDKTSMVNMSHANPGLADYFGANRHPAGLTFPTAPGFSFSFPGLFPSGLYHRPPLIPASSPVKGLSSTEQTNKSQSPLMTHPQILPATQDILKALSKHPSVGDNKPVELQPERSSEERPFEKISDQSESSDLDDVSTPSGSDLETTSGSDLESDIESDKEKFKENGKMFKDKVSPLQNLASINNKKEYSNHSIFSPSLEEQTAVSGAVNDSIKAIASIAEKYFGSTGLVGLQDKKVGALPYPSMFPLPFFPAFSQSMYPFPDRDLRSLPLKMEPQSPGEVKKLQKGSSESPFDLTTKRKDEKPLTPVPSKPPVTPATSQDQPLDLSMGSRSRASGTKLTEPRKNHVFGGKKGSNVESRPASDGSLQHARPTPFFMDPIYRVEKRKLTDPLEALKEKYLRPSPGFLFHPQMSAIENMAEKLESFSALKPEASELLQSVPSMFNFRAPPNALPENLLRKGKERYTCRYCGKIFPRSANLTRHLRTHTGEQPYRCKYCDRSFSISSNLQRHVRNIHNKEKPFKCHLCDRCFGQQTNLDRHLKKHENGNMSGTATSSPHSELESTGAILDDKEDAYFTEIRNFIGNSNHGSQSPRNVEERMNGSHFKDEKALVTSQNSDLLDDEEVEDEVLLDEEDEDNDITGKTGKEPVTSNLHEGNPEDDYEETSALEMSCKTSPVRYKEEEYKSGLSALDHIRHFTDSLKMRKMEDNQYSEAELSSFSTSHVPEELKQPLHRKSKSQAYAMMLSLSDKESLHSTSHSSSNVWHSMARAAAESSAIQSISHV

SEQ ID NO: 49648 - protein, 103 aa, Homo sapiens
  Payload ID: 9933
  Gene Symbol: MECOM
  Gene Name: MDS1 and EVI1 complex locus
  ENSP ID: ENSP00000417922
MKSEDYPHETMAPDIHEERQYRCEDCDQLFESKAELADHQKFPCSTPHSAFSMVEEDFQQKLESENDLQEIHTIQECKECDQVFPDLQSLEKHMLSHTEEREY

SEQ ID NO: 49649 - protein, 28 aa, Homo sapiens
  Payload ID: 9933
  Gene Symbol: MECOM
  Gene Name: MDS1 and EVI1 complex locus
  ENSP ID: ENSP00000418046
MKSEDYPHETMAPDIHEERQYRCEDCDQ

SEQ ID NO: 49650 - protein, 21 aa, Homo sapiens
  Payload ID: 9933
  Gene Symbol: MECOM
  Gene Name: MDS1 and EVI1 complex locus
  ENSP ID: ENSP00000418689
MKSEDYPHETMAPDIHEERQY

SEQ ID NO: 49651 - protein, 67 aa, Homo sapiens
  Payload ID: 9933
  Gene Symbol: MECOM
  Gene Name: MDS1 and EVI1 complex locus
  ENSP ID: ENSP00000418828
MKSEDYPHETMAPDIHEERQYRCEDCDQLFESKAELADHQKFPCSTPHSAFSMVEEDFQQKLESEND

SEQ ID NO: 49652 - protein, 125 aa, Homo sapiens
  Payload ID: 9933
  Gene Symbol: MECOM
  Gene Name: MDS1 and EVI1 complex locus
  ENSP ID: ENSP00000419537
MRSKGRARKLATKGPCFPFAFHHNCKFPEASPATQNYNECVYGNYPEIPLEEMPDADGVASTPSLNIQEPCSPATSSEAFTPKEGSPYKAPIYIPDDIPIPAEFELRESNMPGAGLGIWTKRKIE

SEQ ID NO: 49653 - protein, 103 aa, Homo sapiens; identical to SEQ ID NO: 49648
  Payload ID: 9933
  Gene Symbol: MECOM
  Gene Name: MDS1 and EVI1 complex locus
  ENSP ID: ENSP00000419757

SEQ ID NO: 49654 - protein, 1042 aa, Homo sapiens
  Payload ID: 9933
  Gene Symbol: MECOM
  Gene Name: MDS1 and EVI1 complex locus
  Uniprot ID: Q03112
  ENSP ID: ENSP00000419770
MKSEDYPHETMAPDIHEERQYRCEDCDQLFESKAELADHQKFPCSTPHSAFSMVEEDFQQKLESENDLQEIHTIQECKECDQVFPDLQSLEKHMLSHTEEREYKCDQCPKAFNWKSNLIRHQMSHDSGKHYECENCAKVFTDPSNLQRHIRSQHVGARAHACPECGKTFATSSGLKQHKHIHSSVKPFICEVCHKSYTQFSNLCRHKRMHADCRTQIKCKDCGQMFSTTSSLNKHRRFCEGKNHFAAGGFFGQGISLPGTPAMDKTSMVNMSHANPGLADYFGANRHPAGLTFPTAPGFSFSFPGLFPSGLYHRPPLIPASSPVKGLSSTEQTNKSQSPLMTHPQILPATQDILKALSKHPSVGDNKPVELQPERSSEERPFEKISDQSESSDLDDVSTPSGSDLETTSGSDLESDIESDKEKFKENGKMFKDKVSPLQNLASINNKKEYSNHSIFSPSLEEQTAVSGAVNDSIKAIASIAEKYFGSTGLVGLQDKKVGALPYPSMFPLPFFPAFSQSMYPFPDRDLRSLPLKMEPQSPGEVKKLQKGSSESPFDLTTKRKDEKPLTPVPSKPPVTPATSQDQPLDLSMGSRSRASGTKLTEPRKNHVFGGKKGSNVESRPASDGSLQHARPTPFFMDPIYRVEKRKLTDPLEALKEKYLRPSPGFLFHPQMSAIENMAEKLESFSALKPEASELLQSVPSMFNFRAPPNALPENLLRKGKERYTCRYCGKIFPRSANLTRHLRTHTGEQPYRCKYCDRSFSISSNLQRHVRNIHNKEKPFKCHLCDRCFGQQTNLDRHLKKHENGNMSGTATSSPHSELESTGAILDDKEDAYFTEIRNFIGNSNHGSQSPRNVEERMNGSHFKDEKALVTSQNSDLLDDEEVEDEVLLDEEDEDNDITGKTGKEPVTSNLHEGNPEDDYEETSALEMSCKTSPVRYKEEEYKSGLSALDHIRHFTDSLKMRKMEDNQYSEAELSSFSTSHVPEELKQPLHRKSKSQAYAMMLSLSDKESLHSTSHSSSNVWHSMARAAAESSAIQSISHV

SEQ ID NO: 49655 - protein, 1051 aa, Homo sapiens
  Payload ID: 9933
  Gene Symbol: MECOM
  Gene Name: MDS1 and EVI1 complex locus
  Uniprot ID: Q03112
  ENSP ID: ENSP00000419995
MKSEDYPHETMAPDIHEERQYRCEDCDQLFESKAELADHQKFPCSTPHSAFSMVEEDFQQKLESENDLQEIHTIQECKECDQVFPDLQSLEKHMLSHTEEREYKCDQCPKAFNWKSNLIRHQMSHDSGKHYECENCAKVFTDPSNLQRHIRSQHVGARAHACPECGKTFATSSGLKQHKHIHSSVKPFICEVCHKSYTQFSNLCRHKRMHADCRTQIKCKDCGQMFSTTSSLNKHRRFCEGKNHFAAGGFFGQGISLPGTPAMDKTSMVNMSHANPGLADYFGANRHPAGLTFPTAPGFSFSFPGLFPSGLYHRPPLIPASSPVKGLSSTEQTNKSQSPLMTHPQILPATQDILKALSKHPSVGDNKPVELQPERSSEERPFEKISDQSESSDLDDVSTPSGSDLETTSGSDLESDIESDKEKFKENGKMFKDKVSPLQNLASINNKKEYSNHSIFSPSLEEQTAVSGAVNDSIKAIASIAEKYFGSTGLVGLQDKKVGALPYPSMFPLPFFPAFSQSMYPFPDRDLRSLPLKMEPQSPGEVKKLQKGSSESPFDLTTKRKDEKPLTPVPSKPPVTPATSQDQPLDLSMGSRSRASGTKLTEPRKNHVFGGKKGSNVESRPASDGSLQHARPTPFFMDPIYRVEKRKLTDPLEALKEKYLRPSPGFLFHPQFQLPDQRTWMSAIENMAEKLESFSALKPEASELLQSVPSMFNFRAPPNALPENLLRKGKERYTCRYCGKIFPRSANLTRHLRTHTGEQPYRCKYCDRSFSISSNLQRHVRNIHNKEKPFKCHLCDRCFGQQTNLDRHLKKHENGNMSGTATSSPHSELESTGAILDDKEDAYFTEIRNFIGNSNHGSQSPRNVEERMNGSHFKDEKALVTSQNSDLLDDEEVEDEVLLDEEDEDNDITGKTGKEPVTSNLHEGNPEDDYEETSALEMSCKTSPVRYKEEEYKSGLSALDHIRHFTDSLKMRKMEDNQYSEAELSSFSTSHVPEELKQPLHRKSKSQAYAMMLSLSDKESLHSTSHSSSNVWHSMARAAAESSAIQSISHV

SEQ ID NO: 49656 - protein, 1052 aa, Homo sapiens; identical to SEQ ID NO: 49644
  Payload ID: 9933
  Gene Symbol: MECOM
  Gene Name: MDS1 and EVI1 complex locus
  ENSP ID: ENSP00000420048

SEQ ID NO: 49657 - protein, 103 aa, Homo sapiens; identical to SEQ ID NO: 49648
  Payload ID: 9933
  Gene Symbol: MECOM
  Gene Name: MDS1 and EVI1 complex locus
  ENSP ID: ENSP00000420072

SEQ ID NO: 49658 - protein, 1003 aa, Homo sapiens
  Payload ID: 9933
  Gene Symbol: MECOM
  Gene Name: MDS1 and EVI1 complex locus
  ENSP ID: ENSP00000420466
MKSEDYPHETMAPDIHEERQYRCEDCDQLFESKAELADHQKFPCSTPHSAFSMVEEDFQQKLESENDLQEIHTIQECKECDQVFPDLQSLEKHMLSHTEEREYKCDQCPKAFNWKSNLIRHQMSHDSGKHYECENCAKVFTDPSNLQRHIRSQHVGARAHACPECGKTFATSSGLKQHKHIHSSVKPFICEVCHKSYTQFSNLCRHKRMHADCRTQIKCKDCGQMFSTTSSLNKHRRFCEGKNHFAAGGFFGQGISLPGTPAMDKTSMVNMSHANPGLADYFGANRHPAGLTFPTAPGFSFSFPGLFPSGLYHRPPLIPASSPVKGLSSTEQTNKSQSPLMTHPQILPATQDILKALSKHPSVGDNKPVELQPERSSEERPFEKISDQSESSDLDDVSTPSGSDLETTSGSDLESDIESDKEKFKENGKMFKDKVSPLQNLASINNKKEYSNHSIFSPSLEEQTAVSGAVNDSIKAIASIAEKYFGSTGLVGLQDKKVGALPYPSMFPLPFFPAFSQSMYPFPDRDLRSLPLKMEPQSPGEVKKLQKGSSESPFDLTTKRKDEKPLTPVPSKPPVTPATSQDQPLDLSMGSRSRASGTKLTEPRKNHVFGGKKGSNVESRPASDGSLQHARPTPFFMDPIYRVEKRKLTDPLEALKEKYLRPSPGFLFHPQMSAIENMAEKLESFSALKPEASELLQSVPSMFNFRAPPNALPENLLRKGKERYTCRYCGKIFPRSANLTRHLRTHTGEQPYRCKYCDRSFSISSNLQRHVRNIHNKEKPFKCHLCDRCFGQQTNLDRHLKKHENGNMSGTATSSPHSELESTGAILDDKEDAYFTEIRNFIGNSNHGSQSPRNVEERMNGSHFKDEKALVTSQNSDLLDDEEVEDEVLLDEEDEDNDITGKTGKEPVTSNLHEGNPEDDYEETSALEMSCKTSPVRYKEEEYKSGLSALDHIRHFTDSLKMRKMEDNQYSEAELSSFSTSHVPEELKQPLHRKSKSQEESKA

SEQ ID NO: 49659 - protein, 1051 aa, Homo sapiens; identical to SEQ ID NO: 49655
  Payload ID: 9933
  Gene Symbol: MECOM
  Gene Name: MDS1 and EVI1 complex locus
  Uniprot ID: Q03112
  ENSP ID: ENSP00000486104

SEQ ID NO: 49660 - protein, 2549 aa, Homo sapiens
  Payload ID: 9934
  Gene Symbol: MTOR
  Gene Name: mechanistic target of rapamycin (serine/threonine kinase)
  Uniprot ID: P42345
  ENSP ID: ENSP00000354558
MLGTGPAAATTAATTSSNVSVLQQFASGLKSRNEETRAKAAKELQHYVTMELREMSQEESTRFYDQLNHHIFELVSSSDANERKGGILAIASLIGVEGGNATRIGRFANYLRNLLPSNDPVVMEMASKAIGRLAMAGDTFTAEYVEFEVKRALEWLGADRNEGRRHAAVLVLRELAISVPTFFFQQVQPFFDNIFVAVWDPKQAIREGAVAALRACLILTTQREPKEMQKPQWYRHTFEEAEKGFDETLAKEKGMNRDDRIHGALLILNELVRISSMEGERLREEMEEITQQQLVHDKYCKDLMGFGTKPRHITPFTSFQAVQPQQSNALVGLLGYSSHQGLMGFGTSPSPAKSTLVESRCCRDLMEEKFDQVCQWVLKCRNSKNSLIQMTILNLLPRLAAFRPSAFTDTQYLQDTMNHVLSCVKKEKERTAAFQALGLLSVAVRSEFKVYLPRVLDIIRAALPPKDFAHKRQKAMQVDATVFTCISMLARAMGPGIQQDIKELLEPMLAVGLSPALTAVLYDLSRQIPQLKKDIQDGLLKMLSLVLMHKPLRHPGMPKGLAHQLASPGLTTLPEASDVGSITLALRTLGSFEFEGHSLTQFVRHCADHFLNSEHKEIRMEAARTCSRLLTPSIHLISGHAHVVSQTAVQVVADVLSKLLVVGITDPDPDIRYCVLASLDERFDAHLAQAENLQALFVALNDQVFEIRELAICTVGRLSSMNPAFVMPFLRKMLIQILTELEHSGIGRIKEQSARMLGHLVSNAPRLIRPYMEPILKALILKLKDPDPDPNPGVINNVLATIGELAQVSGLEMRKWVDELFIIIMDMLQDSSLLAKRQVALWTLGQLVASTGYVVEPYRKYPTLLEVLLNFLKTEQNQGTRREAIRVLGLLGALDPYKHKVNIGMIDQSRDASAVSLSESKSSQDSSDYSTSEMLVNMGNLPLDEFYPAVSMVALMRIFRDQSLSHHHTMVVQAITFIFKSLGLKCVQFLPQVMPTFLNVIRVCDGAIREFLFQQLGMLVSFVKSHIRPYMDEIVTLMREFWVMNTSIQSTIILLIEQIVVALGGEFKLYLPQLIPHMLRVFMHDNSPGRIVSIKLLAAIQLFGANLDDYLHLLLPPIVKLFDAPEAPLPSRKAALETVDRLTESLDFTDYASRIIHPIVRTLDQSPELRSTAMDTLSSLVFQLGKKYQIFIPMVNKVLVRHRINHQRYDVLICRIVKGYTLADEEEDPLIYQHRMLRSGQGDALASGPVETGPMKKLHVSTINLQKAWGAARRVSKDDWLEWLRRLSLELLKDSSSPSLRSCWALAQAYNPMARDLFNAAFVSCWSELNEDQQDELIRSIELALTSQDIAEVTQTLLNLAEFMEHSDKGPLPLRDDNGIVLLGERAAKCRAYAKALHYKELEFQKGPTPAILESLISINNKLQQPEAAAGVLEYAMKHFGELEIQATWYEKLHEWEDALVAYDKKMDTNKDDPELMLGRMRCLEALGEWGQLHQQCCEKWTLVNDETQAKMARMAAAAAWGLGQWDSMEEYTCMIPRDTHDGAFYRAVLALHQDLFSLAQQCIDKARDLLDAELTAMAGESYSRAYGAMVSCHMLSELEEVIQYKLVPERREIIRQIWWERLQGCQRIVEDWQKILMVRSLVVSPHEDMRTWLKYASLCGKSGRLALAHKTLVLLLGVDPSRQLDHPLPTVHPQVTYAYMKNMWKSARKIDAFQHMQHFVQTMQQQAQHAIATEDQQHKQELHKLMARCFLKLGEWQLNLQGINESTIPKVLQYYSAATEHDRSWYKAWHAWAVMNFEAVLHYKHQNQARDEKKKLRHASGANITNATTAATTAATATTTASTEGSNSESEAESTENSPTPSPLQKKVTEDLSKTLLMYTVPAVQGFFRSISLSRGNNLQDTLRVLTLWFDYGHWPDVNEALVEGVKAIQIDTWLQVIPQLIARIDTPRPLVGRLIHQLLTDIGRYHPQALIYPLTVASKSTTTARHNAANKILKNMCEHSNTLVQQAMMVSEELIRVAILWHEMWHEGLEEASRLYFGERNVKGMFEVLEPLHAMMERGPQTLKETSFNQAYGRDLMEAQEWCRKYMKSGNVKDLTQAWDLYYHVFRRISKQLPQLTSLELQYVSPKLLMCRDLELAVPGTYDPNQPIIRIQSIAPSLQVITSKQRPRKLTLMGSNGHEFVFLLKGHEDLRQDERVMQLFGLVNTLLANDPTSLRKNLSIQRYAVIPLSTNSGLIGWVPHCDTLHALIRDYREKKKILLNIEHRIMLRMAPDYDHLTLMQKVEVFEHAVNNTAGDDLAKLLWLKSPSSEVWFDRRTNYTRSLAVMSMVGYILGLGDRHPSNLMLDRLSGKILHIDFGDCFEVAMTREKFPEKIPFRLTRMLTNAMEVTGLDGNYRITCHTVMEVLREHKDSVMAVLEAFVYDPLLNWRLMDTNTKGNKRSRTRTDSYSAGQSVEILDGVELGEPAHKKTGTTVPESIHSFIGDGLVKPEALNKKAIQIINRVRDKLTGRDFSHDDTLDVPTQVELLIKQATSHENLCQCYIGWCPFW

SEQ ID NO: 49661 - protein, 754 aa, Homo sapiens
  Payload ID: 9934
  Gene Symbol: MTOR
  Gene Name: mechanistic target of rapamycin (serine/threonine kinase)
  ENSP ID: ENSP00000366034
MNFEAVLHYKHQNQARDEKKKLRHASGANITNATTAATTAATATTTASTEGSNSESEAESTENSPTPSPLQKKVTEDLSKTLLMYTVPAVQGFFRSISLSRGNNLQDTLRVLTLWFDYGHWPDVNEALVEGVKAIQIDTWLQVIPQLIARIDTPRPLVGRLIHQLLTDIGRYHPQALIYPLTVASKSTTTARHNAANKILKNMCEHSNTLVQQAMMVSEELIRVAILWHEMWHEGLEEASRLYFGERNVKGMFEVLEPLHAMMERGPQTLKETSFNQAYGRDLMEAQEWCRKYMKSGNVKDLTQAWDLYYHVFRRISKQLPQLTSLELQYVSPKLLMCRDLELAVPGTYDPNQPIIRIQSIAPSLQVITSKQRPRKLTLMGSNGHEFVFLLKGHEDLRQDERVMQLFGLVNTLLANDPTSLRKNLSIQRYAVIPLSTNSGLIGWVPHCDTLHALIRDYREKKKILLNIEHRIMLRMAPDYDHLTLMQKVEVFEHAVNNTAGDDLAKLLWLKSPSSEVWFDRRTNYTRSLAVMSMVGYILGLGDRHPSNLMLDRLSGKILHIDFGDCFEVAMTREKFPEKIPFRLTRMLTNAMEVTGLDGNYRITCHTVMEVLREHKDSVMAVLEAFVYDPLLNWRLMDTNTKGNKRSRTRTDSYSAGQSVEILDGVELGEPAHKKTGTTVPESIHSFIGDGLVKPEALNKKAIQIINRVRDKLTGRDFSHDDTLDVPTQVELLIKQATSHENLCQCYIGWCPFW

SEQ ID NO: 49662 - protein, 161 aa, Homo sapiens
  Payload ID: 9934
  Gene Symbol: MTOR
  Gene Name: mechanistic target of rapamycin (serine/threonine kinase)
  ENSP ID: ENSP00000398745
MLDRLSGKILHIDFGDCFEVAMTREKFPEKIPFRLTRMLTNAMEVTGLDGNYRITCHTVMEVLREHKDSVMAVLEAFVYDPLLNWRLMDTNTKGNKRSRTRTDSYSAGQSVEILDGVELGEPAHKKTGTTVPESIHSFIGDGLVKPEALNKKAIQIINRVR

SEQ ID NO: 49663 - protein, 456 aa, Homo sapiens
  Payload ID: 9935
  Gene Symbol: MKS1
  Gene Name: Meckel syndrome, type 1
  ENSP ID: ENSP00000316631
MAETVWSTDTGEAVYRSRDPVRNLRLRVHLQRITSSNFLHYQPAAELGKDLIDLATFRPQPTASGHRPEEDEEEEIVIGWQEKLFSQFEVDLYQNETACQSPLDYQYRQEILKLENSGGKKNRRIFTYTDSDRYTNLEEHCQRMTTAASEVPSFLVERMANVRRRRQDRRGMEGGILKSRIVTWEPSEEFVRNNHVINTPLQTMHIMADLGPYKKLGYKKYEHVLCTLKVDSNGVITVKPDFTGLKGPYRIETEGEKQELWKYTIDNVSPHAQPEEEERERRVFKDLYGRHKEYLSSLVGTDFEMTVPGALRLFVNGEVVSAQGYEYDNLYVHFFVELPTAHWSSPAFQQLSGVTQTCTTKSLAMDKVAHFSYPFTFEAFFLHEDESSDALPEWPVLYCEVLSLDFWQRYRVEGYGAVVLPATPGPSWNRAPFRKGCGVCWTVWKGSASRVPFTMC

SEQ ID NO: 49664 - protein, 559 aa, Homo sapiens
  Payload ID: 9935
  Gene Symbol: MKS1
  Gene Name: Meckel syndrome, type 1
  Uniprot ID: Q9NXB0
  ENSP ID: ENSP00000376827
MAETVWSTDTGEAVYRSRDPVRNLRLRVHLQRITSSNFLHYQPAAELGKDLIDLATFRPQPTASGHRPEEDEEEEIVIGWQEKLFSQFEVDLYQNETACQSPLDYQYRQEILKLENSGGKKNRRIFTYTDSDRYTNLEEHCQRMTTAASEVPSFLVERMANVRRRRQDRRGMEGGILKSRIVTWEPSEEFVRNNHVINTPLQTMHIMADLGPYKKLGYKKYEHVLCTLKVDSNGVITVKPDFTGLKGPYRIETEGEKQELWKYTIDNVSPHAQPEEEERERRVFKDLYGRHKEYLSSLVGTDFEMTVPGALRLFVNGEVVSAQGYEYDNLYVHFFVELPTAHWSSPAFQQLSGVTQTCTTKSLAMDKVAHFSYPFTFEAFFLHEDESSDALPEWPVLYCEVLSLDFWQRYRVEGYGAVVLPATPGSHTLTVSTWRPVELGTVAELRRFFIGGSLELEDLSYVRIPGSFKGERLSRFGLRTETTGTVTFRLHCLQQSRAFMESSSLQKRMRSVLDRLEGFSQQSSIHNVLEAFRRARRRMQEARESLPQDLVSPSGTLVS

SEQ ID NO: 49665 - protein, 164 aa, Homo sapiens
  Payload ID: 9935
  Gene Symbol: MKS1
  Gene Name: Meckel syndrome, type 1
  ENSP ID: ENSP00000376828
MAETVWSTDTGEAVYRSRDPVRNLRLRVHLQRITSSNFLHYQPAAELGKDLIDLATFRPQPTASGHRPEEDEEEEIVIGWQEKLFSQFEVDLYQNETACQSPLDYQYRQEILKLENSGGKKNRRIFTYTDSDRYTNLEEGGRHPQVTHRHLGALRRVCQEQPRH

SEQ ID NO: 49666 - protein, 549 aa, Homo sapiens
  Payload ID: 9935
  Gene Symbol: MKS1
  Gene Name: Meckel syndrome, type 1
  Uniprot ID: Q9NXB0
  ENSP ID: ENSP00000442096
MAVPVSSFAQRTRSRFRVHLQRITSSNFLHYQPAAELGKDLIDLATFRPQPTASGHRPEEDEEEEIVIGWQEKLFSQFEVDLYQNETACQSPLDYQYRQEILKLENSGGKKNRRIFTYTDSDRYTNLEEHCQRMTTAASEVPSFLVERMANVRRRRQDRRGMEGGILKSRIVTWEPSEEFVRNNHVINTPLQTMHIMADLGPYKKLGYKKYEHVLCTLKVDSNGVITVKPDFTGLKGPYRIETEGEKQELWKYTIDNVSPHAQPEEEERERRVFKDLYGRHKEYLSSLVGTDFEMTVPGALRLFVNGEVVSAQGYEYDNLYVHFFVELPTAHWSSPAFQQLSGVTQTCTTKSLAMDKVAHFSYPFTFEAFFLHEDESSDALPEWPVLYCEVLSLDFWQRYRVEGYGAVVLPATPGSHTLTVSTWRPVELGTVAELRRFFIGGSLELEDLSYVRIPGSFKGERLSRFGLRTETTGTVTFRLHCLQQSRAFMESSSLQKRMRSVLDRLEGFSQQSSIHNVLEAFRRARRRMQEARESLPQDLVSPSGTLVS

SEQ ID NO: 49667 - protein, 121 aa, Homo sapiens
  Payload ID: 9935
  Gene Symbol: MKS1
  Gene Name: Meckel syndrome, type 1
  ENSP ID: ENSP00000462129
MAETVWSTDTGEAVYRSRDPVRNLRLRVHLQRITSSNFLHYQPAAELGKDLIDLATFRPQPTATLSENDHCSQRGAFILGRANGKCQASPAGQARDGGRHPQVTHRHLGALRRVCQEQPRH

SEQ ID NO: 49668 - protein, 117 aa, Homo sapiens
  Payload ID: 9935
  Gene Symbol: MKS1
  Gene Name: Meckel syndrome, type 1
  ENSP ID: ENSP00000462179
  MOD_RES (1)..(1): Any amino acid
XGEVVSAQGYEYDNLYVHFFVELPTAHWSSPAFQQLSGVTQTCTTKSLAMDKVAHFSYPFTFEAFFLHEDESSDALPEWPVLYCEVLSLDFWQRYRVEGYGAVVLPATPATMTWPWH

SEQ ID NO: 49669 - protein, 48 aa, Homo sapiens
  Payload ID: 9935
  Gene Symbol: MKS1
  Gene Name: Meckel syndrome, type 1
  ENSP ID: ENSP00000462411
MAETVWSTDTGEAVYRSRDPVRNLRLRWTPPRGRRRGGDCDWVAGEAL

SEQ ID NO: 49670 - protein, 146 aa, Homo sapiens
  Payload ID: 9935
  Gene Symbol: MKS1
  Gene Name: Meckel syndrome, type 1
  ENSP ID: ENSP00000462423
MAETVWSTDTGEAVYRSRDPVRNLRLRVHLQRITSSNFLHYQPAAELGKDLIDLATFRPQPTASGHRPEEDEEEEIVIGWQEKLFSQFEVDLYQNETACQSPLDYQYRQEILKLENSGGKKNRRIFTYTDSDRYTNLEEVLGSMWP

SEQ ID NO: 49671 - protein, 228 aa, Homo sapiens
  Payload ID: 9935
  Gene Symbol: MKS1
  Gene Name: Meckel syndrome, type 1
  ENSP ID: ENSP00000462460
  MOD_RES (1)..(1): Any amino acid
XILKSRIVTWEPSEEFVRNNHVINTPLQTMHIMADLGPYKKLGYKKYEHVLCTLKVDSNGVITVKPDFTGLKGPYRIETEGEKQELWKYTIDNVSPHAQPEEEERERRVFKDLYGRHKEYLSSLVGTDFEMTVPGALRLFVNGEVVSAQGYEYDNLYVHFFVELPTAHWSSPAFQQLSGVTQTCTTKSLAMITLSLATRRTDSKGGLAHPMTLLFIGQGGSLLLPIHV

SEQ ID NO: 49672 - protein, 211 aa, Homo sapiens
  Payload ID: 9935
  Gene Symbol: MKS1
  Gene Name: Meckel syndrome, type 1
  ENSP ID: ENSP00000463826
LWKYTIDNVSPHAQPEEEERERRVFKDLYGRHKEYLSSLVGTDFEMTVPGALRLFVNGEVVSAQGYEYDNLYVHFFVELPTAHWSSPAFQQLSGVTQTCTTKSLAMDKVAHFSYPFTFEAFFLHEDESSDALPEWPVLYCEVLSLDFWQRYRVEGYGAVVLPATPGNRSSLPFCGPHALGPKNKTNTRMLLVRGGDNWELEMFGLKEFLFL

SEQ ID NO: 49673 - protein, 1581 aa, Homo sapiens
  Payload ID: 9936
  Gene Symbol: MED1
  Gene Name: mediator complex subunit 1
  Uniprot ID: Q15648
  ENSP ID: ENSP00000300651
MKAQGETEESEKLSKMSSLLERLHAKFNQNRPWSETIKLVRQVMEKRVVMSSGGHQHLVSCLETLQKALKVTSLPAMTDRLESIARQNGLGSHLSASGTECYITSDMFYVEVQLDPAGQLCDVKVAHHGENPVSCPELVQQLREKNFDEFSKHLKGLVNLYNLPGDNKLKTKMYLALQSLEQDLSKMAIMYWKATNAGPLDKILHGSVGYLTPRSGGHLMNLKYYVSPSDLLDDKTASPIILHENNVSRSLGMNASVTIEGTSAVYKLPIAPLIMGSHPVDNKWTPSFSSITSANSVDLPACFFLKFPQPIPVSRAFVQKLQNCTGIPLFETQPTYAPLYELITQFELSKDPDPIPLNHNMRFYAALPGQQHCYFLNKDAPLPDGRSLQGTLVSKITFQHPGRVPLILNLIRHQVAYNTLIGSCVKRTILKEDSPGLLQFEVCPLSESRFSVSFQHPVNDSLVCVVMDVQDSTHVSCKLYKGLSDALICTDDFIAKVVQRCMSIPVTMRAIRRKAETIQADTPALSLIAETVEDMVKKNLPPASSPGYGMTTGNNPMSGTTTPTNTFPGGPITTLFNMSMSIKDRHESVGHGEDFSKVSQNPILTSLLQITGNGGSTIGSSPTPPHHTPPPVSSMAGNTKNHPMLMNLLKDNPAQDFSTLYGSSPLERQNSSSGSPRMEICSGSNKTKKKKSSRLPPEKPKHQTEDDFQRELFSMDVDSQNPIFDVNMTADTLDTPHITPAPSQCSTPPTTYPQPVPHPQPSIQRMVRLSSSDSIGPDVTDILSDIAEEASKLPSTSDDCPAIGTPLRDSSSSGHSQSTLFDSDVFQTNNNENPYTDPADLIADAAGSPSSDSPTNHFFHDGVDFNPDLLNSQSQSGFGEEYFDESSQSGDNDDFKGFASQALNTLGVPMLGGDNGETKFKGNNQADTVDFSIISVAGKALAPADLMEHHSGSQGPLLTTGDLGKEKTQKRVKEGNGTSNSTLSGPGLDSKPGKRSRTPSNDGKSKDKPPKRKKADTEGKSPSHSSSNRPFTPPTSTGGSKSPGSAGRSQTPPGVATPPIPKITIQIPKGTVMVGKPSSHSQYTSSGSVSSSGSKSHHSHSSSSSSSASTSGKMKSSKSEGSSSSKLSSSMYSSQGSSGSSQSKNSSQSGGKPGSSPITKHGLSSGSSSTKMKPQGKPSSLMNPSLSKPNISPSHSRPPGGSDKLASPMKPVPGTPPSSKAKSPISSGSGGSHMSGTSSSSGMKSSSGLGSSGSLSQKTPPSSNSCTASSSSFSSSGSSMSSSQNQHGSSKGKSPSRNKKPSLTAVIDKLKHGVVTSGPGGEDPLDGQMGVSTNSSSHPMSSKHNMSGGEFQGKREKSDKDKSKVSTSGSSVDSSKKTSESKNVGSTGVAKIIISKHDGGSPSIKAKVTLQKPGESSGEGLRPQMASSKNYGSPLISGSTPKHERGSPSHSKSPAYTPQNLDSESESGSSIAEKSYQNSPSSDDGIRPLPEYSTEKHKKHKKEKKKVKDKDRDRDRDKDRDKKKSHSIKPESWSKSPISSDQSLSMTSNTILSADRPSRLSPDFMIGEEDDDLMDVALIGN

SEQ ID NO: 49674 - protein, 556 aa, Homo sapiens
  Payload ID: 9936
  Gene Symbol: MED1
  Gene Name: mediator complex subunit 1
  Uniprot ID: Q15648
  ENSP ID: ENSP00000377828
MKAQGETEESEKLSKMSSLLERLHAKFNQNRPWSETIKLVRQVMEKRVVMSSGGHQHLVSCLETLQKALKVTSLPAMTDRLESIARQNGLGSHLSASGTECYITSDMFYVEVQLDPAGQLCDVKVAHHGENPVSCPELVQQLREKNFDEFSKHLKGLVNLYNLPGDNKLKTKMYLALQSLEQDLSKMAIMYWKATNAGPLDKILHGSVGYLTPRSGGHLMNLKYYVSPSDLLDDKTASPIILHENNVSRSLGMNASVTIEGTSAVYKLPIAPLIMGSHPVDNKWTPSFSSITSANSVDLPACFFLKFPQPIPVSRAFVQKLQNCTGIPLFETQPTYAPLYELITQFELSKDPDPIPLNHNMRFYAALPGQQHCYFLNKDAPLPDGRSLQGTLVSKITFQHPGRVPLILNLIRHQVAYNTLIGSCVKRTILKEDSPGLLQFEVCPLSESRFSVSFQHPVNDSLVCVVMDVQDSTHVSCKLYKGLSDALICTDDFIAKVVQRCMSIPVTMRAIRRKAETIQADTPALSLIAETVEDMVKKNLPPASSPGSKNPELGSG

SEQ ID NO: 49675 - protein, 79 aa, Homo sapiens
  Payload ID: 9936
  Gene Symbol: MED1
  Gene Name: mediator complex subunit 1
  ENSP ID: ENSP00000462441
MKAQGETEESEKLSKMSSLLERLHAKFNQNRPWSETIKLVRQVMFCRFRNLILLVHQDFIEFSWLGVVVHICNPSTLGG

SEQ ID NO: 49676 - protein, 97 aa, Homo sapiens
  Payload ID: 9936
  Gene Symbol: MED1
  Gene Name: mediator complex subunit 1
  ENSP ID: ENSP00000463307
MKAQGETEESEKLSKMSSLLERLHAKFNQNRPWSETIKLVRQVMEKRVVMSSGGHQHLVSCLETLQKALKVTSLPAMTDRLESIARQNGAVRSLYSS

SEQ ID NO: 49677 - protein, 135 aa, Homo sapiens
  Payload ID: 9937
  Gene Symbol: MED10
  Gene Name: mediator complex subunit 10
  Uniprot ID: Q9BTT4
  ENSP ID: ENSP00000255764
MAEKFDHLEEHLEKFVENIRQLGIIVSDFQPSSQAGLNQKLNFIVTGLQDIDKCRQQLHDITVPLEVFEYIDQGRNPQLYTKECLERALAKNEQVKGKIDTMKKFKSLLIQELSKVFPEDMAKYRSIRGEDHPPS

SEQ ID NO: 49678 - protein, 117 aa, Homo sapiens
  Payload ID: 9938
  Gene Symbol: MED11
  Gene Name: mediator complex subunit 11
  Uniprot ID: Q9P086
  ENSP ID: ENSP00000293777
MATYSLANERLRALEDIEREIGAILQNAGTVILELSKEKTNERLLDRQAAAFTASVQHVEAELSAQIRYLTQVATGQPHEGSSYSSRKDCQMALKRVDYARLKLSDVARTCEQMLEN

SEQ ID NO: 49679 - protein, 93 aa, Homo sapiens
  Payload ID: 9938
  Gene Symbol: MED11
  Gene Name: mediator complex subunit 11
  ENSP ID: ENSP00000459834
MATYSLANERLRALEDIEREIGAILQNAGTVILELSKEKTNERLLDRQAAAFTASVQHVEAELSAQIRYLTQVGVSGGFCERTPALGQSLRLG

SEQ ID NO: 49680 - protein, 85 aa, Homo sapiens
  Payload ID: 9938
  Gene Symbol: MED11
  Gene Name: mediator complex subunit 11
  ENSP ID: ENSP00000460400
MATYSLANERLRALEDIEREIGAILQNAGTVILELSKEKTNERLLDRQAAAFTASVQHVEAELSAQIRYLTQLPDGLTNSNSGKK

SEQ ID NO: 49681 - protein, 2027 aa, Homo sapiens [sequence omitted]

SEQ ID NO: 49682 - protein, 2177 aa, Homo sapiens
  Payload ID: 9939
  Gene Symbol: MED12
  Gene Name: mediator complex subunit 12
  Uniprot ID: Q93074
  ENSP ID: ENSP00000363193
MAAFGILSYEHRPLKRPRLGPPDVYPQDPKQKEDELTALNVKQGFNNQPAVSGDEHGSAKNVSFNPAKISSNFSSIIAEKLRCNTLPDTGRRKPQVNQKDNFWLVTARSQSAINTWFTDLAGTKPLTQLAKKVPIFSKKEEVFGYLAKYTVPVMRAAWLIKMTCAYYAAISETKVKKRHVDPFMEWTQIITKYLWEQLQKMAEYYRPGPAGSGGCGSTIGPLPHDVEVAIRQWDYTEKLAMFMFQDGMLDRHEFLTWVLECFEKIRPGEDELLKLLLPLLLRYSGEFVQSAYLSRRLAYFCTRRLALQLDGVSSHSSHVISAQSTSTLPTTPAPQPPTSSTPSTPFSDLLMCPQHRPLVFGLSCILQTILLCCPSALVWHYSLTDSRIKTGSPLDHLPIAPSNLPMPEGNSAFTQQVRAKLREIEQQIKERGQAVEVRWSFDKCQEATAGFTIGRVLHTLEVLDSHSFERSDFSNSLDSLCNRIFGLGPSKDGHEISSDDDAVVSLLCEWAVSCKRSGRHRAMVVAKLLEKRQAEIEAERCGESEAADEKGSIASGSLSAPSAPIFQDVLLQFLDTQAPMLTDPRSESERVEFFNLVLLFCELIRHDVFSHNMYTCTLISRGDLAFGAPGPRPPSPFDDPADDPEHKEAEGSSSSKLEDPGLSESMDIDPSSSVLFEDMEKPDFSLFSPTMPCEGKGSPSPEKPDVEKEVKPPPKEKIEGTLGVLYDQPRHVQYATHFPIPQEESCSHECNQRLVVLFGVGKQRDDARHAIKKITKDILKVLNRKGTAETDQLAPIVPLNPGDLTFLGGEDGQKRRRNRPEAFPTAEDIFAKFQHLSHYDQHQVTAQVSRNVLEQITSFALGMSYHLPLVQHVQFIFDLMEYSLSISGLIDFAIQLLNELSVVEAELLLKSSDLVGSYTTSLCLCIVAVLRHYHACLILNQDQMAQVFEGLCGVVKHGMNRSDGSSAERCILAYLYDLYTSCSHLKNKFGELFSDFCSKVKNTIYCNVEPSESNMRWAPEFMIDTLENPAAHTFTYTGLGKSLSENPANRYSFVCNALMHVCVGHHDPDRVNDIAILCAELTGYCKSLSAEWLGVLKALCCSSNNGTCGFNDLLCNVDVSDLSFHDSLATFVAILIARQCLLLEDLIRCAAIPSLLNAACSEQDSEPGARLTCRILLHLFKTPQLNPCQSDGNKPTVGIRSSCDRHLLAASQNRIVDGAVFAVLKAVFVLGDAELKGSGFTVTGGTEELPEEEGGGGSGGRRQGGRNISVETASLDVYAKYVLRSICQQEWVGERCLKSLCEDSNDLQDPVLSSAQAQRLMQLICYPHRLLDNEDGENPQRQRIKRILQNLDQWTMRQSSLELQLMIKQTPNNEMNSLLENIAKATIEVFQQSAETGSSSGSTASNMPSSSKTKPVLSSLERSGVWLVAPLIAKLPTSVQGHVLKAAGEELEKGQHLGSSSRKERDRQKQKSMSLLSQQPFLSLVLTCLKGQDEQREGLLTSLYSQVHQIVNNWRDDQYLDDCKPKQLMHEALKLRLNLVGGMFDTVQRSTQQTTEWAMLLLEIIISGTVDMQSNNELFTTVLDMLSVLINGTLAADMSSISQGSMEENKRAYMNLAKKLQKELGERQSDSLEKVRQLLPLPKQTRDVITCEPQGSLIDTKGNKIAGFDSIFKKEGLQVSTKQKISPWDLFEGLKPSAPLSWGWFGTVRVDRRVARGEEQQRLLLYHTHLRPRPRAYYLEPLPLPPEDEEPPAPTLLEPEKKAPEPPKTDKPGAAPPSTEERKKKSTKGKKRSQPATKTEDYGMGPGRSGPYGVTVPPDLLHHPNPGSITHLNYRQGSIGLYTQNQPLPAGGPRVDPYRPVRLPMQKLPTRPTYPGVLPTTMTGVMGLEPSSYKTSVYRQQQPAVPQGQRLRQQLQQSQGMLGQSSVHQMTPSSSYGLQTSQGYTPYVSHVGLQQHTGPAGTMVPPSYSSQPYQSTHPSTNPTLVDPTRHLQQRPSGYVHQQAPTYGHGLTSTQRFSHQTLQQTPMISTMTPMSAQGVQAGVRSTAILPEQQQQQQQQQQQQQQQQQQQQQQQQQQYHIRQQQQQQILRQQQQQQQQQQQQQQQQQQQQQQQQQQHQQQQQQQAAPPQPQPQSQPQFQRQGLQQTQQQQQTAALVRQLQQQLSNTQPQPSTNIFGRY

SEQ ID NO: 49683 - protein, 2176 aa, Homo sapiens
  Payload ID: 9939
  Gene Symbol: MED12
  Gene Name: mediator complex subunit 12
  Uniprot ID: Q93074
  ENSP ID: ENSP00000363215
MAAFGILSYEHRPLKRPRLGPPDVYPQDPKQKEDELTALNVKQGFNNQPAVSGDEHGSAKNVSFNPAKISSNFSSIIAEKLRCNTLPDTGRRKPQVNQKDNFWLVTARSQSAINTWFTDLAGTKPLTQLAKKVPIFSKKEEVFGYLAKYTVPVMRAAWLIKMTCAYYAAISETKVKKRHVDPFMEWTQIITKYLWEQLQKMAEYYRPGPAGSGGCGSTIGPLPHDVEVAIRQWDYTEKLAMFMFQDGMLDRHEFLTWVLECFEKIRPGEDELLKLLLPLLLRYSGEFVQSAYLSRRLAYFCTRRLALQLDGVSSHSSHVISAQSTSTLPTTPAPQPPTSSTPSTPFSDLLMCPQHRPLVFGLSCILQTILLCCPSALVWHYSLTDSRIKTGSPLDHLPIAPSNLPMPEGNSAFTQQVRAKLREIEQQIKERGQAVEVRWSFDKCQEATAGFTIGRVLHTLEVLDSHSFERSDFSNSLDSLCNRIFGLGPSKDGHEISSDDDAVVSLLCEWAVSCKRSGRHRAMVVAKLLEKRQAEIEAERCGESEAADEKGSIASGSLSAPSAPIFQDVLLQFLDTQAPMLTDPRSESERVEFFNLVLLFCELIRHDVFSHNMYTCTLISRGDLAFGAPGPRPPSPFDDPADDPEHKEAEGSSSSKLEDPGLSESMDIDPSSSVLFEDMEKPDFSLFSPTMPCEGKGSPSPEKPDVEKEVKPPPKEKIEGTLGVLYDQPRHVQYATHFPIPQEESCSHECNQRLVVLFGVGKQRDDARHAIKKITKDILKVLNRKGTAETDQLAPIVPLNPGDLTFLGGEDGQKRRRNRPEAFPTAEDIFAKFQHLSHYDQHQVTAQVSRNVLEQITSFALGMSYHLPLVQHVQFIFDLMEYSLSISGLIDFAIQLLNELSVVEAELLLKSSDLVGSYTTSLCLCIVAVLRHYHACLILNQDQMAQVFEGLCGVVKHGMNRSDGSSAERCILAYLYDLYTSCSHLKNKFGELFSDFCSKVKNTIYCNVEPSESNMRWAPEFMIDTLENPAAHTFTYTGLGKSLSENPANRYSFVCNALMHVCVGHHDPDRVNDIAILCAELTGYCKSLSAEWLGVLKALCCSSNNGTCGFNDLLCNVDVSDLSFHDSLATFVAILIARQCLLLEDLIRCAAIPSLLNAACSEQDSEPGARLTCRILLHLFKTPQLNPCQSDGNKPTVGIRSSCDRHLLAASQNRIVDGAVFAVLKAVFVLGDAELKGSGFTVTGGTEELPEEEGGGGSGGRRQGGRNISVETASLDVYAKYVLRSICQQEWVGERCLKSLCEDSNDLQDPVLSSAQAQRLMQLICYPHRLLDNEDGENPQRQRIKRILQNLDQWTMRQSSLELQLMIKQTPNNEMNSLLENIAKATIEVFQQSAETGSSSGSTASNMPSSSKTKPVLSSLERSGVWLVAPLIAKLPTSVQGHVLKAAGEELEKGQHLGSSSRKERDRQKQKSMSLLSQQPFLSLVLTCLKGQDEQREGLLTSLYSQVHQIVNNWRDDQYLDDCKPKQLMHEALKLRLNLVGGMFDTVQRSTQQTTEWAMLLLEIIISGTVDMQSNNELFTTVLDMLSVLINGTLAADMSSISQGSMEENKRAYMNLAKKLQKELGERQSDSLEKVRQLLPLPKQTRDVITCEPQGSLIDTKGNKIAGFDSIFKKEGLQVSTKQKISPWDLFEGLKPSAPLSWGWFGTVRVDRRVARGEEQQRLLLYHTHLRPRPRAYYLEPLPLPPEDEEPPAPTLLEPEKKAPEPPKTDKPGAAPPSTEERKKKSTKGKKRSQPATKTEDYGMGPGRSGPYGVTVPPDLLHHPNPGSITHLNYRQGSIGLYTQNQPLPAGGPRVDPYRPVRLPMQKLPTRPTYPGVLPTTMTGVMGLEPSSYKTSVYRQQQPAVPQGQRLRQQLQSQGMLGQSSVHQMTPSSSYGLQTSQGYTPYVSHVGLQQHTGPAGTMVPPSYSSQPYQSTHPSTNPTLVDPTRHLQQRPSGYVHQQAPTYGHGLTSTQRFSHQTLQQTPMISTMTPMSAQGVQAGVRSTAILPEQQQQQQQQQQQQQQQQQQQQQQQQQQYHIRQQQQQQILRQQQQQQQQQQQQQQQQQQQQQQQQQQHQQQQQQQAAPPQPQPQSQPQFQRQGLQQTQQQQQTAALVRQLQQQLSNTQPQPSTNIFGRY

SEQ ID NO: 49684 - protein, 130 aa, Homo sapiens
  Payload ID: 9939
  Gene Symbol: MED12
  Gene Name: mediator complex subunit 12
  ENSP ID: ENSP00000399084
  MOD_RES (1)..(1): Any amino acid
XTPNRRRKKQLNAAFLPQDELTALNVKQGFNNQPAVSGDEHGSAKNVSFNPAKISSNFSSIIAEKLRCNTLPDTGRRKPQVNQKDNFWLVTARSQSAINTWFTDLAGTKPLTQLAKKVPIFSKKEEVFGY

SEQ ID NO: 49685 - protein, 251 aa, Homo sapiens
  Payload ID: 9939
  Gene Symbol: MED12
  Gene Name: mediator complex subunit 12
  ENSP ID: ENSP00000404373
  MOD_RES (1)..(1): Any amino acid
XERKKKSTKGKKRSQPATKTEDYGMGPGRSGPYGVTVPPDLLHHPNPGSITHLNYRQGSIGLYTQNQPLPAGGPRVDPYRPVRLPMQKLPTRPTYPGVLPTTMTGVMGLEPSSYKTSVYRQQQPAVPQGQRLRQQLQQSQGMLGQSSVHQMTPSSSYGLQTSQGYTPYVSHVGLQQHTGPADPTRHLQQRPSGYVHQQAPTYGHGLTSTQRFSHQTLQQTPMISTMTPMSAQGVQAGVRSTAILPEQQQQQ

SEQ ID NO: 49686 - protein, 1809 aa, Homo sapiens
  Payload ID: 9940
  Gene Symbol: MED12L
  Gene Name: mediator complex subunit 12-like
  ENSP ID: ENSP00000273432
MAAFGLLSYEQRPLKRPRLGPPDVYPQDPKQKEDELTAVNVKQGFNNQPAFTGDEHGSARNIVINPSKIGAYFSSILAEKLKLNTFQDTGKKKPQVNAKDNYWLVTARSQSAIHSWFSDLAGNKPLSILAKKVPILSKKEDVFAYLAKYSVPMVRATWLIKMTCAYYSAISEAKIKKRQAPDPNLEWTQISTRYLREQLAKISDFYHMASSTGDGPVPVPPEVEQAMKQWEYNEKLAFHMFQEGMLEKHEYLTWILDVLEKIRPMDDDLLKLLLPLMLQVRARIYEVEQQIKQRGRAVEVRWSFDKCQESTAGVTISRVLHTLEVLDRHCFDRTDSSNSMETLYHKIFWANQNKDNQEVAPNDEAVVTLLCEWAVSCKRSGKHRAMAVAKLLEKRQAEIEAERCGESEVLDEKESISSSSLAGSSLPVFQNVLLRFLDTQAPSLSDPNSECEKVEFVNLVLLFCEFIRHDVFSHDAYMCTLISRGDLSVTASTRPRSPVGENADEHYSKDHDVKMEIFSPMPGESCENANTSLGRRMSVNCEKLVKREKPRELIFPSNYDLLRHLQYATHFPIPLDESSSHECNQRTILLYGVGKERDEARHQLKKITKDILKILNKKSTTETGVGDEGQKARKNKQETFPTLETVFTKLQLLSYFDQHQVTSQISNNVLEQITSFASGTSYHLPLAHHIQLIFDLMEPALNINGLIDFAIQLLNELSVVEAELLLKSSSLAGSYTTGLCVCIVAVLRRYHSCLILNPDQTAQVFEGLCGVVKHVVNPSECSSPERCILAYLYDLYVSCSHLRSKFGDLFSSACSKVKQTIYNNVMPANSNLRWDPDFMMDFIENPSARSINYSMLGKILSDNAANRYSFVCNTLMNVCMGHQDAGRINDIANFSSELTACCTVLSSEWLGVLKALCCSSNHVWGFNDVLCTVDVSDLSFHDSLATFIAILIARQCFSLEDVVQHVALPSLLAAACGDADAEPGARMTCRLLLHLFRAPQACFLPQATGKPFPGIRSSCDRHLLAAAHNSIEVGAVFAVLKAIMMLGDAKIGNNSVSSLKNDDFTMRGLRCDGNADDIWTASQNPKSCGKSISIETANLREYARYVLRTICQQEWVGEHCLKEPERLCTDKELILDPVLSNMQAQKLLQLICYPHGIKECTEGDNLQRQHIKRILQNLEQWTLRQSWLELQLMIKQCLKDPGSGSVAEMNNLLDNIAKATIEVFQQSADLNNSSNSGMSLFNPNSIGSADTSSTRQNGIKTFLSSSERRGVWLVAPLIARLPTSVQGRVLKAAGEELEKGQHLGSSSKKERDRQKQKSMSLLSQQPFLSLVLTCLKGQDEQREGLLTSLQNQVNQILSNWREERYQDDIKARQMMHEALQLRLNLVGGMFDTVQRSTQWTTDWALLLLQIITSGTVDMHTNNELFTTVLDMLGVLINGTLASDLSNASPGGSEENKRAYMNLVKKLKKELGDKRSESIDKVRQLLPLPKQTCDVITCEPMGSLIDTKGNKIAGFDSIDKKQGLQVSTKQKVSPWDLFEGQKNPAPLSWAWFGTVRVDRRVIKYEEQHHLLLYHTHPMPKPRSYYLQPLPLPPEEEEEEPTSPVSQEPERKSAELSDQGKTTTDEEKKTKGRKRKTKSSSRVDEYPQSNIYRVPPNYSPISSQMMHHPQSTLWGYNLVGQPQQPGFFLQNQSLTPGGSRLDPAGSFVPTNTKQALSNMLQRRSGAMMQPPSLHAITSQQQLIQMKLLQQQQQQRLLRQAQTRPFQQFPRQGLQQTQQQQQTAALVRQLQKQLSSNQPQQGVTPYGHPSHF

SEQ ID NO: 49687 - protein, 756 aa, Homo sapiens
  Payload ID: 9940
  Gene Symbol: MED12L
  Gene Name: mediator complex subunit 12-like
  Uniprot ID: Q86YW9
  ENSP ID: ENSP00000310760
MAAFGLLSYEQRPLKRPRLGPPDVYPQDPKQKEDELTAVNVKQGFNNQPAFTGDEHGSARNIVINPSKIGAYFSSILAEKLKLNTFQDTGKKKPQVNAKDNYWLVTARSQSAIHSWFSDLAGNKPLSILAKKVPILSKKEDVFAYLAKYSVPMVRATWLIKMTCAYYSAISEAKIKKRQAPDPNLEWTQISTRYLREQLAKISDFYHMASSTGDGPVPVPPEVEQAMKQWEYNEKLAFHMFQEGMLEKHEYLTWILDVLEKIRPMDDDLLKLLLPLMLQYSDEFVQSAYLSRRLAYFCARRLSLLLSDSPNLLAAHSPHMMIGPNNSSIGAPSPGPPGPGMSPVQLAFSDFLSCAQHGPLVYGLSCMLQTVTLCCPSALVWNYSTNENKSANPGSPLDLLQVAPSSLPMPGGNTAFNQQVRARIYEVEQQIKQRGRAVEVRWSFDKCQESTAGVTISRVLHTLEVLDRHCFDRTDSSNSMETLYHKIFWANQNKDNQEVAPNDEAVVTLLCEWAVSCKRSGKHRAMAVAKLLEKRQAEIEAERCGESEVLDEKESISSSSLAGSSLPVFQNVLLRFLDTQAPSLSDPNSECEKVEFVNLVLLFCEFIRHDVFSHDAYMCTLISRGDLSVTASTRPRSPVGENADEHYSKDHDVKMEEQSIMAHMGIDSGTTNIFDEVDKSDFKTDFGSEFPIFSPMPGESCENANTSLGRRMSVNCEKLVKREKPRELIFPSNYDLLRHLQYATHFPIPLVSHCFS

SEQ ID NO: 49688 - protein, 721 aa, Homo sapiens
  Payload ID: 9940
  Gene Symbol: MED12L
  Gene Name: mediator complex subunit 12-like
  Uniprot ID: Q86YW9
  ENSP ID: ENSP00000403308
MAAFGLLSYEQRPLKRPRLGPPDVYPQDPKQKEDELTAVNVKQGFNNQPAFTGDEHGSARNIVINPSKIGAYFSSILAEKLKLNTFQDTGKKKPQVNAKDNYWLVTARSQSAIHSWFSDLAGNKPLSILAKKVPILSKKEDVFAYLAKYSVPMVRATWLIKMTCAYYSAISEAKIKKRQAPDPNLEWTQISTRYLREQLAKISDFYHMASSTGDGPVPVPPEVEQAMKQWEYNEKLAFHMFQEGMLEKHEYLTWILDVLEKIRPMDDDLLKLLLPLMLQYSDEFVQSAYLSRRLAYFCARRLSLLLSDSPNLLAAHSPHMMIGPNNSSIGAPSPGPPGPGMSPVQLAFSDFLSCAQHGPLVYGLSCMLQTVTLCCPSALVWNYSTNENKSANPGSPLDLLQVAPSSLPMPGGNTAFNQQVRARIYEVEQQIKQRGRAVEVRWSFDKCQESTAGVTISRVLHTLEVLDRHCFDRTDSSNSMETLYHKIFWANQNKDNQEVAPNDEAVVTLLCEWAVSCKRSGKHRAMAVAKLLEKRQAEIEAERCGESEVLDEKESISSSSLAGSSLPVFQNVLLRFLDTQAPSLSDPNSECEKVEFVNLVLLFCEFIRHDVFSHDAYMCTLISRGDLSVTASTRPRSPVGENADEHYSKDHDVKMEIFSPMPGESCENANTSLGRRMSVNCEKLVKREKPRELIFPSNYDLLRHLQYATHFPIPLVSHCFS

SEQ ID NO: 49689 - protein, 2145 aa, Homo sapiens
  Payload ID: 9940
  Gene Symbol: MED12L
  Gene Name: mediator complex subunit 12-like
  Uniprot ID: Q86YW9
  ENSP ID: ENSP00000417235
MAAFGLLSYEQRPLKRPRLGPPDVYPQDPKQKEDELTAVNVKQGFNNQPAFTGDEHGSARNIVINPSKIGAYFSSILAEKLKLNTFQDTGKKKPQVNAKDNYWLVTARSQSAIHSWFSDLAGNKPLSILAKKVPILSKKEDVFAYLAKYSVPMVRATWLIKMTCAYYSAISEAKIKKRQAPDPNLEWTQISTRYLREQLAKISDFYHMASSTGDGPVPVPPEVEQAMKQWEYNEKLAFHMFQEGMLEKHEYLTWILDVLEKIRPMDDDLLKLLLPLMLQYSDEFVQSAYLSRRLAYFCARRLSLLLSDSPNLLAAHSPHMMIGPNNSSIGAPSPGPPGPGMSPVQLAFSDFLSCAQHGPLVYGLSCMLQTVTLCCPSALVWNYSTNENKSANPGSPLDLLQVAPSSLPMPGGNTAFNQQVRARIYEVEQQIKQRGRAVEVRWSFDKCQESTAGVTISRVLHTLEVLDRHCFDRTDSSNSMETLYHKIFWANQNKDNQEVAPNDEAVVTLLCEWAVSCKRSGKHRAMAVAKLLEKRQAEIEAERCGESEVLDEKESISSSSLAGSSLPVFQNVLLRFLDTQAPSLSDPNSECEKVEFVNLVLLFCEFIRHDVFSHDAYMCTLISRGDLSVTASTRPRSPVGENADEHYSKDHDVKMEIFSPMPGESCENANTSLGRRMSVNCEKLVKREKPRELIFPSNYDLLRHLQYATHFPIPLDESSSHECNQRTILLYGVGKERDEARHQLKKITKDILKILNKKSTTETGVGDEGQKARKNKQETFPTLETVFTKLQLLSYFDQHQVTSQISNNVLEQITSFASGTSYHLPLAHHIQLIFDLMEPALNINGLIDFAIQLLNELSVVEAELLLKSSSLAGSYTTGLCVCIVAVLRRYHSCLILNPDQTAQVFEGLCGVVKHVVNPSECSSPERCILAYLYDLYVSCSHLRSKFGDLFSSACSKVKQTIYNNVMPANSNLRWDPDFMMDFIENPSARSINYSMLGKILSDNAANRYSFVCNTLMNVCMGHQDAGRINDIANFSSELTACCTVLSSEWLGVLKALCCSSNHVWGFNDVLCTVDVSDLSFHDSLATFIAILIARQCFSLEDVVQHVALPSLLAAACGDADAEPGARMTCRLLLHLFRAPQACFLPQATGKPFPGIRSSCDRHLLAAAHNSIEVGAVFAVLKAIMMLGDAKIGNNSVSSLKNDDFTMRGLRCDGNADDIWTASQNPKSCGKSISIETANLREYARYVLRTICQQEWVGEHCLKEPERLCTDKELILDPVLSNMQAQKLLQLICYPHGIKECTEGDNLQRQHIKRILQNLEQWTLRQSWLELQLMIKQCLKDPGSGSVAEMNNLLDNIAKATIEVFQQSADLNNSSNSGMSLFNPNSIGSADTSSTRQNGIKTFLSSSERRGVWLVAPLIARLPTSVQGRVLKAAGEELEKGQHLGSSSKKERDRQKQKSMSLLSQQPFLSLVLTCLKGQDEQREGLLTSLQNQVNQILSNWREERYQDDIKARQMMHEALQLRLNLVGGMFDTVQRSTQWTTDWALLLLQIITSGTVDMHTNNELFTTVLDMLGVLINGTLASDLSNASPGGSEENKRAYMNLVKKLKKELGDKRSESIDKVRQLLPLPKQTCDVITCEPMGSLIDTKGNKIAGFDSIDKKQGLQVSTKQKVSPWDLFEGQKNPAPLSWAWFGTVRVDRRVIKYEEQHHLLLYHTHPMPKPRSYYLQPLPLPPEEEEEEPTSPVSQEPERKSAELSDQGKTTTDEEKKTKGRKRKTKSSSRVDEYPQSNIYRVPPNYSPISSQMMHHPQSTLWGYNLVGQPQQPGFFLQNQSLTPGGSRLDPAGSFVPTNTKQALSNMLQRRSGAMMQPPSLHAITSQQQLIQMKLLQQQQQQRLLRQAQTRPFQQGQPGDQAALFAAQARPSPQLPQYPGLQQAQTMPQGYTMYGTQMPLQQTSQQQAGSVVLSPSYNSRAYPAAHSNPVLMERLRQIQQQPSGYVQQQASPYLQPLTGSQRLNHQALQQSPLVGGGIDAVLTSAHPNLPSVPLPQDPMRPRQPQVRQQQRLLQMQQPQQPQPQQPPQPQQSSQSQSQTLGLQAMQPQQPLFPRQGLQQTQQQQQTAALVRQLQKQLSSNQPQQGVTPYGHPSHF

SEQ ID NO: 49690 - protein, 74 aa, Homo sapiens
  Payload ID: 9940
  Gene Symbol: MED12L
  Gene Name: mediator complex subunit 12-like
  ENSP ID: ENSP00000417420
  MOD_RES (1)..(1): Any amino acid
XDVKMEIFSPMPGESCENANTSLGRRMSVNCEKLVKREKPRELIFPSNYDLLRHLQYATHFPIPLVLMSVPPSV

SEQ ID NO: 49691 - protein, 2174 aa, Homo sapiens
  Payload ID: 9941
  Gene Symbol: MED13
  Gene Name: mediator complex subunit 13
  Uniprot ID: Q9UHV7
  ENSP ID: ENSP00000380888
MSASFVPNGASLEDCHCNLFCLADLTGIKWKKYVWQGPTSAPILFPVTEEDPILSSFSRCLKADVLGVWRRDQRPGRRELWIFWWGEDPSFADLIHHDLSEEEDGVWENGLSYECRTLLFKAVHNLLERCLMNRNFVRIGKWFVKPYEKDEKPINKSEHLSCSFTFFLHGDSNVCTSVEINQHQPVYLLSEEHITLAQQSNSPFQVILCPFGLNGTLTGQAFKMSDSATKKLIGEWKQFYPISCCLKEMSEEKQEDMDWEDDSLAAVEVLVAGVRMIYPACFVLVPQSDIPTPSPVGSTHCSSSCLGVHQVPASTRDPAMSSVTLTPPTSPEEVQTVDPQSVQKWVKFSSVSDGFNSDSTSHHGGKIPRKLANHVVDRVWQECNMNRAQNKRKYSASSGGLCEEATAAKVASWDFVEATQRTNCSCLRHKNLKSRNAGQQGQAPSLGQQQQILPKHKTNEKQEKSEKPQKRPLTPFHHRVSVSDDVGMDADSASQRLVISAPDSQVRFSNIRTNDVAKTPQMHGTEMANSPQPPPLSPHPCDVVDEGVTKTPSTPQSQHFYQMPTPDPLVPSKPMEDRIDSLSQSFPPQYQEAVEPTVYVGTAVNLEEDEANIAWKYYKFPKKKDVEFLPPQLPSDKFKDDPVGPFGQESVTSVTELMVQCKKPLKVSDELVQQYQIKNQCLSAIASDAEQEPKIDPYAFVEGDEEFLFPDKKDRQNSEREAGKKHKVEDGTSSVTVLSHEEDAMSLFSPSIKQDAPRPTSHARPPSTSLIYDSDLAVSYTDLDNLFNSDEDELTPGSKKSANGSDDKASCKESKTGNLDPLSCISTADLHKMYPTPPSLEQHIMGFSPMNMNNKEYGSMDTTPGGTVLEGNSSSIGAQFKIEVDEGFCSPKPSEIKDFSYVYKPENCQILVGCSMFAPLKTLPSQYLPPIKLPEECIYRQSWTVGKLELLSSGPSMPFIKEGDGSNMDQEYGTAYTPQTHTSFGMPPSSAPPSNSGAGILPSPSTPRFPTPRTPRTPRTPRGAGGPASAQGSVKYENSDLYSPASTPSTCRPLNSVEPATVPSIPEAHSLYVNLILSESVMNLFKDCNFDSCCICVCNMNIKGADVGVYIPDPTQEAQYRCTCGFSAVMNRKFGNNSGLFLEDELDIIGRNTDCGKEAEKRFEALRATSAEHVNGGLKESEKLSDDLILLLQDQCTNLFSPFGAADQDPFPKSGVISNWVRVEERDCCNDCYLALEHGRQFMDNMSGGKVDEALVKSSCLHPWSKRNDVSMQCSQDILRMLLSLQPVLQDAIQKKRTVRPWGVQGPLTWQQFHKMAGRGSYGTDESPEPLPIPTFLLGYDYDYLVLSPFALPYWERLMLEPYGSQRDIAYVVLCPENEALLNGAKSFFRDLTAIYESCRLGQHRPVSRLLTDGIMRVGSTASKKLSEKLVAEWFSQAADGNNEAFSKLKLYAQVCRYDLGPYLASLPLDSSLLSQPNLVAPTSQSLITPPQMTNTGNANTPSATLASAASSTMTVTSGVAISTSVATANSTLTTASTSSSSSSNLNSGVSSNKLPSFPPFGSMNSNAAGSMSTQANTVQSGQLGGQQTSALQTAGISGESSSLPTQPHPDVSESTMDRDKVGIPTDGDSHAVTYPPAIVVYIIDPFTYENTDESTNSSSVWTLGLLRCFLEMVQTLPPHIKSTVSVQIIPCQYLLQPVKHEDREIYPQHLKSLAFSAFTQCRRPLPTSTNVKTLTGFGPGLAMETALRSPDRPECIRLYAPPFILAPVKDKQTELGETFGEAGQKYNVLFVGYCLSHDQRWILASCTDLYGELLETCIINIDVPNRARRKKSSARKFGLQKLWEWCLGLVQMSSLPWRVVIGRLGRIGHGELKDWSCLLSRRNLQSLSKRLKDMCRMCGISAADSPSILSACLVAMEPQGSFVIMPDSVSTGSVFGRSTTLNMQTSQLNTPQDTSCTHILVFPTSASVQVASATYTTENLDLAFNPNNDGADGMGIFDLLDTGDDLDPDIINILPASPTGSPVHSPGSHYPHGGDAGKGQSTDRLLSTEPHEEVPNILQQPLALGYFVSTAKAGPLPDWFWSACPQAQYQCPLFLKASLHLHVPSVQSDELLHSKHSHPLDSNQTSDVLRFVLEQYNALSWLTCDPATQDRRSCLPIHFVVLNQLYNFIMNML

SEQ ID NO: 49692 - protein, 327 aa, Homo sapiens
  Payload ID: 9941
  Gene Symbol: MED13
  Gene Name: mediator complex subunit 13
  ENSP ID: ENSP00000464131
  MOD_RES (1)..(1): Any amino acid
XVQKWVKFSSVSDGFNSDSTSHHGGKIPRKLANHVVDRVWQECNMNRAQNKRKYSASSGGLCEEATAAKVASWDFVEATQRTNCSCLRHKNLKSRNAGQQGQAPSLGQQQQILPKHKTNEKQEKSEKPQKRPLTPFHHRVSVSDDVGMDADSASQRLVISAPDSQVRFSNIRTNDVAKTPQMHGTEMANSPQPPPLSPHPCDVVDEGVTKTPSTPQSQHFYQMPTPDPLVPSKPMEDRIDSLSQSFPPQYQEAVEPTVYVGTAVNLEEDEANIAWKYYKFPKKKDVEFLPPQLPSDKFKDDPVGPFGQESVTSVTEYVFFLIVTIII

SEQ ID NO: 49693 - protein, 2210 aa, Homo sapiens
  Payload ID: 9942
  Gene Symbol: MED13L
  Gene Name: mediator complex subunit 13-like
  Uniprot ID: Q71F56
  ENSP ID: ENSP00000281928
MTAAANWVANGASLEDCHSNLFSLAELTGIKWRRYNFGGHGDCGPIISAPAQDDPILLSFIRCLQANLLCVWRRDVKPDCKELWIFWWGDEPNLVGVIHHELQVVEEGLWENGLSYECRTLLFKAIHNLLERCLMDKNFVRIGKWFVRPYEKDEKPVNKSEHLSCAFTFFLHGESNVCTSVEIAQHQPIYLINEEHIHMAQSSPAPFQVLVSPYGLNGTLTGQAYKMSDPATRKLIEEWQYFYPMVLKKKEESKEEDELGYDDDFPVAVEVIVGGVRMVYPSAFVLISQNDIPVPQSVASAGGHIAVGQQGLGSVKDPSNCGMPLTPPTSPEQAILGESGGMQSAASHLVSQDGGMITMHSPKRSGKIPPKLHNHMVHRVWKECILNRTQSKRSQMSTPTLEEEPASNPATWDFVDPTQRVSCSCSRHKLLKRCAVGPNRPPTVSQPGFSAGPSSSSSLPPPASSKHKTAERQEKGDKLQKRPLIPFHHRPSVAEELCMEQDTPGQKLGLAGIDSSLEVSSSRKYDKQMAVPSRNTSKQMNLNPMDSPHSPISPLPPTLSPQPRGQETESLDPPSVPVNPALYGNGLELQQLSTLDDRTVLVGQRLPLMAEVSETALYCGIRPSNPESSEKWWHSYRLPPSDDAEFRPPELQGERCDAKMEVNSESTALQRLLAQPNKRFKIWQDKQPQLQPLHFLDPLPLSQQPGDSLGEVNDPYTFEDGDIKYIFTANKKCKQGTEKDSLKKNKSEDGFGTKDVTTPGHSTPVPDGKNAMSIFSSATKTDVRQDNAAGRAGSSSLTQVTDLAPSLHDLDNIFDNSDDDELGAVSPALRSSKMPAVGTEDRPLGKDGRAAVPYPPTVADLQRMFPTPPSLEQHPAFSPVMNYKDGISSETVTALGMMESPMVSMVSTQLTEFKMEVEDGLGSPKPEEIKDFSYVHKVPSFQPFVGSSMFAPLKMLPSHCLLPLKIPDACLFRPSWAIPPKIEQLPMPPAATFIRDGYNNVPSVGSLADPDYLNTPQMNTPVTLNSAAPASNSGAGVLPSPATPRFSVPTPRTPRTPRTPRGGGTASGQGSVKYDSTDQGSPASTPSTTRPLNSVEPATMQPIPEAHSLYVTLILSDSVMNIFKDRNFDSCCICACNMNIKGADVGLYIPDSSNEDQYRCTCGFSAIMNRKLGYNSGLFLEDELDIFGKNSDIGQAAERRLMMCQSTFLPQVEGTKKPQEPPISLLLLLQNQHTQPFASLNFLDYISSNNRQTLPCVSWSYDRVQADNNDYWTECFNALEQGRQYVDNPTGGKVDEALVRSATVHSWPHSNVLDISMLSSQDVVRMLLSLQPFLQDAIQKKRTGRTWENIQHVQGPLTWQQFHKMAGRGTYGSEESPEPLPIPTLLVGYDKDFLTISPFSLPFWERLLLDPYGGHRDVAYIVVCPENEALLEGAKTFFRDLSAVYEMCRLGQHKPICKVLRDGIMRVGKTVAQKLTDELVSEWFNQPWSGEENDNHSRLKLYAQVCRHHLAPYLATLQLDSSLLIPPKYQTPPAAAQGQATPGNAGPLAPNGSAAPPAGSAFNPTSNSSSTNPAASSSASGSSVPPVSSSASAPGISQISTTSSSGFSGSVGGQNPSTGGISADRTQGNIGCGGDTDPGQSSSQPSQDGQESVTERERIGIPTEPDSADSHAHPPAVVIYMVDPFTYAAEEDSTSGNFWLLSLMRCYTEMLDNLPEHMRNSFILQIVPCQYMLQTMKDEQVFYIQYLKSMAFSVYCQCRRPLPTQIHIKSLTGFGPAASIEMTLKNPERPSPIQLYSPPFILAPIKDKQTELGETFGEASQKYNVLFVGYCLSHDQRWLLASCTDLHGELLETCVVNIALPNRSRRSKVSARKIGLQKLWEWCIGIVQMTSLPWRVVIGRLGRLGHGELKDWSILLGECSLQTISKKLKDVCRMCGISAADSPSILSACLVAMEPQGSFVVMPDAVTMGSVFGRSTALNMQSSQLNTPQDASCTHILVFPTSSTIQVAPANYPNEDGFSPNNDDMFVDLPFPDDMDNDIGILMTGNLHSSPNSSPVPSPGSPSGIGVGSHFQHSRSQGERLLSREAPEELKQQPLALGYFVSTAKAENLPQWFWSSCPQAQNQCPLFLKASLHHHISVAQTDELLPARNSQRVPHPLDSKTTSDVLRFVLEQYNALSWLTCNPATQDRTSCLPVHFVVLTQLYNAIMNIL

SEQ ID NO: 49694 - protein, 190 aa, Homo sapiens
  Payload ID: 9942
  Gene Symbol: MED13L
  Gene Name: mediator complex subunit 13-like
  ENSP ID: ENSP00000446782
  MOD_RES (1)..(1): Any amino acid
XPLAPNGSAAPPAGSAFNPTSNSSSTNPAASSSASGSSVPPVSSSASAPGISQISTTSSSGFSGSVGGQNPSTGGISADRTQGNIGCGGDTDPGQSSSQPSQDGQESVTERERIGIPTEPDSADSHAHPPAVVIYMVDPFTYAAEEDSTSGNFWLLSLMRCYTEMLDNLPEHMRNSFILQVTVCKFIIYF

SEQ ID NO: 49695 - protein, 93 aa, Homo sapiens
  Payload ID: 9942
  Gene Symbol: MED13L
  Gene Name: mediator complex subunit 13-like
  ENSP ID: ENSP00000448553
MLESRKAIAPSRRKAELTGIKWRRYNFGGHGDCGPIISAPAQDDPILLSFIRCLQANLLCVWRRDVKPDCKELWIFWWGDEPNLVGVIHHELQ

SEQ ID NO: 49696 - protein, 140 aa, Homo sapiens
  Payload ID: 9942
  Gene Symbol: MED13L
  Gene Name: mediator complex subunit 13-like
  ENSP ID: ENSP00000449876
ERIGIPTEPDSADSHAHPPAVVIYMVDPFTYAAEEDSTSGNFWLLSLMRCYTEMLDNLPEHMRNSFILQIVPCQYMLQTMKDEQVFYIQYLKSMAFSVYCQCRRPLPTQIHIKSLTGFGPAASIEMTLKNPEVGIGRTET

SEQ ID NO: 49697 - protein, 195 aa, Homo sapiens
  Payload ID: 9942
  Gene Symbol: MED13L
  Gene Name: mediator complex subunit 13-like
  ENSP ID: ENSP00000449895
  MOD_RES (1)..(1): Any amino acid
XQTELGETFGEASQKYNVLFVGYCLSHDQRWLLASCTDLHGELLETCVVNIALPNRDPFPFPISLFVRSRRSKVSARKIGLQKLWEWCIGIVQMTSLPWRVVIGRLGRLGHGELKDWSILLGECSLQTISKKLKDVCRMCGISAADSPSILSACLVAMEPQGSFVVMPDAVTMGSVFGRSTALNMQSSQLNTPQD

SEQ ID NO: 49698 - protein, 1454 aa, Homo sapiens
  Payload ID: 9943
  Gene Symbol: MED14
  Gene Name: mediator complex subunit 14
  Uniprot ID: O60244
  ENSP ID: ENSP00000323720
MAPVQLENHQLVPPGGGGGGSGGPPSAPAPPPPGAAVAAAAAAAASPGYRLSTLIEFLLHRAYSELMVLTDLLPRKSDVERKIEIVQFASRTRQLFVRLLALVKWANNAGKVEKCAMISSFLDQQAILFVDTADRLASLARDALVHARLPSFAIPYAIDVLTTGSYPRLPTCIRDKIIPPDPITKIEKQATLHQLNQILRHRLVTTDLPPQLANLTVANGRVKFRVEGEFEATLTVMGDDPDVPWRLLKLEILVEDKETGDGRALVHSMQISFIHQLVQSRLFADEKPLQDMYNCLHSFCLSLQLEVLHSQTLMLIRERWGDLVQVERYHAGKCLSLSVWNQQVLGRKTGTASVHKVTIKIDENDVSKPLQIFHDPPLPASDSKLVERAMKIDHLSIEKLLIDSVHARAHQKLQELKAILRGFNANENSSIETALPALVVPILEPCGNSECLHIFVDLHSGMFQLMLYGLDQATLDDMEKSVNDDMKRIIPWIQQLKFWLGQQRCKQSIKHLPTISSETLQLSNYSTHPIGNLSKNKLFIKLTRLPQYYIVVEMLEVPNKPTQLSYKYYFMSVNAADREDSPAMALLLQQFKENIQDLVFRTKTGKQTRTNAKRKLSDDPCPVESKKTKRAGEMCAFNKVLAHFVAMCDTNMPFVGLRLELSNLEIPHQGVQVEGDGFSHAIRLLKIPPCKGITEETQKALDRSLLDCTFRLQGRNNRTWVAELVFANCPLNGTSTREQGPSRHVYLTYENLLSEPVGGRKVVEMFLNDWNSIARLYECVLEFARSLPDIPAHLNIFSEVRVYNYRKLILCYGTTKGSSISIQWNSIHQKFHISLGTVGPNSGCSNCHNTILHQLQEMFNKTPNVVQLLQVLFDTQAPLNAINKLPTVPMLGLTQRTNTAYQCFSILPQSSTHIRLAFRNMYCIDIYCRSRGVVAIRDGAYSLFDNSKLVEGFYPAPGLKTFLNMFVDSNQDARRRSVNEDDNPPSPIGGDMMDSLISQLQPPPQQQPFPKQPGTSGAYPLTSPPTSYHSTVNQSPSMMHTQSPGNLHAASSPSGALRAPSPASFVPTPPPSSHGISIGPGASFASPHGTLDPSSPYTMVSPSGRAGNWPGSPQVSGPSPAARMPGMSPANPSLHSPVPDASHSPRAGTSSQTMPTNMPPPRKLPQRSWAASIPTILTHSALNILLLPSPTPGLVPGLAGSYLCSPLERFLGSVIMRRHLQRIIQQETLQLINSNEPGVIMFKTDALKCRVALSPKTNQTLQLKVTPENAGQWKPDELQVLEKFFETRVAGPPFKANTLIAFTKLLGAPTHILRDCVHIMKLELFPDQATQLKWNVQFCLTIPPSAPPIAPPGTPAVVLKSKMLFFLQLTQKTSVPPQEPVSIIVPIIYDMASGTTQQADIPRQQNSSVAAPMMVSNILKRFAEMNPPRQGECTIFAAVRDLMANLTLPPGGRP

SEQ ID NO: 49699 - protein, 155 aa, Homo sapiens
  Payload ID: 9943
  Gene Symbol: MED14
  Gene Name: mediator complex subunit 14
  ENSP ID: ENSP00000392586
VAGPPFKANTLIAFTKLLGAPTHILRDCVHIMKLELFPDQATQLKWNVQFCLTIPPSAPPIAPPGTPAVVLKSKMLFFLQLTQKTSVPPQEPVSIIVPIIYDMASGTTQQADIPRQQNSSVAAPMMVSNILKRFAEMNPPRQGSIKGTGCPSDFL

SEQ ID NO: 49700 - protein, 331 aa, Homo sapiens
  Payload ID: 9943
  Gene Symbol: MED14
  Gene Name: mediator complex subunit 14
  ENSP ID: ENSP00000411357
PSGRAGNWPGSPQVSGPSPAARMPGMSPANPSLHSPVPDASHSPRAGTSSQTMPTNMPPPRKLPQRSWAASIPTILTHSALNILLLPSPTPGLVPGLAGSYLCSPLERFLGSVIMRRHLQRIIQQETLQLINSNEPGVIMFKTDALKCRVALSPKTNQTLQLKVTPENAGQWKPDELQVLEKFFETRVAGPPFKANTLIAFTKLLGAPTHILRDCVHIMKLELFPDQATQLKWNVQFCLTIPPSAPPIAPPGTPAVVLKSKMLFFLQLTQKTSVPPQEPVSIIVPIIYDMASGTTQQADIPRQQNSSVAAPMMVSNILKRFAEMNPPRQGT

SEQ ID NO: 49701 - protein, 788 aa, Homo sapiens
  Payload ID: 9944
  Gene Symbol: MED15
  Gene Name: mediator complex subunit 15
  Uniprot ID: Q96RN5
  ENSP ID: ENSP00000263205
MDVSGQETDWRSTAFRQKLVSQIEDAMRKAGVAHSKSSKDMESHVFLKAKTRDEYLSLVARLIIHFRDIHNKKSQASVSDPMNALQSLTGGPAAGAAGIGMPPRGPGQSLGGMGSLGAMGQPMSLSGQPPPGTSGMAPHSMAVVSTATPQTQLQLQQVALQQQQQQQQFQQQQQAALQQQQQQQQQQQFQAQQSAMQQQFQAVVQQQQQLQQQQQQQQHLIKLHHQNQQQIQQQQQQLQRIAQLQLQQQQQQQQQQQQQQQQALQAQPPIQQPPMQQPQPPPSQALPQQLQQMHHTQHHQPPPQPQQPPVAQNQPSQLPPQSQTQPLVSQAQALPGQMLYTQPPLKFVRAPMVVQQPPVQPQVQQQQTAVQTAQAAQMVAPGVQMITEALAQGGMHIRARFPPTTAVSAIPSSSIPLGRQPMAQVSQSSLPMLSSPSPGQQVQTPQSMPPPPQPSPQPGQPSSQPNSNVSSGPAPSPSSFLPSPSPQPSQSPVTARTPQNFSVPSPGPLNTPVNPSSVMSPAGSSQAEEQQYLDKLKQLSKYIEPLRRMINKIDKNEDRKKDLSKMKSLLDILTDPSKRCPLKTLQKCEIALEKLKNDMAVPTPPPPPVPPTKQQYLCQPLLDAVLANIRSPVFNHSLYRTFVPAMTAIHGPPITAPVVCTRKRRLEDDERQSIPSVLQGEVARLDPKFLVNLDPSHCSNNGTVHLICKLDDKDLPSVPPLELSVPADYPAQSPLWIDRQWQYDANPFLQSVHRCMTSRLLQLPDKHSVTALLNTWAQSVHQACLSAA

SEQ ID NO: 49702 - protein, 748 aa, Homo sapiens
  Payload ID: 9944
  Gene Symbol: MED15
  Gene Name: mediator complex subunit 15
  Uniprot ID: Q96RN5
  ENSP ID: ENSP00000292733
MDVSGQETDWRSTAFRQKLVSQIEDAMRKAGVAHSKSSKDMESHVFLKAKTRDEYLSLVARLIIHFRDIHNKKSQASVSDPMNALQSLTGGPAAGAAGIGMPPRGPGQSLGGMGSLGAMGQPMSLSGQPPPGTSGMAPHSMAVVSTATPQTQLQLQQVALQQQQQQQQFQQQQQAALQQQQQQQQQQQFQAQQSAMQQQFQAVVQQQQQLQQQQQQQQHLIKLHHQNQQQIQQQQQQLQRIAQLQLQQQQQQQQQQQQQQQQALQAQPPIQQPPMQQPQPPPSQALPQQLQQMHHTQHHQPPPQPQQPPVAQNQPSQLPPQSQTQPLVSQAQALPGQMLYTQPPLKFVRAPMVVQQPPVQPQVQQQQTAVQTAQAAQMVAPGVQVSQSSLPMLSSPSPGQQVQTPQSMPPPPQPSPQPGQPSSQPNSNVSSGPAPSPSSFLPSPSPQPSQSPVTARTPQNFSVPSPGPLNTPVNPSSVMSPAGSSQAEEQQYLDKLKQLSKYIEPLRRMINKIDKNEDRKKDLSKMKSLLDILTDPSKRCPLKTLQKCEIALEKLKNDMAVPTPPPPPVPPTKQQYLCQPLLDAVLANIRSPVFNHSLYRTFVPAMTAIHGPPITAPVVCTRKRRLEDDERQSIPSVLQGEVARLDPKFLVNLDPSHCSNNGTVHLICKLDDKDLPSVPPLELSVPADYPAQSPLWIDRQWQYDANPFLQSVHRCMTSRLLQLPDKHSVTALLNTWAQSVHQACLSAA

SEQ ID NO: 49703 - protein, 677 aa, Homo sapiens
  Payload ID: 9944
  Gene Symbol: MED15
  Gene Name: mediator complex subunit 15
  Uniprot ID: Q96RN5
  ENSP ID: ENSP00000372434
MDVSGQETDWRSTAFRQKLVSQIEDAMRKAGVAHSKSSKDMESHVFLKAKTRDEYLSLVARLIIHFRDIHNKKSQASVSAQLQLQQVALQQQQQQQQFQQQQQAALQQQQQQQQQQQFQAQQSAMQQQFQAVVQQQQQLQQQQQQQQHLIKLHHQNQQQIQQQQQQLQRIAQLQLQQQQQQQQQQQQQQQQALQAQPPIQQPPMQQPQPPPSQALPQQLQQMHHTQHHQPPPQPQQPPVAQNQPSQLPPQSQTQPLVSQAQALPGQMLYTQPPLKFVRAPMVVQQPPVQPQVQQQQTAVQTAQAAQMVAPGVQVSQSSLPMLSSPSPGQQVQTPQSMPPPPQPSPQPGQPSSQPNSNVSSGPAPSPSSFLPSPSPQPSQSPVTARTPQNFSVPSPGPLNTPVNPSSVMSPAGSSQAEEQQYLDKLKQLSKYIEPLRRMINKIDKNEDRKKDLSKMKSLLDILTDPSKRCPLKTLQKCEIALEKLKNDMAVPTPPPPPVPPTKQQYLCQPLLDAVLANIRSPVFNHSLYRTFVPAMTAIHGPPITAPVVCTRKRRLEDDERQSIPSVLQGEVARLDPKFLVNLDPSHCSNNGTVHLICKLDDKDLPSVPPLELSVPADYPAQSPLWIDRQWQYDANPFLQSVHRCMTSRLLQLPDKHSVTALLNTWAQSVHQACLSAA

SEQ ID NO: 49704 - protein, 722 aa, Homo sapiens
  Payload ID: 9944
  Gene Symbol: MED15
  Gene Name: mediator complex subunit 15
  ENSP ID: ENSP00000384344
MRKAGVAHSKSSKDMESHVFLKAKTRDEYLSLVARLIIHFRDIHNKKSQASVSDPMNALQSLTGGPAAGAAGIGMPPRGPGQSLGGMGSLGAMGQPMSLSGQPPPGTSGMAPHSMAVVSTATPQTQLQLQQVALQQQQQQQQFQQQQQAALQQQQQQQQQQQFQAQQSAMQQQFQAVVQQQQQLQQQQQQQQHLIKLHHQNQQQIQQQQQQLQRIAQLQLQQQQQQQQQQQQQQQQALQAQPPIQQPPMQQPQPPPSQALPQQLQQMHHTQHHQPPPQPQQPPVAQNQPSQLPPQSQTQPLVSQAQALPGQMLYTQPPLKFVRAPMVVQQPPVQPQVQQQQTAVQTAQAAQMVAPGVQVSQSSLPMLSSPSPGQQVQTPQSMPPPPQPSPQPGQPSSQPNSNVSSGPAPSPSSFLPSPSPQPSQSPVTARTPQNFSVPSPGPLNTPVNPSSVMSPAGSSQAEEQQYLDKLKQLSKYIEPLRRMINKIDKNEDRKKDLSKMKSLLDILTDPSKRCPLKTLQKCEIALEKLKNDMAVPTPPPPPVPPTKQQYLCQPLLDAVLANIRSPVFNHSLYRTFVPAMTAIHGPPITAPVVCTRKRRLEDDERQSIPSVLQGEVARLDPKFLVNLDPSHCSNNGTVHLICKLDDKDLPSVPPLELSVPADYPAQSPLWIDRQWQYDANPFLQSVHRCMTSRLLQLPDKHSVTALLNTWAQSVHQACLSAA

SEQ ID NO: 49705 - protein, 124 aa, Homo sapiens
  Payload ID: 9944
  Gene Symbol: MED15
  Gene Name: mediator complex subunit 15
  ENSP ID: ENSP00000390498
MRKAGVAHSKSSKDMESHVFLKAKTRDEYLSLVARLIIHFRDIHNKKSQASVSDPMNALQSLTGGPAAGAAGIGMPPRGPGQSLGGMGSLGAMGQPMSLSGQPPPGTSGMAPHSMAVVSTATPQ

SEQ ID NO: 49706 - protein, 55 aa, Homo sapiens
  Payload ID: 9944
  Gene Symbol: MED15
  Gene Name: mediator complex subunit 15
  ENSP ID: ENSP00000391108
MDVSGQETDWRSTAFRQKLVSQIEDAMRKAGVAHSKSSKDMESHVFLKAKTRVRP

SEQ ID NO: 49707 - protein, 141 aa, Homo sapiens
  Payload ID: 9944
  Gene Symbol: MED15
  Gene Name: mediator complex subunit 15
  ENSP ID: ENSP00000392738
MRKAGVAHSKSSKDMESHVFLKAKTRDEYLSLVARLIIHFRDIHNKKSQASVSDPMNALQSLTGGPAAGAAGIGMPPRGPGQSLGGMGSLGAMGQPMSLSGQPPPGTSGMAPHSMAVVSTATPQTQLQLQQVALQQQQQQQ

SEQ ID NO: 49708 - protein, 165 aa, Homo sapiens
  Payload ID: 9944
  Gene Symbol: MED15
  Gene Name: mediator complex subunit 15
  ENSP ID: ENSP00000396461
MGFSSDEYLSLVARLIIHFRDIHNKKSQASVSDPMNALQSLTGGPAAGAAGIGMPPRGPGQSLGGMGSLGAMGQPMSLSGQPPPGTSGMAPHSMAVVSTATPQTQLQLQQVALQQQQQQQQFQQQQQAALQQQQQQQQQQQFQAQQSAMQQQFQAVVQQQQQLQQ

SEQ ID NO: 49709 - protein, 120 aa, Homo sapiens
  Payload ID: 9944
  Gene Symbol: MED15
  Gene Name: mediator complex subunit 15
  ENSP ID: ENSP00000407742
MRKAGVAHSKSSKDMESHVFLKAKTRDEYLSLVARLIIHFRDIHNKKSQASVSDPMNALQSLTGGPAAGAAGIGMPPRGPGQSLGGMGSLGAMGQPMSLSGQPPPGTSGMAPHSMAVVST

SEQ ID NO: 49710 - protein, 105 aa, Homo sapiens
  Payload ID: 9944
  Gene Symbol: MED15
  Gene Name: mediator complex subunit 15
  ENSP ID: ENSP00000408742
MRKAGVAHSKSSKDMESHVFLKAKTRDEYLSLVARLIIHFRDIHNKKSQASVSDPMNALQSLTGGPAAGAAGIGMPPRGPGQSLGGMGSLGAMGQPMSLSGQPPP

SEQ ID NO: 49711 - protein, 105 aa, Homo sapiens
  Payload ID: 9944
  Gene Symbol: MED15
  Gene Name: mediator complex subunit 15
  ENSP ID: ENSP00000408794
MRKAGVAHSKSSKDMESHVFLKAKTRDEYLSLVARLIIHFRDIHNKKSQASVSAQLQLQQVALQQQQQQQQFQQQQQAALQQQQQQQQQQQFQAQQSAMQQQFQA

SEQ ID NO: 49712 - protein, 194 aa, Homo sapiens
  Payload ID: 9944
  Gene Symbol: MED15
  Gene Name: mediator complex subunit 15
  ENSP ID: ENSP00000408875
  MOD_RES (1)..(1): Any amino acid
XFQRRPSKRLNLPCRMGFSSDEYLSLVARLIIHFRDIHNKKSQASVSDPMNALQSLTGGPAAGAAGIGQPPPGTSGMAPHSMAVVSTATPQTQLQLQQVALQQQQQQQQFQQQQQAALQQQQQQQQQQQFQAQQSAMQQQFQAVVQQQQQLQQQQQQQQHLIKLHHQNQQQIQQQQQQLQRIAQLQLQQQQQQQ

SEQ ID NO: 49713 - protein, 54 aa, Homo sapiens
  Payload ID: 9944
  Gene Symbol: MED15
  Gene Name: mediator complex subunit 15
  ENSP ID: ENSP00000409578
MDVSGQETDWRSTAFRQKLVSQIEDAMRKAGVAHSKSSKDMESHVFLKAKTRIL

SEQ ID NO: 49714 - protein, 119 aa, Homo sapiens
  Payload ID: 9944
  Gene Symbol: MED15
  Gene Name: mediator complex subunit 15
  ENSP ID: ENSP00000410173
MAGSRCQEAIVVSGGEREELGSVAPLRGTLAPHHRLLVSVSSFFHARPCEETTKQALWSHSVTQAEVQWRDCGSLQPPPPGLKRSSHVSLPSSWDHSEDAMRKAGVAHSKSSKDMESHV

SEQ ID NO: 49715 - protein, 82 aa, Homo sapiens
  Payload ID: 9944
  Gene Symbol: MED15
  Gene Name: mediator complex subunit 15
  ENSP ID: ENSP00000413603
MGFSSDEYLSLVARLIIHFRDIHNKKSQASVSAQLQLQQVALQQQQQQQQFQQQQQAALQQQQQQQQQQQFQAQQSAMQQQF

SEQ ID NO: 49716 - protein, 61 aa, Homo sapiens
  Payload ID: 9944
  Gene Symbol: MED15
  Gene Name: mediator complex subunit 15
  ENSP ID: ENSP00000413636
MAGSRCQEAIVVSGGEREELGSVAPLRGTLAPHHRLLVSVSSFFHARPCEETTKQALSRMP

SEQ ID NO: 49717 - protein, 160 aa, Homo sapiens
  Payload ID: 9944
  Gene Symbol: MED15
  Gene Name: mediator complex subunit 15
  ENSP ID: ENSP00000415778
MKRGHSRWLPALSDEYLSLVARLIIHFRDIHNKKSQASVSDPMNALQSLTGGPAAGAAGIGMPPRGPGQSLGGMGSLGAMGQPMSLSGQPPPGTSGMAPHSMAVVSTATPQTQLQLQQVALQQQQQQQQFQQQQQAALQQQQQQQQQQQFQAQQSAMQQQ

SEQ ID NO: 49718 - protein, 36 aa, Homo sapiens
  Payload ID: 9944
  Gene Symbol: MED15
  Gene Name: mediator complex subunit 15
  ENSP ID: ENSP00000416109
MGFSSDEYLSLVARLIIHFRDIRTVAWLVHTVLWGS

SEQ ID NO: 49719 - protein, 218 aa, Homo sapiens
  Payload ID: 9945
  Gene Symbol: MED16
  Gene Name: mediator complex subunit 16
  ENSP ID: ENSP00000269814
MCDLRRPAAGGMMDLAYVCEWEKWSKSTHCPSVPLACAWSCRNLIAFTMDLRSDDQDLTRMIHILDTEHPWDLHSIPSEHHEAITCLEWDQSGSRLLSADADGQIKCWSMADHLANSWESSVGSLVEGDPIVALSWLHNGVKLALHVEKSGASSFGEKFSRVKFSPSPTEECKACTRCGCVTMLKSPNRTTAVKQWEQRWIKNCLCGGLWWRVPLSYP

SEQ ID NO: 49720 - protein, 860 aa, Homo sapiens
  Payload ID: 9945
  Gene Symbol: MED16
  Gene Name: mediator complex subunit 16
  Uniprot ID: Q9Y2X0
  ENSP ID: ENSP00000308528
MCDLRRPAAGGMMDLAYVCEWEKWSKSTHCPSVPLACAWSCRNLIAFTMDLRSDDQDLTRMIHILDTEHPWDLHSIPSEHHEAITCLEWDQSGSRLLSADADGQIKCWSMADHLANSWESSVGSLVEGDPIVALSWLHNGVKLALHVEKSGASSFGEKFSRVKFSPSLTLFGGKPMEGWIAVTVSGLVTVSLLKPSGQVLTSTESLCRLRGRVALADIAFTGGGNIVVATADGSSASPVQFYKVCVSVVSEKCRIDTEILPSLFMRCTTDLNRKDKFPAITHLKFLARDMSEQVLLCASSQTSSIVECWSLRKEGLPVNNIFQQISPVVGDKQPTILKWRILSATNDLDRVSAVALPKLPISLTNTDLKVASDTQFYPGLGLALAFHDGSVHIVHRLSLQTMAVFYSSAAPRPVDEPAMKRPRTAGPAVHLKAMQLSWTSLALVGIDSHGKLSVLRLSPSMGHPLEVGLALRHLLFLLEYCMVTGYDWWDILLHVQPSMVQSLVEKLHEEYTRQTAALQQVLSTRILAMKASLCKLSPCTVTRVCDYHTKLFLIAISSTLKSLLRPHFLNTPDKSPGDRLTEICTKITDVDIDKVMINLKTEEFVLDMNTLQALQQLLQWVGDFVLYLLASLPNQGSLLRPGHSFLRDGTSLGMLRELMVVIRIWGLLKPSCLPVYTATSDTQDSMSLLFRLLTKLWICFPSTGPCSVWVLLGWQPLPGRDEGPASEPDEALVDECCLLPSQLLIPSLDWLPASDGLVSRLQPKQPLRLQFGRAPTLPGSAATLQLDGLARAPGQPKIDHLRRLHLGACPTEECKACTRCGCVTMLKSPNRTTAVKQWEQRWIKNCLCGGLWWRVPLSYP

SEQ ID NO: 49721 - protein, 877 aa, Homo sapiens
  Payload ID: 9945
  Gene Symbol: MED16
  Gene Name: mediator complex subunit 16
  Uniprot ID: Q9Y2X0
  ENSP ID: ENSP00000325612
MCDLRRPAAGGMMDLAYVCEWEKWSKSTHCPSVPLACAWSCRNLIAFTMDLRSDDQDLTRMIHILDTEHPWDLHSIPSEHHEAITCLEWDQSGSRLLSADADGQIKCWSMADHLANSWESSVGSLVEGDPIVALSWLHNGVKLALHVEKSGASSFGEKFSRVKFSPSLTLFGGKPMEGWIAVTVSGLVTVSLLKPSGQVLTSTESLCRLRGRVALADIAFTGGGNIVVATADGSSASPVQFYKVCVSVVSEKCRIDTEILPSLFMRCTTDLNRKDKFPAITHLKFLARDMSEQVLLCASSQTSSIVECWSLRKEGLPVNNIFQQISPVVGDKQPTILKWRILSATNDLDRVSAVALPKLPISLTNTDLKVASDTQFYPGLGLALAFHDGSVHIVHRLSLQTMAVFYSSAAPRPVDEPAMKRPRTAGPAVHLKAMQLSWTSLALVGIDSHGKLSVLRLSPSMGHPLEVGLALRHLLFLLEYCMVTGYDWWDILLHVQPSMVQSLVEKLHEEYTRQTAALQQVLSTRILAMKASLCKLSPCTVTRVCDYHTKLFLIAISSTLKSLLRPHFLNTPDKSPGDRLTEICTKITDVDIDKVMINLKTEEFVLDMNTLQALQQLLQWVGDFVLYLLASLPNQGSLLRPGHSFLRDGTSLGMLRELMVVIRIWGLLKPSCLPVYTATSDTQDSMSLLFRLLTKLWICCRDEGPASEPDEALVDECCLLPSQLLIPSLDWLPASDGLVSRLQPKQPLRLQFGRAPTLPGSAATLQLDGLARAPGQPKIDHLRRLHLGACPTEECKACTRCGCVTMLKSPNRTTAVKQWEQRWIKNCLAVEGRGPDACVTSRASEEAPAFVQLGPQSTHHSPRTPRSLDHLHPEDRP

SEQ ID NO: 49722 - protein, 841 aa, Homo sapiens
  Payload ID: 9945
  Gene Symbol: MED16
  Gene Name: mediator complex subunit 16
  Uniprot ID: Q9Y2X0
  ENSP ID: ENSP00000379153
MCDLRRPAAGGMMDLAYVCEWEKWSKSTHCPSVPLACAWSCRNLIAFTMDLRSDDQDLTRMIHILDTEHPWDLHSIPSEHHEAITCLEWDQSGSRLLSADADGQIKCWSMADHLANSWESSVGSLVEGDPIVALSWLHNGVKLALHVEKSGASSFGEKFSRVKFSPSLTLFGGKPMEGWIAVTVSGLVTVSLLKPSGQVLTSTESLCRLRGRVALADIAFTGGGNIVVATADGSSASPVQFYKVCVSVVSEKCRIDTEILPSLFMRCTTDLNRKDKFPAITHLKFLARDMSEQVLLCASSQTSSIVECWSLRKEGLPVNNIFQQISPVVGDKQPTILKWRILSATNDLDRVSAVALPKLPISLTNTDLKVASDTQFYPGLGLALAFHDGSVHIVHRLSLQTMAVFYSSAAPRPVDEPAMKRPRTAGPAVHLKAMQLSWTSLALVGIDSHGKLSVLRLSPSMGHPLEVGLALRHLLFLLEYCMVTGYDWWDILLHVQPSMVQSLVEKLHEEYTRQTAALQQVLSTRILAMKASLCKLSPCTVTRVCDYHTKLFLIAISSTLKSLLRPHFLNTPDKSPGDRLTEICTKITDVDIDKVMINLKTEEFVLDMNTLQALQQLLQWVGDFVLYLLASLPNQGSLLRPGHSFLRDGTSLGMLRELMVVIRIWGLLKPSCLPVYTATSDTQDSMSLLFRLLTKLWICCRDEGPASEPDEALVDECCLLPSQLLIPSLDWLPASDGLVSRLQPKQPLRLQFGRAPTLPGSAATLQLDGLARAPGQPKIDHLRRLHLGACPTEECKACTRCGCVTMLKSPNRTTAVKQWEQRWIKNCLCGGLWWRVPLSYP

SEQ ID NO: 49723 - protein, 877 aa, Homo sapiens; identical to SEQ ID NO: 49721
  Payload ID: 9945
  Gene Symbol: MED16
  Gene Name: mediator complex subunit 16
  Uniprot ID: Q9Y2X0
  ENSP ID: ENSP00000464810

SEQ ID NO: 49724 - protein, 462 aa, Homo sapiens
  Payload ID: 9945
  Gene Symbol: MED16
  Gene Name: mediator complex subunit 16
  ENSP ID: ENSP00000465762
MCDLRRPAAGGMMDLAYVCEWEKWSKSTHCPSVPLACAWSCRNLIAFTMDLRSDDQDLTRMIHILDTEHPWDLHSIPSEHHEAITCLEWDQSGSRLLSADADGQIKCWSMADHLANSWESSVGSLVEGDPIVALSWLHNGVKLALHVEKVLLCASSQTSSIVECWSLRKEGLPVNNIFQQISPVVGDKQPTILKWRILSATNDLDRVSAVALPKLPISLTNTDLKVASDTQFYPGLGLALAFHDGSVHIVHRLSLQTMAVFYSSAAPRPVDEPAMKRPRTAGPAVHLKAMQLSWTSLALVGIDSHGKLSVLRLSPSMGHPLEVGLALRHLLFLLEYCMVTGYDWWDILLHVQPSMVQSLVEKLHEEYTRQTAALQQVLSTRILAMKASLCKLSPCTVTRVCDYHTKLFLIAISSTLKSLLRPHFLNTPDKSPGDRLTEICTKITDVDIDKVMINLKTEEFVL

SEQ ID NO: 49725 - protein, 74 aa, Homo sapiens
  Payload ID: 9945
  Gene Symbol: MED16
  Gene Name: mediator complex subunit 16
  ENSP ID: ENSP00000465823
MCDLRRPAAGGMMDLAYVCEWEKWSKSTHCPSVPLACAWSCRNLIAFTMDLRSDDQGLLCSCGGTACSLSCRLG

SEQ ID NO: 49726 - protein, 49 aa, Homo sapiens
  Payload ID: 9945
  Gene Symbol: MED16
  Gene Name: mediator complex subunit 16
  ENSP ID: ENSP00000465827
MCDLRRPAAGGMMDLAYVCEWEKWSKSTHCPSVPLACAWSCRNLIAFTM

SEQ ID NO: 49727 - protein, 537 aa, Homo sapiens
  Payload ID: 9945
  Gene Symbol: MED16
  Gene Name: mediator complex subunit 16
  ENSP ID: ENSP00000466868
MCDLRRPAAGGMMDLAYVCEWEKWSKSTHCPSVPLACAWSCRNLIAFTMDLRSDDQDLTRMIHILDTEHPWDLHSIPSEHHEAITCLEWDQSGSRLLSADADGQIKCWSMADHLANSWESSVGSLVEGDPIVALSWLHNGVKLALHVEKSGASSFGEKFSRVKFSPSLTLFGGKPMEGWIAVTVSGLVTVSLLKPSGQVLTSTESLCRLRGRVALADIAFTGGGNIVVATADGSSASPVQFYKVCVSVVSEKCRIDTEILPSLFMRCTTDLNRKDKFPAITHLKFLARDMSEQVLLCASSQTSSIVECWSLRKEGLPVNNIFQQISPVVGDKQPTILKWRILSATNDLDRVSAVALPKLPISLTNTDLKVASDTQFYPGLGLALAFHDGSVHIVHRLSLQTMAVFYSSAAPRPVDEPAMKRPRTAGPAVHLKAMQLSWTSLALVGIDSHGKVLSTRILAMKASLCKLSPCTVTRVCDYHTKLFLIAISSTLKSLLRPHFLNTPDKSPGDRLTEICTKITDVDIDKVMINLKTEEFVL

SEQ ID NO: 49728 - protein, 663 aa, Homo sapiens
  Payload ID: 9945
  Gene Symbol: MED16
  Gene Name: mediator complex subunit 16
  ENSP ID: ENSP00000475528
MCDLRRPAAGGMMDLAYVCEWEKWSKSTHCPSVPLACAWSCRNLIAFTMDLRSDDQDLTRMIHILDTEHPWDLHSIPSEHHEAITCLEWDQSGSRLLSADADGQIKCWSMADHLANSWESSVGSLVEGDPIVALSWLHNGVKLALHVEKSGASSFGEKFSRVKFSPSLTLFGGKPMEGWIAVTVSGLVTVSLLKPSGQVLTSTESLCRLRGRVALADIAFTGGGNIVVATADGSSASPVQFYKVCVSVVSEKCRIDTEILPSLFMRCTTDLNRKDKFPAITHLKFLARDMSEQVLLCASSQTSSIVECWSLRKEGLPVNNIFQQISPVVGDKQPTILKWRILSATNDLDRVSAVALPKLPISLTNTDLKVASDTQFYPGLGLALAFHDGSVHIVHRLSLQTMAVFYSSAAPRPVDEPAMKRPRTAGPAVHLKAMQLSWTSLALVGIDSHGKLSVLRLSPSMGHPLEVGLALRHLLFLLEYCMVTGYDWWDILLHVQPSMVQSLVEKLHEEYTRQTAALQQVLSTRILAMKASLCKLSPCTVTRVCDYHTKLFLIAISSTLKSLLRPHFLNTPDKSPGDRLTEICTKITDVDIDKVMINLKTEEFVLDMNTLQALQQLLQWVGDFVLYLLASLPNQPSPTSEPSPTSEPCPTSEPSPTSEPSSP

SEQ ID NO: 49729 - protein, 505 aa, Homo sapiens
  Payload ID: 9945
  Gene Symbol: MED16
  Gene Name: mediator complex subunit 16
  ENSP ID: ENSP00000475725
  MOD_RES (1)..(1): Any amino acid
XVVSEKCRIDTEILPSLFMRCTTDLNRKDKFPAITHLKFLARDMSEQVLLCASSQTSSIVECWSLRKEGLPVNNIFQQISPVVGDKQPTILKWRILSATNDLDRVSAVALPKLPISLTNTDLKVASDTQFYPGLGLALAFHDGSVHIVHRLSLQTMAVFYSSAAPRPVDEPAMKRPRTAGPAVHLKAMQLSWTSLALVGIDSHGKLSVLRLSPSMGHPLEVGLALRHLLFLLEYCMVTGYDWWDILLHVQPSMVQSLVEKLHEEYTRQTAALQQVLSTRILAMKASLCKLSPCTVTRVCDYHTKLFLIAISSTLKSLLRPHFLNTPDKSPGDRLTEICTKITDVDIDKVMINLKTEEFVLDMNTLQALQQLLQWVGDFVLYLLASLPNQVAMRAQRASRTRRWWMNAACCPASCLSPAWTGCQPATAWLAACSPSSPFVCSLAGRPRCLAVLPPCSSTASPGPQASPRSTTCGGCTLALAPRRNARPAPGAAVSPCSSRPTEPRR

SEQ ID NO: 49730 - protein, 79 aa, Homo sapiens
  Payload ID: 9945
  Gene Symbol: MED16
  Gene Name: mediator complex subunit 16
  ENSP ID: ENSP00000478286
  MOD_RES (1)..(1): Any amino acid
XATLQLDGLARAPGQPKIDHLRRLHLGACPTEECKACTRCGCVTMLKSPNRTTAVKQWEQRWIKNCLCGLLKAVGRTPA

SEQ ID NO: 49731 - protein, 219 aa, Homo sapiens
  Payload ID: 9945
  Gene Symbol: MED16
  Gene Name: mediator complex subunit 16
  ENSP ID: ENSP00000479411
MCDLRRPAAGGMMDLAYVCEWEKWSKSTHCPSVPLACAWSCRNLIAFTMDLRSDDQDLTRMIHILDTEHPWDLHSIPSEHHEAITCLEWDQSGSRLLSADADGQIKCWSMADHLANSWESSVGSLVEGDPIVALSWLHNGVKLALHVEKSGASSFGEKFSRVKFSPSLTLFGGKPMEGWIAVTVSGLVTVSLLKPSGQVLTSTESLCGGLWWRVPLSYP

SEQ ID NO: 49732 - protein, 194 aa, Homo sapiens
  Payload ID: 9945
  Gene Symbol: MED16
  Gene Name: mediator complex subunit 16
  ENSP ID: ENSP00000480766
MCDLRRPAAGGMMDLAYVCEWEKWSKSTHCPSVPLACAWSCRNLIAFTMDLRSDDQDLTRMIHILDTEHPWDLHSIPSEHHEAITCLEWDQSGSRLLSADADGQIKCWSMADHLANSWESSVGSLVEGDPIVALSWLHNGVKLALHVEKSLLRPHFLNTPDKSPGDRLTEICTKITDVDIDKVMINLKTEEFVL

SEQ ID NO: 49733 - protein, 135 aa, Homo sapiens [sequence omitted]

SEQ ID NO: 49734 - protein, 371 aa, Homo sapiens
  Payload ID: 9945
  Gene Symbol: MED16
  Gene Name: mediator complex subunit 16
  ENSP ID: ENSP00000487810
  MOD_RES (1)..(1): Any amino acid
XLALAFHDGSVHIVHRLSLQTMAVFYSSAAPRPVDEPAMKRPRTAGPAVHLKAMQLSWTSLALVGIDSHGKLSVLRLSPSMGHPLEVGLALRHLLFLLEYCMVTGYDWWDILLHVQPSMVQSLVEKLHEEYTRQTAALQQVLSTRILAMKASLCKLSPCTVTRVCDYHTKLFLIAISSTLKSLLRPHFLNTPDKSPGDRLTEICTKITDVDIDKVMINLKTEEFVLDMNTLQALQQLLQWVGDFVLYLLASLPNQVAMRAQRASRTRRWWMNAACCPASCLSPAWTGCQPATAWSAACSPSSPFVCSLAGRPRCLAVLPPCSSTASPGPQASPRSTTCGGCTLALAPRRNARPAPGAAVSPCSSRPTEPRR

SEQ ID NO: 49735 - protein, 497 aa, Homo sapiens
  Payload ID: 9945
  Gene Symbol: MED16
  Gene Name: mediator complex subunit 16
  ENSP ID: ENSP00000488309
  MOD_RES (1)..(1): Any amino acid
XLALAFHDGSVHIVHRLSLQTMAVFYSSAAPRPVDEPAMKRPRTAGPAVHLKAMQLSWTSLALVGIDSHGKLSVLRLSPSMGHPLEVGLALRHLLFLLEYCMVTGYDWWDILLHVQPSMVQSLVEKLHEEYTRQTAALQQVLSTRILAMKASLCKLSPCTVTRVCDYHTKLFLIAISSTLKSLLRPHFLNTPDKSPGDRLTEICTKITDVDIDKVMINLKTEEFVLDMNTLQALQQLLQWVGDFVLYLLASLPNQGSLLRPGHSFLRDGTSLGMLRELMVVIRIWGLLKPSCLPVYTATSDTQDSMSLLFRLLTKLWICCRDEGPASEPDEALVDECCLLPSQLLIPSLDWLPASDGLVSRLQPKQPLRLQFGRAPTLPGSAATLQLDGLARAPGQPKIDHLRRLHLGACPTEECKACTRCGCVTMLKSPNRTTAVKQWEQRWIKNCLAVEGRGPDACVTSRASEEAPAFVQLGPQSTHHSPRTPRSLDHLHPKDRP

SEQ ID NO: 49736 - protein, 480 aa, Homo sapiens
  Payload ID: 9945
  Gene Symbol: MED16
  Gene Name: mediator complex subunit 16
  ENSP ID: ENSP00000488368
  MOD_RES (1)..(1): Any amino acid
XLALAFHDGSVHIVHRLSLQTMAVFYSSAAPRPVDEPAMKRPRTAGPAVHLKAMQLSWTSLALVGIDSHGKLSVLRLSPSMGHPLEVGLALRHLLFLLEYCMVTGYDWWDILLHVQPSMVQSLVEKLHEEYTRQTAALQQVLSTRILAMKASLCKLSPCTVTRVCDYHTKLFLIAISSTLKSLLRPHFLNTPDKSPGDRLTEICTKITDVDIDKVMINLKTEEFVLDMNTLQALQQLLQWVGDFVLYLLASLPNQGSLLRPGHSFLRDGTSLGMLRELMVVIRIWGLLKPSCLPVYTATSDTQDSMSLLFRLLTKLWICFPSTGPCSVWVLLGWQPLPGRDEGPASEPDEALVDECCLLPSQLLIPSLDWLPASDGLVSRLQPKQPLRLQFGRAPTLPGSAATLQLDGLARAPGQPKIDHLRRLHLGACPTEECKACTRCGCVTMLKSPNRTTAVKQWEQRWIKNCLCGGLWWRVPLSYP

SEQ ID NO: 49737 - protein, 45 aa, Homo sapiens
  Payload ID: 9945
  Gene Symbol: MED16
  Gene Name: mediator complex subunit 16
  ENSP ID: ENSP00000488370
SLLRPHFLNTPDKSPGDRLTEICTKITDVDIDKVMINLKTEEFVL

SEQ ID NO: 49738 - protein, 226 aa, Homo sapiens
  Payload ID: 9945
  Gene Symbol: MED16
  Gene Name: mediator complex subunit 16
  ENSP ID: ENSP00000488448
  MOD_RES (1)..(1): Any amino acid
XLALAFHDGSVHIVHRLSLQTMAVFYSSAAPRPVDEPAMKRPRTAGPAVHLKAMQLSWTSLALVGIDSHGKLSVLRLSPSMGHPLEVGLALRHLLFLLEYCMVTGYDWWDILLHVQPSMVQSLVEKLHEEYTRQTAALQQVLSTRILAMKASLCKLSPCTVTRVCDYHTKLFLIAISSTLKSLLRPHFLNTPDKSPGDRLTEICTKITDVDIDKVMINLKTEEFVL

SEQ ID NO: 49739 - protein, 283 aa, Homo sapiens
  Payload ID: 9945
  Gene Symbol: MED16
  Gene Name: mediator complex subunit 16
  ENSP ID: ENSP00000488455
  MOD_RES (1)..(1): Any amino acid
XLALAFHDGSVHIVHRLSLQTMAVFYSSAAPRPVDEPAMKRPRTAGPAVHLKAMQLSWTSLALVGIDSHGKLSVLRLSPSMGHPLEVGLALRHLLFLLEYCMVTGYDWWDILLHVQPSMVQSLVEKLHEEYTRQTAALQQVLSTRILAMKASLCKLSPCTVTRVCDYHTKLFLIAISSTLKSLLRPHFLNTPDKSPGDRLTEICTKITDVDIDKVMINLKTEEFVLDMNTLQALQQLLQWVGDFVLYLLASLPNQPSPTSEPSPTSEPSPPSEPSPTSEPSSP

SEQ ID NO: 49740 - protein, 157 aa, Homo sapiens
  Payload ID: 9945
  Gene Symbol: MED16
  Gene Name: mediator complex subunit 16
  ENSP ID: ENSP00000488625
  MOD_RES (1)..(1): Any amino acid
XLALAFHDGSVHIVHRLSLQTMAVFYSSAAPRPVDEPAMKRPRTAGPAVHLKAMQLSWTSLALVGIDSHGKVLSTRILAMKASLCKLSPCTVTRVCDYHTKLFLIAISSTLKSLLRPHFLNTPDKSPGDRLTEICTKITDVDIDKVMINLKTEEFVL

SEQ ID NO: 49741 - protein, 79 aa, Homo sapiens; identical to SEQ ID NO: 49730
  Payload ID: 9945
  Gene Symbol: MED16
  Gene Name: mediator complex subunit 16
  ENSP ID: ENSP00000488682
  MOD_RES (1)..(1): Any amino acid

SEQ ID NO: 49742 - protein, 461 aa, Homo sapiens
  Payload ID: 9945
  Gene Symbol: MED16
  Gene Name: mediator complex subunit 16
  ENSP ID: ENSP00000488787
  MOD_RES (1)..(1): Any amino acid
XLALAFHDGSVHIVHRLSLQTMAVFYSSAAPRPVDEPAMKRPRTAGPAVHLKAMQLSWTSLALVGIDSHGKLSVLRLSPSMGHPLEVGLALRHLLFLLEYCMVTGYDWWDILLHVQPSMVQSLVEKLHEEYTRQTAALQQVLSTRILAMKASLCKLSPCTVTRVCDYHTKLFLIAISSTLKSLLRPHFLNTPDKSPGDRLTEICTKITDVDIDKVMINLKTEEFVLDMNTLQALQQLLQWVGDFVLYLLASLPNQGSLLRPGHSFLRDGTSLGMLRELMVVIRIWGLLKPSCLPVYTATSDTQDSMSLLFRLLTKLWICCRDEGPASEPDEALVDECCLLPSQLLIPSLDWLPASDGLVSRLQPKQPLRLQFGRAPTLPGSAATLQLDGLARAPGQPKIDHLRRLHLGACPTEECKACTRCGCVTMLKSPNRTTAVKQWEQRWIKNCLCGGLWWRVPLSYP

SEQ ID NO: 49743 - protein, 651 aa, Homo sapiens
  Payload ID: 9946
  Gene Symbol: MED17
  Gene Name: mediator complex subunit 17
  Uniprot ID: Q9NVC6
  ENSP ID: ENSP00000251871
MSGVRAVRISIESACEKQVHEVGLDGTETYLPPLSMSQNLARLAQRIDFSQGSGSEEEEAAGTEGDAQEWPGAGSSADQDDEEGVVKFQPSLWPWDSVRNNLRSALTEMCVLYDVLSIVRDKKFMTLDPVSQDALPPKQNPQTLQLISKKKSLAGAAQILLKGAERLTKSVTENQENKLQRDFNSELLRLRQHWKLRKVGDKILGDLSYRSAGSLFPHHGTFEVIKNTDLDLDKKIPEDYCPLDVQIPSDLEGSAYIKVSIQKQAPDIGDLGTVNLFKRPLPKSKPGSPHWQTKLEAAQNVLLCKEIFAQLSREAVQIKSQVPHIVVKNQIISQPFPSLQLSISLCHSSNDKKSQKFATEKQCPEDHLYVLEHNLHLLIREFHKQTLSSIMMPHPASAPFGHKRMRLSGPQAFDKNEINSLQSSEGLLEKIIKQAKHIFLRSRAAATIDSLASRIEDPQIQAHWSNINDVYESSVKVLITSQGYEQICKSIQLQLNIGVEQIRVVHRDGRVITLSYQEQELQDFLLSQMSQHQVHAVQQLAKVMGWQVLSFSNHVGLGPIESIGNASAITVASPSGDYAISVRNGPESGSKIMVQFPRNQCKDLPKSDVLQDNKWSHLRGPFKEVQWNKMEGRNFVYKMELLMSALSPCLL

SEQ ID NO: 49744 - protein, 231 aa, Homo sapiens
  Payload ID: 9946
  Gene Symbol: MED17
  Gene Name: mediator complex subunit 17
  ENSP ID: ENSP00000431524
MSGVRAVRISIESACEKQVHEVGLDGTETYLPPLSMSQNLARLAQRIDFSQGSGSEEEEAAGTEGDAQEWPGAGSSADQDDEEGVVKFQPSLWPWDSVRNNLRSALTEMCVLYDVLSIVRDKKFMTLDPVSQDALPPKQDRGLAIYKERNGSTLRGDPNRLDRVDAMNPQTLQLISKKKSLAGAAQILLKGAERLTKSVTENQENKLQRDFNSELLRLRQHWKLRKVGDKI

SEQ ID NO: 49745 - protein, 266 aa, Homo sapiens
  Payload ID: 9946
  Gene Symbol: MED17
  Gene Name: mediator complex subunit 17
  ENSP ID: ENSP00000433090
MSGVRAVRISIESACEKQVHEVGLDGTETYLPPLSMSQNLARLAQRIDFSQGSGSEEEEAAGTEGDAQEWPGAGSSADQDDEEGVVKFQPSLWPWDSVRNNLRSALTEMCVLYDVLSIVRDKKFMTLDPVSQDALPPKQNPQTLQLISKKKSLAGAAQILLKGAERLTKSVTENQENKLQRDFNSELLRLRQHWKLRKVGDKILGDLSYRSAGSLFPHHGTFEVIKNTDLDLDKKIPEDYCPLDVQIPSDLEGSAYIKVFVKIFFK

SEQ ID NO: 49746 - protein, 143 aa, Homo sapiens
  Payload ID: 9946
  Gene Symbol: MED17
  Gene Name: mediator complex subunit 17
  ENSP ID: ENSP00000433626
MCVLYDVLSIVRDKKFMTLDPVSQDALPPKQNPQTLQLISKKKSLAGAAQILLKGAERLTKSVTENQENKLQRDFNSELLRLRQHWKLRKVGDKILGDLSYRSAGSLFPHHGTFEVIKNTDLDLDKKIPEDYCPLDVQIPSDL

SEQ ID NO: 49747 - protein, 145 aa, Homo sapiens
  Payload ID: 9946
  Gene Symbol: MED17
  Gene Name: mediator complex subunit 17
  Uniprot ID: Q9NVC6
  ENSP ID: ENSP00000434459
MSGVRAVRISIESACEKQVHEVGLDGTETYLPPLSMSQNLARLAQRIDFSQGSGSEEEEAAGTEGDAQEWPGAGSSADQDDEEGVVKFQPSLWPWDSVRNNLRSALTEMCVLYDVLSIVRDKKFMTLDPVSQDALPPKQVFVDFN

SEQ ID NO: 49748 - protein, 208 aa, Homo sapiens [sequence omitted]

SEQ ID NO: 49749 - protein, 208 aa, Homo sapiens [sequence omitted]

SEQ ID NO: 49750 - protein, 194 aa, Homo sapiens
  Payload ID: 9948
  Gene Symbol: MED19
  Gene Name: mediator complex subunit 19
  Uniprot ID: A0JLT2
  ENSP ID: ENSP00000337340
MENFTALFGAQADPPPPPTALGFGPGKPPPPPPPPAGGGPGTAPPPTAATAPPGADKSGAGCGPFYLMRELPGSTELTGSTNLITHYNLEQAYNKFCGKKVKEKLSNFLPDLPGMIDLPGSHDNSSLRSLIEKPPILSSSFNPITGTMLAGFRLHTGPLPEQCRLMHIQPPKKKNKHKHKQSRTQDPVPPGKPS

SEQ ID NO: 49751 - protein, 244 aa, Homo sapiens
  Payload ID: 9948
  Gene Symbol: MED19
  Gene Name: mediator complex subunit 19
  ENSP ID: ENSP00000416227
MENFTALFGAQADPPPPPTALGFGPGKPPPPPPPPAGGGPGTAPPPTAATAPPGADKSGAGCGPFYLMRELPGSTELTGSTNLITHYNLEQAYNKFCGKKVKEKLSNFLPDLPGMIDLPGSHDNSSLRSLIEKPPILSSSFNPITGTMLAGFRLHTGPLPEQCRLMHIQPPKKKNKHKHKQSRTQDPVPPETPSDSDHKKKKKKKEEDPERKRKKKEKKKKKNRHSPDHPGMGSSQASSSSSLR

SEQ ID NO: 49752 - protein, 212 aa, Homo sapiens
  Payload ID: 9949
  Gene Symbol: MED20
  Gene Name: mediator complex subunit 20
  Uniprot ID: Q9H944
  ENSP ID: ENSP00000265350
MGVTCVSQMPVAEGKSVQQTVELLTRKLEMLGAEKQGTFCVDCETYHTAASTLGSQGQTGKLMYVMHNSEYPLSCFALFENGPCLIADTNFDVLMVKLKGFFQSAKASKIETRGTRYQYCDFLVKVGTVTMGPSARGISVEVEYGPCVVASDCWSLLLEFLQSFLGSHTPGAPAVFGNRHDAVYGPADTMVQYMELFNKIRKQQQVPVAGIR

SEQ ID NO: 49753 - protein, 140 aa, Homo sapiens
  Payload ID: 9949
  Gene Symbol: MED20
  Gene Name: mediator complex subunit 20
  ENSP ID: ENSP00000377795
MPVAEGKSVQQTVELLTRKLEMLGAEKQGTFCVDCETYHTAASTLGSQGQTGKLMYVMHNSEYPLSCFALFENGPCLIADTNFDVLMVKLKGFFQSAKASKIETRGTRYQYCDFLVKVGTVTMGPSARGISVEVEYGPCV

SEQ ID NO: 49754 - protein, 145 aa, Homo sapiens
  Payload ID: 9949
  Gene Symbol: MED20
  Gene Name: mediator complex subunit 20
  ENSP ID: ENSP00000386668
MGVTCVSQMPVAEGKSVQQTVELLTRKLEMLGAEKQGTFCVDCETYHTAASTLGSQGQTGKLMYVMHNSEYPLSCFALFENGPCLIADTNFDVLMVKLKGFFQSAKASKIETRGTRYQYCDFLVKVGTVTMGPSARGISVEVRPW

SEQ ID NO: 49755 - protein, 123 aa, Homo sapiens
  Payload ID: 9949
  Gene Symbol: MED20
  Gene Name: mediator complex subunit 20
  Uniprot ID: Q9H944
  ENSP ID: ENSP00000386816
MGVTCVSQMPVAEGKSVQQTVELLTRKLEMLGAEKQGTFCVDCETYHTAASTLGSQGQTGKLMYVMHNSEYPLSCFALFENGPCLIADTNFDVLMVKLKGFFQSAKASKIETRGTRWSMAPVW

SEQ ID NO: 49756 - protein, 60 aa, Homo sapiens
  Payload ID: 9949
  Gene Symbol: MED20
  Gene Name: mediator complex subunit 20
  ENSP ID: ENSP00000403061
MMEMFSNNSVQYTSPSHLWLWATVLNSSSSQSCVSQMPVAEGKSVQQTVELLTRKLEMLG

SEQ ID NO: 49757 - protein, 211 aa, Homo sapiens
  Payload ID: 9949
  Gene Symbol: MED20
  Gene Name: mediator complex subunit 20
  ENSP ID: ENSP00000484159
MGVTCVSQMPVAEGKSVQQTVELLTRKLEMLGAEKQGTFCVDCETYHTAASTLGSQGQTGKLMYVMHNSEYPLSCFALFENGPCLIADTNFDVLMVKLKGFFQSAKASKIETRGTRYQYCDFLVKVGTVTMGPVPGISVEVEYGPCVVASDCWSLLLEFLQSFLGSHTPGAPAVFGNRHDAVYGPADTMVQYMELFNKIRKQQQVPVAGIR

SEQ ID NO: 49758 - protein, 144 aa, Homo sapiens
  Payload ID: 9950
  Gene Symbol: MED21
  Gene Name: mediator complex subunit 21
  Uniprot ID: Q13503
  ENSP ID: ENSP00000282892
MADRLTQLQDAVNSLADQFCNAIGVLQQCGPPASFNNIQTAINKDQPANPTEEYAQLFAALIARTAKDIDVLIDSLPSEESTAALQAASLYKLEEENHEAATCLEDVVYRGDMLLEKIQSALADIAQSQLKTRSGTHSQSLPDS

SEQ ID NO: 49759 - protein, 159 aa, Homo sapiens
  Payload ID: 9950
  Gene Symbol: MED21
  Gene Name: mediator complex subunit 21
  ENSP ID: ENSP00000442126
MADRLTQLQDAVNSLADQFCNAIGVLQQCGPPASFNNIQTAINKDQPANPTEEYAQLFAALIARTAKDIDVLIDSLPSEESTAALQAASLYKLEEENHEAATCLEDVVYRGDMLLEKIQSALADIAQSQLKTRSGEVSVTQAEVQFCDHGSLQLHPGFR

SEQ ID NO: 49760 - protein, 87 aa, Homo sapiens
  Payload ID: 9950
  Gene Symbol: MED21
  Gene Name: mediator complex subunit 21
  ENSP ID: ENSP00000444297
MADRLTQLQDAVNSVRNFIRLASVFLFLEVKQGRKGAQEAKLESGERTERQGFGIKRSLGRRHRELGGLRPAAGRCLKVREGADSFA

SEQ ID NO: 49761 - protein, 200 aa, Homo sapiens
  Payload ID: 9951
  Gene Symbol: MED22
  Gene Name: mediator complex subunit 22
  Uniprot ID: Q15528
  ENSP ID: ENSP00000342343
MAQQRALPQSKETLLQSYNKRLKDDIKSIMDNFTEIIKTAKIEDETQVSRATQGEQDNYEMHVRAANIVRAGESLMKLVSDLKQFLILNDFPSVNEAIDQRNQQLRTLQEECDRKLITLRDEISIDLYELEEEYYSSSSSLCEANDLPLCEAYGRLDLDTDSADGLSAPLLASPEPSAGPLQVAAPAHSHAGGPGPTEHA

SEQ ID NO: 49762 - protein, 134 aa, Homo sapiens
  Payload ID: 9951
  Gene Symbol: MED22
  Gene Name: mediator complex subunit 22
  ENSP ID: ENSP00000361067
MAQQRALPQSKETLLQSYNKRLKDDIKSIMDNFTEIIKTAKIEDETQVSRATQGEQDNYEMHVRAGESLMKLVSDLKQFLILNDFPSVNEAIDQRNQQLRTLQEECDRKLITLRDEISIDLYELEEEYYSSRYK

SEQ ID NO: 49763 - protein, 137 aa, Homo sapiens
  Payload ID: 9951
  Gene Symbol: MED22
  Gene Name: mediator complex subunit 22
  ENSP ID: ENSP00000394781
MAQQRALPQSKETLLQSYNKRLKDDIKSIMDNFTEIIKTAKIEDETQVSRATQGEQDNYEMHVRAANIVRAGESLMKLVSDLKQFLILNDFPSVNEAIDQRNQQLRTLQEECDRKLITLRDEISIDLYELEEEYYSS

SEQ ID NO: 49764 - protein, 111 aa, Homo sapiens
  Payload ID: 9951
  Gene Symbol: MED22
  Gene Name: mediator complex subunit 22
  ENSP ID: ENSP00000404178
MAQQRALPQSKETLLQSYNKRLKDDIKSIMDNFTEIIKTAKIEDETQVSRATQGEQDNYEMHVRAANIVRAGESLMKLVSDLKQFLILNDFPSVNEAIDQRNQQLRTLQEE

SEQ ID NO: 49765 - protein, 135 aa, Homo sapiens
  Payload ID: 9951
  Gene Symbol: MED22
  Gene Name: mediator complex subunit 22
  ENSP ID: ENSP00000420815
MAQQRALPQSKETLLQSYNKRLKDDIKSIMDNFTEIIKTAKIEDETQVSRATQGEQDNYEMHVRAANIVRAGESLMKLVSDLKQFLILNDFPSVNEAIDQRNQQLRTLQEECDRKLITLRDEISIDLYELEEEYY

SEQ ID NO: 49766 - protein, 140 aa, Homo sapiens
  Payload ID: 9951
  Gene Symbol: MED22
  Gene Name: mediator complex subunit 22
  Uniprot ID: Q15528
  ENSP ID: ENSP00000478773
MAQQRALPQSKETLLQSYNKRLKDDIKSIMDNFTEIIKTAKIEDETQVSRATQGEQDNYEMHVRAANIVRAGESLMKLVSDLKQFLILNDFPSVNEAIDQRNQQLRTLQEECDRKLITLRDEISIDLYELEEEYYSSRYK

SEQ ID NO: 49767 - protein, 140 aa, Homo sapiens; identical to SEQ ID NO: 49766
  Payload ID: 9951
  Gene Symbol: MED22
  Gene Name: mediator complex subunit 22
  Uniprot ID: Q15528
  ENSP ID: ENSP00000481493

SEQ ID NO: 49768 - protein, 200 aa, Homo sapiens; identical to SEQ ID NO: 49761
  Payload ID: 9951
  Gene Symbol: MED22
  Gene Name: mediator complex subunit 22
  Uniprot ID: Q15528
  ENSP ID: ENSP00000482438

SEQ ID NO: 49769 - protein, 111 aa, Homo sapiens; identical to SEQ ID NO: 49764
  Payload ID: 9951
  Gene Symbol: MED22
  Gene Name: Mediator complex subunit 22
  ENSP ID: ENSP00000485703

SEQ ID NO: 49770 - protein, 140 aa, Homo sapiens; identical to SEQ ID NO: 49766
  Payload ID: 9951
  Gene Symbol: MED22
  Gene Name: Mediator complex subunit 22
  ENSP ID: ENSP00000485715

SEQ ID NO: 49771 - protein, 200 aa, Homo sapiens; identical to SEQ ID NO: 49761
  Payload ID: 9951
  Gene Symbol: MED22
  Gene Name: Mediator complex subunit 22
  ENSP ID: ENSP00000485880

SEQ ID NO: 49772 - protein, 135 aa, Homo sapiens; identical to SEQ ID NO: 49765
  Payload ID: 9951
  Gene Symbol: MED22
  Gene Name: Mediator complex subunit 22
  ENSP ID: ENSP00000486136

SEQ ID NO: 49773 - protein, 140 aa, Homo sapiens; identical to SEQ ID NO: 49766
  Payload ID: 9951
  Gene Symbol: MED22
  Gene Name: Mediator complex subunit 22
  ENSP ID: ENSP00000486722

SEQ ID NO: 49774 - protein, 134 aa, Homo sapiens; identical to SEQ ID NO: 49762
  Payload ID: 9951
  Gene Symbol: MED22
  Gene Name: Mediator complex subunit 22
  ENSP ID: ENSP00000487129

SEQ ID NO: 49775 - protein, 137 aa, Homo sapiens; identical to SEQ ID NO: 49763
  Payload ID: 9951
  Gene Symbol: MED22
  Gene Name: Mediator complex subunit 22
  ENSP ID: ENSP00000487276

SEQ ID NO: 49776 - protein, 200 aa, Homo sapiens; identical to SEQ ID NO: 49761
  Payload ID: 9951
  Gene Symbol: MED22
  Gene Name: Mediator complex subunit 22
  ENSP ID: ENSP00000487580

SEQ ID NO: 49777 - protein, 1365 aa, Homo sapiens
  Payload ID: 9952
  Gene Symbol: MED23
  Gene Name: mediator complex subunit 23
  Uniprot ID: Q9ULK4
  ENSP ID: ENSP00000346588
METQLQSIFEEVVKTEVIEEAFPGMFMDTPEDEKTKLISCLGAFRQFWGGLSQESHEQCIQWIVKFIHGQHSPKRISFLYDCLAMAVETGLLPPRLVCESLINSDTLEWERTQLWALTFKLVRKIIGGVDYKGVRDLLKVILEKILTIPNTVSSAVVQQLLAAREVIAYILERNACLLPAYFAVTEIRKLYPEGKLPHWLLGNLVSDFVDTFRPTARINSICGRCSLLPVVNNSGAICNSWKLDPATLRFPLKGLLPYDKDLFEPQTALLRYVLEQPYSRDMVCNMLGLNKQTLNIAQHKQRCPVLEDQLVDLVVYAMERSETEEKFDDGGTSQLLWQHLSSQLIFFVLFQFASFPHMVLSLHQKLAGRGLIKGRDHLMWVLLQFISGSIQKNALADFLPVMKLFDLLYPEKEYIPVPDINKPQSTHAFAMTCIWIHLNRKAQNDNSKLQIPIPHSLRLHHEFLQQSLRNKSLQMNDYKIALLCNAYSTNSECFTLPMGALVETIYGNGIMRIPLPGTNCMASGSITPLPMNLLDSLTVHAKMSLIHSIATRVIKLAHAKSSVALAPALVETYSRLLVYMEIESLGIKGFISQLLPTVFKSHAWGILHTLLEMFSYRMHHIQPHYRVQLLSHLHTLAAVAQTNQNQLHLCVESTALRLITALGSSEVQPQFTRFLSDPKTVLSAESEELNRALILTLARATHVTDFFTGSDSIQGTWCKDILQTIMSFTPHNWASHTLSCFPGPLQAFFKQNNVPQESRFNLKKNVEEEYRKWKSMSNENDIITHFSMQGSPPLFLCLLWKMLLETDHINQIGYRVLERIGARALVAHVRTFADFLVYEFSTSAGGQQLNKCIEILNDMVWKYNIVTLDRLILCLAMRSHEGNEAQVCYFIIQLLLLKPNDFRNRVSDFVKENSPEHWLQNDWHTKHMNYHKKYPEKLYFEGLAEQVDPPVQIQSPYLPIYFGNVCLRFLPVFDIVIHRFLELLPVSKSLETLLDHLGGLYKFHDRPVTYLYNTLHYYEMHLRDRAFLKRKLVHAIIGSLKDNRPQGWCLSDTYLKCAMNAREENPWVPDDTYYCRLIGRLVDTMAGKSPGPFPNCDWRFNEFPNPAAHALHVTCVELMALAVSGKEVGNALLNVVLKSQPLVPRENITAWMNAIGLIITALPEPYWIVLHDRIVSVISSPSLTSETEWVGYPFRLFDFTACHQSYSEMSCSYTLALAHAVWHHSSIGQLSLIPKFLTEVLLPIVKTEFQLLYVYHLVGPFLQRFQQERTRCMIEIGVAFYDMLLNVDQCSTHLNYMDPICDFLYHMKYMFTGDSVKEQVEKIICNLKPALKLRLRFITHISKMEPAAVPPQAMNSGSPAPQSNQ

SEQ ID NO: 49778 - protein, 886 aa, Homo sapiens
  Payload ID: 9952
  Gene Symbol: MED23
  Gene Name: mediator complex subunit 23
  Uniprot ID: Q9ULK4
  ENSP ID: ENSP00000357032
METQLQSIFEEVVKTEVIEEAFPGMFMDTPEDEKTKLISCLGAFRQFWGGLSQESHEQCIQWIVKFIHGQHSPKRISFLYDCLAMAVETGLLPPRLVCESLINSDTLEWERTQLWALTFKLVRKIIGGVDYKGVRDLLKVILEKILTIPNTVSSAVVQQLLAAREVIAYILERNACLLPAYFAVTEIRKLYPEGKLPHWLLGNLVSDFVDTFRPTARINSICGRCSLLPVVNNSGAICNSWKLDPATLRFPLKGLLPYDKDLFEPQTALLRYVLEQPYSRDMVCNMLGLNKQTLNIAQHKQRCPVLEDQLVDLVVYAMERSETEEKFDDGGTSQLLWQHLSSQLIFFVLFQFASFPHMVLSLHQKLAGRGLIKGRDHLMWVLLQFISGSIQKNALADFLPVMKLFDLLYPEKEYIPVPDINKPQSTHAFAMTCIWIHLNRKAQNDNSKLQIPIPHSLRLHHEFLQQSLRNKSLQMNDYKIALLCNAYSTNSECFTLPMGALVETIYGNGIMRIPLPGTNCMASGSITPLPMNLLDSLTVHAKMSLIHSIATRVIKLAHAKSSVALAPALVETYSRLLVYMEIESLGIKGFISQLLPTVFKSHAWGILHTLLEMFSYRMHHIQPHYRVQLLSHLHTLAAVAQTNQNQLHLCVESTALRLITALGSSEVQPQFTRFLSDPKTVLSAESEELNRALILTLARATHVTDFFTGSDSIQGTWCKDILQTIMSFTPHNWASHTLSCFPGPLQAFFKQNNVPQESRFNLKKNVEEEYRKWKSMSNENDIITHFSMQGSPPLFLCLLWKMLLETDHINQIGYRVLERIGARALVAHVRTFADFLVYEFSTSAGGQQLNKCIEILNDMVWKYNIVTLDRLILCLVRINTFLSLFS

SEQ ID NO: 49779 - protein, 1374 aa, Homo sapiens
  Payload ID: 9952
  Gene Symbol: MED23
  Gene Name: mediator complex subunit 23
  ENSP ID: ENSP00000357037
METQLQSIFEEVVKTEVIEEAFPGMFMDTPEDEKTKLISCLGAFRQFWGGLSQESHEQCIQWIVKFIHGQHSPKRISFLYDCLAMAVETGLLPPRLVCESLINSDTLEWERTQLWALTFKLVRKIIGGVDYKGVRDLLKVILEKILTIPNTVSSAVVQQLLAAREVIAYILERNACLLPAYFAVTEIRKLYPEGKLPHWLLGNLVSDFVDTFRPTARINSICGRCSLLPVVNNSGAICNSWKLDPATLRFPLKGLLPYDKDLFEPQTALLRYVLEQPYSRDMVCNMLGLNKQTLNIAQHKQRCPVLEDQLVDLVVYAMERSETEEKFDDGGTSQLLWQHLSSQLIFFVLFQFASFPHMVLSLHQKLAGRGLIKGRDHLMWVLLQFISGSIQKNALADFLPVMKLFDLLYPEKEYIPVPDINKPQSTHAFAMTCIWIHLNRKAQNDNSKLQIPIPHSLRLHHEFLQQSLRNKSLQMNDYKIALLCNAYSTNSECFTLPMGALVETIYGNGIMRIPLPGTNCMASGSITPLPMNLLDSLTVHAKMSLIHSIATRVIKLAHAKSSVALAPALVETYSRLLVYMEIESLGIKGFISQLLPTVFKSHAWGILHTLLEMFSYRMHHIQPHYRVQLLSHLHTLAAVAQTNQNQLHLCVESTALRLITALGSSEVQPQFTRFLSDPKTVLSAESEELNRALILTLARATHVTDFFTGSDSIQGTWCKDILQTIMSFTPHNWASHTLSCFPGPLQAFFKQNNVPQESRFNLKKNVEEEYRKWKSMSNENDIITHFSMQGSPPLFLCLLWKMLLETDHINQIGYRVLERIGARALVAHVRTFADFLVYEFSTSAGGQQLNKCIEILNDMVWKYNIVTLDRLILCLAMRSHEGNEAQVCYFIIQLLLLKPNDFRNRVSDFVKENSPEHWLQNDWHTKHMNYHKKYPEKLYFEGLAEQVDPPVQIQSPYLPIYFGNVCLRFLPVFDIVIHRFLELLPVSKSLETLLDHLGGLYKFHDRPVTYLYNTLHYYEMHLRDRAFLKRKLVHAIIGSLKDNRPQGWCLSDTYLKCAMNAREENPWVPDDTYYCRLIGRLVDTMAGKSPGPFPNCDWRFNEFPNPAAHALHVTCVELMALAVSGKEVGNALLNVVLKSQPLVPRENITAWMNAIGLIITALPEPYWIVLHDRIVSVISSPSLTSETEWVGYPFRLFDFTACHQSYSEMSCSYTLALAHAVWHHSSIGQLSLIPKFLTEVLLPIVKTEFQLLYVYHLVGPFLQRFQQERTRCMIEIGVAFYDMLLNVDQCSTHLNYMDPICDFLYHMKYMFTGDSVKEQVKKIICNLKPALKLRLRFITHISKMEPAAVPPQAMNSGSPAPQSNQVPVSLPVTQ

SEQ ID NO: 49780 - protein, 1364 aa, Homo sapiens
  Payload ID: 9952
  Gene Symbol: MED23
  Gene Name: mediator complex subunit 23
  Uniprot ID: Q9ULK4
  ENSP ID: ENSP00000357039
METQLQSIFEEVVKTEVIEEAFPGMFMDTPEDEKTKLISCLGAFRQFWGGLSQESHEQCIQWIVKFIHGQHSPKRISFLYDCLAMAVETGLLPPRLVCESLINSDTLEWERTQLWALTFKLVRKIIGGVDYKGVRDLLKVILEKILTIPNTVSSAVVQQLLAAREVIAYILERNACLLPAYFAVTEIRKLYPEGKLPHWLLGNLVSDFVDTFRPTARINSICGRCSLLPVVNNSGAICNSWKLDPATLRFPLKGLLPYDKDLFEPQTALLRYVLEQPYSRDMVCNMLGLNKQHKQRCPVLEDQLVDLVVYAMERSETEEKFDDGGTSQLLWQHLSSQLIFFVLFQFASFPHMVLSLHQKLAGRGLIKGRDHLMWVLLQFISGSIQKNALADFLPVMKLFDLLYPEKEYIPVPDINKPQSTHAFAMTCIWIHLNRKAQNDNSKLQIPIPHSLRLHHEFLQQSLRNKSLQMNDYKIALLCNAYSTNSECFTLPMGALVETIYGNGIMRIPLPGTNCMASGSITPLPMNLLDSLTVHAKMSLIHSIATRVIKLAHAKSSVALAPALVETYSRLLVYMEIESLGIKGFISQLLPTVFKSHAWGILHTLLEMFSYRMHHIQPHYRVQLLSHLHTLAAVAQTNQNQLHLCVESTALRLITALGSSEVQPQFTRFLSDPKTVLSAESEELNRALILTLARATHVTDFFTGSDSIQGTWCKDILQTIMSFTPHNWASHTLSCFPGPLQAFFKQNNVPQESRFNLKKNVEEEYRKWKSMSNENDIITHFSMQGSPPLFLCLLWKMLLETDHINQIGYRVLERIGARALVAHVRTFADFLVYEFSTSAGGQQLNKCIEILNDMVWKYNIVTLDRLILCLAMRSHEGNEAQVCYFIIQLLLLKPNDFRNRVSDFVKENSPEHWLQNDWHTKHMNYHKKYPEKLYFEGLAEQVDPPVQIQSPYLPIYFGNVCLRFLPVFDIVIHRFLELLPVSKSLETLLDHLGGLYKFHDRPVTYLYNTLHYYEMHLRDRAFLKRKLVHAIIGSLKDNRPQGWCLSDTYLKCAMNAREENPWVPDDTYYCRLIGRLVDTMAGKSPGPFPNCDWRFNEFPNPAAHALHVTCVELMALAVSGKEVGNALLNVVLKSQPLVPRENITAWMNAIGLIITALPEPYWIVLHDRIVSVISSPSLTSETEWVGYPFRLFDFTACHQSYSEMSCSYTLALAHAVWHHSSIGQLSLIPKFLTEVLLPIVKTEFQLLYVYHLVGPFLQRFQQERTRCMIEIGVAFYDMLLNVDQCSTHLNYMDPICDFLYHMKYMFTGDSVKEQVEKIICNLKPALKLRLRFITHISKMEPAAVPPQAMNSGSPAPQSNQVDTLT

SEQ ID NO: 49781 - protein, 1368 aa, Homo sapiens
  Payload ID: 9952
  Gene Symbol: MED23
  Gene Name: mediator complex subunit 23
  Uniprot ID: Q9ULK4
  ENSP ID: ENSP00000357047
METQLQSIFEEVVKTEVIEEAFPGMFMDTPEDEKTKLISCLGAFRQFWGGLSQESHEQCIQWIVKFIHGQHSPKRISFLYDCLAMAVETGLLPPRLVCESLINSDTLEWERTQLWALTFKLVRKIIGGVDYKGVRDLLKVILEKILTIPNTVSSAVVQQLLAAREVIAYILERNACLLPAYFAVTEIRKLYPEGKLPHWLLGNLVSDFVDTFRPTARINSICGRCSLLPVVNNSGAICNSWKLDPATLRFPLKGLLPYDKDLFEPQTALLRYVLEQPYSRDMVCNMLGLNKQHKQRCPVLEDQLVDLVVYAMERSETEEKFDDGGTSQLLWQHLSSQLIFFVLFQFASFPHMVLSLHQKLAGRGLIKGRDHLMWVLLQFISGSIQKNALADFLPVMKLFDLLYPEKEYIPVPDINKPQSTHAFAMTCIWIHLNRKAQNDNSKLQIPIPHSLRLHHEFLQQSLRNKSLQMNDYKIALLCNAYSTNSECFTLPMGALVETIYGNGIMRIPLPGTNCMASGSITPLPMNLLDSLTVHAKMSLIHSIATRVIKLAHAKSSVALAPALVETYSRLLVYMEIESLGIKGFISQLLPTVFKSHAWGILHTLLEMFSYRMHHIQPHYRVQLLSHLHTLAAVAQTNQNQLHLCVESTALRLITALGSSEVQPQFTRFLSDPKTVLSAESEELNRALILTLARATHVTDFFTGSDSIQGTWCKDILQTIMSFTPHNWASHTLSCFPGPLQAFFKQNNVPQESRFNLKKNVEEEYRKWKSMSNENDIITHFSMQGSPPLFLCLLWKMLLETDHINQIGYRVLERIGARALVAHVRTFADFLVYEFSTSAGGQQLNKCIEILNDMVWKYNIVTLDRLILCLAMRSHEGNEAQVCYFIIQLLLLKPNDFRNRVSDFVKENSPEHWLQNDWHTKHMNYHKKYPEKLYFEGLAEQVDPPVQIQSPYLPIYFGNVCLRFLPVFDIVIHRFLELLPVSKSLETLLDHLGGLYKFHDRPVTYLYNTLHYYEMHLRDRAFLKRKLVHAIIGSLKDNRPQGWCLSDTYLKCAMNAREENPWVPDDTYYCRLIGRLVDTMAGKSPGPFPNCDWRFNEFPNPAAHALHVTCVELMALAVSGKEVGNALLNVVLKSQPLVPRENITAWMNAIGLIITALPEPYWIVLHDRIVSVISSPSLTSETEWVGYPFRLFDFTACHQSYSEMSCSYTLALAHAVWHHSSIGQLSLIPKFLTEVLLPIVKTEFQLLYVYHLVGPFLQRFQQERTRCMIEIGVAFYDMLLNVDQCSTHLNYMDPICDFLYHMKYMFTGDSVKEQVEKIICNLKPALKLRLRFITHISKMEPAAVPPQAMNSGSPAPQSNQVPVSLPVTQ

SEQ ID NO: 49782 - protein, 475 aa, Homo sapiens
  Payload ID: 9952
  Gene Symbol: MED23
  Gene Name: mediator complex subunit 23
  Uniprot ID: Q9ULK4
  ENSP ID: ENSP00000445072
METQLQSIFEEVVKTEVIEEAFPGMFMDTPEDEKTKLISCLGAFRQFWGGLSQESHEQCIQWIVKFIHGQHSPKRISFLYDCLAMAVETGLLPPRLVCESLINSDTLEWERTQLWALTFKLVRKIIGGVDYKGVRDLLKVILEKILTIPNTVSSAVVQQLLAAREVIAYILERNACLLPAYFAVTEIRKLYPEGKLPHWLLGNLVSDFVDTFRPTARINSICGRCSLLPVVNNSGAICNSWKLDPATLRFPLKGLLPYDKDLFEPQTALLRYVLEQPYSRDMVCNMLGLNKQHKQRCPVLEDQLVDLVVYAMERSETEEKFDDGGTSQLLWQHLSSQLIFFVLFQFASFPHMVLSLHQKLAGRGLIKGRDHLMWVLLQFISGSIQKNALADFLPVMKLFDLLYPEKEYIPVPDINKPQSTHAFAMTCIWIHLNRKAQNDNSKLQIPIPHSLRLHHESAFANCFQITCMGDLTHTP

SEQ ID NO: 49783 - protein, 976 aa, Homo sapiens
  Payload ID: 9953
  Gene Symbol: MED24
  Gene Name: mediator complex subunit 24
  Uniprot ID: O75448
  ENSP ID: ENSP00000348610
MKVVNLKQAILQAWKERWSDYQWAINMKKFFPKGATWDILNLADALLEQAMIGPSPNPLILSYLKYAISSQFDDFSRDLCVQALLDIMDMFCDRLSCHGKAEECIGLCRALLSALHWLLRCTAASAERLREGLEAGTPAAGEKQLAMCLQRLEKTLSSTKNRALLHIAKLEEASSWTAIEHSLLKLGEILANLSNPQLRSQAEQCGTLIRSIPTMLSVHAEQMHKTGFPTVHAVILLEGTMNLTGETQSLVEQLTMVKRMQHIPTPLFVLEIWKACFVGLIESPEGTEELKWTAFTFLKIPQVLVKLKKYSHGDKDFTEDVNCAFEFLLKLTPLLDKADQRCNCDCTNFLLQECGKQGLLSEASVNNLMAKRKADREHAPQQKSGENANIQPNIQLILRAEPTVTNILKTMDADHSKSPEGLLGVLGHMLSGKSLDLLLAAAAATGKLKSFARKFINLNEFTTYGSEESTKPASVRALLFDISFLMLCHVAQTYGSEVILSESRTGAEVPFFETWMQTCMPEEGKILNPDHPCFRPDSTKVESLVALLNNSSEMKLVQMKWHEACLSISAAILEILNAWENGVLAFESIQKITDNIKGKVCSLAVCAVAWLVAHVRMLGLDEREKSLQMIRQLAGPLFSENTLQFYNERVVIMNSILERMCADVLQQTATQIKFPSTGVDTMPYWNLLPPKRPIKEVLTDIFAKVLEKGWVDSRSIHIFDTLLHMGGVYWFCNNLIKELLKETRKEHTLRAVELLYSIFCLDMQQVTLVLLGHILPGLLTDSSKWHSLMDPPGTALAKLAVWCALSSYSSHKGQASTRQKKRHREDIEDYISLFPLDDVQPSKLMRLLSSNEDDANILSSPTDRSMSSSLSASQLHTVNMRDPLNRVLANLFLLISSILGSRTAGPHTQFVQWFMEECVDCLEQGGRGSVLQFMPFTTVSELVKVSAMSSPKVVLAITDLSLPLGRQVAAKAIAAL

SEQ ID NO: 49784 - protein, 1014 aa, Homo sapiens
  Payload ID: 9953
  Gene Symbol: MED24
  Gene Name: mediator complex subunit 24
  ENSP ID: ENSP00000377684
MSFSLAPFLSPQSWPPPLPPAQSEIMKVVNLKQAILQAWKERWSDYQWAINMKKFFPKGATWDILNLADALLEQAMIGPSPNPLILSYLKYAISSQMVSYSSVLTAISKFDDFSRDLCVQALLDIMDMFCDRLSCHGKAEECIGLCRALLSALHWLLRCTAASAERLREGLEAGTPAAGEKQLAMCLQRLEKTLSSTKNRALLHIAKLEEASSWTAIEHSLLKLGEILANLSNPQLRSQAEQCGTLIRSIPTMLSVHAEQMHKTGFPTVHAVILLEGTMNLTGETQSLVEQLTMVKRMQHIPTPLFVLEIWKACFVGLIESPEGTEELKWTAFTFLKIPQVLVKLKKYSHGDKDFTEDVNCAFEFLLKLTPLLDKADQRCNCDCTNFLLQECGKQGLLSEASVNNLMAKRKADREHAPQQKSGENANIQPNIQLILRAEPTVTNILKTMDADHSKSPEGLLGVLGHMLSGKSLDLLLAAAAATGKLKSFARKFINLNEFTTYGSEESTKPASVRALLFDISFLMLCHVAQTYGSEVILSESRTGAEVPFFETWMQTCMPEEGKILNPDHPCFRPDSTKVESLVALLNNSSEMKLVQMKWHEACLSISAAILEILNAWENGVLAFESIQKITDNIKGKVCSLAVCAVAWLVAHVRMLGLDEREKSLQMIRQLAGPLFSENTLQFYNERVVIMNSILERMCADVLQQTATQIKFPSTGVDTMPYWNLLPPKRPIKEVLTDIFAKVLEKGWVDSRSIHIFDTLLHMGGVYWFCNNLIKELLKETRKEHTLRAVELLYSIFCLDMQQVTLVLLGHILPGLLTDSSKWHSLMDPPGTALAKLAVWCALSSYSSHKGQASTRQKKRHREDIEDYISLFPLDDVQPSKLMRLLSSNEDDANILSSPTDRSMSSSLSASQLHTVNMRDPLNRVLANLFLLISSILGSRTAGPHTQFVQWFMEECVDCLEQGGRGSVLQFMPFTTVSELVKVSAMSSPKVVLAITDLSLPLGRQVAAKAIAAL

SEQ ID NO: 49785 - protein, 976 aa, Homo sapiens; identical to SEQ ID NO: 49783
  Payload ID: 9953
  Gene Symbol: MED24
  Gene Name: mediator complex subunit 24
  Uniprot ID: O75448
  ENSP ID: ENSP00000377685

SEQ ID NO: 49786 - protein, 989 aa, Homo sapiens
  Payload ID: 9953
  Gene Symbol: MED24
  Gene Name: mediator complex subunit 24
  Uniprot ID: O75448
  ENSP ID: ENSP00000377686
MKVVNLKQAILQAWKERWSDYQWAINMKKFFPKGATWDILNLADALLEQAMIGPSPNPLILSYLKYAISSQMVSYSSVLTAISKFDDFSRDLCVQALLDIMDMFCDRLSCHGKAEECIGLCRALLSALHWLLRCTAASAERLREGLEAGTPAAGEKQLAMCLQRLEKTLSSTKNRALLHIAKLEEASSWTAIEHSLLKLGEILANLSNPQLRSQAEQCGTLIRSIPTMLSVHAEQMHKTGFPTVHAVILLEGTMNLTGETQSLVEQLTMVKRMQHIPTPLFVLEIWKACFVGLIESPEGTEELKWTAFTFLKIPQVLVKLKKYSHGDKDFTEDVNCAFEFLLKLTPLLDKADQRCNCDCTNFLLQECGKQGLLSEASVNNLMAKRKADREHAPQQKSGENANIQPNIQLILRAEPTVTNILKTMDADHSKSPEGLLGVLGHMLSGKSLDLLLAAAAATGKLKSFARKFINLNEFTTYGSEESTKPASVRALLFDISFLMLCHVAQTYGSEVILSESRTGAEVPFFETWMQTCMPEEGKILNPDHPCFRPDSTKVESLVALLNNSSEMKLVQMKWHEACLSISAAILEILNAWENGVLAFESIQKITDNIKGKVCSLAVCAVAWLVAHVRMLGLDEREKSLQMIRQLAGPLFSENTLQFYNERVVIMNSILERMCADVLQQTATQIKFPSTGVDTMPYWNLLPPKRPIKEVLTDIFAKVLEKGWVDSRSIHIFDTLLHMGGVYWFCNNLIKELLKETRKEHTLRAVELLYSIFCLDMQQVTLVLLGHILPGLLTDSSKWHSLMDPPGTALAKLAVWCALSSYSSHKGQASTRQKKRHREDIEDYISLFPLDDVQPSKLMRLLSSNEDDANILSSPTDRSMSSSLSASQLHTVNMRDPLNRVLANLFLLISSILGSRTAGPHTQFVQWFMEECVDCLEQGGRGSVLQFMPFTTVSELVKVSAMSSPKVVLAITDLSLPLGRQVAAKAIAAL

SEQ ID NO: 49787 - protein, 301 aa, Homo sapiens
  Payload ID: 9953
  Gene Symbol: MED24
  Gene Name: mediator complex subunit 24
  ENSP ID: ENSP00000392276
MSFSLAPFLSPQSWPPPLPPAQSEIMKVVNLKQAILQAWKERWSDYQWAINMKKFFPKGATWDILNLADALLEQAMIGPSPNPLILSYLKYAISSQFDDFSRDLCVQALLDIMDMFCDRLSCHGKAEECIGLCRALLSALHWLLRCTAASAERLREGLEAGTPAAGEKQLAMCLQRLEKTLSSTKNRALLHIAKLEEASSWTAIEHSLLKLGEILANLSNPQLRSQAEQCGTLIRSIPTMLSVHAEQMHKTGFPTVHAVILLEGTMNLTGETQSLVEQLTMVKRMQHIPTPLFVLEIWKAC

SEQ ID NO: 49788 - protein, 292 aa, Homo sapiens
  Payload ID: 9953
  Gene Symbol: MED24
  Gene Name: mediator complex subunit 24
  ENSP ID: ENSP00000393464
VYWFCNNLIKELLKETRKEHTLRAVELLYSIFCLDMQQVTLVLLGHILPGLLTDSSKWHSLMDPPGTALAKLAVWCALSSYSSHKGQASTRQKKRHREDIEDYISLFPLDDVQPSKLMRLLSSNEDDANILSSPRSSLGSPCTSYLRWVKVGLGHPRGAPLLHSAGCFPALHLLRPTADRSMSSSLSASQLHTVNMRDPLNRVLANLFLLISSILGSRTAGPHTQFVQWFMEECVDCLEQGGRGSVLQFMPFTTVSELVKVSAMSSPKVVLAITDLSLPLGRQVAAKAIAAL

SEQ ID NO: 49789 - protein, 84 aa, Homo sapiens
  Payload ID: 9953
  Gene Symbol: MED24
  Gene Name: mediator complex subunit 24
  ENSP ID: ENSP00000435760
  MOD_RES (1)..(1): Any amino acid
XGQASTRQKKRHREDIEDYISLFPLDDVQPSKLMRLLSSNEDDANILSSPTDRSMSSSLSASQLHTVNMRDPLNRVLVPPSPRV

SEQ ID NO: 49790 - protein, 189 aa, Homo sapiens
  Payload ID: 9953
  Gene Symbol: MED24
  Gene Name: mediator complex subunit 24
  ENSP ID: ENSP00000438630
MSFSLAPFLSPQSWPPPLPPAQSEIMKVVNLKQAILQAWKERWSDYQWAINMKKFFPKGATWDILNLADALLEQAMIGPSPNPLILSYLKYAISSQFDDFSRDLCVQALLDIMDMFCDRLSCHGKAEECIGLCRALLSALHWLLRCTAASAERLREGLEAGTPAAGEKQLAMCLQRLEKTLSSTKNRAL

SEQ ID NO: 49791 - protein, 163 aa, Homo sapiens
  Payload ID: 9953
  Gene Symbol: MED24
  Gene Name: mediator complex subunit 24
  ENSP ID: ENSP00000438767
MSFSLAPFLSPQSWPPPLPPAQSEIMKVVNLKQAILQAWKERWSDYQWAINMKKFFPKGATWDILNLADALLEQAMIGPSPNPLILSYLKYAISSQMVSYSSVLTAISKFDDFSRDLCVQALLDIMDMFCDRLSCHGKAEECIGLCRALLSALHWLLRCTAAS

SEQ ID NO: 49792 - protein, 100 aa, Homo sapiens
  Payload ID: 9953
  Gene Symbol: MED24
  Gene Name: mediator complex subunit 24
  ENSP ID: ENSP00000439148
MKVVNLKQAILQAWKERWSDYQWAINMKKFFPKGATWDILNLADALLEQAMIGPSPNPLILSYLKYAISSQMVSYSSVLTAISKLSRQSRGMHRTVPSPS

SEQ ID NO: 49793 - protein, 1008 aa, Homo sapiens
  Payload ID: 9953
  Gene Symbol: MED24
  Gene Name: mediator complex subunit 24
  ENSP ID: ENSP00000440100
MKVVNLKQAILQAWKERWSDYQWAINMKKFFPKGATWDILNLADALLEQAMIGPSPNPLILSYLKYAISSQMVSYSSVLTAISKFDDFSRDLCVQALLDIMDMFCDRLSCHGKAEECIGLCRALLSALHWLLRCTAASAERLREGLEAGTPAAGEKQLAMCLQRLEKTLSSTKNRALLHIAKLEEASLHTSQGLGQGGTRANQPTASWTAIEHSLLKLGEILANLSNPQLRSQAEQCGTLIRSIPTMLSVHAEQMHKTGFPTVHAVILLEGTMNLTGETQSLVEQLTMVKRMQHIPTPLFVLEIWKACFVGLIESPEGTEELKWTAFTFLKIPQVLVKLKKYSHGDKDFTEDVNCAFEFLLKLTPLLDKADQRCNCDCTNFLLQECGKQGLLSEASVNNLMAKRKADREHAPQQKSGENANIQPNIQLILRAEPTVTNILKTMDADHSKSPEGLLGVLGHMLSGKSLDLLLAAAAATGKLKSFARKFINLNEFTTYGSEESTKPASVRALLFDISFLMLCHVAQTYGSEVILSESRTGAEVPFFETWMQTCMPEEGKILNPDHPCFRPDSTKVESLVALLNNSSEMKLVQMKWHEACLSISAAILEILNAWENGVLAFESIQKITDNIKGKVCSLAVCAVAWLVAHVRMLGLDEREKSLQMIRQLAGPLFSENTLQFYNERVVIMNSILERMCADVLQQTATQIKFPSTGVDTMPYWNLLPPKRPIKEVLTDIFAKVLEKGWVDSRSIHIFDTLLHMGGVYWFCNNLIKELLKETRKEHTLRAVELLYSIFCLDMQQVTLVLLGHILPGLLTDSSKWHSLMDPPGTALAKLAVWCALSSYSSHKGQASTRQKKRHREDIEDYISLFPLDDVQPSKLMRLLSSNEDDANILSSPTDRSMSSSLSASQLHTVNMRDPLNRVLANLFLLISSILGSRTAGPHTQFVQWFMEECVDCLEQGGRGSVLQFMPFTTVSELVKVSAMSSPKVVLAITDLSLPLGRQVAAKAIAAL

SEQ ID NO: 49794 - protein, 791 aa, Homo sapiens
  Payload ID: 9953
  Gene Symbol: MED24
  Gene Name: mediator complex subunit 24
  ENSP ID: ENSP00000443344
MIGPSPNPLILSYLKYAISSQMVSYSSVLTAISKFDDFSRDLCVQALLDIMDMFCDRLSCHGKAEECIGLCRALLSALHWLLRCTAASAERLREGLEAGTPAAGEKQLAMCLQRLEKTLSSTKNRALLHIAKLEEASSWTAIEHSLLKLGEILANLSNPQLRSQAEQCGTLIRSIPTMLSVHAEQMHKTGFPTVHAVILLEGTMNLTGETQSLVEQLTMVKRMQHIPTPLFVLEIWKACFVGLIESPEGTEELKWTAFTFLKIPQVLVKLKKYSHGDKDFTEDVNCAFEFLLKLTPLLDKADQRCNCDCTNFLLQECGKQGLLSEASVNNLMAKRKADREHAPQQKSGENANIQPNIQLILRAEPTVTNILKTMDADHSKSPEGLLGVLGHMLSGKSLDLLLAAAAATGKLKSFARKFINLNEFTTYGSEESTKPASVRALLFDISFLMLCHVAQTYGSEVILSESRTGAEVPFFETWMQTCMPEEGKILNPDHPCFRPDSTKVESLVALLNNSSEMKLVQMKWHEACLSISAAILEILNAWENGVLAFESIQKITDNIKGKVCSLAVCAVAWLVAHVRMLGLDEREKSLQMIRQLAGPLFSENTLQFYNERVVIMNSILERMCADVLQQTATQIKFPSTGVDTMPYWNLLPPKRPIKEVLTDIFAKVLEKGWVDSRSIHIFDTLLHMGGVYWFCNNLIKELLKETRKEHTLRAVELLYSIFCLDMQQVTLVLLGHILPGLLTDSSKWHSLMDPPGTALAKLAVWCALSSYSSHKGQASTRQKKRHREDIE

SEQ ID NO: 49795 - protein, 176 aa, Homo sapiens
  Payload ID: 9953
  Gene Symbol: MED24
  Gene Name: mediator complex subunit 24
  ENSP ID: ENSP00000462539
MIQEWLQVEGLRLWLQAQNDSRGAGKAPFLSPQSWPPPLPPAQSEIMKVVNLKQAILQAWKERWSDYQWAINMKKFFPKGATWDILNLADALLEQAMIGPSPNPLILSYLKYAISSQMVSYSSVLTAISKFDDFSRDLCVQALLDIMDMFCDRLSCHGKAEECIGLCRALLSALHW

SEQ ID NO: 49796 - protein, 159 aa, Homo sapiens
  Payload ID: 9953
  Gene Symbol: MED24
  Gene Name: mediator complex subunit 24
  ENSP ID: ENSP00000462646
MKVVNLKQAILQAWKERWSDYQWAINMKKFFPKGATWDILNLADALLEQAMIGPSPNPLILSYLKYAISSQMVSYSSVLTAISKFDDFSRDLCVQALLDIMDMFCDRLSCHGKAEECIGLCRALLSALHWLLRCTAASAERLREGLEAGTPAAGEKQLA

SEQ ID NO: 49797 - protein, 138 aa, Homo sapiens
  Payload ID: 9953
  Gene Symbol: MED24
  Gene Name: mediator complex subunit 24
  ENSP ID: ENSP00000463043
AISSQFDDFSRDLCVQALLDIMDMFCDRLSCHGKAEECIGLCRALLSALHWLLRCTAASAERLREGLEAGTPAAGEKQLAMCLQRLEKTLSSTKNRALLHIAKLEEASLHTSQGLGQGGTRANQPTATGFWPPSASLS

SEQ ID NO: 49798 - protein, 143 aa, Homo sapiens
  Payload ID: 9953
  Gene Symbol: MED24
  Gene Name: mediator complex subunit 24
  ENSP ID: ENSP00000463480
MSFSLAPFLSPQSWPPPLPPAQSEIMKVVNLKQAILQAWKERWSDYQWAINMKKFFPKGATWDILNLADALLEQAMIGPSPNPLILSYLKYAISSQMVSYSSVLTAISKFDDFSRDLCVQALLDIMDMFCDRLSCHGKAEECI

SEQ ID NO: 49799 - protein, 57 aa, Homo sapiens
  Payload ID: 9953
  Gene Symbol: MED24
  Gene Name: mediator complex subunit 24
  ENSP ID: ENSP00000463484
  MOD_RES (1)..(1): Any amino acid
XLLEQAMIGPSPNPLILSYLKYAISSQMVSYSSVLTAINSTGFGEVEEVLSWRQGLH

SEQ ID NO: 49800 - protein, 138 aa, Homo sapiens
  Payload ID: 9953
  Gene Symbol: MED24
  Gene Name: mediator complex subunit 24
  ENSP ID: ENSP00000463528
MSFSLAPFLSPQSWPPPLPPAQSEIMKVVNLKQAILQAWKERWSDYQWAINMKKFFPKGATWDILNLADALLEQAMIGPSPNPLILSYLKYAISSQFDDFSRDLCVQALLDIMDMFCDRLSCHGKAEECIGLCRALLS

SEQ ID NO: 49801 - protein, 23 aa, Homo sapiens
  Payload ID: 9953
  Gene Symbol: MED24
  Gene Name: mediator complex subunit 24
  ENSP ID: ENSP00000463724
  MOD_RES (1)..(1): Any amino acid
XLNEFTTYGSEESSDSVRVAHRS

SEQ ID NO: 49802 - protein, 638 aa, Homo sapiens
  Payload ID: 9953
  Gene Symbol: MED24
  Gene Name: mediator complex subunit 24
  ENSP ID: ENSP00000463751
MVSYSSVLTAISKFDDFSRDLCVQALLDIMDMFCDRLSCHGKAEECIGLCRALLSALHWLLRCTAASAERLREGLEAGTPAAGEKQLAMCLQRLEKTLSSTKNRALLHIAKLEEASSWTAIEHSLLKLGEILANLSNPQLRSQAEQCGTLIRSIPTMLSVHAEQMHKTGFPTVHAVILLEGTMNLTGETQSLVEQLTMVKRMQHIPTPLFVLEIWKACFVGLIESPEGTEELKWTAFTFLKIPQVLVKLKKYSHGDKDFTEDVNCAFEFLLKLTPLLDKADQRCNCDCTNFLLQECGKQGLLSEASVNNLMAKRKADREHAPQQKSGENANIQPNIQLILRAEPTVTNILKCSSGLDFLSCPQTMDADHSKSPEGLLGVLGHMLSGKSLDLLLAAAAATGKLKSFARKFINLNEFTTYGSEESTKPASVRALLFDISFLMLCHVAQTYGSEVILSESRTGAEVPFFETWMQTCMPEEGKILNPDHPCFRPDSTKVESLVALLNNSSEMKLVQMKWHEACLSISAAILEILNAWENGVLAFESIQKITDNIKGKVCSLAVCAVAWLVAHVRMLGLDEREKSLQMIRQLAGPLFSENTLQFYNERVVIMNSILERMCADVLQQTATQIKFPSTGVDTMPY

SEQ ID NO: 49803 - protein, 54 aa, Homo sapiens
  Payload ID: 9953
  Gene Symbol: MED24
  Gene Name: mediator complex subunit 24
  ENSP ID: ENSP00000464225
MKVVNLKQAILQAWKERWSDYQWAINMKKFFPKGATWDILNLADALLEQAMIGP

SEQ ID NO: 49804 - protein, 137 aa, Homo sapiens
  Payload ID: 9953
  Gene Symbol: MED24
  Gene Name: mediator complex subunit 24
  ENSP ID: ENSP00000482676
MKVVNLKQAILQAWKERWSDYQWAINMKKFFPKGATWDILNLADALLEQAMIGPSPNPLILSYLKYAISSQMVSYSSVLTAISKFDDFSRDHKPSGHPCVRPPQPRSSLTSEELSRCKVCMCVCVCVCVCLCVFCNM

SEQ ID NO: 49805 - protein, 747 aa, Homo sapiens
  Payload ID: 9954
  Gene Symbol: MED25
  Gene Name: mediator complex subunit 25
  Uniprot ID: Q71SY5
  ENSP ID: ENSP00000326767
MVPGSEGPARAGSVVADVVFVIEGTANLGPYFEGLRKHYLLPAIEYFNGGPPAETDFGGDYGGTQYSLVVFNTVDCAPESYVQCHAPTSSAYEFVTWLDGIKFMGGGGESCSLIAEGLSTALQLFDDFKKMREQIGQTHRVCLLICNSPPYLLPAVESTTYSGCTTENLVQQIGERGIHFSIVSPRKLPALRLLFEKAAPPALLEPLQPPTDVSQDPRHMVLVRGLVLPVGGGSAPGPLQSKQPVPLPPAAPSGATLSAAPQQPLPPVPPQYQVPGNLSAAQVAAQNAVEAAKNQKAGLGPRFSPITPLQQAAPGVGPPFSQAPAPQLPPGPPGAPKPPPASQPSLVSTVAPGSGLAPTAQPGAPSMAGTVAPGGVSGPSPAQLGAPALGGQQSVSNKLLAWSGVLEWQEKPKPASVDANTKLTRSLPCQVYVNHGENLKTEQWPQKLIMQLIPQQLLTTLGPLFRNSRMVQFHFTNKDLESLKGLYRIMGNGFAGCVHFPHTAPCEVRVLMLLYSSKKKIFMGLIPYDQSGFVNGIRQVITNHKQVQQQKLEQQQRGMGGQQAPPGLGPILEDQARPSQNLLQLRPPQPQPQGTVGASGATGQPQPQGTAQPPPGAPQGPPGAASGPPPPGPILRPQNPGANPQLRSLLLNPPPPQTGVPPPQASLHHLQPPGAPALLPPPHQGLGQPQLGPPLLHPPPAQSWPAQLPPRAPLPGQMLLSGGPRGPVPQPGLQPSVMEDDILMDLI

SEQ ID NO: 49806 - protein, 534 aa, Homo sapiens
  Payload ID: 9954
  Gene Symbol: MED25
  Gene Name: mediator complex subunit 25
  Uniprot ID: Q71SY5
  ENSP ID: ENSP00000437496
MVPGSEGPARAGSVVADVVFVIEGTANLGPYFEGLRKHYLLPAIEYFNGGPPAETDFGGDVPGNLSAAQVAAQNAVEAAKNQKAGLGPRFSPITPLQQAAPGVGPPFSQAPAPQLPPGPPGAPKPPPASQPSLVSTVAPGSGLAPTAQPGAPSMAGTVAPGGVSGPSPAQLGAPALGGQQSVSNKLLAWSGVLEWQEKPKPASVDANTKLTRSLPCQVYVNHGENLKTEQWPQKLIMQLIPQQLLTTLGPLFRNSRMVQFHFTNKDLESLKGLYRIMGNGFAGCVHFPHTAPCEVRVLMLLYSSKKKIFMGLIPYDQSGFVNGIRQVITNHKQVQQQKLEQQQRGMGGQQAPPGLGPILEDQARPSQNLLQLRPPQPQPQGTVGASGATGQPQPQGTAQPPPGAPQGPPGAASGPPPPGPILRPQNPGANPQLRSLLLNPPPPQTGVPPPQASLHHLQPPGAPALLPPPHQGLGQPQLGPPLLHPPPAQSWPAQLPPRAPLPGQMLLSGGPRGPVPQPGLQPSVMEDDILMDLI

SEQ ID NO: 49807 - protein, 253 aa, Homo sapiens
  Payload ID: 9954
  Gene Symbol: MED25
  Gene Name: mediator complex subunit 25
  ENSP ID: ENSP00000470027
MVPGSEGPARAGSVVADVVFVIEGTANLGPYFEGLRKHYLLPAIEYFNGGPPAETDFGGDYGGTQYSLVVFNTVDCAPESYVQCHAPTSSAYEFVTWLDGIKFMGGGGESCSLIAEGLSTALQLFDDFKKMREQIGQTHRVCLLICNSPPYLLPAVESTTYSGCTTENLVQQIGERGIHFSIVSPRKLPALRLLFEKAAPPALLEPLQPPTDVSQDPRHMVLVRGLVLPAGPAAQRHGGRHPHGSHLNPQHPI

SEQ ID NO: 49808 - protein, 248 aa, Homo sapiens
  Payload ID: 9954
  Gene Symbol: MED25
  Gene Name: mediator complex subunit 25
  ENSP ID: ENSP00000470692
  MOD_RES (1)..(1): Any amino acid
XEDLHGPHPLRPERLRQRHPAGHHQPQAGPAAEAGAAAARNGGTAGTPRAGAHSGGPSQALTESAPAPPTAAPASGYRRGLWGHGAAPAPRYCPAPARCPSRPSWSSFWPTPSWTHPSAPEPWGQPSAAKPPPQPTTAADWGAPTPGLPPPPPATRGSCAAASAAPGPGAAPVGAPTPASTTCPVLARTTSPSGSTASGKTKERRRGPCVSRKMGASLFLCGSEEHAYVFNMQTNRVCVERIQPETPL

SEQ ID NO: 49809 - protein, 180 aa, Homo sapiens
  Payload ID: 9954
  Gene Symbol: MED25
  Gene Name: mediator complex subunit 25
  ENSP ID: ENSP00000478074
MVPGSEGPARAGSVVADVVFVIEGTANLGPYFEGLRKHYLLPAIEYFNGAPQGPPGAASGPPPPGPILRPQNPGANPQLRSLLLNPPPPQTGVPPPQASLHHLQPPGAPALLPPPHQGLGQPQLGPPLLHPPPAQSWPAQLPPRAPLPGQMLLSGGPRGPVPQPGLQPSVMEDDILMDLI

SEQ ID NO: 49810 - protein, 259 aa, Homo sapiens
  Payload ID: 9954
  Gene Symbol: MED25
  Gene Name: mediator complex subunit 25
  ENSP ID: ENSP00000479851
MVPGSEGPARAGSVVADVVFVIEGTANLGPYFEGLRKHYLLPAIEYFNGGPPAETDFGGDYGGTQYSLVVFNTVDCAPESYVQCHAPTSSAYEFVTWLDGIKFMGGGGESCSLIAEGLSTALQLFDDFKKMREQIGQTHRVCLLICNSPPYLLPAVESTTYSGCTTENLVQQIGERGIHFSIVSPRKLPALRLLFEKAAPGLAGAAAASDRCEPGPEAHGAGSGTRAACWGWLSPRPPPVKAASPPASRRTLRCQVRCC

SEQ ID NO: 49811 - protein, 482 aa, Homo sapiens
  Payload ID: 9954
  Gene Symbol: MED25
  Gene Name: mediator complex subunit 25
  ENSP ID: ENSP00000480731
MVPGSEGPARAGSVVADVVFVIEGTANLGPYFEGLRKHYLLPAIEYFNGGPPAPFSQAPAPQLPPGPPGAPKPPPASQPSLVSTVAPGSGLAPTAQPGAPSMAGTVAPGGVSGPSPAQLGAPALGGQQSVSNKLLAWSGVLEWQEKPKPASVDANTKLTRSLPCQVYVNHGENLKTEQWPQKLIMQLIPQQLLTTLGPLFRNSRMVQFHFTNKDLESLKGLYRIMGNGFAGCVHFPHTAPCEVRVLMLLYSSKKKIFMGLIPYDQSGFVNGIRQVITNHKQVQQQKLEQQQRGMGGQQAPPGLGPILEDQARPSQNLLQLRPPQPQPQGTVGASGATGQPQPQGTAQPPPGAPQGPPGAASGPPPPGPILRPQNPGANPQLRSLLLNPPPPQTGVPPPQASLHHLQPPGAPALLPPPHQGLGQPQLGPPLLHPPPAQSWPAQLPPRAPLPGQMLLSGGPRGPVPQPGLQPSVMEDDILMDLI

SEQ ID NO: 49812 - protein, 233 aa, Homo sapiens
  Payload ID: 9954
  Gene Symbol: MED25
  Gene Name: mediator complex subunit 25
  ENSP ID: ENSP00000482155
MVPGSEGPARAGSVVADVVFVIEGTANLGPYFEGLRKHYLLPAIEYFNGGPPAETDFGGDYGGTQYSLVVFNTVDCAPESYVQCHAPTSSAYEFVTWLDGIKFMGGGGESCSLIAEGLSTALQLFDDFKKMREQIGQTHRVCLLICNSPPASLHHLQPPGAPALLPPPHQGLGQPQLGPPLLHPPPAQSWPAQLPPRAPLPGQMLLSGGPRGPVPQPGLQPSVMEDDILMDLI

SEQ ID NO: 49813 - protein, 397 aa, Homo sapiens
  Payload ID: 9954
  Gene Symbol: MED25
  Gene Name: mediator complex subunit 25
  ENSP ID: ENSP00000482659
MVPGSEGPARAGSVVADVVFVIEGTANLGPYFEGLRKHYLLPAIEYFNGGPPAETDFGGDYGGTQYSLVVFNTVDCAPESYVQCHAPTSSAYEFVTWLDGIKFMGGGGESCSLIAEGLSTALQLFDDFKKMREQIGQTHRVCLLICNSPPYLLPAVESTTYSGCTTENLVQQIGERGIHFSIVSPRKLPALRLLFEKAAPPALLEPLQPPTDVSQDPRHMVLVRGLVLPVGGGSAPGPLQSKQPVPLPPAAPSGATLSAAPQQPLPPVPPQYQVPGNLSAAQVAAQNAVEAAKNQKAGLGPRFSPITPLQQAAPGVGPPFSQAPAPALLPPPHQGLGQPQLGPPLLHPPPAQSWPAQLPPRAPLPGQMLLSGGPRGPVPQPGLQPSVMEDDILMDLI

SEQ ID NO: 49814 - protein, 250 aa, Homo sapiens
  Payload ID: 9954
  Gene Symbol: MED25
  Gene Name: mediator complex subunit 25
  ENSP ID: ENSP00000483584
MLLYSSKKKIFMGLIPYDQSGFVNGIRQVITNHKQVQQQKLEQQQRGMGGQQAPPGLGPILEDQARPSQNLLQLRPPQPQPQGTVGASGATGQPQPQGTAQPPPGAPQGPPGAASGPPPPGPIFGPRTLGPTLSCEASSSTHHRRRLGCPHPRPPSTTSSHQGLLRCCLRRQGLGQPQLGPHSCIHHLPSPGPHNFPLGLHCQVRGPGGGQRSGLSVPAAPGLEHQDRVLLGSKDIGSKNEGSPMAFAEL

SEQ ID NO: 49815 - protein, 482 aa, Homo sapiens; identical to SEQ ID NO: 49811
  Payload ID: 9954
  Gene Symbol: MED25
  Gene Name: mediator complex subunit 25
  ENSP ID: ENSP00000484882

SEQ ID NO: 49816 - protein, 600 aa, Homo sapiens
  Payload ID: 9955
  Gene Symbol: MED26
  Gene Name: mediator complex subunit 26
  Uniprot ID: O95402
  ENSP ID: ENSP00000263390
MTAAPASPQQIRDRLLQAIDPQSNIRNMVAVLEVISSLEKYPITKEALEETRLGKLINDVRKKTKNEELAKRAKKLLRSWQKLIEPAHQHEAALRGLAGATGSANGGAHNCRPEVGAAGPPRSIHDLKSRNDLQRLPGQRLDRLGSRKRRGDQRDLGHPGPPPKVSKASHDPLVPNSSPLPTNGISGSPESFASSLDGSGHAGPEGSRLERDENDKHSGKIPVNAVRPHTSSPGLGKPPGPCLQPKASVLQQLDRVDETPGPPHPKGPPRCSFSPRNSRHEGSFARQQSLYAPKGSVPSPSPRPQALDATQVPSPLPLAQPSTPPVRRLELLPSAESPVCWLEQPESHQRLAGPGCKAGLSPAEPLLSRAGFSPDSSKADSDAASSGGSDSKKKKRYRPRDYTVNLDGQVAEAGVKPVRLKERKLTFDPMTRQIKPLTQKEPVRADSPVHMEQQSRTELDKQEAKASLQSPFEQTNWKELSRNEIIQSYLSRQSSLLSSSGAQTPGAHHFMSEYLKQEESTRQGARQLHVLVPQSPPTDLPGLTREVTQDDLDRIQASQWPGVNGCQDTQGNWYDWTQCISLDPHGDDGRLNILPYVCLD

SEQ ID NO: 49817 - protein, 110 aa, Homo sapiens
  Payload ID: 9955
  Gene Symbol: MED26
  Gene Name: mediator complex subunit 26
  ENSP ID: ENSP00000469434
MVAVLEVISSLEKYPITKEALEETRLGKLINDVRKKTKNEELAKRAKKLLRSWQKLIEPAHQHEAALRGLAGATGSANGGAHNCRPEVGAAGPPRSIHDLKSRNDLQRLP

SEQ ID NO: 49818 - protein, 213 aa, Homo sapiens
  Payload ID: 9955
  Gene Symbol: MED26
  Gene Name: mediator complex subunit 26
  ENSP ID: ENSP00000471040
MPLNFRQIGGPAPKTERSRPNASGAEVEKPPRRRRFATSGFPSYGGRLLPEALCRLTFSRSGSRVAVQTPALPPHPFPHPLRGGGAAATPPDSDDPSARRITTWTSGSLALTKNSAAAQPATPVPQSRAGKALPEEGFSRRPPRPEIRNMVAVLEVISSLEKYPITKEALEETRLGKLINDVRKKTKNEELAKRAKKLLRSWQKLIEPAHQHE

SEQ ID NO: 49819 - protein, 54 aa, Homo sapiens
  Payload ID: 9955
  Gene Symbol: MED26
  Gene Name: mediator complex subunit 26
  ENSP ID: ENSP00000472706
MVAVLEVISSLEKYPITKEALEETRLGKLINDVRKKTKNEELAKRAKKLLRSWQ

SEQ ID NO: 49820 - protein, 82 aa, Homo sapiens
  Payload ID: 9955
  Gene Symbol: MED26
  Gene Name: mediator complex subunit 26
  ENSP ID: ENSP00000472880
MTAAPASPQQIRDRLLQAIDPQSNIRNMVAVLEVISSLEKYPITKEALEVSIPDPSIWEGRTGGRGWYQPGPSAASGSISVF

SEQ ID NO: 49821 - protein, 92 aa, Homo sapiens
  Payload ID: 9955
  Gene Symbol: MED26
  Gene Name: mediator complex subunit 26
  Uniprot ID: O95402
  ENSP ID: ENSP00000484490
MTAAPASPQQIRDRLLQAIDPQSNIRNMVAVLEVISSLEKYPITKEALEETRLGKLINDVRKKTKNEELAKRAKKLPGWQWACRPRGQPPGA

SEQ ID NO: 49822 - protein, 311 aa, Homo sapiens
  Payload ID: 9956
  Gene Symbol: MED27
  Gene Name: mediator complex subunit 27
  Uniprot ID: Q6P2C8
  ENSP ID: ENSP00000292035
MADVINVSVNLEAFSQAISAIQALRSSVSRVFDCLKDGMRNKETLEGREKAFIAHFQDNLHSVNRDLNELERLSNLVGKPSENHPLHNSGLLSLDPVQDKTPLYSQLLQAYKWSNKLQYHAGLASGLLNQQSLKRSANQMGVSAKRRPKAQPTTLVLPPQYVDDVISRIDRMFPEMSIHLSRPNGTSAMLLVTLGKVLKVIVVMRSLFIDRTIVKGYNENVYTEDGKLDIWSKSNYQVFQKVTDHATTALLHYQLPQMPDVVVRSFMTWLRSYIKLFQAPCQRCGKFLQDGLPPTWRDFRTLEAFHDTCRQ

SEQ ID NO: 49823 - protein, 275 aa, Homo sapiens
  Payload ID: 9956
  Gene Symbol: MED27
  Gene Name: mediator complex subunit 27
  Uniprot ID: Q6P2C8
  ENSP ID: ENSP00000349530
MADVINVSVNLEAFSQAISAIQALRSSVSRVFDCLKDGMRNKETLEGREKAFIAHFQDNLHSVNRDLNELERLSNLVGKPSENHPLHNSGLLSLDPVQDKTPLYSQLLQAYKWSNKLQYHAGLASGLLNQQSLKRSANQMGVSAKRRPKAQPTTLVLPPQYVDDVISRIDRMFPEMSIHLSRPNGTSAMLLLDIWSKSNYQVFQKVTDHATTALLHYQLPQMPDVVVRSFMTWLRSYIKLFQAPCQRCGKFLQDGLPPTWRDFRTLEAFHDTCRQ

SEQ ID NO: 49824 - protein, 130 aa, Homo sapiens
  Payload ID: 9956
  Gene Symbol: MED27
  Gene Name: mediator complex subunit 27
  Uniprot ID: Q6P2C8
  ENSP ID: ENSP00000477136
MADVINVSVNLEAFSQAISAIQALRSSVSRVFDCLKDGMRNKETLEGREKAFIAHFQDNLHSVNRDLNELERLSNLVGKPSENHPLHNSGLLSLDPVQDKTPLYSQLLQAYKWSNKKEQLSIPRIFHWKV

SEQ ID NO: 49825 - protein, 178 aa, Homo sapiens
  Payload ID: 9957
  Gene Symbol: MED28
  Gene Name: mediator complex subunit 28
  Uniprot ID: Q9H204
  ENSP ID: ENSP00000237380
MAAPLGGMFSGQPPGPPQAPPGLPGQASLLQAAPGAPRPSSSTLVDELESSFEACFASLVSQDYVNGTDQEEIRTGVDQCIQKFLDIARQTECFFLQKRLQLSVQKPEQVIKEDVSELRNELQRKDALVQKHLTKLRHWQQVLEDINVQHKKPADIPQGSLAYLEQASANIPAPLKPT

SEQ ID NO: 49826 - protein, 179 aa, Homo sapiens
  Payload ID: 9957
  Gene Symbol: MED28
  Gene Name: mediator complex subunit 28
  ENSP ID: ENSP00000426529
PLGGMFSGQPPGPPQAPPGLPGQASLLQAAPGAPRPSSSTLVDELESSFEACFASLVSQDYVNGTDQEEIRTGVDQCIQKFLDIARQTECFFLQKRLQLSVQKPEQVIKEDVSELRNELQRKDALVQKHLTKLRHWQQVLEDINVQHKKPADIPQGSLAYLEQASANIPAPLKPTHLTG

SEQ ID NO: 49827 - protein, 192 aa, Homo sapiens
  Payload ID: 9957
  Gene Symbol: MED28
  Gene Name: mediator complex subunit 28
  ENSP ID: ENSP00000483496
MAAPLGGMFSGQPPGPPQAPPGLPGQASLLQAAPGAPRPSSSTLVDELESSFEACFASLVSQDYVNGTDQEEIRTGVDQCIQKFLDIARQTECFFLQKRLQLSVQKPEQVIKEDVSELRNELQRKDALVQKHLTKLRHWQQVLEDINVQHKKPADIPQGSLAYLAGICQHPCTSEANVSKGQRQLAYEWADA

SEQ ID NO: 49828 - protein, 221 aa, Homo sapiens
  Payload ID: 9958
  Gene Symbol: MED29
  Gene Name: mediator complex subunit 29
  ENSP ID: ENSP00000314343
MLKSNGERRSRNALPAVYARKMAASQQQASAASSAAGVSGPSSAGGPGPQQQPQPPAQLVGPAQSGLLQQQQQDFDPVQRYKMLIPQLKESLQTLMKVAAQNLIQNTNIDNGQKSSDGPIQRFDKCLEEFYALCDQLELCLRLAHECLSQSCDSAKHSPTLVPTATKPDAVQPDSLPYPQYLAVIKAQISCAKDIHTALLDCANKVTGKTPAPPAGPGGTL

SEQ ID NO: 49829 - protein, 96 aa, Homo sapiens
  Payload ID: 9958
  Gene Symbol: MED29
  Gene Name: mediator complex subunit 29
  ENSP ID: ENSP00000471101
MLKSNGERRSRNALPAVYARKMAASQQQASAASSAAGVSGPSSAGGPGPQQQPQPPAQLVGPAQSGLLQQQQQDFDPVQRYKMLIPQLKESLQKEQ

SEQ ID NO: 49830 - protein, 114 aa, Homo sapiens
  Payload ID: 9958
  Gene Symbol: MED29
  Gene Name: mediator complex subunit 29
  ENSP ID: ENSP00000471444
MAASQQQASAASSAAGVSGPSSAGGPGPQQQPQPPAQLVGPAQSGLLQQQQQDFDPVQRYKMLIPQLKESLQTLMKVAAQNLIQNTNIDNGQVSLCHPGWTTVARSWLIAALNT

SEQ ID NO: 49831 - protein, 200 aa, Homo sapiens
  Payload ID: 9958
  Gene Symbol: MED29
  Gene Name: mediator complex subunit 29
  Uniprot ID: Q9NX70
  ENSP ID: ENSP00000471802
MAASQQQASAASSAAGVSGPSSAGGPGPQQQPQPPAQLVGPAQSGLLQQQQQDFDPVQRYKMLIPQLKESLQTLMKVAAQNLIQNTNIDNGQKSSDGPIQRFDKCLEEFYALCDQLELCLRLAHECLSQSCDSAKHSPTLVPTATKPDAVQPDSLPYPQYLAVIKAQISCAKDIHTALLDCANKVTGKTPAPPAGPGGTL

SEQ ID NO: 49832 - protein, 196 aa, Homo sapiens
  Payload ID: 9958
  Gene Symbol: MED29
  Gene Name: mediator complex subunit 29
  Uniprot ID: Q9NX70
  ENSP ID: ENSP00000472501
MAASQQQASAASSAAGVSGPSSAGGPGPQQQPQPPAQLVGPAQSGLLQQQQQDFDPVQRYKMLIPQLKESLQTLMKVAAQNLIQNTNIDNGQKSSDGPIQRFDKCLEEFYALCDQLELCLPPSPTQCSLTASPTHSTWRSSKPRFPVPRTFTPPCWTVPTRSRARHPHHLLALGALCEVGDREWGRQWLVGGVQRE

SEQ ID NO: 49833 - protein, 208 aa, Homo sapiens
  Payload ID: 9958
  Gene Symbol: MED29
  Gene Name: mediator complex subunit 29
  ENSP ID: ENSP00000473181
MAASQQQASAASSAAGVSGPSSAGGPGPQQQPQPPAQLVGPAQSGLLQQQQQDFDPVQRYKMLIPQLKESLQTLMKVAAQNLIQNTNIDNGQKSSDGPIQRFDKCLEEFYALCDQLELCLVRSLLDTGAWRMSACHRVVTVPSTLQRWCPQPPSPTQCSLTASPTHSTWRSSKPRFPVPRTFTPPCWTVPTRSRARHPHHLLALGALC

SEQ ID NO: 49834 - protein, 221 aa, Homo sapiens; identical to SEQ ID NO: 49828
  Payload ID: 9958
  Gene Symbol: MED29
  Gene Name: mediator complex subunit 29
  ENSP ID: ENSP00000481733

SEQ ID NO: 49835 - protein, 178 aa, Homo sapiens
  Payload ID: 9959
  Gene Symbol: MED30
  Gene Name: mediator complex subunit 30
  Uniprot ID: Q96HR3
  ENSP ID: ENSP00000297347
MSTPPLAASGMAPGPFAGPQAQQAAREVNTASLCRIGQETVQDIVYRTMEIFQLLRNMQLPNGVTYHTGTYQDRLTKLQDNLRQLSVLFRKLRLVYDKCNENCGGMDPIPVEQLIPYVEEDGSKNDDRAGPPRFASEERREIAEVNKKLKQKNQQLKQIMDQLRNLIWDINAMLAMRN

SEQ ID NO: 49836 - protein, 143 aa, Homo sapiens
  Payload ID: 9959
  Gene Symbol: MED30
  Gene Name: mediator complex subunit 30
  Uniprot ID: Q96HR3
  ENSP ID: ENSP00000431051
MSTPPLAASGMAPGPFAGPQAQQAAREVNTASLCRIGQETVQDIVYRTMEIFQLLRNMQLPNGVTYHTGTYQDRLTKLQDNLRQLSVLFRKLRLVYDKCNENCGGMDPIPVEKLKQKNQQLKQIMDQLRNLIWDINAMLAMRN

SEQ ID NO: 49837 - protein, 131 aa, Homo sapiens
  Payload ID: 9960
  Gene Symbol: MED31
  Gene Name: mediator complex subunit 31
  Uniprot ID: Q9Y3C7
  ENSP ID: ENSP00000225728
MAAAVAMETDDAGNRLRFQLELEFVQCLANPNYLNFLAQRGYFKDKAFVNYLKYLLYWKDPEYAKYLKYPQCLHMLELLQYEHFRKELVNAQCAKFIDEQQILHWQHYSRKRMRLQQALAEQQQQNNTSGK

SEQ ID NO: 49838 - protein, 43 aa, Homo sapiens
  Payload ID: 9960
  Gene Symbol: MED31
  Gene Name: mediator complex subunit 31
  ENSP ID: ENSP00000458248
MAAAVAMETDDAGNRLRFQLELEFVQCLANPNYLNCTLSVYTC

SEQ ID NO: 49839 - protein, 57 aa, Homo sapiens
  Payload ID: 9960
  Gene Symbol: MED31
  Gene Name: mediator complex subunit 31
  ENSP ID: ENSP00000459723
MLELLQYEHFRKELVNAQCAKFIDEQQILHWQHYSRKRMRLQQALAEQQQQNNTSGK

SEQ ID NO: 49840 - protein, 270 aa, Homo sapiens
  Payload ID: 9961
  Gene Symbol: MED4
  Gene Name: mediator complex subunit 4
  Uniprot ID: Q9NPJ6
  ENSP ID: ENSP00000258648
MAASSSGEKEKERLGGGLGVAGGNSTRERLLSALEDLEVLSRELIEMLAISRNQKLLQAGEENQVLELLIHRDGEFQELMKLALNQGKIHHEMQVLEKEVEKRDSDIQQLQKQLKEAEQILATAVYQAKEKLKSIEKARKGAISSEEIIKYAHRISASNAVCAPLTWVPGDPRRPYPTDLEMRSGLLGQMNNPSTNGVNGHLPGDALAAGRLPDVLAPQYPWQSNDMSMNMLPPNHSSDFLLEPPGHNKENEDDVEIMSTDSSSSSSESD

SEQ ID NO: 49841 - protein, 224 aa, Homo sapiens
  Payload ID: 9961
  Gene Symbol: MED4
  Gene Name: mediator complex subunit 4
  Uniprot ID: Q9NPJ6
  ENSP ID: ENSP00000367849
MLAISRNQKLLQAGEENQVLELLIHRDGEFQELMKLALNQGKIHHEMQVLEKEVEKRDSDIQQLQKQLKEAEQILATAVYQAKEKLKSIEKARKGAISSEEIIKYAHRISASNAVCAPLTWVPGDPRRPYPTDLEMRSGLLGQMNNPSTNGVNGHLPGDALAAGRLPDVLAPQYPWQSNDMSMNMLPPNHSSDFLLEPPGHNKENEDDVEIMSTDSSSSSSESD

SEQ ID NO: 49842 - protein, 238 aa, Homo sapiens
  Payload ID: 9961
  Gene Symbol: MED4
  Gene Name: mediator complex subunit 4
  ENSP ID: ENSP00000413595
MKLLWWCDWLPERSHVFTQRELIEMLAISRNQKLLQAGEENQVLELLIHRDGEFQELMKLALNQGKIHHEMQVLEKEVEKRDSDIQQLQKQLKEAEQILATAVYQAKEKLKSIEKARKGAISSEEIIKYAHRISASNAVCAPLTWVPGDPRRPYPTDLEMRSGLLGQMNNPSTNGVNGHLPGDALAAGRLPDVLAPQYPWQSNDMSMNMLPPNHSSDFLLEPPGHNKENEDDVEIMST

SEQ ID NO: 49843 - protein, 153 aa, Homo sapiens
  Payload ID: 9961
  Gene Symbol: MED4
  Gene Name: mediator complex subunit 4
  ENSP ID: ENSP00000483651
  MOD_RES (1)..(1): Any amino acid
XDPRRPYPTDLEMRSGLLGQMNNPSTNGVNGHLPGDALAAGRLPDVLAPQYPWQSNDMSMNMLPPNHSSDFLLEPPGHNKENEDDVEIMSTDSSSSSKMEFHHVGQTGSELLTSSDPPTSASQSAGITGVSHRAWQEPSLLSTEDCLINTSWL

SEQ ID NO: 49844 - protein, 246 aa, Homo sapiens
  Payload ID: 9962
  Gene Symbol: MED6
  Gene Name: mediator complex subunit 6
  Uniprot ID: O75586
  ENSP ID: ENSP00000256379
MAAVDIRDNLLGISWVDSSWIPILNSGSVLDYFSERSNPFYDRTCNNEVVKMQRLTLEHLNQMVGIEYILLHAQEPILFIIRKQQRQSPAQVIPLADYYIIAGVIYQAPDLGSVINSRVLTAVHGIQSAFDEAMSYCRYHPSKGYWWHFKDHEEQDKVRPKAKRKEEPSSIFQRQRVDALLLDLRQKFPPKFVQLKPGEKPVPVDQTKKEAEPIPETVKPEEKETTKNVQQTVSAKGPPEKRMRLQ

SEQ ID NO: 49845 - protein, 181 aa, Homo sapiens
  Payload ID: 9962
  Gene Symbol: MED6
  Gene Name: mediator complex subunit 6
  Uniprot ID: O75586
  ENSP ID: ENSP00000394502
MAAVDIRDNLLGISWVDSSWIPILNSGSVLDYFSERSNPFYDRTCNNEVVKMQRLTLEHLNQMVGIEYILLHAQEPILFIIRKQQRQSPAQVIPLADYYIIAGVIYQAPDLGSVINSRVLTAVHGIQSAFDEAMSYCRYHPSKGYWWHFKDHEEQAKAWRKACSSGSNKERGRTYTRNCKT

SEQ ID NO: 49846 - protein, 253 aa, Homo sapiens
  Payload ID: 9962
  Gene Symbol: MED6
  Gene Name: mediator complex subunit 6
  Uniprot ID: O75586
  ENSP ID: ENSP00000413343
MAAVDIRDNLLGISWVDSSWIPILNSGSVLDYFSERSNPFYDRTCNNEVVKMQRLTLEHLNQMVGIEYILLHAQEPILFIIRKQQRQSPAQVIPLADYYIIAGVIYQAPDLGSVINSRVSLFSFYKLTAVHGIQSAFDEAMSYCRYHPSKGYWWHFKDHEEQDKVRPKAKRKEEPSSIFQRQRVDALLLDLRQKFPPKFVQLKPGEKPVPVDQTKKEAEPIPETVKPEEKETTKNVQQTVSAKGPPEKRMRLQ

SEQ ID NO: 49847 - protein, 249 aa, Homo sapiens
  Payload ID: 9962
  Gene Symbol: MED6
  Gene Name: mediator complex subunit 6
  ENSP ID: ENSP00000451684
MAAVDIRDNLLGISWVDSSWIPILNSGSVLDYFSERSNPFYDRTCNNEVVKMQRLTLEHLNQMVGIEYILLHAQEPILFIIRKQQRQSPAQVIPLADYYIIAGVIYQAPDLGSVINSRVLTAVHGIQSAFDEAMSYCRYHPSKGYWWHFKDHEEQDKVRPKAKRKEEPSSIFQRQRVDALLLDLRQKFPPKFVQLKPGEKPVPVDQTKKEAEPIPETVKPEEKETTKNVQQTVSAKGPPEKRMRLQKAV

SEQ ID NO: 49848 - protein, 257 aa, Homo sapiens
  Payload ID: 9962
  Gene Symbol: MED6
  Gene Name: mediator complex subunit 6
  ENSP ID: ENSP00000481920
MAAVDIRDNLLGISWVDSSWIPILNSGSVLDYFSERSNPFYDRTCNNEVVKMQRLTLEHLNQMVGIEYILLHAQEPILFIIRKQQRQSPAQVIPLADYYIIAGVIYQAPDLGSVINSRVLTAVHGIQSAFDEAMSYCRYHPSKGYWWHFKDHEEQDKVRPKAKRKEEPSSIFQRQRVDALLLDLRQKFPPKFVQLKPGEKPVPVDQTKKEAEPIPETVKPEEKETTKNVQQTVSAKGPPEKRMRLHYIILSIKINSC

SEQ ID NO: 49849 - protein, 233 aa, Homo sapiens
  Payload ID: 9963
  Gene Symbol: MED7
  Gene Name: mediator complex subunit 7
  Uniprot ID: O43513
  ENSP ID: ENSP00000286317
MGEPQQVSALPPPPMQYIKEYTDENIQEGLAPKPPPPIKDSYMMFGNQFQCDDLIIRPLESQGIERLHPMQFDHKKELRKLNMSILINFLDLLDILIRSPGSIKREEKLEDLKLLFVHVHHLINEYRPHQARETLRVMMEVQKRQRLETAERFQKHLERVIEMIQNCLASLPDDLPHSEAGMRVKTEPMDADDSNNCTGQNEHQRENSGHRRDQIIEKDAALCVLIDEMNERP

SEQ ID NO: 49850 - protein, 233 aa, Homo sapiens; identical to SEQ ID NO: 49849
  Payload ID: 9963
  Gene Symbol: MED7
  Gene Name: mediator complex subunit 7
  Uniprot ID: O43513
  ENSP ID: ENSP00000401046

SEQ ID NO: 49851 - protein, 195 aa, Homo sapiens
  Payload ID: 9963
  Gene Symbol: MED7
  Gene Name: mediator complex subunit 7
  ENSP ID: ENSP00000430746
MGEPQQVSALPPPPMQYIKEYTDENIQEGLAPKPPPPIKDSYMMFGNQFQCDDLIIRPLESQGIERLHPMQFDHKKELRKLNMSILINFLDLLDILIRSPGSIKREEKLEDLKLLFVHVHHLINEYRPHQARETLRVMMEVQKRQRLETAERFQKHLERVIEMIQNCLASLPDDLPHSEAGMRVKTEPMDADDSN

SEQ ID NO: 49852 - protein, 301 aa, Homo sapiens
  Payload ID: 9964
  Gene Symbol: MED8
  Gene Name: mediator complex subunit 8
  Uniprot ID: Q96G25
  ENSP ID: ENSP00000290663
MQREEKQLEASLDALLSQVADLKNSLGSFICKLENEYGRLTWPSVLDSFALLSGQLNTLNKVLKHEKTPLFRNQVIIPLVLSPDRDEDLMRQTEGRVPVFSHEVVPDHLRTKPDPEVEEQEKQLTTDAARIGADAAQKQIQSLNKMCSNLLEKISKEERESESGGLRPNKQTFNPTDTNALVAAVAFGKGLSNWRPSGSSGPGQAGQPGAGTILAGTSGLQQVQMAGAPSQQQPMLSGVQMAQAGQPGKMPSGIKTNIKSASMHPYQRPSCLGFILAIPLRRKVKKLLGQEGKKNAHLQLW

SEQ ID NO: 49853 - protein, 179 aa, Homo sapiens
  Payload ID: 9964
  Gene Symbol: MED8
  Gene Name: mediator complex subunit 8
  Uniprot ID: Q96G25
  ENSP ID: ENSP00000361533
MRQTEGRVPVFSHEVVPDHLRTKPDPEVEEQEKQLTTDAARIGADAAQKQIQSLNKMCSNLLEKISKEERESESGGLRPNKQTFNPTDTNALVAAVAFGKGLSNWRPSGSSGPGQAGQPGAGTILAGTSGLQQVQMAGAPSQQQPMLSGVQMAQAGQPGKMPSGIKTNIKSASMHPYQR

SEQ ID NO: 49854 - protein, 268 aa, Homo sapiens
  Payload ID: 9964
  Gene Symbol: MED8
  Gene Name: mediator complex subunit 8
  Uniprot ID: Q96G25
  ENSP ID: ENSP00000361535
MQREEKQLEASLDALLSQVADLKNSLGSFICKLENEYGRLTWPSVLDSFALLSGQLNTLNKVLKHEKTPLFRNQVIIPLVLSPDRDEDLMRQTEGRVPVFSHEVVPDHLRTKPDPEVEEQEKQLTTDAARIGADAAQKQIQSLNKMCSNLLEKISKEERESESGGLRPNKQTFNPTDTNALVAAVAFGKGLSNWRPSGSSGPGQAGQPGAGTILAGTSGLQQVQMAGAPSQQQPMLSGVQMAQAGQPGKMPSGIKTNIKSASMHPYQR

SEQ ID NO: 49855 - protein, 146 aa, Homo sapiens
  Payload ID: 9965
  Gene Symbol: MED9
  Gene Name: mediator complex subunit 9
  Uniprot ID: Q9NWA0
  ENSP ID: ENSP00000268711
MASAGVAAGRQAEDVLPPTSDQPLPDTKPLPPPQPPPVPAPQPQQSPAPRPQSPARAREEENYSFLPLVHNIIKCMDKDSPEVHQDLNALKSKFQEMRKLISTMPGIHLSPEQQQQQLQSLREQVRTKNELLQKYKSLCMFEIPKE

SEQ ID NO: 49856 - protein, 82 aa, Homo sapiens
  Payload ID: 9965
  Gene Symbol: MED9
  Gene Name: mediator complex subunit 9
  ENSP ID: ENSP00000462204
MASAGVAAGRQAEDVLPPTSDQPLPDTKPLPPPQPPPVPAPQPQQSPAPRPQSPARAREEENYSFLPLVHNIIKCRDGAGLK

SEQ ID NO: 49857 - protein, 82 aa, Homo sapiens; identical to SEQ ID NO: 49856
  Payload ID: 9965
  Gene Symbol: MED9
  Gene Name: mediator complex subunit 9
  ENSP ID: ENSP00000463031

SEQ ID NO: 49858 - protein, 297 aa, Homo sapiens
  Payload ID: 9966
  Gene Symbol: MEMO1
  Gene Name: mediator of cell motility 1
  Uniprot ID: Q9Y316
  ENSP ID: ENSP00000295065
MSNRVVCREASHAGSWYTASGPQLNAQLEGWLSQVQSTKRPARAIIAPHAGYTYCGSCAAHAYKQVDPSITRRIFILGPSHHVPLSRCALSSVDIYRTPLYDLRIDQKIYGELWKTGMFERMSLQTDEDEHSIEMHLPYTAKAMESHKDEFTIIPVLVGALSESKEQEFGKLFSKYLADPSNLFVVSSDFCHWGQRFRYSYYDESQGEIYRSIEHLDKMGMSIIEQLDPVSFSNYLKKYHNTICGRHPIGVLLNAITELQKNGMNMSFSFLNYAQSSQCRNWQDSSVSYAAGALTVH

SEQ ID NO: 49859 - protein, 300 aa, Homo sapiens
  Payload ID: 9966
  Gene Symbol: MEMO1
  Gene Name: mediator of cell motility 1
  Uniprot ID: Q9Y316
  ENSP ID: ENSP00000368691
MPLWRADKCQDVQSASWRPRRADGPQLNAQLEGWLSQVQSTKRPARAIIAPHAGYTYCGSCAAHAYKQVDPSITRRIFILGPSHHVPLSRCALSSVDIYRTPLYDLRIDQKIYGELWKTGMFERMSLQTDEDEHSIEMHLPYTAKAMESHKDEFTIIPVLVGALSESKEQEFGKLFSKYLADPSNLFVVSSDFCHWGQRFRYSYYDESQGEIYRSIEHLDKMGMSIIEQLDPVSFSNYLKKYHNTICGRHPIGVLLNAITELQKNGMNMSFSFLNYAQSSQCRNWQDSSVSYAAGALTVH

SEQ ID NO: 49860 - protein, 100 aa, Homo sapiens
  Payload ID: 9966
  Gene Symbol: MEMO1
  Gene Name: mediator of cell motility 1
  ENSP ID: ENSP00000385321
MSNRVVCREASHAGSWYTASGPQLNAQLEGWLSQVQSTKRPARAIIAPHAGYTYCGSCAAHAYKQVDPSITFSRSALMLNILSLCLFIFSSIRKMPFLII

SEQ ID NO: 49861 - protein, 297 aa, Homo sapiens; identical to SEQ ID NO: 49858
  Payload ID: 9966
  Gene Symbol: MEMO1
  Gene Name: mediator of cell motility 1
  Uniprot ID: Q9Y316
  ENSP ID: ENSP00000385557

SEQ ID NO: 49862 - protein, 274 aa, Homo sapiens
  Payload ID: 9966
  Gene Symbol: MEMO1
  Gene Name: mediator of cell motility 1
  Uniprot ID: Q9Y316
  ENSP ID: ENSP00000400795
MSNRVVCREASHAGSWYTASGPQLNAQLEGWLSQVQSTKRPARAIIAPRRIFILGPSHHVPLSRCALSSVDIYRTPLYDLRIDQKIYGELWKTGMFERMSLQTDEDEHSIEMHLPYTAKAMESHKDEFTIIPVLVGALSESKEQEFGKLFSKYLADPSNLFVVSSDFCHWGQRFRYSYYDESQGEIYRSIEHLDKMGMSIIEQLDPVSFSNYLKKYHNTICGRHPIGVLLNAITELQKNGMNMSFSFLNYAQSSQCRNWQDSSVSYAAGALTVH

SEQ ID NO: 49863 - protein, 20 aa, Homo sapiens
  Payload ID: 9966
  Gene Symbol: MEMO1
  Gene Name: mediator of cell motility 1
  ENSP ID: ENSP00000409621
MSNRVVCREASHAGSWYTAS

SEQ ID NO: 49864 - protein, 2089 aa, Homo sapiens
  Payload ID: 9967
  Gene Symbol: MDC1
  Gene Name: mediator of DNA-damage checkpoint 1
  Uniprot ID: Q14676
  ENSP ID: ENSP00000365588
MEDTQAIDWDVEEEEETEQSSESLRCNVEPVGRLHIFSGAHGPEKDFPLHLGKNVVGRMPDCSVALPFPSISKQHAEIEILAWDKAPILRDCGSLNGTQILRPPKVLSPGVSHRLRDQELILFADLLCQYHRLDVSLPFVSRGPLTVEETPRVQGETQPQRLLLAEDSEEEVDFLSERRMVKKSRTTSSSVIVPESDEEGHSPVLGGLGPPFAFNLNSDTDVEEGQQPATEEASSAARRGATVEAKQSEAEVVTEIQLEKDQPLVKERDNDTKVKRGAGNGVVPAGVILERSQPPGEDSDTDVDDDSRPPGRPAEVHLERAQPFGFIDSDTDAEEERIPATPVVIPMKKRKIFHGVGTRGPGAPGLAHLQESQAGSDTDVEEGKAPQAVPLEKSQASMVINSDTDDEEEVSAALTLAHLKESQPAIWNRDAEEDMPQRVVLLQRSQTTTERDSDTDVEEEELPVENREAVLKDHTKIRALVRAHSEKDQPPFGDSDDSVEADKSSPGIHLERSQASTTVDINTQVEKEVPPGSAIIHIKKHQVSVEGTNQTDVKAVGGPAKLLVVSLEEAWPLHGDCETDAEEGTSLTASVVADVRKSQLPAEGDAGAEWAAAVLKQERAHEVGAQGGPPVAQVEQDLPISRENLTDLVVDTDTLGESTQPQREGAQVPTGREREQHVGGTKDSEDNYGDSEDLDLQATQCFLENQGLEAVQSMEDEPTQAFMLTPPQELGPSHCSFQTTGTLDEPWEVLATQPFCLRESEDSETQPFDTHLEAYGPCLSPPRAIPGDQHPESPVHTEPMGIQGRGRQTVDKVMGIPKETAERVGPERGPLERETEKLLPERQTDVTGEEELTKGKQDREQKQLLARDTQRQESDKNGESASPERDRESLKVEIETSEEIQEKQVQKQTLPSKAFEREVERPVANRECDPAELEEKVPKVILERDTQRGEPEGGSQDQKGQASSPTPEPGVGAGDLPGPTSAPVPSGSQSGGRGSPVSPRRHQKGLLNCKMPPAEKASRIRAAEKVSRGDQESPDACLPPTVPEAPAPPQKPLNSQSQKHLAPPPLLSPLLPSIKPTVRKTRQDGSQEAPEAPLSSELEPFHPKPKIRTRKSSRMTPFPATSAAPEPHPSTSTAQPVTPKPTSQATRSRTNRSSVKTPEPVVPTAPELQPSTSTDQPVTSEPTSQVTRGRKSRSSVKTPETVVPTALELQPSTSTDRPVTSEPTSQATRGRKNRSSVKTPEPVVPTAPELQPSTSTDQPVTSEPTYQATRGRKNRSSVKTPEPVVPTAPELRPSTSTDRPVTPKPTSRTTRSRTNMSSVKTPETVVPTAPELQISTSTDQPVTPKPTSRTTRSRTNMSSVKNPESTVPIAPELPPSTSTEQPVTPEPTSRATRGRKNRSSGKTPETLVPTAPKLEPSTSTDQPVTPEPTSQATRGRTNRSSVKTPETVVPTAPELQPSTSTDQPVTPEPTSQATRGRTDRSSVKTPETVVPTAPELQASASTDQPVTSEPTSRTTRGRKNRSSVKTPETVVPAAPELQPSTSTDQPVTPEPTSRATRGRTNRSSVKTPESIVPIAPELQPSTSRNQLVTPEPTSRATRCRTNRSSVKTPEPVVPTAPEPHPTTSTDQPVTPKLTSRATRRKTNRSSVKTPKPVEPAASDLEPFTPTDQSVTPEAIAQGGQSKTLRSSTVRAMPVPTTPEFQSPVTTDQPISPEPITQPSCIKRQRAAGNPGSLAAPIDHKPCSAPLEPKSQASRNQRWGAVRAAESLTAIPEPASPQLLETPIHASQIQKVEPAGRSRFTPELQPKASQSRKRSLATMDSPPHQKQPQRGEVSQKTVIIKEEEEDTAEKPGKEEDVVTPKPGKRKRDQAEEEPNRIPSRSLRRTKLNQESTAPKVLFTGVVDARGERAVLALGGSLAGSAAEASHLVTDRIRRTVKFLCALGRGIPILSLDWLHQSRKAGFFLPPDEYVVTDPEQEKNFGFSLQDALSRARERRLLEGYEIYVTPGVQPPPPQMGEIISCCGGTYLPSMPRSYKPQRVVITCPQDFPHCSIPLRVGLPLLSPEFLLTGVLKQEAKPEAFVLSPLEMSST

SEQ ID NO: 49865 - protein, 2089 aa, Homo sapiens
  Payload ID: 9967
  Gene Symbol: MDC1
  Gene Name: mediator of DNA-damage checkpoint 1
  Uniprot ID: Q14676
  ENSP ID: ENSP00000373060
MEDTQAIDWDVEEEEETEQSSESLRCNVEPVGRLHIFSGAHGPEKDFPLHLGKNVVGRMPDCSVALPFPSISKQHAEIEILAWDKAPILRDCGSLNGTQILRPPKVLSPGVSHRLRDQELILFADLLCQYHRLDVSLPFVSRGPLTVEETPRVQGETQPQRLLLAEDSEEEVDFLSERRMVKKSRTTSSSVIVPESDEEGHSPVLGGLGPPFAFNLNSDTDVEEGQQPATEEASSAARRGATVEAKQSEAEVVTEIQLEKDQPLVKEKDNDTKVKRGAGNGVVPAGVILERSQPPGEDSDTDVDDDSRPPGRPAEVHLERAQPFGFIDSDTDAEEERIPATPVVIPMKKRKIFHGVGTRGPGAPGLAHLQESQAGSDTDVEEGKAPQAVPLEKSQASMVINSDTDDEEEVSAALTLAHLKESQPAIWNRDAEEDMPQRVVLLQRSQTTTERDSDTDVEEEELPVENREAVLKDHTKIRALVRAHSEKDQPPFGDSDDSVEADKSSPGIHLERSQASTTVDINTQVEKEVPPGSAIIHIKKHQVSVEGTNQTDVKAVGGPAKLLVVSLEEAWPLHGDCETDAEEGTSLTASVVADVRKSQLPAEGDAGAEWAAAVLKQERAHEVGAQGGPPVAQVEQDLPISRENLTDLVVDTDTLGESTQPQREGAQVPTGREREQHVGGTKDSEDNYGDSEDLDLQATQCFLENQGLEAVQSMEDEPTQAFMLTPPQELGPSHCSFQTTGTLDEPWEVLATQPFCLRESEDSETQPFDTHLEAYGPCLSPPRAIPGDQHPESPVHTEPMGIQGRGRQTVDKVMGIPKETAERVGPERGPLERETEKLLPERQTDVTGEEELTKGKQDREQKQLLARDTQRQESDKNGESASPERDRESLKVEIETSEEIQEKQVQKQTLPSKAFEREVERPVANRECDPAELEEKVPKVILERDTQRGEPEGGSQDQKGQASSPTPEPGVGAGDLPGPTSAPVPSGSQSGGRGSPVSPRRHQKGLLNCKMPPAEKASRIRAAEKVSRGDQESPDACLPPTVPEAPAPPQKPLNSQSQKHLAPPPLLSPLLPSIKPTVRKTRQDGSQEAPEAPLSSELEPFHPKPKIRTRKSSRMTPFPATSAAPEPHPSTSTAQPVTPKPTSQATRSRTNRSSVKTPEPVVPTAPELQPSTSTDQPVTSEPTSQVTRGRKSRSSVKTPETVVPTALELQPSTSTDRPVTSEPTSQATRGRKNRSSVKTPEPVVPTAPELQPSTSTDQPVTSEPTYQATRGRKNRSSVKTPEPVVPTAPELRPSTSTDRPVTPKPTSRTTRSRTNMSSVKTPETVVPTAPELQISTSTDQPVTPKPTSRTTRSRTNMSSVKNPESTVPIAPELPPSTSTEQPVTPEPTSRATRGRKNRSSGKTPETLVPTAPKLEPSTSTDQPVTPEPTSQATRGRTNRSSVKTPETVVPTAPELQPSTSTDQPVTPEPTSQATRGRTDRSSVKTPETVVPTAPELQASASTDQPVTSEPTSRTTRGRKNRSSVKTPETVVPAAPELQPSTSTDQPVTPEPTSRATRGRTNRSSVKTPESIVPIAPELQPSTSRNQLVTPEPTSRATRCRTNRSSVKTPEPVVPTAPEPHPTTSTDQPVTPKLTSRATRRKTNRSSVKTPKPVEPAASDLEPFTPTDQSVTPEAIAQGGQSKTLRSSTVRAMPVPTTPEFQSPVTTDQPISPEPITQPSCIKRQRAAGNPGSLAAPIDHKPCSAPLEPKSQASRNQRWGAVRAAESLTAIPEPASPQLLETPIHASQIQKVEPAGRSRFTPELQPKASQSRKRSLATMDSPPHQKQPQRGEVSQKTVIIKEEEEDTAEKPGKEEDVVTPKPGKRKRDQAEEEPNRIPSRSLRRTKLNQESTAPKVLFTGVVDARGERAVLALGGSLAGSAAEASHLVTDRIRRTVKFLCALGRGIPILSLDWLHQSRKAGFFLPPDEYVVTDPEQEKNFGFSLQDALSRARERRLLEGYEIYVTPGVQPPPPQMGEIISCCGGTYLPSMPRSYKPQRVVITCPQDFPHCSIPLRVGLPLLSPEFLLTGVLKQEAKPEAFVLSPLEMSST

SEQ ID NO: 49866 - protein, 2089 aa, Homo sapiens; identical to SEQ ID NO: 49864
  Payload ID: 9967
  Gene Symbol: MDC1
  Gene Name: mediator of DNA-damage checkpoint 1
  Uniprot ID: Q14676
  ENSP ID: ENSP00000387429

SEQ ID NO: 49867 - protein, 126 aa, Homo sapiens
  Payload ID: 9967
  Gene Symbol: MDC1
  Gene Name: mediator of DNA-damage checkpoint 1
  ENSP ID: ENSP00000387706
MEDTQAIDWDVEEEEETEQSSESLRCNVEPVGRLHIFSGAHGPEKDFPLHLGKNVVGRMPDCSVALPFPSISKQHAEIEILAWDKAPILRDCGSLNGTQILRPPKVLSPGVSHRLRDQELILFADL

SEQ ID NO: 49868 - protein, 113 aa, Homo sapiens
  Payload ID: 9967
  Gene Symbol: MDC1
  Gene Name: mediator of DNA-damage checkpoint 1
  ENSP ID: ENSP00000387743
MEDTQAIDWDVEEEEETEQSSESLRCNVEPVGRLHIFSGAHGPEKDFPLHLGKNVVGRMPDCSVALPFPSISKQHAEIEILAWDKAPILRDCGSLNGTQILRPPKVLSPGVSH

SEQ ID NO: 49869 - protein, 162 aa, Homo sapiens
  Payload ID: 9967
  Gene Symbol: MDC1
  Gene Name: mediator of DNA-damage checkpoint 1
  ENSP ID: ENSP00000388355
MEDTQAIDWDVEEEEETEQSSESLRCNVEPVGRLHIFSGAHGPEKDFPLHLGKNVVGRMPDCSVALPFPSISKQHAEIEILAWDKAPILRDCGSLNGTQILRPPKVLSPGVSHRLRDQELILFADLLCQYHRLDVSLPFVSRGPLTVEETPRVQGETQPQRL

SEQ ID NO: 49870 - protein, 113 aa, Homo sapiens; identical to SEQ ID NO: 49868
  Payload ID: 9967
  Gene Symbol: MDC1
  Gene Name: mediator of DNA-damage checkpoint 1
  ENSP ID: ENSP00000390040

SEQ ID NO: 49871 - protein, 162 aa, Homo sapiens; identical to SEQ ID NO: 49869
  Payload ID: 9967
  Gene Symbol: MDC1
  Gene Name: mediator of DNA-damage checkpoint 1
  ENSP ID: ENSP00000390489

SEQ ID NO: 49872 - protein, 113 aa, Homo sapiens; identical to SEQ ID NO: 49868
  Payload ID: 9967
  Gene Symbol: MDC1
  Gene Name: mediator of DNA-damage checkpoint 1
  ENSP ID: ENSP00000391230

SEQ ID NO: 49873 - protein, 162 aa, Homo sapiens; identical to SEQ ID NO: 49869
  Payload ID: 9967
  Gene Symbol: MDC1
  Gene Name: mediator of DNA-damage checkpoint 1
  ENSP ID: ENSP00000392784

SEQ ID NO: 49874 - protein, 162 aa, Homo sapiens; identical to SEQ ID NO: 49869
  Payload ID: 9967
  Gene Symbol: MDC1
  Gene Name: mediator of DNA-damage checkpoint 1
  ENSP ID: ENSP00000392833

SEQ ID NO: 49875 - protein, 126 aa, Homo sapiens; identical to SEQ ID NO: 49867
  Payload ID: 9967
  Gene Symbol: MDC1
  Gene Name: mediator of DNA-damage checkpoint 1
  ENSP ID: ENSP00000393886

SEQ ID NO: 49876 - protein, 113 aa, Homo sapiens; identical to SEQ ID NO: 49868
  Payload ID: 9967
  Gene Symbol: MDC1
  Gene Name: mediator of DNA-damage checkpoint 1
  ENSP ID: ENSP00000394074

SEQ ID NO: 49877 - protein, 306 aa, Homo sapiens
  Payload ID: 9967
  Gene Symbol: MDC1
  Gene Name: mediator of DNA-damage checkpoint 1
  ENSP ID: ENSP00000396121
  MOD_RES (1)..(1): Any amino acid
XHVGGTKDSEDNYGDSEDLDLQATQCFLENQGLEAVQSMEDEPTQAFMLTPPQELGPSHCSFQTTGLLNCKMPPAEKASRIRAAEKVSRGDQESPDACLPPTVPEAPAPPQKPLNSQSQKHLAPPPLLSPLLPSIKPTVRKTRQDGSQEAPEAPLSSELEPFHPKPKIRTRKSSRMTPFPATSAAPEPHPSTSTAQPVTPKPTSQATRSRTNRSSVKTPEPVVPTAPELQPSTSTDQPVTSEPTSQVTRGRKSRSSVKTPETVVPTALELQPSTSTDRPVTSEPTSQATRGRKNRSSVKTPEPVVP

SEQ ID NO: 49878 - protein, 306 aa, Homo sapiens; identical to SEQ ID NO: 49877
  Payload ID: 9967
  Gene Symbol: MDC1
  Gene Name: mediator of DNA-damage checkpoint 1
  ENSP ID: ENSP00000396124
  MOD_RES (1)..(1): Any amino acid

SEQ ID NO: 49879 - protein, 162 aa, Homo sapiens; identical to SEQ ID NO: 49869
  Payload ID: 9967
  Gene Symbol: MDC1
  Gene Name: mediator of DNA-damage checkpoint 1
  ENSP ID: ENSP00000396389

SEQ ID NO: 49880 - protein, 2089 aa, Homo sapiens; identical to SEQ ID NO: 49864
  Payload ID: 9967
  Gene Symbol: MDC1
  Gene Name: mediator of DNA-damage checkpoint 1
  Uniprot ID: Q14676
  ENSP ID: ENSP00000396484

SEQ ID NO: 49881 - protein, 126 aa, Homo sapiens; identical to SEQ ID NO: 49867
  Payload ID: 9967
  Gene Symbol: MDC1
  Gene Name: mediator of DNA-damage checkpoint 1
  ENSP ID: ENSP00000396989

SEQ ID NO: 49882 - protein, 306 aa, Homo sapiens; identical to SEQ ID NO: 49877
  Payload ID: 9967
  Gene Symbol: MDC1
  Gene Name: mediator of DNA-damage checkpoint 1
  ENSP ID: ENSP00000397021
  MOD_RES (1)..(1): Any amino acid

SEQ ID NO: 49883 - protein, 162 aa, Homo sapiens; identical to SEQ ID NO: 49869
  Payload ID: 9967
  Gene Symbol: MDC1
  Gene Name: mediator of DNA-damage checkpoint 1
  ENSP ID: ENSP00000397126

SEQ ID NO: 49884 - protein, 306 aa, Homo sapiens; identical to SEQ ID NO: 49877
  Payload ID: 9967
  Gene Symbol: MDC1
  Gene Name: mediator of DNA-damage checkpoint 1
  ENSP ID: ENSP00000397642
  MOD_RES (1)..(1): Any amino acid

SEQ ID NO: 49885 - protein, 126 aa, Homo sapiens; identical to SEQ ID NO: 49867
  Payload ID: 9967
  Gene Symbol: MDC1
  Gene Name: mediator of DNA-damage checkpoint 1
  ENSP ID: ENSP00000398151

SEQ ID NO: 49886 - protein, 306 aa, Homo sapiens; identical to SEQ ID NO: 49877
  Payload ID: 9967
  Gene Symbol: MDC1
  Gene Name: mediator of DNA-damage checkpoint 1
  ENSP ID: ENSP00000398474
  MOD_RES (1)..(1): Any amino acid

SEQ ID NO: 49887 - protein, 126 aa, Homo sapiens; identical to SEQ ID NO: 49867
  Payload ID: 9967
  Gene Symbol: MDC1
  Gene Name: mediator of DNA-damage checkpoint 1
  ENSP ID: ENSP00000400305

SEQ ID NO: 49888 - protein, 162 aa, Homo sapiens; identical to SEQ ID NO: 49869
  Payload ID: 9967
  Gene Symbol: MDC1
  Gene Name: mediator of DNA-damage checkpoint 1
  ENSP ID: ENSP00000400979

SEQ ID NO: 49889 - protein, 2089 aa, Homo sapiens
  Payload ID: 9967
  Gene Symbol: MDC1
  Gene Name: mediator of DNA-damage checkpoint 1
  Uniprot ID: Q14676
  ENSP ID: ENSP00000404318
MEDTQAIDWDVEEEEETEQSSESLRCNVEPVGRLHIFSGAHGPEKDFPLHLGKNVVGRMPDCSVALPFPSISKQHAEIEILAWDKAPILRDCGSLNGTQILRPPKVLSPGVSHRLRDQELILFADLLCQYHRLDVSLPFVSRGPLTVEETPRVQGETQPQRLLLAEDSEEEVDFLSERRMVKKSRTTSSSVIVPESDEEGHSPVLGGLGPPFAFNLNSDTDVEEGQQPATEEASSAARRGATVEAKQSEAEVVTEIQLEKDQPLVKERDNDTKVKRGAGNGVVPAGVILERSQPPGEDSDTDVDDDSRPPGRPAEVHLERAQPFGFIDSDTDAEEERIPATPVVIPMKKRKIFHGVGTRGPGAPGLAHLQESQAGSDTDVEEGKAPQAVPLEKSQASMVINSDTDDEEEVSAALTLAHLKESQPAIWNRDAEEDMPQRVVLLQRSQTTTERDSDTDVEEEELPVENREAVLKDHTKIRALVRAHSEKDQPPFGDSDDSVEADKSSPGIHLERSQASTTVDINTQVEKEVPPGSAIIHIKKHQVSVEGTNQTDVKAVGGPAKLLVVSLEEAWPLHGDCETDAEEGTSLTASVVADVRKSQLPAEGDAGAEWAAAVLKQERAHEVGAQGGPPVAQVEQDLPISRENLTDLVVDTDTLGESTQPQREGAQVPTGREREQHVGGTKDSEDNYGDSEDLDLQATQCFLENQGLEAVQSMEDEPTQAFMLTPPQELGPSHCSFQTTGTLDEPWEVLATQPFCLRESEDSETQPFDTHLEAYGPCLSPPRAIPGDQHPESPVHTEPMGIQGRGRQTVDKVMGIPKETAERVGPERGPLERETEKLLPERQTDVTGEEELTKGKQDREQKQLLARDTQRQESDKNGESASPERDRESLKVEIETSEEIQEKQVQKQTLPSKAFEREVERPVANRECDPAELEEKVPKVILERDTQRGEPEGGSQDQKGQASSPTPEPGVGAGDLPGPTSAPVPSGSQSGGRGSPVSPRRHQKGLLNCKMPPAEKASRIRAAEKVSRGDQESPDACLPPTVPEAPAPPQKPLNSQSQKHLAPPPLLSPLLPSIKPTVRKTRQDGSQEAPEAPLSSELEPFHPKPKIRTRKSSRMTPFPATSAAPEPHPSTSTAQPVTPKPTSQATRSRTNRSSVKTPEPVVPTAPELQPSTSTDQPVTSEPTSQVTRGRKSRSSVKTPETVVPTALELQPSTSTDRPVTSEPTSQATRGRKNRSSVKTPEPVVPTAPELQPSTSTDQPVTSEPTYQATRGRKNRSSVKTPEPVVPTAPELRPSTSTDRPVTPKPTSRTTRSRTNMSSVKTPETVVPTAPELQISTSTDQPVTPKPTSRTTRSRTNMSSVKNPESTVPIAPELPPSTSTEQPVTPEPTSRATRGRKNRSSGKTPETLVPTAPKLEPSTSTDQPVTPEPTSQATRGRTNRSSVKTPETVVPTAPELQPSTSTDQPVTPEPTSQATRGRTDRSSVKTPETVVPTAPELQASASTDQPVTSEPTSRTTRGRKNRSSVKTPETVVPAAPALQPSTSTDQPVTPEPTSRATRGRTNRSSVKTPESIVPIAPELQPSTSRNQLVTPEPTSRATRCRTNRSSVKTPEPVVPTAPEPHPTTSTDQPVTPKLTSRATRRKTNRSSVKTPKPVEPAASDLEPFTPTDQSVTPEAIAQGGQSKTLRSSTVRAMPVPTTPEFQSPVTTDQPISPEPITQPSCIKRQRAAGNPGSLAAPIDHKPCSAPLEPKSQASRNQRWGAVRAAESLTAIPEPASPQLLETPIHASQIQKVEPAGRSRFTPELQPKASQSRKRSLATMDSPPHQKQPQRGEVSQKTVIIKEEEEDTAEKPGKEEDVVTPKPGKRKRDQAEEEPNRIPSRSLRRTKLNQESTAPKVLFTGVVDARGERAVLALGGSLAGSAAEASHLVTDRIRRTVKFLCALGRGIPILSLDWLHQSRKAGFFLPPDEYVVTDPEQEKNFGFSLQDALSRARERRLLEGYEIYVTPGVQPPPPQMGEIISCCGGTYLPSMPRSYKPQRVVITCPQDFPHCSIPLRVGLPLLSPEFLLTGVLKQEAKPEAFVLSPLEMSST

SEQ ID NO: 49890 - protein, 126 aa, Homo sapiens; identical to SEQ ID NO: 49867
  Payload ID: 9967
  Gene Symbol: MDC1
  Gene Name: mediator of DNA-damage checkpoint 1
  ENSP ID: ENSP00000404954

SEQ ID NO: 49891 - protein, 113 aa, Homo sapiens; identical to SEQ ID NO: 49868
  Payload ID: 9967
  Gene Symbol: MDC1
  Gene Name: mediator of DNA-damage checkpoint 1
  ENSP ID: ENSP00000405350

SEQ ID NO: 49892 - protein, 306 aa, Homo sapiens; identical to SEQ ID NO: 49877
  Payload ID: 9967
  Gene Symbol: MDC1
  Gene Name: mediator of DNA-damage checkpoint 1
  ENSP ID: ENSP00000405806
  MOD_RES (1)..(1): Any amino acid

SEQ ID NO: 49893 - protein, 126 aa, Homo sapiens; identical to SEQ ID NO: 49867
  Payload ID: 9967
  Gene Symbol: MDC1
  Gene Name: mediator of DNA-damage checkpoint 1
  ENSP ID: ENSP00000405991

SEQ ID NO: 49894 - protein, 162 aa, Homo sapiens; identical to SEQ ID NO: 49869
  Payload ID: 9967
  Gene Symbol: MDC1
  Gene Name: mediator of DNA-damage checkpoint 1
  ENSP ID: ENSP00000407703

SEQ ID NO: 49895 - protein, 113 aa, Homo sapiens; identical to SEQ ID NO: 49868
  Payload ID: 9967
  Gene Symbol: MDC1
  Gene Name: mediator of DNA-damage checkpoint 1
  ENSP ID: ENSP00000408831

SEQ ID NO: 49896 - protein, 306 aa, Homo sapiens; identical to SEQ ID NO: 49877
  Payload ID: 9967
  Gene Symbol: MDC1
  Gene Name: mediator of DNA-damage checkpoint 1
  ENSP ID: ENSP00000408962
  MOD_RES (1)..(1): Any amino acid

SEQ ID NO: 49897 - protein, 2089 aa, Homo sapiens; identical to SEQ ID NO: 49864
  Payload ID: 9967
  Gene Symbol: MDC1
  Gene Name: mediator of DNA-damage checkpoint 1
  Uniprot ID: Q14676
  ENSP ID: ENSP00000409167

SEQ ID NO: 49898 - protein, 126 aa, Homo sapiens; identical to SEQ ID NO: 49867
  Payload ID: 9967
  Gene Symbol: MDC1
  Gene Name: mediator of DNA-damage checkpoint 1
  ENSP ID: ENSP00000410383

SEQ ID NO: 49899 - protein, 113 aa, Homo sapiens; identical to SEQ ID NO: 49868
  Payload ID: 9967
  Gene Symbol: MDC1
  Gene Name: mediator of DNA-damage checkpoint 1
  ENSP ID: ENSP00000411310

SEQ ID NO: 49900 - protein, 306 aa, Homo sapiens; identical to SEQ ID NO: 49877
  Payload ID: 9967
  Gene Symbol: MDC1
  Gene Name: mediator of DNA-damage checkpoint 1
  ENSP ID: ENSP00000413610
  MOD_RES (1)..(1): Any amino acid

SEQ ID NO: 49901 - protein, 113 aa, Homo sapiens; identical to SEQ ID NO: 49868
  Payload ID: 9967
  Gene Symbol: MDC1
  Gene Name: mediator of DNA-damage checkpoint 1
  ENSP ID: ENSP00000414163

SEQ ID NO: 49902 - protein, 2089 aa, Homo sapiens; identical to SEQ ID NO: 49864
  Payload ID: 9967
  Gene Symbol: MDC1
  Gene Name: mediator of DNA-damage checkpoint 1
  Uniprot ID: Q14676
  ENSP ID: ENSP00000415212

SEQ ID NO: 49903 - protein, 2089 aa, Homo sapiens; identical to SEQ ID NO: 49864
  Payload ID: 9967
  Gene Symbol: MDC1
  Gene Name: mediator of DNA-damage checkpoint 1
  Uniprot ID: Q14676
  ENSP ID: ENSP00000416511

SEQ ID NO: 49904 - protein, 142 aa, Homo sapiens
  Payload ID: 9967
  Gene Symbol: MDC1
  Gene Name: mediator of DNA-damage checkpoint 1
  ENSP ID: ENSP00000447771
MEDTQAIDWDVEEEEETEQSSESLRCNVEPVGRLHIFSGAHGPEKDFPLHLGKNVVGRMPDCSVALPFPSISKQHAEIEILAWDKAPILRDCGSLNVPSPGCLSALCLPGPSDSRRDTQSTGRNSTPEASVGGLGGGSRFSF

SEQ ID NO: 49905 - protein, 142 aa, Homo sapiens; identical to SEQ ID NO: 49904
  Payload ID: 9967
  Gene Symbol: MDC1
  Gene Name: mediator of DNA-damage checkpoint 1
  ENSP ID: ENSP00000447851

SEQ ID NO: 49906 - protein, 142 aa, Homo sapiens; identical to SEQ ID NO: 49904
  Payload ID: 9967
  Gene Symbol: MDC1
  Gene Name: mediator of DNA-damage checkpoint 1
  ENSP ID: ENSP00000447883

SEQ ID NO: 49907 - protein, 142 aa, Homo sapiens; identical to SEQ ID NO: 49904
  Payload ID: 9967
  Gene Symbol: MDC1
  Gene Name: mediator of DNA-damage checkpoint 1
  ENSP ID: ENSP00000448066

SEQ ID NO: 49908 - protein, 142 aa, Homo sapiens; identical to SEQ ID NO: 49904
  Payload ID: 9967
  Gene Symbol: MDC1
  Gene Name: mediator of DNA-damage checkpoint 1
  ENSP ID: ENSP00000448232

SEQ ID NO: 49909 - protein, 142 aa, Homo sapiens; identical to SEQ ID NO: 49904
  Payload ID: 9967
  Gene Symbol: MDC1
  Gene Name: mediator of DNA-damage checkpoint 1
  ENSP ID: ENSP00000449936

SEQ ID NO: 49910 - protein, 142 aa, Homo sapiens; identical to SEQ ID NO: 49904
  Payload ID: 9967
  Gene Symbol: MDC1
  Gene Name: mediator of DNA-damage checkpoint 1
  ENSP ID: ENSP00000450002

SEQ ID NO: 49911 - protein, 142 aa, Homo sapiens; identical to SEQ ID NO: 49904
  Payload ID: 9967
  Gene Symbol: MDC1
  Gene Name: mediator of DNA-damage checkpoint 1
  ENSP ID: ENSP00000483601

SEQ ID NO: 49912 - protein, 781 aa, Homo sapiens
  Payload ID: 9968
  Gene Symbol: MEFV
  Gene Name: Mediterranean fever
  Uniprot ID: O15553
  ENSP ID: ENSP00000219596
MAKTPSDHLLSTLEELVPYDFEKFKFKLQNTSVQKEHSRIPRSQIQRARPVKMATLLVTYYGEEYAVQLTLQVLRAINQRLLAEELHRAAIQEYSTQENGTDDSAASSSLGENKPRSLKTPDHPEGNEGNGPRPYGGGAASLRCSQPEAGRGLSRKPLSKRREKASEGLDAQGKPRTRSPALPGGRSPGPCRALEGGQAEVRLRRNASSAGRLQGLAGGAPGQKECRPFEVYLPSGKMRPRSLEVTISTGEKAPANPEILLTLEEKTAANLDSATEPRARPTPDGGASADLKEGPGNPEHSVTGRPPDTAASPRCHAQEGDPVDGTCVRDSCSFPEAVSGHPQASGSRSPGCPRCQDSHERKSPGSLSPQPLPQCKRHLKQVQLLFCEDHDEPICLICSLSQEHQGHRVRPIEEVALEHKKKIQKQLEHLKKLRKSGEEQRSYGEEKAVSFLKQTEALKQRVQRKLEQVYYFLEQQEHFFVASLEDVGQMVGQIRKAYDTRVSQDIALLDALIGELEAKECQSEWELLQDIGDILHRAKTVPVPEKWTTPQEIKQKIQLLHQKSEFVEKSTKYFSETLRSEMEMFNVPELIGAQAHAVNVILDAETAYPNLIFSDDLKSVRLGNKWERLPDGPQRFDSCIIVLGSPSFLSGRRYWEVEVGDKTAWILGACKTSISRKGNMTLSPENGYWVVIMMKENEYQASSVPPTRLLIKEPPKRVGIFVDYRVGSISFYNVTARSHIYTFASCSFSGPLQPIFSPGTRDGGKNTAPLTICPVGGQGPD

SEQ ID NO: 49913 - protein, 601 aa, Homo sapiens
  Payload ID: 9968
  Gene Symbol: MEFV
  Gene Name: Mediterranean fever
  ENSP ID: ENSP00000339639
MAKTPSDHLLSTLEELVPYDFEKFKFKLQNTSVQKEHSRIPRSQIQRARPVKMATLLVTYYGEEYAVQLTLQVLRAINQRLLAEELHRAAIQDMGSCYVAQVGLELLISNNPPIFASETAGITGRPPDTAASPRCHAQEGDPVDGTCVRDSCSFPEAVSGHPQASGSRSPGCPRCQDSHERKSPGSLSPQPLPQCKRHLKQVQLLFCEDHDEPICLICSLSQEHQGHRVRPIEEVALEHKKKIQKQLEHLKKLRKSGEEQRSYGEEKAVSFLKQTEALKQRVQRKLEQVYYFLEQQEHFFVASLEDVGQMVGQIRKAYDTRVSQDIALLDALIGELEAKECQSEWELLQDIGDILHRAKTVPVPEKWTTPQEIKQKIQLLHQKSEFVEKSTKYFSETLRSEMEMFNVPELIGAQAHAVNVILDAETAYPNLIFSDDLKSVRLGNKWERLPDGPQRFDSCIIVLGSPSFLSGRRYWEVEVGDKTAWILGACKTSISRKGNMTLSPENGYWVVIMMKENEYQASSVPPTRLLIKEPPKRVGIFVDYRVGSISFYNVTARSHIYTFASCSFSGPLQPIFSPGTRDGGKNTAPLTICPVGGQGPD

SEQ ID NO: 49914 - protein, 490 aa, Homo sapiens
  Payload ID: 9968
  Gene Symbol: MEFV
  Gene Name: Mediterranean fever
  ENSP ID: ENSP00000437486
MAKTPSDHLLSTLEELVPYDFEKFKFKLQNTSVQKEHSRIPRSQIQRARPVKMATLLVTYYGEEYAVQLTLQVLRAINQRLLAEELHRAAIQEYSTQENGTDDSAASSSLGENKPRSLKTPDHPEGNEGNGPRPYGGGAASLRCSQPEAGRGLSRKPLSKRREKASEGLDAQGKPRTRSPALPGGRSPGPCRALEGGQAEVRLRRNASSAGRLQGLAGGAPGQKECRPFEVYLPSGKMRPRSLEVTISTGEKAPANPEILLTLEEKTAANLDSATEPRARPTPDGGASADLKEGPGNPEHSVTGRPPDTAASPRCHAQEGDPVDGTCVRDSCSFPEAVSGHPQASGSRSPGCPRCQDSHERKSPGSLSPQPLPQCKRHLKQVQLLFCEDHDEPICLICSLSQEHQGHRVRPIEEVALEHKKKIQKQLEHLKKLRKSGEEQRSYGEEKAVSFLVVVQWCDLGSLQPLPPGFKRFSCLSLLSSWDYRNKLKR

SEQ ID NO: 49915 - protein, 613 aa, Homo sapiens
  Payload ID: 9968
  Gene Symbol: MEFV
  Gene Name: Mediterranean fever
  ENSP ID: ENSP00000438611
MAKTPSDHLLSTLEELVPYDFEKFKFKLQNTSVQKEHSRIPRSQIQRARPVKMATLLVTYYGEEYAVQLTLQVLRAINQRLLAEELHRAAIQEYSTQENGTDDSAASSSLGENKPRSLKTPDHPEGNEGNGPRPYGGGAASLRCSQPEAGRGLSRKPLSKRREKASEGLDAQGKPRTRSPALPGGRSPGPCRALEGGQAEVRLRRNASSAGRLQGLAGGAPGQKECRPFEVYLPSGKMRPRSLEVTISTGEKAPANPEILLTLEEKTAANLDSATEPRARPTPDGGASADLKEGPGNPEHSVTGRPPDTAASPRCHAQEGDPVDGTCVRDSCSFPEAVSGHPQASGSRSPGCPRCQDSHERKSPGSLSPQPLPQCKRHLKQVQLLFCEDHDEPICLICSLSQEHQGHRVRPIEEVALEHKKKIQKQLEHLKKLRKSGEEQRSYGEEKAVSFLKQTEALKQRVQRKLEQVYYFLEQQEHFFVASLEDVGQMVGQIRKAYDTRVSQDIALLDALIGELEAKECQSEWELLQDIGDILHRAKTVPVPEKWTTPQEIKQKIQLLHQKSEFVEKSTKYFSETLRSEMEMFNGESSGNGVCWPGVVAVFPCAVDLRGPI

SEQ ID NO: 49916 - protein, 445 aa, Homo sapiens
  Payload ID: 9968
  Gene Symbol: MEFV
  Gene Name: Mediterranean fever
  Uniprot ID: O15553
  ENSP ID: ENSP00000438711
MAKTPSDHLLSTLEELVPYDFEKFKFKLQNTSVQKEHSRIPRSQIQRARPVKMATLLVTYYGEEYAVQLTLQVLRAINQRLLAEELHRAAIQGRPPDTAASPRCHAQEGDPVDGTCVRDSCSFPEAVSGHPQASGSRSPGCPRCQDSHERKSPGSLSPQPLPQCKRHLKQVQLLFCEDHDEPICLICSLSQEHQGHRVRPIEEVALEHKKKIQKQLEHLKKLRKSGEEQRSYGEEKAVSFLKQTEALKQRVQRKLEQVYYFLEQQEHFFVASLEDVGQMVGQIRKAYDTRVSQDIALLDALIGELEAKECQSEWELLQDIGDILHRAKTVPVPEKWTTPQEIKQKIQLLHQKSEFVEKSTKYFSETLRSEMEMFNDHSPQHGLGSWEERDYTQHSMQGPKQGVPCLSLLSGQCNLAPLNANAQDFFPYLIFLRSSGADWRSGTCC

SEQ ID NO: 49917 - protein, 402 aa, Homo sapiens
  Payload ID: 9968
  Gene Symbol: MEFV
  Gene Name: Mediterranean fever
  ENSP ID: ENSP00000444178
MAKTPSDHLLSTLEELVPYDFEKFKFKLQNTSVQKEHSRIPRSQIQRARPVKMATLLVTYYGEEYAVQLTLQVLRAINQRLLAEELHRAAIQGRPPDTAASPRCHAQEGDPVDGTCVRDSCSFPEAVSGHPQASGSRSPGCPRCQDSHERKSPGSLSPQPLPQCKRHLKQVQLLFCEDHDEPICLICSLSQEHQGHRVRPIEEVALEHKKKIQKQLEHLKKLRKSGEEQRSYGEEKAVSFLKQTEALKQRVQRKLEQVYYFLEQQEHFFVASLEDVGQMVGQIRKAYDTRVSQDIALLDALIGELEAKECQSEWELLQDIGDILHRAKTVPVPEKWTTPQEIKQKIQLLHQKSEFVEKSTKYFSETLRSEMEMFNGESSGNGVCWPGVVAVFPCAVDLRGPI

SEQ ID NO: 49918 - protein, 95 aa, Homo sapiens
  Payload ID: 9968
  Gene Symbol: MEFV
  Gene Name: Mediterranean fever
  ENSP ID: ENSP00000444471
MAKTPSDHLLSTLEELVPYDFEKFKFKLQNTSVQKEHSRIPRSQIQRARPVKMATLLVTYYGEEYAVQLTLQVLRAINQRLLAEELHRAAIQETN

SEQ ID NO: 49919 - protein, 644 aa, Homo sapiens
  Payload ID: 9968
  Gene Symbol: MEFV
  Gene Name: Mediterranean fever
  ENSP ID: ENSP00000444615
MAKTPSDHLLSTLEELVPYDFEKFKFKLQNTSVQKEHSRIPRSQIQRARPVKMATLLVTYYGEEYAVQLTLQVLRAINQRLLAEELHRAAIQEYSTQENGTDDSAASSSLGENKPRSLKTPDHPEGNEGNGPRPYGGGAASLRCSQPEAGRGLSRKPLSKRREKASEGLDAQGKPRTRSPALPGGRSPGPCRALEGGQAEVRLRRNASSAGRLQGLAGGAPGQKECRPFEVYLPSGKMRPRSLEVTISTGEKAPANPEILLTLEEKTAANLDSATEPRARPTPDGGASADLKEGPGNPEHSVTDMGSCYVAQVGLELLISNNPPIFASETAGITGRPPDTAASPRCHAQEGDPVDGTCVRDSCSFPEAVSGHPQASGSRSPGCPRCQDSHERKSPGSLSPQPLPQCKRHLKQVQLLFCEDHDEPICLICSLSQEHQGHRVRPIEEVALEHKKKIQKQLEHLKKLRKSGEEQRSYGEEKAVSFLKQTEALKQRVQRKLEQVYYFLEQQEHFFVASLEDVGQMVGQIRKAYDTRVSQDIALLDALIGELEAKECQSEWELLQDIGDILHRAKTVPVPEKWTTPQEIKQKIQLLHQKSEFVEKSTKYFSETLRSEMEMFNGESSGNGVCWPGVVAVFPCAVDLRGPI

SEQ ID NO: 49920 - protein, 570 aa, Homo sapiens
  Payload ID: 9968
  Gene Symbol: MEFV
  Gene Name: Mediterranean fever
  Uniprot ID: O15553
  ENSP ID: ENSP00000445079
MAKTPSDHLLSTLEELVPYDFEKFKFKLQNTSVQKEHSRIPRSQIQRARPVKMATLLVTYYGEEYAVQLTLQVLRAINQRLLAEELHRAAIQGRPPDTAASPRCHAQEGDPVDGTCVRDSCSFPEAVSGHPQASGSRSPGCPRCQDSHERKSPGSLSPQPLPQCKRHLKQVQLLFCEDHDEPICLICSLSQEHQGHRVRPIEEVALEHKKKIQKQLEHLKKLRKSGEEQRSYGEEKAVSFLKQTEALKQRVQRKLEQVYYFLEQQEHFFVASLEDVGQMVGQIRKAYDTRVSQDIALLDALIGELEAKECQSEWELLQDIGDILHRAKTVPVPEKWTTPQEIKQKIQLLHQKSEFVEKSTKYFSETLRSEMEMFNVPELIGAQAHAVNVILDAETAYPNLIFSDDLKSVRLGNKWERLPDGPQRFDSCIIVLGSPSFLSGRRYWEVEVGDKTAWILGACKTSISRKGNMTLSPENGYWVVIMMKENEYQASSVPPTRLLIKEPPKRVGIFVDYRVGSISFYNVTARSHIYTFASCSFSGPLQPIFSPGTRDGGKNTAPLTICPVGGQGPD

SEQ ID NO: 49921 - protein, 306 aa, Homo sapiens
  Payload ID: 9968
  Gene Symbol: MEFV
  Gene Name: Mediterranean fever
  ENSP ID: ENSP00000458312
MAKTPSDHLLSTLEELVPYDFEKFKFKLQNTSVQKEHSRIPRSQIQRARPVKMATLLVTYYGEEYAVQLTLQVLRAINQRLLAEELHRAAIQEYSTQENGTDDSAASSSLGENKPRSLKTPDHPEGNEGNGPRPYGGGAASLRCSQPEAGRGLSRKPLSKRREKASEGLDAQGKPRTRSPALPGGRSPGPCRALEGGQAEVRLRRNASSAGRLQGLAGGAPGQKECRPFEVYLPSGKMRPRSLEVTISTGEKAPANPEILLTLEEKTAANLDSATEPRARPTPDGGASADLKEGPGNPEHSVTETN

SEQ ID NO: 49922 - protein, 95 aa, Homo sapiens; identical to SEQ ID NO: 49918
  Payload ID: 9968
  Gene Symbol: MEFV
  Gene Name: Mediterranean fever
  ENSP ID: ENSP00000460269

SEQ ID NO: 49923 - protein, 95 aa, Homo sapiens; identical to SEQ ID NO: 49918
  Payload ID: 9968
  Gene Symbol: MEFV
  Gene Name: Mediterranean fever
  ENSP ID: ENSP00000460551

SEQ ID NO: 49924 - protein, 101 aa, Homo sapiens
  Payload ID: 9968
  Gene Symbol: MEFV
  Gene Name: Mediterranean fever
  ENSP ID: ENSP00000461186
MAKTPSDHLLSTLEELVPYDFEKFKFKLQNTSVQKEHSRIPRSQIQRARPVKMATLLVTYYGEEYAVQLTLQVLRAINQRLLAEELHRAAIQGHWRHLAQG

SEQ ID NO: 49925 - protein, 411 aa, Homo sapiens
  Payload ID: 9968
  Gene Symbol: MEFV
  Gene Name: Mediterranean fever
  ENSP ID: ENSP00000481436
MAKTPSDHLLSTLEELVPYDFEKFKFKLQNTSVQKEHSRIPRSQIQRARPVKMATLLVTYYGEEYAVQLTLQVLRAINQRLLAEELHRAAIQGRPPDTAASPRCHAQEGDPVDGTCVRDSCSFPEAVSGHPQASGSRSPGCPRCQDSHERKSPGSLSPQPLPQCKRHLKQVQLLFCEDHDEPICLICSLSQEHQGHRVRPIEEVALEHKKKIQKQLEHLKKLRKSGEEQRSYGEEKAVSFLKQTEALKQRVQRKLEQVYYFLEQQEHFFVASLEDVGQMVGQIRKAYDTRVSQDIALLDALIGELEAKECQSEWELLQDIGDILHRAKTVPVPEKWTTPQEIKQKIQLLHQKSEFVEKSTKYFSETLRSEMEMFNDHSPQHGLGSWEERDYTQHSMQGPKQGVPCLVVRTV

SEQ ID NO: 49926 - protein, 415 aa, Homo sapiens
  Payload ID: 9969
  Gene Symbol: MAMSTR
  Gene Name: MEF2 activating motif and SAP domain containing transcriptional regulator
  Uniprot ID: Q6ZN01
  ENSP ID: ENSP00000324175
MTLAASSQRSQIIRSKFRSVLQLRIHRRNQEQISDPDPWISASDPPLAPALPSGTAPFLFSPGVLLPEPEYCPPWRSPKKESPKISQRWRESKPRGNLTYHQYMPPEPRQGSRADPQAEGSALGPPGPSLWEGTDSQQPHPRMKPSPLTPCPPGVPSPSPPPHKLELQTLKLEELTVSELRQQLRLRGLPVSGTKSMLLERMRGGAPPRERPKPRREDSPAGAPWPRLKPKALAAARRQGSVKPSAASHRPPLPRAADTPGTAPAPTPTPAPAAAPALTPSSGPGSAALTLEEELQEAIRRAQLLPNRGIDDILEDQVEPDDPLPPIPLDFPGSFDVLSPSPDSEGLSSVFSSSLPSPTNSSSPSPRDPTDSLDWLEALSGGPPLGSGPPPPSIFSADLSDSSSSRLWDLLEDPW

SEQ ID NO: 49927 - protein, 312 aa, Homo sapiens
  Payload ID: 9969
  Gene Symbol: MAMSTR
  Gene Name: MEF2 activating motif and SAP domain containing transcriptional regulator
  Uniprot ID: Q6ZN01
  ENSP ID: ENSP00000349192
MPPEPRQGSRADPQAEGSALGPPGPSLWEGTDSQQPHPRMKPSPLTPCPPGVPSPSPPPHKLELQTLKLEELTVSELRQQLRLRGLPVSGTKSMLLERMRGGAPPRERPKPRREDSPAGAPWPRLKPKALAAARRQGSVKPSAASHRPPLPRAADTPGTAPAPTPTPAPAAAPALTPSSGPGSAALTLEEELQEAIRRAQLLPNRGIDDILEDQVEPDDPLPPIPLDFPGSFDVLSPSPDSEGLSSVFSSSLPSPTNSSSPSPRDPTDSLDWLEALSGGPPLGSGPPPPSIFSADLSDSSSSRLWDLLEDPW

SEQ ID NO: 49928 - protein, 11 aa, Homo sapiens
  Payload ID: 9969
  Gene Symbol: MAMSTR
  Gene Name: MEF2 activating motif and SAP domain containing transcriptional regulator
  ENSP ID: ENSP00000469127
MPPEPRQGSRA

SEQ ID NO: 49929 - protein, 219 aa, Homo sapiens
  Payload ID: 9969
  Gene Symbol: MAMSTR
  Gene Name: MEF2 activating motif and SAP domain containing transcriptional regulator
  ENSP ID: ENSP00000469544
MTLAASSQRSQIIRSKFRSVLQLRIHRRNQEQNPVQAPISQQSSLAPWPALRHPGAPLSTQPCSSRPGLLPAGLSGSFTVSPVSDPDPWISASDPPLAPALPSGTAPFLFSPGVLLPEPEYCPPWRSPKKESPKISQRWRESKPRGNLTYHQYMPPEPRQGSRADPQAEGSALGPPGPSLWEGTDSQQPHPRMKPSPLTPCPPGVPSPSPPPHKLELQT

SEQ ID NO: 49930 - protein, 247 aa, Homo sapiens
  Payload ID: 9969
  Gene Symbol: MAMSTR
  Gene Name: MEF2 activating motif and SAP domain containing transcriptional regulator
  Uniprot ID: Q6ZN01
  ENSP ID: ENSP00000471590
MPPEPRQGSRADPQAEGSALGPPGPSLWEGTDSQQPHPRMKPSPLTPCPPGVPSPSPPPHKLELQTLKLEELTVKPSAASHRPPLPRAADTPGTAPAPTPTPAPAAAPALTPSSGPGSAALTLEEELQEAIRRAQLLPNRGIDDILEDQVEPDDPLPPIPLDFPGSFDVLSPSPDSEGLSSVFSSSLPSPTNSSSPSPRDPTDSLDWLEALSGGPPLGSGPPPPSIFSADLSDSSSSRLWDLLEDPW

SEQ ID NO: 49931 - protein, 931 aa, Homo sapiens
  Payload ID: 9970
  Gene Symbol: MKL1
  Gene Name: megakaryoblastic leukemia (translocation) 1
  Uniprot ID: Q969V6
  ENSP ID: ENSP00000347847
MPPLKSPAAFHEQRRSLERARTEDYLKRKIRSRPERSELVRMHILEETSAEPSLQAKQLKLKRARLADDLNEKIAQRPGPMELVEKNILPVESSLKEAIIVGQVNYPKVADSSSFDEDSSDALSPEQPASHESQGSVPSPLEARVSEPLLSATSASPTQVVSQLPMGRDSREMLFLAEQPPLPPPPLLPPSLTNGTTIPTAKSTPTLIKQSQPKSASEKSQRSKKAKELKPKVKKLKYHQYIPPDQKQDRGAPPMDSSYAKILQQQQLFLQLQILNQQQQQHHNYQAILPAPPKSAGEALGSSGTPPVRSLSTTNSSSSSGAPGPCGLARQNSTSLTGKPGALPANLDDMKVAELKQELKLRSLPVSGTKTELIERLRAYQDQISPVPGAPKAPAATSILHKAGEVVVAFPAARLSTGPALVAAGLAPAEVVVATVASSGVVKFGSTGSTPPVSPTPSERSLLSTGDENSTPGDTFGEMVTSPLTQLTLQASPLQILVKEEGPRAGSCCLSPGGRAELEGRDKDQMLQEKDKQIEALTRMLRQKQQLVERLKLQLEQEKRAQQPAPAPAPLGTPVKQENSFSSCQLSQQPLGPAHPFNPSLAAPATNHIDPCAVAPGPPSVVVKQEALQPEPEPVPAPQLLLGPQGPSLIKGVAPPTLITDSTGTHLVLTVTNKNADSPGLSSGSPQQPSSQPGSPAPAPSAQMDLEHPLQPLFGTPTSLLKKEPPGYEEAMSQQPKQQENGSSSQQMDDLFDILIQSGEISADFKEPPSLPGKEKPSPKTVCGSPLAAQPSPSAELPQAAPPPPGSPSLPGRLEDFLESSTGLPLLTSGHDGPEPLSLIDDLHSQMLSSTAILDHPPSPMDTSELHFVPEPSSTMGLDLADGHLDSMDWLELSSGGPVLSLAPLSTTAPSLFSTDFLDGHDLQLHWDSCL

SEQ ID NO: 49932 - protein, 798 aa, Homo sapiens
  Payload ID: 9970
  Gene Symbol: MKL1
  Gene Name: megakaryoblastic leukemia (translocation) 1
  ENSP ID: ENSP00000379861
MPPLKSPAAFHEQRRSLERARTEDYLKRKIRSRPERSELVRMHILEETSAEPSLQAKQLKLKRARLADDLNEKIAQRPGPMELVEKNILPVESSLKEAIIVGQVNYPKVADSSSFDEDSSDALSPEQPASHESQGSVPSPLEARVSEPLLSATSASPTQVVSQLPMGRDSREMLFLAEQPPLPPPPLLPPSLTNGTTIPTAKSTPTLIKQSQPKSASEKSQRSKKAKELKPKVKKLKYHQYIPPDQKQDRGAPPMDSSYAKILQQQQLFLQLQILNQQQQQHHNYQAILPAPPKSAGEALGSSGTPPVRSLSTTNSSSSSGAPGPCGLARQNSTSLTGKPGALPANLDDMKVAELKQELKLRSLPVSGTKTELIERLRAYQDQISPVPGAPKAPAATSILHKAGEVVVAFPAARLSTGPALVAAGLAPAEVVVATVASSGVVKFGSTGSTPPVSPTPSERSLLSTGDENSTPGDTFGEMVTSPLTQLTLQASPLQILVKEEGPRAGSCCLSPGGRAELEGRDKDQMLQEKDKQIEALTRMLRQKQQLVERLKLQLEQEKRAQQPAPAPAPLGTPVKQENSFSSCQLSQQPLGPAHPFNPSLAAPATNHIDPCAVAPGPPSVVVKQEALQPEPEPVPAPQLLLGPQGPSLIKGVAPPTLITDSTGTHLVLTVTNKNADSPGLSSGSPQQPSSQPGSPAPAPSAQMDLEHPLQPLFGTPTSLLKKEPPGYEEAMSQQPKQQENGSSSQQMDDLFDILIQSGGNPRNFSRFQGAAIPAREGEAIPEDSLWVPPGSTAITFC

SEQ ID NO: 49933 - protein, 161 aa, Homo sapiens
  Payload ID: 9970
  Gene Symbol: MKL1
  Gene Name: megakaryoblastic leukemia (translocation) 1
  ENSP ID: ENSP00000385076
MPPLKSPAAFHEQRRSLERARTEDYLKRKIRSRPERSELVRMHILEETSAEPSLQAKQLKLKRARLADDLNEKIAQRPGPMELVEKNILPVESSLKEAIIGEEDPATLCERQLRCRRGGSARLKQNWAEALDFLIFDFLLSLGRTKAQSLRASCTGCMNLG

SEQ ID NO: 49934 - protein, 881 aa, Homo sapiens
  Payload ID: 9970
  Gene Symbol: MKL1
  Gene Name: megakaryoblastic leukemia (translocation) 1
  ENSP ID: ENSP00000385584
MPPLKSPAAFHEQRRSLERARTEDYLKRKIRSRPERSELVRMHILEETSAEPSLQAKQLKLKRARLADDLNEKIAQRPGPMELVEKNILPVESSLKEAIIVGQVNYPKVADSSSFDEDSSDALSPEQPASHESQGSVPSPLEARVSEPLLSATSASPTQQSQPKSASEKSQRSKKAKELKPKVKKLKYHQYIPPDQKQDRGAPPMDSSYAKILQQQQLFLQLQILNQQQQQHHNYQAILPAPPKSAGEALGSSGTPPVRSLSTTNSSSSSGAPGPCGLARQNSTSLTGKPGALPANLDDMKVAELKQELKLRSLPVSGTKTELIERLRAYQDQISPVPGAPKAPAATSILHKAGEVVVAFPAARLSTGPALVAAGLAPAEVVVATVASSGVVKFGSTGSTPPVSPTPSERSLLSTGDENSTPGDTFGEMVTSPLTQLTLQASPLQILVKEEGPRAGSCCLSPGGRAELEGRDKDQMLQEKDKQIEALTRMLRQKQQLVERLKLQLEQEKRAQQPAPAPAPLGTPVKQENSFSSCQLSQQPLGPAHPFNPSLAAPATNHIDPCAVAPGPPSVVVKQEALQPEPEPVPAPQLLLGPQGPSLIKGVAPPTLITDSTGTHLVLTVTNKNADSPGLSSGSPQQPSSQPGSPAPAPSAQMDLEHPLQPLFGTPTSLLKKEPPGYEEAMSQQPKQQENGSSSQQMDDLFDILIQSGEISADFKEPPSLPGKEKPSPKTVCGSPLAAQPSPSAELPQAAPPPPGSPSLPGRLEDFLESSTGLPLLTSGHDGPEPLSLIDDLHSQMLSSTAILDHPPSPMDTSELHFVPEPSSTMGLDLADGHLDSMDWLELSSGGPVLSLAPLSTTAPSLFSTDFLDGHDLQLHWDSCL

SEQ ID NO: 49935 - protein, 931 aa, Homo sapiens; identical to SEQ ID NO: 49931
  Payload ID: 9970
  Gene Symbol: MKL1
  Gene Name: megakaryoblastic leukemia (translocation) 1
  Uniprot ID: Q969V6
  ENSP ID: ENSP00000385835

SEQ ID NO: 49936 - protein, 73 aa, Homo sapiens
  Payload ID: 9970
  Gene Symbol: MKL1
  Gene Name: megakaryoblastic leukemia (translocation) 1
  ENSP ID: ENSP00000398478
MRREGSTVLQLKLQQRRTREELVSQGIMPPLKSPAAFHEQRRSLERARTEDYLKRKIRSRPERSELVRMHILE

SEQ ID NO: 49937 - protein, 882 aa, Homo sapiens
  Payload ID: 9970
  Gene Symbol: MKL1
  Gene Name: megakaryoblastic leukemia (translocation) 1
  ENSP ID: ENSP00000478420
MIPPLKSPAAFHEQRRSLERARTEDYLKRKIRSRPERSELVRMHILEETSAEPSLQAKQLKLKRARLADDLNEKIAQRPGPMELVEKNILPVESSLKEAIIVGQVNYPKVADSSSFDEDSSDALSPEQPASHESQGSVPSPLEARVSEPLLSATSASPTQQSQPKSASEKSQRSKKAKELKPKVKKLKYHQYIPPDQKQDRGAPPMDSSYAKILQQQQLFLQLQILNQQQQQHHNYQAILPAPPKSAGEALGSSGTPPVRSLSTTNSSSSSGAPGPCGLARQNSTSLTGKPGALPANLDDMKVAELKQELKLRSLPVSGTKTELIERLRAYQDQISPVPGAPKAPAATSILHKAGEVVVAFPAARLSTGPALVAAGLAPAEVVVATVASSGVVKFGSTGSTPPVSPTPSERSLLSTGDENSTPGDTFGEMVTSPLTQLTLQASPLQILVKEEGPRAGSCCLSPGGRAELEGRDKDQMLQEKDKQIEALTRMLRQKQQLVERLKLQLEQEKRAQQPAPAPAPLGTPVKQENSFSSCQLSQQPLGPAHPFNPSLAAPATNHIDPCAVAPGPPSVVVKQEALQPEPEPVPAPQLLLGPQGPSLIKGVAPPTLITDSTGTHLVLTVTNKNADSPGLSSGSPQQPSSQPGSPAPAPSAQMDLEHPLQPLFGTPTSLLKKEPPGYEEAMSQQPKQQENGSSSQQMDDLFDILIQSGEISADFKEPPSLPGKEKPSPKTVCGSPLAAQPSPSAELPQAAPPPPGSPSLPGRLEDFLESSTGLPLLTSGHDGPEPLSLIDDLHSQMLSSTAILDHPPSPMDTSELHFVPEPSSTMGLDLADGHLDSMDWLELSSGGPVLSLAPLSTTAPSLFSTDFLDGHDLQLHWDSCL

SEQ ID NO: 49938 - protein, 966 aa, Homo sapiens
  Payload ID: 9970
  Gene Symbol: MKL1
  Gene Name: megakaryoblastic leukemia (translocation) 1
  ENSP ID: ENSP00000479510
MTLLEPEMLMMAVQSVLQLKLQQRRTREELVSQGIMPPLKSPAAFHEQRRSLERARTEDYLKRKIRSRPERSELVRMHILEETSAEPSLQAKQLKLKRARLADDLNEKIAQRPGPMELVEKNILPVESSLKEAIIVGQVNYPKVADSSSFDEDSSDALSPEQPASHESQGSVPSPLEARVSEPLLSATSASPTQVVSQLPMGRDSREMLFLAEQPPLPPPPLLPPSLTNGTTIPTAKSTPTLIKQSQPKSASEKSQRSKKAKELKPKVKKLKYHQYIPPDQKQDRGAPPMDSSYAKILQQQQLFLQLQILNQQQQQHHNYQAILPAPPKSAGEALGSSGTPPVRSLSTTNSSSSSGAPGPCGLARQNSTSLTGKPGALPANLDDMKVAELKQELKLRSLPVSGTKTELIERLRAYQDQISPVPGAPKAPAATSILHKAGEVVVAFPAARLSTGPALVAAGLAPAEVVVATVASSGVVKFGSTGSTPPVSPTPSERSLLSTGDENSTPGDTFGEMVTSPLTQLTLQASPLQILVKEEGPRAGSCCLSPGGRAELEGRDKDQMLQEKDKQIEALTRMLRQKQQLVERLKLQLEQEKRAQQPAPAPAPLGTPVKQENSFSSCQLSQQPLGPAHPFNPSLAAPATNHIDPCAVAPGPPSVVVKQEALQPEPEPVPAPQLLLGPQGPSLIKGVAPPTLITDSTGTHLVLTVTNKNADSPGLSSGSPQQPSSQPGSPAPAPSAQMDLEHPLQPLFGTPTSLLKKEPPGYEEAMSQQPKQQENGSSSQQMDDLFDILIQSGEISADFKEPPSLPGKEKPSPKTVCGSPLAAQPSPSAELPQAAPPPPGSPSLPGRLEDFLESSTGLPLLTSGHDGPEPLSLIDDLHSQMLSSTAILDHPPSPMDTSELHFVPEPSSTMGLDLADGHLDSMDWLELSSGGPVLSLAPLSTTAPSLFSTDFLDGHDLQLHWDSCL

SEQ ID NO: 49939 - protein, 85 aa, Homo sapiens
  Payload ID: 9970
  Gene Symbol: MKL1
  Gene Name: megakaryoblastic leukemia (translocation) 1
  ENSP ID: ENSP00000484628
MLSSTAILDHPPSPMDTSELHFVPEPSSTMGLDLADGHLDSMDWLELSSGGPVLSLAPLSTTAPSLFSTDFLDGHDLQLHWDSCL

SEQ ID NO: 49940 - protein, 799 aa, Homo sapiens
  Payload ID: 9970
  Gene Symbol: MKL1
  Gene Name: megakaryoblastic leukemia (translocation) 1
  ENSP ID: ENSP00000484786
MIPPLKSPAAFHEQRRSLERARTEDYLKRKIRSRPERSELVRMHILEETSAEPSLQAKQLKLKRARLADDLNEKIAQRPGPMELVEKNILPVESSLKEAIIVGQVNYPKVADSSSFDEDSSDALSPEQPASHESQGSVPSPLEARVSEPLLSATSASPTQVVSQLPMGRDSREMLFLAEQPPLPPPPLLPPSLTNGTTIPTAKSTPTLIKQSQPKSASEKSQRSKKAKELKPKVKKLKYHQYIPPDQKQDRGAPPMDSSYAKILQQQQLFLQLQILNQQQQQHHNYQAILPAPPKSAGEALGSSGTPPVRSLSTTNSSSSSGAPGPCGLARQNSTSLTGKPGALPANLDDMKVAELKQELKLRSLPVSGTKTELIERLRAYQDQISPVPGAPKAPAATSILHKAGEVVVAFPAARLSTGPALVAAGLAPAEVVVATVASSGVVKFGSTGSTPPVSPTPSERSLLSTGDENSTPGDTFGEMVTSPLTQLTLQASPLQILVKEEGPRAGSCCLSPGGRAELEGRDKDQMLQEKDKQIEALTRMLRQKQQLVERLKLQLEQEKRAQQPAPAPAPLGTPVKQENSFSSCQLSQQPLGPAHPFNPSLAAPATNHIDPCAVAPGPPSVVVKQEALQPEPEPVPAPQLLLGPQGPSLIKGVAPPTLITDSTGTHLVLTVTNKNADSPGLSSGSPQQPSSQPGSPAPAPSAQMDLEHPLQPLFGTPTSLLKKEPPGYEEAMSQQPKQQENGSSSQQMDDLFDILIQSGGNPRNFSRFQGAAIPAREGEAIPEDSLWVPPGSTAITFC

SEQ ID NO: 49941 - protein, 507 aa, Homo sapiens
  Payload ID: 9971
  Gene Symbol: MATK
  Gene Name: megakaryocyte-associated tyrosine kinase
  Uniprot ID: P42679
  ENSP ID: ENSP00000308734
MAGRGSLVSWRAFHGCDSAEELPRVSPRFLRAWHPPPVSARMPTRRWAPGTQCITKCEHTRPKPGELAFRKGDVVTILEACENKSWYRVKHHTSGQEGLLAAGALREREALSADPKLSLMPWFHGKISGQEAVQQLQPPEDGLFLVRESARHPGDYVLCVSFGRDVIHYRVLHRDGHLTIDEAVFFCNLMDMVEHYSKDKGAICTKLVRPKRKHGTKSAEEELARAGWLLNLQHLTLGAQIGEGEFGAVLQGEYLGQKVAVKNIKCDVTAQAFLDETAVMTKMQHENLVRLLGVILHQGLYIVMEHVSKGNLVNFLRTRGRALVNTAQLLQFSLHVAEGMEYLESKKLVHRDLAARNILVSEDLVAKVSDFGLAKAERKGLDSSRLPVKWTAPEALKHGKFTSKSDVWSFGVLLWEVFSYGRAPYPKMSLKEVSEAVEKGYRMEPPEGCPGPVHVLMSSCWEAEPARRPPFRKLAEKLARELRSAGAPASVSGQDADGSTSPRSQEP

SEQ ID NO: 49942 - protein, 466 aa, Homo sapiens
  Payload ID: 9971
  Gene Symbol: MATK
  Gene Name: megakaryocyte-associated tyrosine kinase
  Uniprot ID: P42679
  ENSP ID: ENSP00000378481
MPTRRWAPGTQCITKCEHTRPKPGELAFRKGDVVTILEACENKSWYRVKHHTSGQEGLLAAGALREREALSADPKLSLMPWFHGKISGQEAVQQLQPPEDGLFLVRESARHPGDYVLCVSFGRDVIHYRVLHRDGHLTIDEAVFFCNLMDMVEHYSKDKGAICTKLVRPKRKHGTKSAEEELARAGWLLNLQHLTLGAQIGEGEFGAVLQGEYLGQKVAVKNIKCDVTAQAFLDETAVMTKMQHENLVRLLGVILHQGLYIVMEHVSKGNLVNFLRTRGRALVNTAQLLQFSLHVAEGMEYLESKKLVHRDLAARNILVSEDLVAKVSDFGLAKAERKGLDSSRLPVKWTAPEALKHGKFTSKSDVWSFGVLLWEVFSYGRAPYPKMSLKEVSEAVEKGYRMEPPEGCPGPVHVLMSSCWEAEPARRPPFRKLAEKLARELRSAGAPASVSGQDADGSTSPRSQEP

SEQ ID NO: 49943 - protein, 508 aa, Homo sapiens
  Payload ID: 9971
  Gene Symbol: MATK
  Gene Name: megakaryocyte-associated tyrosine kinase
  Uniprot ID: P42679
  ENSP ID: ENSP00000378485
MQGHFPAERREGRPRRGTRGQQQLLVSPRFLRAWHPPPVSARMPTRRWAPGTQCITKCEHTRPKPGELAFRKGDVVTILEACENKSWYRVKHHTSGQEGLLAAGALREREALSADPKLSLMPWFHGKISGQEAVQQLQPPEDGLFLVRESARHPGDYVLCVSFGRDVIHYRVLHRDGHLTIDEAVFFCNLMDMVEHYSKDKGAICTKLVRPKRKHGTKSAEEELARAGWLLNLQHLTLGAQIGEGEFGAVLQGEYLGQKVAVKNIKCDVTAQAFLDETAVMTKMQHENLVRLLGVILHQGLYIVMEHVSKGNLVNFLRTRGRALVNTAQLLQFSLHVAEGMEYLESKKLVHRDLAARNILVSEDLVAKVSDFGLAKAERKGLDSSRLPVKWTAPEALKHGKFTSKSDVWSFGVLLWEVFSYGRAPYPKMSLKEVSEAVEKGYRMEPPEGCPGPVHVLMSSCWEAEPARRPPFRKLAEKLARELRSAGAPASVSGQDADGSTSPRSQEP

SEQ ID NO: 49944 - protein, 13 aa, Homo sapiens
  Payload ID: 9971
  Gene Symbol: MATK
  Gene Name: megakaryocyte-associated tyrosine kinase
  ENSP ID: ENSP00000465556
MAGRGSLVSWRAF

SEQ ID NO: 49945 - protein, 237 aa, Homo sapiens
  Payload ID: 9971
  Gene Symbol: MATK
  Gene Name: megakaryocyte-associated tyrosine kinase
  ENSP ID: ENSP00000465761
VSFGRDVIHYRVLHRDGHLTIDEAVFFCNLMDMVERPPGNGTGCWGSPPWGWAHGCPTILQHYSKDKGAICTKLVRPKRKHGTKSAEEELARGPQLRHSSVTIIHHLSQKPGPEPPPTPSSSIPSLARFPRPAGWLLNLQHLTLGAQIGEGEFGAVLQGEYLGQKVAVKNIKCDVTAQAFLDETAVMTKMQHENLVRLLGVILHQGLYIVMEHVSKGNLVNFLRTRGRALVNTAQLL

SEQ ID NO: 49946 - protein, 174 aa, Homo sapiens
  Payload ID: 9971
  Gene Symbol: MATK
  Gene Name: megakaryocyte-associated tyrosine kinase
  ENSP ID: ENSP00000467006
MAGRGSLVSWRAFHGCDSAEELPRVSPRFLRAWHPPPVSARMPTRRWAPGTQCITKCEHTRPKPGELAFRKGDVVTILEACENKSWYRVKHHTSGQEGLLAAGALREREALSADPKLSLMPWFHGKISGQEAVQQLQPPEDGLFLVRESARHPGDYVLCVSFGRDVIHYRVLHR

SEQ ID NO: 49947 - protein, 38 aa, Homo sapiens
  Payload ID: 9971
  Gene Symbol: MATK
  Gene Name: megakaryocyte-associated tyrosine kinase
  ENSP ID: ENSP00000467472
MQGHFPAERREGRPRRGTRGQQQLLKTGRTRLGPVAPS

SEQ ID NO: 49948 - protein, 84 aa, Homo sapiens
  Payload ID: 9971
  Gene Symbol: MATK
  Gene Name: megakaryocyte-associated tyrosine kinase
  ENSP ID: ENSP00000467992
MPTRRWAPGTQCITKCEHTRPKPGELAFRKGDVVTILEACENKSWYRVKHHTSGQEGLLAAGALREREALSADPKLSLMPWFHG

SEQ ID NO: 49949 - protein, 506 aa, Homo sapiens
  Payload ID: 9971
  Gene Symbol: MATK
  Gene Name: megakaryocyte-associated tyrosine kinase
  ENSP ID: ENSP00000468030
MAGRGSLVSWRAFHGCDSAEELPRVSPRFLRAWHPPPVSARMPTRRWAPGTQCITKCEHTRPKPGELAFRKGDVVTILEACENKSWYRVKHHTSGQEGLLAAGALREREALSADPKLSLMPWFHGKISGQEAVQQLQPPEDGLFLVRESARHPGDYVLCVSFGRDVIHYRVLHRDGHLTIDEAVFFCNLMDMVEHYSKDKGAICTKLVRPKRKHGTKSAEEELARAGWLLNLQHLTLGAQIGEGEFGAVLQGEYLGQKVAVKNIKCDVTAQAFLDETAVMTKMQHENLVRLLGVILHQGLYIVMEHVSKGNLVNFLRTRGRALVNTAQLLQFSLHVAEGMEYLESKKLVHRDLAARNILVSEDLVAKVSDFGLAKAERKGLDSSRLPVKWTAPEALKHGFTSKSDVWSFGVLLWEVFSYGRAPYPKMSLKEVSEAVEKGYRMEPPEGCPGPVHVLMSSCWEAEPARRPPFRKLAEKLARELRSAGAPASVSGQDADGSTSPRSQEP

SEQ ID NO: 49950 - protein, 131 aa, Homo sapiens
  Payload ID: 9971
  Gene Symbol: MATK
  Gene Name: megakaryocyte-associated tyrosine kinase
  ENSP ID: ENSP00000468465
MPWFHGKISGQEAVQQLQPPEDGLFLVRESARHPGDYVLCVSFGRDVIHYRVLHRDGHLTIDEAVFFCNLMDMVEHYSKDKGAICTKLVRPKRKHGTKSAEEELARAGWLLNLQHLTLGAQIGEGEFGAVL

SEQ ID NO: 49951 - protein, 267 aa, Homo sapiens
  Payload ID: 9971
  Gene Symbol: MATK
  Gene Name: megakaryocyte-associated tyrosine kinase
  ENSP ID: ENSP00000468576
SADPKLSLMPWFHGKISGQEAVQQLQPPEDGLFLVRESARHPGDYVLCVSFGRDVIHYRVLHRDGHLTIDEAVFFCNLMDMVERPPGNGTGCWGSPPWGWAHGCPTILQHYSKDKGAICTKLVRPKRKHGTKSAEEELARAGWLLNLQHLTLGAQIGEGEFGAVLQGEYLGQKVAVKNIKCDVTAQAFLDETAVMTKMQHENLVRLLGVILHQGLYIVMEHVSKGNLVNFLRTRGRALVNTAQLLQFSLHVAEGMEYLESKKLVHRD

SEQ ID NO: 49952 - protein, 527 aa, Homo sapiens
  Payload ID: 9971
  Gene Symbol: MATK
  Gene Name: megakaryocyte-associated tyrosine kinase
  ENSP ID: ENSP00000478847
MAGRGSLVSWRAFHGCDSAEELPRVSPRFLRAWHPPPVSARMPTRRWAPGTQCITKCEHTRPKPGELAFRKGDVVTILEACENKSWYRVKHHTSGQEGLLAAGALREREALSADPKLSLMPWFHGKISGQEAVQQLQPPEDGLFLVRESARHPGDYVLCVSFGRDVIHYRVLHRDGHLTIDEAVFFCNLMDMVEHYSKDKGAICTKLVRPKRKHGTKSAEEELARAGWLLNLQHLTLGAQIGEGEFGAVLQGEYLGQKVAVKNIKCDVTAQAFLDETAVMTKMQHENLVRLLGVILHQGLYIVMEHVSKGNLVNFLRTRGRALVNTAQLLQFSLHVAEGMEYLESKKLVHRDLAARNILVSEDLVAKVSDFGLAKAERKGLDSSRLPVKWTAPEALKHGFTSKSDVWSFGVLLWEVFSYGRAPYPKMSLKEVSEAVEKGYRMEPPEGCPGPVHVLMSSCWEAEPPAGHPSANWPRSWPGSYAVQVPQPPSQGRTPTLHLAPKPGALTPPGGPWPQRTERVESAAWGH

SEQ ID NO: 49953 - protein, 508 aa, Homo sapiens; identical to SEQ ID NO: 49943
  Payload ID: 9971
  Gene Symbol: MATK
  Gene Name: megakaryocyte-associated tyrosine kinase
  Uniprot ID: P42679
  ENSP ID: ENSP00000483213

SEQ ID NO: 49954 - protein, 377 aa, Homo sapiens
  Payload ID: 9972
  Gene Symbol: MLC1
  Gene Name: megalencephalic leukoencephalopathy with subcortical cysts 1
  Uniprot ID: Q15049
  ENSP ID: ENSP00000310375
MTQEPFREELAYDRMPTLERGRQDPASYAPDAKPSDLQLSKRLPPCFSHKTWVFSVLMGSCLLVTSGFSLYLGNVFPAEMDYLRCAAGSCIPSAIVSFTVSRRNANVIPNFQILFVSTFAVTTTCLIWFGCKLVLNPSAININFNLILLLLLELLMAATVIIAARSSEEDCKKKKGSMSDSANILDEVPFPARVLKSYSVVEVIAGISAVLGGIIALNVDDSVSGPHLSVTFFWILVACFPSAIASHVAAECPSKCLVEVLIAISSLTSPLLFTASGYLSFSIMRIVEMFKDYPPAIKPSYDVLLLLLLLVLLLQAGLNTGTAIQCVRFKVSARLQGASWDTQNGPQERLAGEVARSPLKEFDKEKAWRAVVVQMAQ

SEQ ID NO: 49955 - protein, 377 aa, Homo sapiens; identical to SEQ ID NO: 49954
  Payload ID: 9972
  Gene Symbol: MLC1
  Gene Name: megalencephalic leukoencephalopathy with subcortical cysts 1
  Uniprot ID: Q15049
  ENSP ID: ENSP00000379216

SEQ ID NO: 49956 - protein, 223 aa, Homo sapiens
  Payload ID: 9972
  Gene Symbol: MLC1
  Gene Name: megalencephalic leukoencephalopathy with subcortical cysts 1
  ENSP ID: ENSP00000401385
MTQEPFREELAYDRMPTLERGRQDPASYAPDAKPSDLQLSKRLPPCFSHKTWVFSVLMGCIPSAIVSFTVSRRNANVIPNFQILFVSTFAVTTTCLIWFGCKLVLNPSAININFNLILLLLLELLMAATVIIAARSSEEDCKKKKGSMSDSANILDEVPFPARVLKSYSVVEVIAGISAVLGGIIALNVDDSVSGPHLSVTFFWILVACFPSAIASHVAAECP

SEQ ID NO: 49957 - protein, 530 aa, Homo sapiens
  Payload ID: 9973
  Gene Symbol: M1AP
  Gene Name: meiosis 1 associated protein
  Uniprot ID: Q8TC57
  ENSP ID: ENSP00000290536
MHPGRTTGKGPSTHTQIDQQPPRLLIVHIALPSWADICTNLCEALQNFFSLACSLMGPSRMSLFSLYMVQDQHECILPFVQVKGNFARLQTCISELRMLQREGCFRSQGASLRLAVEDGLQQFKQYSRHVTTRAALTYTSLEITILTSQPGKEVVKQLEEGLKDTDLARVRRFQVVEVTKGILEHVDSASPVEDTSNDESSILGTDIDLQTIDNDIVSMEIFFKAWLHNSGTDQEQIHLLLSSQCFSNISRPRDNPMCLKCDLQERLLCPSLLAGTADGSLRMDDPKGDFITLYQMASQSSASHYKLQVIKALKSSGLCESLTYGLPFILRPTSCWQLDWDELETNQQHFHALCHSLLKREWLLLAKGEPPGPGHSQRIPASTFYVIMPSHSLTLLVKAVATRELMLPSTFPLLPEDPHDDSLKNVESMLDSLELEPTYNPLHVQSHLYSHLSSIYAKPQGRLHPHWESRAPRKHPCKTGQLQTNRARATVAPLPMTPVPGRASKMPAASKSSSDAFFLPSEWEKDPSRP

SEQ ID NO: 49958 - protein, 526 aa, Homo sapiens
  Payload ID: 9973
  Gene Symbol: M1AP
  Gene Name: meiosis 1 associated protein
  Uniprot ID: Q8TC57
  ENSP ID: ENSP00000386793
MHPGRTTGKGPSTHTQIDQQPPRLLIVHIALPSWADICTNLCEALQNFFSLACSLMGPSRMSLFSLYMVQDQHECILPFVQVKGNFARLQTCISELRMLQREGCFRSQGASLRLAVEDGLQQFKQYSRHVTTRAALTYTSLEITILTSQPGKEVVKQLEEGLKDTDLARVRRFQVVEVTKGILEHVDSASPVEDTSNDESSILGTDIDLQTIDNDIVSMEIFFKAWLHNSGTDQEQIHLLLSSQCFSNISRPRDNPMCLKCDLQERLLCPSLLAGTADGSLRMDDPKGDFITLYQMASQSSASHYKLQVIKALKSSGLCESLTYGLPFILRPTSCWQLDWDELETNQQHFHALCHSLLKREWLLLAKGEPPGPGHSQRIPASTFYVIMPSHSLTLLVKAVATRELMLPSTFPLLPEDPHDDSLKNVESMLDSLELEPTYNPLHVQSHLYSHLSSIYAKPQGRLHPHWESRAPRKTGQLQTNRARATVAPLPMTPVPGRASKMPAASKSSSDAFFLPSEWEKDPSRP

SEQ ID NO: 49959 - protein, 155 aa, Homo sapiens
  Payload ID: 9973
  Gene Symbol: M1AP
  Gene Name: meiosis 1 associated protein
  ENSP ID: ENSP00000406107
MHPGRTTGKGPSTHTQIDQQPPRLLIVHIALPSWADICTNLCEALQNFFSLACSLMGPSRMSLFSLYMVQDQHECILPFVQVKGNFARLQTCISELRMLQREGCFRSQGASLRLAVEDGLQQFKQYSRHVTTRAALTYTSLERVLFWELTLTFRL

SEQ ID NO: 49960 - protein, 93 aa, Homo sapiens
  Payload ID: 9973
  Gene Symbol: M1AP
  Gene Name: meiosis 1 associated protein
  ENSP ID: ENSP00000408713
MHPGRTTGKGPSTHTQIDQQPPRLLIVHIALPSWADICTNLCEALQNFFSLACSLMGPSRMSLFSLYMVQDQHECILPFVRVLFWELTLTFRL

SEQ ID NO: 49961 - protein, 142 aa, Homo sapiens
  Payload ID: 9973
  Gene Symbol: M1AP
  Gene Name: meiosis 1 associated protein
  ENSP ID: ENSP00000414882
MHPGRTTGKGPSTHTQIDQQPPRLLIVHIALPSWADICTNLCEALQNFFSLACSLMGPSRMSLFSLYMVQDQHECILPFVQVKGNFARLQTCISELRMLQREGCFRSQGASLRLAVEDGLQQFKQYSRHVTTRAALTYTSLE

SEQ ID NO: 49962 - protein, 526 aa, Homo sapiens; identical to SEQ ID NO: 49958
  Payload ID: 9973
  Gene Symbol: M1AP
  Gene Name: meiosis 1 associated protein
  Uniprot ID: Q8TC57
  ENSP ID: ENSP00000445662

SEQ ID NO: 49963 - protein, 471 aa, Homo sapiens
  Payload ID: 9974
  Gene Symbol: MEIOB
  Gene Name: meiosis specific with OB domains
  Uniprot ID: Q8N635
  ENSP ID: ENSP00000314484
MANSFAARIFTTLSDLQTNMANLKVIGIVIGKTDVKGFPDRKNIGSERYTFSFTIRDSPAHFVNAASWGNEDYIKSLSDSFRVGDCVIIENPLIQRKEIEREEKFSPATPSNCKLLLSENHSTVKVCSSYEVDTKLLSLIHLPVKESHDYYSLGDIVANGHSLNGRIINVLAAVKSVGEPKYFTTSDRRKGQRCEVRLYDETESSFAMTCWDNESILLAQSWMPRETVIFASDVRINFDKFRNCMTATVISKTIITTNPDIPEANILLNFIRENKETNVLDDEIDSYFKESINLSTIVDVYTVEQLKGKALKNEGKADPSYGILYAYISTLNIDDETTKVVRNRCSSCGYIVNEASNMCTTCNKNSLDFKSVFLSFHVLIDLTDHTGTLHSCSLTGSVAEETLGCTVHEFLAMTDEQKTALKWQFLLERSKIYLKFVLSHRARSGLKISVLSCKLADPTEASRNLSGQKHV

SEQ ID NO: 49964 - protein, 442 aa, Homo sapiens
  Payload ID: 9974
  Gene Symbol: MEIOB
  Gene Name: meiosis specific with OB domains
  Uniprot ID: Q8N635
  ENSP ID: ENSP00000380504
MANSFAARIFTTLSDLQTNMANLKVIGIVIGKTDVKGFPDRKNIGSERYTFSFTIRDSPAHFVNAASWGNEDYIKSLSDSFRVGDCVIIENPLIQRKEIEREEKFSPATPSNCKLLLSENHSTVKVCSSYEVDTKLLSLIHLPVKESHDYYSLGDIVANGHSLNGRIINVLAAVKSVGEPKYFTTSDRRKGQRCEVRLYDETESSFAMTCWDNESILLAQSWMPRETVIFASDVRINFDKFRNCMTATVISKTIITTNPDIPEANILLNFIRENKETNVLDDEIDSYFKESINLSTIVDVYTVEQLKGKALKNEGKADPSYGILYAYISTLNIDDETTKVVRNRCSSCGYIVNEASNMCTTCNKNSLDFKSVFLSFHVLIDLTDHTGTLHSCSLTGSVAEETLGCTFVLSHRARSGLKISVLSCKLADPTEASRNLSGQKHV

SEQ ID NO: 49965 - protein, 471 aa, Homo sapiens; identical to SEQ ID NO: 49963
  Payload ID: 9974
  Gene Symbol: MEIOB
  Gene Name: meiosis specific with OB domains
  Uniprot ID: Q8N635
  ENSP ID: ENSP00000390778

SEQ ID NO: 49966 - protein, 53 aa, Homo sapiens
  Payload ID: 9974
  Gene Symbol: MEIOB
  Gene Name: meiosis specific with OB domains
  ENSP ID: ENSP00000456880
MTCWDNESILLAQSWMPRETVIFASDVRINFDKFRNCMTATVISKTIITTNPD

SEQ ID NO: 49967 - protein, 264 aa, Homo sapiens
  Payload ID: 9974
  Gene Symbol: MEIOB
  Gene Name: meiosis specific with OB domains
  ENSP ID: ENSP00000457416
MTCWDNESILLAQSWMPRETVIFASDVRINFDKFRNCMTATVISKTIITTNPDIPEANILLNFIRENKETNVLDDEIDSYFKESINLSTIVDVYTVEQLKGKALKNEGKADPSYGILYAYISTLNIDDETTKVVRNRCSSCGYIVNEASNMCTTCNKNSLDFKSVFLSFHVLIDLTDHTGTLHSCSLTGSVAEETLGCTVHEFLAMTDEQKTALKWQFLLERSKIYLKFVLSHRARSGLKISVLSCKLADPTEASRNLSGQKHV

SEQ ID NO: 49968 - protein, 43 aa, Homo sapiens
  Payload ID: 9974
  Gene Symbol: MEIOB
  Gene Name: meiosis specific with OB domains
  ENSP ID: ENSP00000457427
MANSFAARIFTTLSDLQTNMANLILDQKGTLSASPFGIHQHIL

SEQ ID NO: 49969 - protein, 88 aa, Homo sapiens
  Payload ID: 9975
  Gene Symbol: MEIG1
  Gene Name: meiosis/spermiogenesis associated 1
  Uniprot ID: Q5JSS6
  ENSP ID: ENSP00000367486
MASSDVKPKSVSHAKKWSEEIENLYRFQQAGYRDETEYRQVKQVSMVDRWPETGYVKKLQRRDNTFYYYNKQRECDDKEVHKVKIYAY

SEQ ID NO: 49970 - protein, 88 aa, Homo sapiens; identical to SEQ ID NO: 49969
  Payload ID: 9975
  Gene Symbol: MEIG1
  Gene Name: meiosis/spermiogenesis associated 1
  Uniprot ID: Q5JSS6
  ENSP ID: ENSP00000384334

SEQ ID NO: 49971 - protein, 495 aa, Homo sapiens
  Payload ID: 9976
  Gene Symbol: MNS1
  Gene Name: meiosis-specific nuclear structural 1
  Uniprot ID: Q8NEH6
  ENSP ID: ENSP00000260453
MGSKRRNLSCSERHQKLVDENYCKKLHVQALKNVNSQIRNQMVQNENDNRVQRKQFLRLLQNEQFELDMEEAIQKAEENKRLKELQLKQEEKLAMELAKLKHESLKDEKMRQQVRENSIELRELEKKLKAAYMNKERAAQIAEKDAIKYEQMKRDAEIAKTMMEEHKRIIKEENAAEDKRNKAKAQYYLDLEKQLEEQEKKKQEAYEQLLKEKLMIDEIVRKIYEEDQLEKQQKLEKMNAMRRYIEEFQKEQALWRKKKREEMEEENRKIIEFANMQQQREEDRMAKVQENEEKRLQLQNALTQKLEEMLRQREDLEQVRQELYQEEQAEIYKSKLKEEAEKKLRKQKEMKQDFEEQMALKELVLQAAKEEEENFRKTMLAKFAEDDRIELMNAQKQRMKQLEHRRAVEKLIEERRQQFLADKQRELEEWQLQQRRQGFINAIIEEERLKLLKEHATNLLGYLPKGVFKKEDDIDLLGEEFRKVYQQRSEICEEK

SEQ ID NO: 49972 - protein, 1274 aa, Homo sapiens
  Payload ID: 9977
  Gene Symbol: MEI1
  Gene Name: meiotic double-stranded break formation protein 1
  Uniprot ID: Q5TIA1
  ENSP ID: ENSP00000384115
MAVRQAATAGTPGPRREEEAALLFERAHYRHDPRWLLPVTPRLCLACALELLPDPGVSLVRKKHMLSCFQDALVRHTSLVTQLVSQDQRVCIHFISVLFGLLCSMEDGSVTDLCIEVLIQITTQLKLEQTIRCLLDECHKELCNMPSMRGSLATLTLLGKLVDAIPALADELVMEHGNLMEHLLRGLVYPSEGIQASVCYLYGKLYSSPVAAEMLSGHFREKLFPLFLSILDGAQTKELQINCLGLLRQLLKYDLFVSMIMNQDGLGESAKNIEGSSGNTSLPLVLKKLLLSRDETLQVASAHCITAVLVHSPAKHASAFIHADIPEFLFEHLSSSSEVLVWSSCNCLTLLVEEPLFFSKCHTVYGIEAVVRSLQGSLKMNNIELHKQGLLLFAEILTRQPEEIKLFTSSAMCRDAGRALQEAVSSPVLEVAAEALKATSAFLRKDHQSTPPVQYGELQALLEAMLNRCAEFSQTLLSRRPLGHASSRDSEKAILQRGKFLLSTLEGFRSACRLAIEFQSEPSAQENPFTAPSAKKEDTLEAFSEFLLSACDSLCIPMVMRHLEQTTHPALMEVFLSILHNLFVIVPHMKEKFSKKLASSSFIRLTLELKARFCSGLSHSALNQVCSNFLYYMCLNLLSAPEKTGPPSKEELSAVSELLQHGLPQISSRSPESLAFLSDRQYMEGAARQRQYCILLLFYLAYIHEDRFVSEAELFEAVQSFLLSLQDQGERPPLVVFKASIYLLAICQDKDNTLRETMVSAIRKFLEGIPDLQLVYTHHPLLLRFFLLYPELMSRYGHRVLELWFFWEESSYEELDDVTSAGQPALPASLVVLFQLLRSIPSILLILLDLIYSSPVDTAHKVLISLRTFLRRNEDIQVGGLIRGHFLLILQRLLVEHGASPSGASGNLPLLLSLLSLMQLRNVSEQELDSVAMKLLHQVSKLCGKCSPTDVDILQPSFNFLYWSLHQTTPSSQKRAAAVLLSSTGLMELLEKMLALTLAKADSPRTALLCSAWLLTASFSAQQHKGSLQVHQTLSVEMDQVLKALSFPKKKAALLSAAILCFLRTALRQSFSSALVALVPSGAQPLPATKDTVLAPLRMSQVRSLVIGLQNLLVQKDPLLSQACVGCLEALLDYLDARSPDIALHVASQPWNRFLLFTLLDAGENSFLRPEILRLMTLFMRYRSSSVLSHEEVGDVLQGVALADLSTLSNTTLQALHGFFQQLQSMGHLADHSMAQTLQASLEGLPPSTSSGQPPLQDMLCLGGVAVSLSHIRN

SEQ ID NO: 49973 - protein, 238 aa, Homo sapiens
  Payload ID: 9977
  Gene Symbol: MEI1
  Gene Name: meiotic double-stranded break formation protein 1
  Uniprot ID: Q5TIA1
  ENSP ID: ENSP00000385298
MLALTLAKADSPRTALLCSAWLLTASFSAQQHKGSLQVHQTLSVEMDQVLKALSFPKKKAALLSAAILCFLRTALRQSFSSALVALVPSGAQPLPATKDTVLAPLRMSQVRSLVIGLQNLLVQKDPLLSQACVGCLEALLDYLDARSPDIALHVASQPWNRFLLFTLLDAGENSFLRPEILRLMTLLQSMGHLADHSMAQTLQASLEGLPPSTSSGQPPLQDMLCLGGVAVSLSHIRN

SEQ ID NO: 49974 - protein, 63 aa, Homo sapiens
  Payload ID: 9977
  Gene Symbol: MEI1
  Gene Name: meiotic double-stranded break formation protein 1
  ENSP ID: ENSP00000410973
  MOD_RES (1)..(1): Any amino acid
XRSSSVLSHEELQSMGHLADHSMAQTLQASLEGLPPSTSSGQPPLQDMLCLGGVAVSLSHIRN

SEQ ID NO: 49975 - protein, 506 aa, Homo sapiens
  Payload ID: 9977
  Gene Symbol: MEI1
  Gene Name: meiotic double-stranded break formation protein 1
  ENSP ID: ENSP00000444225
MNQDGLGESAKNIEGSSGNTSLPLVLKKLLLSRDETLQVASAHCITAVLVHSPAKHASAFIHADIPEFLFEHLSSSSEVLVWSSCNCLTLLVEEPLFFSKCHTVYGIEAVVRSLQGSLKMNNIELHKQGLLLFAEILTRQPEEIKLFTSSAMCRDAGRALQEAVSSPVLEVAAEALKATSAFLRKDHQSTPPVQYGELQALLEAMLNRCAEFSQTLLSRRPLGHASSRDSEKAILQRGKFLLSTLEGFRSACRLAIEFQSEPSAQENPFTAPSAKKEDTLEAFSEFLLSACDSLCIPMVMRHLEQTTHPALMEVFLSILHNLFVIVPHMKEKFSKKLASSSFIRLTLELKARFCSGLSHSALNQVCSNFLYYMCLNLLSAPEKTGPPSKEELSAVSELLQHGLPQISSRSPESLAFLSDRQYMEGAARQRQYCILLLFYLAYIHEDRFVSEAELFEAVQSFLLSLQDQGERPPLVVFKASIYLLAICQDKDNTLREQLHCSLISIS

SEQ ID NO: 49976 - protein, 385 aa, Homo sapiens
  Payload ID: 9978
  Gene Symbol: MEI4
  Gene Name: meiotic double-stranded break formation protein 4
  Uniprot ID: A8MW99
  ENSP ID: ENSP00000473370
MDVQKWYLRTSKLALALAIIRSKPADKSSREYTEHLAMLLSEEQSKWRSKVEILEAEVMQLRQKLLVSRLCSGSFKSGYVSSQLEAQEPKSSESTLTSMEDSGCDLSNEQRTESSDLSQHFVESCTPTHFPPLPLVKRPCAILQNPLSSHMQFLQYLLELKNLTESGNLKRDLTHFEKDSSTVSDSVFQLLDGLITFYRNPKLPFSRFWTEAVGTLASLISDYNLSSHILKKCSKKLEEFEKTLLHAILGNNHINQFQVQHYVSQSLVTLGNCSLLRKSIISLLLSEVNGFADDLGAINQEQASYDVSRYENIFYLFWVLEQLLQKETEEGNTSSIGHDDQEIKKFLQKHDETIFQLSDAFPLFTFYLWRVGILLSSAQIETLRK

SEQ ID NO: 49977 - protein, 333 aa, Homo sapiens
  Payload ID: 9979
  Gene Symbol: MEIKIN
  Gene Name: meiotic kinetochore factor
  ENSP ID: ENSP00000481155
MWPLRVYTRKKREGQRLNLTPTPDLGSPAKAEAPPGSKRKGKVHGLSKIAEKAERSRQGGSGSGPFSPRLGVTGEKSLQENRSSEDTQDEKIASLRESVTDDLQVDSSSSNSELVSGLSLHHGMASSLLSYSVTDSYAEYKSFEESFPSPELFRKSDYLDWECPNLEEHMQWKNSTLLDTSKAVAIEKAPQFSNVSAIFSTSSEDYQKCHRKTVMTVADQNVSPKAKCASNSESDNAACEILLAEKTCPSTPEKTKKKKTNSSTPGKKNRGLLTSTPSSETAGFVFPANASEICCIIRTSPGTRQVKNKGVIVKKKKYSLPKDTPQDIIIKMA

SEQ ID NO: 49978 - protein, 104 aa, Homo sapiens
  Payload ID: 9979
  Gene Symbol: MEIKIN
  Gene Name: meiotic kinetochore factor
  ENSP ID: ENSP00000488457
  MOD_RES (1)..(1): Any amino acid
XRKLALQPLKKQRKKQIDLSSVQKASFEELFPNVSNYVNSNEIVPVSSLQENSSNEFPANASEICCIIRTSPGTRQVKNKGVIVKKKKYSLPKDTPQDIIIKMA

SEQ ID NO: 49979 - protein, 373 aa, Homo sapiens
  Payload ID: 9979
  Gene Symbol: MEIKIN
  Gene Name: meiotic kinetochore factor
  Uniprot ID: A0A087WXM9
  ENSP ID: ENSP00000488568
MWPLRVYTRKKREGQRLNLTPTPDLGSPAKAEAPPGSKRKGKVHGLSKIAEKAERSRQGGSGSGPFSPRLGVTGEKSLQENRSSEDTQDEKIASLRESVTDDLQVDSSSSNSELVSGLSLHHGMASSLLSYSVTDSYAEYKSFEESFPSPELFRKSDYLDWECPNLEEHMQWKNSTLLDTSKAVAIEKAPQFSNVSAIFSTSSEDYQKCHRKTVMTVADQNVSPKAKCASNSESDNAACEILLAEKTCPSTPEKTKKKKTNSSTPGKKNRGLLTSTPSSETAGFVIDLSSVQKASFEELFPNVSNYVNSNEIVPVSSLQENSSNEFPANASEICCIIRTSPGTRQVKNKGVIVKKKKYSLPKDTPQDIIIKMA

SEQ ID NO: 49980 - protein, 205 aa, Homo sapiens
  Payload ID: 9980
  Gene Symbol: MND1
  Gene Name: meiotic nuclear divisions 1
  Uniprot ID: Q9BWT6
  ENSP ID: ENSP00000240488
MSKKKGLSAEEKRTRMMEIFSETKDVFQLKDLEKIAPKEKGITAMSVKEVLQSLVDDGMVDCERIGTSNYYWAFPSKALHARKHKLEVLESQLSEGSQKHASLQKSIEKAKIGRCETEERTRLAKELSSLRDQREQLKAEVEKYKDCDPQVVEEIRQANKVAKEAANRWTDNIFAIKSWAKRKFGFEENKIDRTFGIPEDFDYID

SEQ ID NO: 49981 - protein, 165 aa, Homo sapiens
  Payload ID: 9980
  Gene Symbol: MND1
  Gene Name: meiotic nuclear divisions 1
  ENSP ID: ENSP00000422933
MMEIFSETKDVFQLKDLEKIAPKEKGITAMSVKEVLQSLVDDGMVDCERIGTSNYYWAFPSKALHARKHKLEVLESQLSEGSQKHASLQKSIEKAKIGRCETEERTRLAKELSSLRDQREQLKAEVEKYKDCDPQVVEEIRQANKVAKEAANRWTGMYYNNADKL

SEQ ID NO: 49982 - protein, 102 aa, Homo sapiens
  Payload ID: 9980
  Gene Symbol: MND1
  Gene Name: meiotic nuclear divisions 1
  ENSP ID: ENSP00000425500
MMEIFSETKDVFQLKDLEKIAPKEKGITAMSVKEVLQSLVDDGMVDCERIGTSNYYWAFPSKALHARKHKLEVLESQLSEGSQKHASLQKSIEKAKIGRCET

SEQ ID NO: 49983 - protein, 126 aa, Homo sapiens
  Payload ID: 9980
  Gene Symbol: MND1
  Gene Name: meiotic nuclear divisions 1
  ENSP ID: ENSP00000427559
MSKKKGLSAEEKRTRMMEIFSETKDVFQLKDLEKIAPKEKGITAMSVKEVLQSLVDDGMVDCERIGTSNYYWAFPSKALHARKHKLEVLESQDPGCCFHEIIKVSYYRKFWLGAVAHACNPSTLGG

SEQ ID NO: 49984 - protein, 122 aa, Homo sapiens
  Payload ID: 9980
  Gene Symbol: MND1
  Gene Name: meiotic nuclear divisions 1
  ENSP ID: ENSP00000477758
MSKKKGLSAEEKRTRMMEIFSETKDVFQLKDLEKIAPKEKGITAMSVKEVLQSLVDDGMVDCERIGTSNYYWAFPSKALHARKHKLEVLESQLSEGSQKHASLQKSIEKAKIGRCETAKQIK

SEQ ID NO: 49985 - protein, 390 aa, Homo sapiens
  Payload ID: 9981
  Gene Symbol: MEIS1
  Gene Name: Meis homeobox 1
  Uniprot ID: O00470
  ENSP ID: ENSP00000272369
MAQRYDDLPHYGGMDGVGIPSTMYGDPHAARSMQPVHHLNHGPPLHSHQYPHTAHTNAMAPSMGSSVNDALKRDKDAIYGHPLFPLLALIFEKCELATCTPREPGVAGGDVCSSESFNEDIAVFAKQIRAEKPLFSSNPELDNLMIQAIQVLRFHLLELEKVHELCDNFCHRYISCLKGKMPIDLVIDDREGGSKSDSEDITRSANLTDQPSWNRDHDDTASTRSGGTPGPSSGGHTSHSGDNSSEQGDGLDNSVASPSTGDDDDPDKDKKRHKKRGIFPKVATNIMRAWLFQHLTHPYPSEEQKKQLAQDTGLTILQVNNWFINARRRIVQPMIDQSNRAVSQGTPYNPDGQPMGGFVMDGQQHMGIRAPGPMSGMGMNMGMEGQWHYM

SEQ ID NO: 49986 - protein, 463 aa, Homo sapiens
  Payload ID: 9981
  Gene Symbol: MEIS1
  Gene Name: Meis homeobox 1
  Uniprot ID: O00470
  ENSP ID: ENSP00000381518
MQYDDLPHYGGMDGVGIPSTMYGDPHAARSMQPVHHLNHGPPLHSHQYPHTAHTNAMAPSMGSSVNDALKRDKDAIYGHPLFPLLALIFEKCELATCTPREPGVAGGDVCSSESFNEDIAVFAKQIRAEKPLFSSNPELDNLMIQAIQVLRFHLLELEKVHELCDNFCHRYISCLKGKMPIDLVIDDREGGSKSDSEDITRSANLTDQPSWNRDHDDTASTRSGGTPGPSSGGHTSHSGDNSSEQGDGLDNSVASPSTGDDDDPDKDKKRHKKRGIFPKVATNIMRAWLFQHLTHPYPSEEQKKQLAQDTGLTILQVNNWFINARRRIVQPMIDQSNRAVSQGTPYNPDGQPMGGFVMDGQQHMGIRAPGLQSMPGEYVARGGPMGVSMGQPSYTQPQMPPHPAQLRHGPPMHTYIPGHPHHPTVMMHGGPPHPGMPMSASSPTVLNTGDPTMSGQVMDIHAQ

SEQ ID NO: 49987 - protein, 121 aa, Homo sapiens
  Payload ID: 9981
  Gene Symbol: MEIS1
  Gene Name: Meis homeobox 1
  ENSP ID: ENSP00000397418
  MOD_RES (1)..(1): Any amino acid
XLCFESPEISRPVFPCLQMIQAIQVLRFHLLELEKVHELCDNFCHRYISCLKGKMPIDLVIDDREGGSKSDSEDITRSANLTDQPSWNRDHDDTASTRSGGTPGPSSGGHTSHSGDNSSEQ

SEQ ID NO: 49988 - protein, 325 aa, Homo sapiens
  Payload ID: 9981
  Gene Symbol: MEIS1
  Gene Name: Meis homeobox 1
  ENSP ID: ENSP00000440571
MAQGLRLQGSRRKGRHPLFPLLALIFEKCELATCTPREPGVAGGDVCSSESFNEDIAVFAKQIRAEKPLFSSNPELDNLMIQAIQVLRFHLLELEKVHELCDNFCHRYISCLKGKMPIDLVIDDREGGSKSDSEDITRSANLTDQPSWNRDHDDTASTRSGGTPGPSSGGHTSHSGDNSSEQGDGLDNSVASPSTGDDDDPDKDKKRHKKRGIFPKVATNIMRAWLFQHLTHPYPSEEQKKQLAQDTGLTILQVNNWFINARRRIVQPMIDQSNRAVSQGTPYNPDGQPMGGFVMDGQQHMGIRAPGPMSGMGMNMGMEGQWHYM

SEQ ID NO: 49989 - protein, 370 aa, Homo sapiens
  Payload ID: 9981
  Gene Symbol: MEIS1
  Gene Name: Meis homeobox 1
  ENSP ID: ENSP00000454209
MAQRYDDLPHYGGMDGVGIPSTMYGDPHAARSMQPVHHLNHGPPLHSHQYPHTAHTNAMAPSMGSSVNDALKRDKDAIYGHPLFPLLALIFEKCELATCTPREPGVAGGDVCSSESFNEDIAVFAKQIRAEKPLFSSNPELDNLMIQAIQVLRFHLLELEKVHELCDNFCHRYISCLKGKMPIDLVIDDREGGSKSDSEDITRSANLTDQPSWNRDHDDTASTRSGGTPGPSSGGHTSHSGDNSSEQGDGLDNSVASPSTGDDDDPDKDKKRHKKRGIFPKVATNIMRAWLFQHLTHPYPSEEQKKQLAQDTGLTILQVNNWFINARRRIVQPMIDQSNRAGKSPIVTVFKSRKRKPSSSHSPGGPLPGK

SEQ ID NO: 49990 - protein, 378 aa, Homo sapiens
  Payload ID: 9981
  Gene Symbol: MEIS1
  Gene Name: Meis homeobox 1
  ENSP ID: ENSP00000475161
MAQRYDDLPHYGGMDGVGIPSTMYGDPHAARSMQPVHHLNHGPPLHSHQYPHTAHTNAMAPSMGSSVNDALKRDKDAIYGHPLFPLLALIFEKCELATCTPREPGVAGGDVCSSESFNEDIAVFAKQIRAEKPLFSSNPELDNLMIQAIQVLRFHLLELEKVHELCDNFCHRYISCLKGKMPIDLVIDDREGGSKSDSEDITRSANLTDQPSWNRDHDDTASTRSGGTPGPSSGGHTSHSGDNSSEQGDGLDNSVASPSTGDDDDPDKDKKRHKKRGIFPKVATNIMRAWLFQHLTHPYPSEEQKKQLAQDTGLTILQVNNWFINARRRIVQPMIDQSNRAVSQGTPYNPDGQPMGGFVMDGQQHMGIRAPGKTLFLW

SEQ ID NO: 49991 - protein, 302 aa, Homo sapiens
  Payload ID: 9982
  Gene Symbol: MEIS2
  Gene Name: Meis homeobox 2
  Uniprot ID: O14770
  ENSP ID: ENSP00000326296
MAQRYDELPHYGGMDGVGVPASMYGDPHAPRPIPPVHHLNHGPPLHATQHYGAHAPHPNVMPASMGSAVNDALKRDKDAIYGHPLFPLLALVFEKCELATCTPREPGVAGGDVCSSDSFNEDIAVFAKQVRAEKPLFSSNPELDNLMIQAIQVLRFHLLELEKVHELCDNFCHRYISCLKGKMPIDLVIDERDGSSKSDHEELSGSSTNLADHNPSSWRDHDDATSTHSAGTPGPSSGGHASQSGDNSSEQGDGLDNSVASPGTGDDDDPDKDKKRQKKRGIFPKVATNIMRAWLFQHLTVY

SEQ ID NO: 49992 - protein, 381 aa, Homo sapiens
  Payload ID: 9982
  Gene Symbol: MEIS2
  Gene Name: Meis homeobox 2
  Uniprot ID: O14770
  ENSP ID: ENSP00000339549
MDGVGVPASMYGDPHAPRPIPPVHHLNHGPPLHATQHYGAHAPHPNVMPASMGSAVNDALKRDKDAIYGHPLFPLLALVFEKCELATCTPREPGVAGGDVCSSDSFNEDIAVFAKQVRAEKPLFSSNPELDNLMIQAIQVLRFHLLELEKVHELCDNFCHRYISCLKGKMPIDLVIDERDGSSKSDHEELSGSSTNLADHNPSSWRDHDDATSTHSAGTPGPSSGGHASQSGDNSSEQGDGLDNSVASPGTGDDDDPDKDKKRQKKRGIFPKVATNIMRAWLFQHLTHPYPSEEQKKQLAQDTGLTILQVNNWFINARRRIVQPMIDQSNRAVSQGAAYSPEGQPMGSFVLDGQQHMGIRPAGPMSGMGMNMGMDGQWHYM

SEQ ID NO: 49993 - protein, 470 aa, Homo sapiens
  Payload ID: 9982
  Gene Symbol: MEIS2
  Gene Name: Meis homeobox 2
  Uniprot ID: O14770
  ENSP ID: ENSP00000341400
MAQRYDELPHYGGMDGVGVPASMYGDPHAPRPIPPVHHLNHGPPLHATQHYGAHAPHPNVMPASMGSAVNDALKRDKDAIYGHPLFPLLALVFEKCELATCTPREPGVAGGDVCSSDSFNEDIAVFAKQVRAEKPLFSSNPELDNLMIQAIQVLRFHLLELEKVHELCDNFCHRYISCLKGKMPIDLVIDERDGSSKSDHEELSGSSTNLADHNPSSWRDHDDATSTHSAGTPGPSSGGHASQSGDNSSEQGDGLDNSVASPGTGDDDDPDKDKKRQKKRGIFPKVATNIMRAWLFQHLTHPYPSEEQKKQLAQDTGLTILQVNNWFINARRRIVQPMIDQSNRAVSQGAAYSPEGQPMGSFVLDGQQHMGIRPAGLQSMPGDYVSQGGPMGMSMAQPSYTPPQMTPHPTQLRHGPPMHSYLPSHPHHPAMMMHGGPPTHPGMTMSAQSPTMLNSVDPNVGGQVMDIHAQ

SEQ ID NO: 49994 - protein, 306 aa, Homo sapiens
  Payload ID: 9982
  Gene Symbol: MEIS2
  Gene Name: Meis homeobox 2
  Uniprot ID: O14770
  ENSP ID: ENSP00000380745
MALVFEKCELATCTPREPGVAGGDVCSSDSFNEDIAVFAKQVRAEKPLFSSNPELDNLMIQAIQVLRFHLLELEKVHELCDNFCHRYISCLKGKMPIDLVIDERDGSSKSDHEELSGSSTNLADHNPSSWRDHDDATSTHSAGTPGPSSGGHASQSGDNSSEQGDGLDNSVASPGTGDDDDPDKDKKRQKKRGIFPKVATNIMRAWLFQHLTHPYPSEEQKKQLAQDTGLTILQVNNWFINARRRIVQPMIDQSNRAVSQGAAYSPEGQPMGSFVLDGQQHMGIRPAGPMSGMGMNMGMDGQWHYM

SEQ ID NO: 49995 - protein, 306 aa, Homo sapiens; identical to SEQ ID NO: 49994
  Payload ID: 9982
  Gene Symbol: MEIS2
  Gene Name: Meis homeobox 2
  Uniprot ID: O14770
  ENSP ID: ENSP00000380749

SEQ ID NO: 49996 - protein, 401 aa, Homo sapiens
  Payload ID: 9982
  Gene Symbol: MEIS2
  Gene Name: Meis homeobox 2
  Uniprot ID: O14770
  ENSP ID: ENSP00000404185
MAQRYDELPHYGGMDGVGVPASMYGDPHAPRPIPPVHHLNHGPPLHATQHYGAHAPHPNVMPASMGSAVNDALKRDKDAIYGHPLFPLLALVFEKCELATCTPREPGVAGGDVCSSDSFNEDIAVFAKQVRAEKPLFSSNPELDNLMIQAIQVLRFHLLELEKVHELCDNFCHRYISCLKGKMPIDLVIDERDGSSKSDHEELSGSSTNLADHNPSSWRDHDDATSTHSAGTPGPSSGGHASQSGDNSSEQGDGLDNSVASPGTGDDDDPDKDKKRQKKRGIFPKVATNIMRAWLFQHLTHPYPSEEQKKQLAQDTGLTILQVNNWFINARRRIVQPMIDQSNRAGFLLDPSVSQGAAYSPEGQPMGSFVLDGQQHMGIRPAGPMSGMGMNMGMDGQWHYM

SEQ ID NO: 49997 - protein, 381 aa, Homo sapiens; identical to SEQ ID NO: 49992
  Payload ID: 9982
  Gene Symbol: MEIS2
  Gene Name: Meis homeobox 2
  Uniprot ID: O14770
  ENSP ID: ENSP00000452693

SEQ ID NO: 49998 - protein, 94 aa, Homo sapiens
  Payload ID: 9982
  Gene Symbol: MEIS2
  Gene Name: Meis homeobox 2
  ENSP ID: ENSP00000452770
MIQAIQVLRFHLLELEKVHELCDNFCHRYISCLKGKMPIDLVIDERDGSSKSDHEELSGSSTNLADHNPSSWRDHDDATSTHSAGTPGPSSGGH

SEQ ID NO: 49999 - protein, 105 aa, Homo sapiens
  Payload ID: 9982
  Gene Symbol: MEIS2
  Gene Name: Meis homeobox 2
  ENSP ID: ENSP00000452874
MIQAIQVLRFHLLELEKVHELCDNFCHRYISCLKGKMPIDLVIDERDGSSKSDHEELSGSSTNLADHNPSSWRDHDDATSTHSAGTPGPSSGGHASQSGDNSSEQ

SEQ ID NO: 50000 - protein, 388 aa, Homo sapiens
  Payload ID: 9982
  Gene Symbol: MEIS2
  Gene Name: Meis homeobox 2
  Uniprot ID: O14770
  ENSP ID: ENSP00000453390
MDGVGVPASMYGDPHAPRPIPPVHHLNHGPPLHATQHYGAHAPHPNVMPASMGSAVNDALKRDKDAIYGHPLFPLLALVFEKCELATCTPREPGVAGGDVCSSDSFNEDIAVFAKQVRAEKPLFSSNPELDNLMIQAIQVLRFHLLELEKVHELCDNFCHRYISCLKGKMPIDLVIDERDGSSKSDHEELSGSSTNLADHNPSSWRDHDDATSTHSAGTPGPSSGGHASQSGDNSSEQGDGLDNSVASPGTGDDDDPDKDKKRQKKRGIFPKVATNIMRAWLFQHLTHPYPSEEQKKQLAQDTGLTILQVNNWFINARRRIVQPMIDQSNRAGFLLDPSVSQGAAYSPEGQPMGSFVLDGQQHMGIRPAGPMSGMGMNMGMDGQWHYM

SEQ ID NO: 50001 - protein, 98 aa, Homo sapiens
  Payload ID: 9982
  Gene Symbol: MEIS2
  Gene Name: Meis homeobox 2
  ENSP ID: ENSP00000453481
MAQRYDELPHYGGMDGVGVPASMYGDPHAPRPIPPVHHLNHGPPLHATQHYGAHAPHPNVMPASMGSAVNDALKRDKDAIYGFAPKSHFFPQIQSWTI

SEQ ID NO: 50002 - protein, 394 aa, Homo sapiens
  Payload ID: 9982
  Gene Symbol: MEIS2
  Gene Name: Meis homeobox 2
  Uniprot ID: O14770
  ENSP ID: ENSP00000453497
MAQRYDELPHYGGMDGVGVPASMYGDPHAPRPIPPVHHLNHGPPLHATQHYGAHAPHPNVMPASMGSAVNDALKRDKDAIYGHPLFPLLALVFEKCELATCTPREPGVAGGDVCSSDSFNEDIAVFAKQVRAEKPLFSSNPELDNLMIQAIQVLRFHLLELEKVHELCDNFCHRYISCLKGKMPIDLVIDERDGSSKSDHEELSGSSTNLADHNPSSWRDHDDATSTHSAGTPGPSSGGHASQSGDNSSEQGDGLDNSVASPGTGDDDDPDKDKKRQKKRGIFPKVATNIMRAWLFQHLTHPYPSEEQKKQLAQDTGLTILQVNNWFINARRRIVQPMIDQSNRAVSQGAAYSPEGQPMGSFVLDGQQHMGIRPAGPMSGMGMNMGMDGQWHYM

SEQ ID NO: 50003 - protein, 157 aa, Homo sapiens
  Payload ID: 9982
  Gene Symbol: MEIS2
  Gene Name: Meis homeobox 2
  ENSP ID: ENSP00000453782
MALVFEKCELATCTPREPGVAGGDVCSSDSFNEDIAVFAKQVRAEKPLFSSNPELDNLMIQAIQVLRFHLLELEKVHELCDNFCHRYISCLKGKMPIDLVIDERDGSSKSDHEELSGSSTNLADHNPSSWRDHDDATSTHSAGTPGPSSGGHASQSG

SEQ ID NO: 50004 - protein, 477 aa, Homo sapiens
  Payload ID: 9982
  Gene Symbol: MEIS2
  Gene Name: Meis homeobox 2
  Uniprot ID: O14770
  ENSP ID: ENSP00000453793
MAQRYDELPHYGGMDGVGVPASMYGDPHAPRPIPPVHHLNHGPPLHATQHYGAHAPHPNVMPASMGSAVNDALKRDKDAIYGHPLFPLLALVFEKCELATCTPREPGVAGGDVCSSDSFNEDIAVFAKQVRAEKPLFSSNPELDNLMIQAIQVLRFHLLELEKVHELCDNFCHRYISCLKGKMPIDLVIDERDGSSKSDHEELSGSSTNLADHNPSSWRDHDDATSTHSAGTPGPSSGGHASQSGDNSSEQGDGLDNSVASPGTGDDDDPDKDKKRQKKRGIFPKVATNIMRAWLFQHLTHPYPSEEQKKQLAQDTGLTILQVNNWFINARRRIVQPMIDQSNRAGFLLDPSVSQGAAYSPEGQPMGSFVLDGQQHMGIRPAGLQSMPGDYVSQGGPMGMSMAQPSYTPPQMTPHPTQLRHGPPMHSYLPSHPHHPAMMMHGGPPTHPGMTMSAQSPTMLNSVDPNVGGQVMDIHAQ

SEQ ID NO: 50005 - protein, 139 aa, Homo sapiens
  Payload ID: 9982
  Gene Symbol: MEIS2
  Gene Name: Meis homeobox 2
  ENSP ID: ENSP00000475660
IQVLRFHLLELEKVHELCDNFCHRYISCLKGKMPIDLVIDERDGSSKSDHEELSGSSTNLADHNPSSWRDHDDATSTHSAGTPGPSSGGHASQSGDNSSEQEFFRFIPIFQMKWLGLGEGQLLDCHDRKRKQKNEDKAI

SEQ ID NO: 50006 - protein, 235 aa, Homo sapiens
  Payload ID: 9982
  Gene Symbol: MEIS2
  Gene Name: Meis homeobox 2
  ENSP ID: ENSP00000475899
EGFRWMIQAIQVLRFHLLELEKVHELCDNFCHRYISCLKGKMPIDLVIDERDGSSKSDHEELSGSSTNLADHNPSSWRDHDDATSTHSAGTPGPSSGGHASQSGDNSSEQGDGLDNSVASPGTGDDDDPDKDKKRQKKRGIFPKVATNIMRAWLFQHLTHPYPSEEQKKQLAQDTGLTILQVNNWFINARRRIVQPMIDQSNRAVSQGAAYSPEGQPMGSFVLDGQQHMGIRPAG

SEQ ID NO: 50007 - protein, 404 aa, Homo sapiens
  Payload ID: 9983
  Gene Symbol: MEIS3
  Gene Name: Meis homeobox 3
  ENSP ID: ENSP00000333552
MARRYDELPHYPGIVDGPAALASFPETVPAVPGPYGPHRPPQPLPPGLDSDGLKREKDEIYGHPLFPLLALVFEKCELATCSPRDGAGAGLGTPPGGDVCSSDSFNEDIAAFAKQVRSERPLFSSNPELDNLMIQAIQVLRFHLLELEKGKMPIDLVIEDRDGGCREDFEDYPASCPSLPDQNNMWIRDHEDSGSVHLGTPGPSSGGLASQSGDNSSDQGDGLDTSVASPSSGGEDEDLDQERRRNKKRGIFPKVATNIMRAWLFQHLSRRSEAPVLPDVCLGLGSPSPGPRWARPWGSDCGRPGRQSDSCWWLQHPYPSEEQKKQLAQDTGLTILQVNNWFINARRRIVQPMIDQSNRTGQGAAFSPEGQPIGGYTETQPHVAVRPPGSVGMSLNLEGEWHYL

SEQ ID NO: 50008 - protein, 358 aa, Homo sapiens
  Payload ID: 9983
  Gene Symbol: MEIS3
  Gene Name: Meis homeobox 3
  Uniprot ID: Q99687
  ENSP ID: ENSP00000388667
MARRYDELPHYPGIVDGPAALASFPETVPAVPGPYGPHRPPQPLPPGLDSDGLKREKDEIYGHPLFPLLALVFEKCELATCSPRDGAGAGLGTPPGGDVCSSDSFNEDIAAFAKQVRSERPLFSSNPELDNLMIQAIQVLRFHLLELEKGKMPIDLVIEDRDGGCREDFEDYPASCPSLPDQNNMWIRDHEDSGSVHLGTPGPSSGGLASQSGDNSSDQGDGLDTSVASPSSGGEDEDLDQERRRNKKRGIFPKVATNIMRAWLFQHLSHPYPSEEQKKQLAQDTGLTILQVNNWFINARRRIVQPMIDQSNRTGQGAAFSPEGQPIGGYTETQPHVAVRPPGSVGMSLNLEGEWHYL

SEQ ID NO: 50009 - protein, 421 aa, Homo sapiens
  Payload ID: 9983
  Gene Symbol: MEIS3
  Gene Name: Meis homeobox 3
  Uniprot ID: Q99687
  ENSP ID: ENSP00000452854
MARRYDELPHYPGIVDGPAALASFPETVPAVPGPYGPHRPPQPLPPGLDSDGLKREKDEIYGHPLFPLLALVFEKCELATCSPRDGAGAGLGTPPGGDVCSSDSFNEDIAAFAKQVRSERPLFSSNPELDNLMIQAIQVLRFHLLELEKVHDLCDNFCHRYITCLKGKMPIDLVIEDRDGGCREDFEDYPASCPSLPDQNNMWIRDHEDSGSVHLGTPGPSSGGLASQSGDNSSDQGDGLDTSVASPSSGGEDEDLDQERRRNKKRGIFPKVATNIMRAWLFQHLSRRSEAPVLPDVCLGLGSPSPGPRWARPWGSDCGRPGRQSDSCWWLQHPYPSEEQKKQLAQDTGLTILQVNNWFINARRRIVQPMIDQSNRTGQGAAFSPEGQPIGGYTETQPHVAVRPPGSVGMSLNLEGEWHYL

SEQ ID NO: 50010 - protein, 177 aa, Homo sapiens
  Payload ID: 9983
  Gene Symbol: MEIS3
  Gene Name: Meis homeobox 3
  ENSP ID: ENSP00000453249
  MOD_RES (1)..(1): Any amino acid
XGLSLPSQVRSERPLFSSNPELDNLGKMPIDLVIEDRDGGCREDFEDYPASCPSLPDQNNMWIRDHEDSGSVHLGTPGPSSGGLASQSGDNSSDQGDGLDTSVASPSSGGEDEDLDQERRRNKKRGIFPKVATNIMRAWLFQHLSRRSEAPVLPDVCLGLGSPSPGPRWARPWGSDC

SEQ ID NO: 50011 - protein, 421 aa, Homo sapiens; identical to SEQ ID NO: 50009
  Payload ID: 9983
  Gene Symbol: MEIS3
  Gene Name: Meis homeobox 3
  Uniprot ID: Q99687
  ENSP ID: ENSP00000453307

SEQ ID NO: 50012 - protein, 250 aa, Homo sapiens
  Payload ID: 9983
  Gene Symbol: MEIS3
  Gene Name: Meis homeobox 3
  ENSP ID: ENSP00000453757
PPPSLSTPALPPWVAPPSTPVPPQVHDLCDNFCHRYITCLKGKMPIDLVIEDRDGGCREDFEDYPASCPSLPDQNNMWIRDHEDSGSVHLGTPGPSSGGLASQSGDNSSDQGDGLDTSVASPSSGGEDEDLDQERRRNKKRGIFPKVATNIMRAWLFQHLSHPYPSEEQKKQLAQDTGLTILQVNNWFINARRRIVQPMIDQSNRTGQGAAFSPEGQPIGGYTETQPHVAVRPPGSVGMSLNLEGEWHYL

SEQ ID NO: 50013 - protein, 463 aa, Homo sapiens
  Payload ID: 9983
  Gene Symbol: MEIS3
  Gene Name: Meis homeobox 3
  ENSP ID: ENSP00000453934
MCTLCTTMRGSYRRCPWISLSVCLSLCLCHCLLTPLSPSLFPPSQTLPSLPLGPPAHMSGISAWTGSSLPTEAAPGDLEGFKLGGSDTWGPQYDELPHYPGIVDGPAALASFPETVPAVPGPYGPHRPPQPLPPGLDSDGLKREKDEIYGHPLFPLLALVFEKCELATCSPRDGAGAGLGTPPGGDVCSSDSFNEDIAAFAKQVRSERPLFSSNPELDNLMIQAIQVLRFHLLELEKVHDLCDNFCHRYITCLKGKMPIDLVIEDRDGGCREDFEDYPASCPSLPDQNNMWIRDHEDSGSVHLGTPGPSSGGLASQSGDNSSDQGDGLDTSVASPSSGGEDEDLDQERRRNKKRGIFPKVATNIMRAWLFQHLSHPYPSEEQKKQLAQDTGLTILQVNNWFINARRRIVQPMIDQSNRTGQGAAFSPEGQPIGGYTETQPHVAVRPPGSVGMSLNLEGEWHYL

SEQ ID NO: 50014 - protein, 375 aa, Homo sapiens
  Payload ID: 9983
  Gene Symbol: MEIS3
  Gene Name: Meis homeobox 3
  Uniprot ID: Q99687
  ENSP ID: ENSP00000454073
MARRYDELPHYPGIVDGPAALASFPETVPAVPGPYGPHRPPQPLPPGLDSDGLKREKDEIYGHPLFPLLALVFEKCELATCSPRDGAGAGLGTPPGGDVCSSDSFNEDIAAFAKQVRSERPLFSSNPELDNLMIQAIQVLRFHLLELEKVHDLCDNFCHRYITCLKGKMPIDLVIEDRDGGCREDFEDYPASCPSLPDQNNMWIRDHEDSGSVHLGTPGPSSGGLASQSGDNSSDQGDGLDTSVASPSSGGEDEDLDQERRRNKKRGIFPKVATNIMRAWLFQHLSHPYPSEEQKKQLAQDTGLTILQVNNWFINARRRIVQPMIDQSNRTGQGAAFSPEGQPIGGYTETQPHVAVRPPGSVGMSLNLEGEWHYL

SEQ ID NO: 50015 - protein, 126 aa, Homo sapiens
  Payload ID: 9983
  Gene Symbol: MEIS3
  Gene Name: Meis homeobox 3
  ENSP ID: ENSP00000475941
FPKVATNIMRAWLFQHLSAGAGRHVIAPSLRLPWSPSWGAQRRSEAPVLPDVCLGLGSPSPGPRWARPWGSDCGRPGRQSDSCWWLQHPYPSEEQKKQLAQDTGLTILQVNNWFINARRRIVQPMI

SEQ ID NO: 50016 - protein, 220 aa, Homo sapiens
  Payload ID: 9983
  Gene Symbol: MEIS3
  Gene Name: Meis homeobox 3
  ENSP ID: ENSP00000476248
MARRYDELPHYPGIVDGPAALASFPETVPAVPGPYGPHRPPQPLPPGLDSDGLKREKDEIYGHPLFPLLALVFEKCELATCSPRDGAGAGLGTPPGGDVCSSDSFNEDIAAFAKQVRSERPLFSSNPELDNLMIQAIQVLRFHLLELEKVSASHLPTPSLAPVIPPPLVASAPHLPALSPPELKQNAAPVPEHPRPAPVGGPPQYPGAPPGPRPVRQLLS

SEQ ID NO: 50017 - protein, 118 aa, Homo sapiens
  Payload ID: 9984
  Gene Symbol: MLANA
  Gene Name: melan-A
  Uniprot ID: Q16655
  ENSP ID: ENSP00000370880
MPREDAHFIYGYPKKGHGHSYTTAEEAAGIGILTVILGVLLLIGCWYCRRRNGYRALMDKSLHVGTQCALTRRCPQEGFDHRDSKVSLQEKNCEPVVPNAPPAYEKLSAEQSPPPYSP

SEQ ID NO: 50018 - protein, 118 aa, Homo sapiens; identical to SEQ ID NO: 50017
  Payload ID: 9984
  Gene Symbol: MLANA
  Gene Name: melan-A
  Uniprot ID: Q16655
  ENSP ID: ENSP00000370885

SEQ ID NO: 50019 - protein, 118 aa, Homo sapiens; identical to SEQ ID NO: 50017
  Payload ID: 9984
  Gene Symbol: MLANA
  Gene Name: melan-A
  Uniprot ID: Q16655
  ENSP ID: ENSP00000370886

SEQ ID NO: 50020 - protein, 422 aa, Homo sapiens
  Payload ID: 9985
  Gene Symbol: MCHR1
  Gene Name: melanin-concentrating hormone receptor 1
  Uniprot ID: Q99705
  ENSP ID: ENSP00000249016
MSVGAMKKGVGRAVGLGGGSGCQATEEDPLPNCGACAPGQGGRRWRLPQPAWVEGSSARLWEQATGTGWMDLEASLLPTGPNASNTSDGPDNLTSAGSPPRTGSISYINIIMPSVFGTICLLGIIGNSTVIFAVVKKSKLHWCNNVPDIFIINLSVVDLLFLLGMPFMIHQLMGNGVWHFGETMCTLITAMDANSQFTSTYILTAMAIDRYLATVHPISSTKFRKPSVATLVICLLWALSFISITPVWLYARLIPFPGGAVGCGIRLPNPDTDLYWFTLYQFFLAFALPFVVITAAYVRILQRMTSSVAPASQRSIRLRTKRVTRTAIAICLVFFVCWAPYYVLQLTQLSISRPTLTFVYLYNAAISLGYANSCLNPFVYIVLCETFRKRLVLSVKPAAQGQLRAVSNAQTADEERTESKGT

SEQ ID NO: 50021 - protein, 296 aa, Homo sapiens
  Payload ID: 9985
  Gene Symbol: MCHR1
  Gene Name: melanin-concentrating hormone receptor 1
  ENSP ID: ENSP00000370841
MSVGAMKKGVGRAVGLGGGSGCQATEEDPLPNCGACAPGQGGRRWRLPQPAWVEGSSARLWEQATGTGWMDLEASLLPTGPNASNTSDGPDNLTSAGSPPRTGSISYINIIMPSVFGTICLLGIIGNSTVIFAVVKKSKLHWCNNVPDIFIINLSFFLAFALPFVVITAAYVRILQRMTSSVAPASQRSIRLRTKRVTRTAIAICLVFFVCWAPYYVLQLTQLSISRPTLTFVYLYNAAISLGYANSCLNPFVYIVLCETFRKRLVLSVKPAAQGQLRAVSNAQTADEERTESKGT

SEQ ID NO: 50022 - protein, 340 aa, Homo sapiens
  Payload ID: 9986
  Gene Symbol: MCHR2
  Gene Name: melanin-concentrating hormone receptor 2
  Uniprot ID: Q969V1
  ENSP ID: ENSP00000281806
MNPFHASCWNTSAELLNKSWNKEFAYQTASVVDTVILPSMIGIICSTGLVGNILIVFTIIRSRKKTVPDIYICNLAVADLVHIVGMPFLIHQWARGGEWVFGGPLCTIITSLDTCNQFACSAIMTVMSVDRYFALVQPFRLTRWRTRYKTIRINLGLWAASFILALPVWVYSKVIKFKDGVESCAFDLTSPDDVLWYTLYLTITTFFFPLPLILVCYILILCYTWEMYQQNKDARCCNPSVPKQRVMKLTKMVLVLVVVFILSAAPYHVIQLVNLQMEQPTLAFYVGYYLSICLSYASSSINPFLYILLSGNFQKRLPQIQRRATEKEINNMGNTLKSHF

SEQ ID NO: 50023 - protein, 340 aa, Homo sapiens; identical to SEQ ID NO: 50022
  Payload ID: 9986
  Gene Symbol: MCHR2
  Gene Name: melanin-concentrating hormone receptor 2
  Uniprot ID: Q969V1
  ENSP ID: ENSP00000358214

SEQ ID NO: 50024 - protein, 317 aa, Homo sapiens
  Payload ID: 9987
  Gene Symbol: MC1R
  Gene Name: melanocortin 1 receptor (alpha melanocyte stimulating hormone receptor)
  Uniprot ID: Q01726
  ENSP ID: ENSP00000451605
MAVQGSQRRLLGSLNSTPTAIPQLGLAANQTGARCLEVSISDGLFLSLGLVSLVENALVVATIAKNRNLHSPMYCFICCLALSDLLVSGSNVLETAVILLLEAGALVARAAVLQQLDNVIDVITCSSMLSSLCFLGAIAVDRYISIFYALRYHSIVTLPRARRAVAAIWVASVVFSTLFIAYYDHVAVLLCLVVFFLAMLVLMAVLYVHMLARACQHAQGIARLHKRQRPVHQGFGLKGAVTLTILLGIFFLCWGPFFLHLTLIVLCPEHPTCGCIFKNFNLFLALIICNAIIDPLIYAFHSQELRRTLKEVLTCSW

SEQ ID NO: 50025 - protein, 382 aa, Homo sapiens
  Payload ID: 9987
  Gene Symbol: MC1R
  Gene Name: melanocortin 1 receptor (alpha melanocyte stimulating hormone receptor)
  ENSP ID: ENSP00000451760
MAVQGSQRRLLGSLNSTPTAIPQLGLAANQTGARCLEVSISDGLFLSLGLVSLVENALVVATIAKNRNLHSPMYCFICCLALSDLLVSGSNVLETAVILLLEAGALVARAAVLQQLDNVIDVITCSSMLSSLCFLGAIAVDRYISIFYALRYHSIVTLPRARRAVAAIWVASVVFSTLFIAYYDHVAVLLCLVVFFLAMLVLMAVLYVHMLARACQHAQGIARLHKRQRPVHQGFGLKGAVTLTILLGIFFLCWGPFFLHLTLIVLCPEHPTCGCIFKNFNLFLALIICNAIIDPLIYAFHSQELRRTLKEVLTCSCSQDRALVSWDVKSLGGSVCQELLPQQPQEKGLCDQKASSTALQRLLQKEVKSLPQAKGPGLQEPP

SEQ ID NO: 50026 - protein, 297 aa, Homo sapiens
  Payload ID: 9988
  Gene Symbol: MC2R
  Gene Name: melanocortin 2 receptor (adrenocorticotropic hormone)
  Uniprot ID: Q01718
  ENSP ID: ENSP00000333821
MKHIINSYENINNTARNNSDCPRVVLPEEIFFTISIVGVLENLIVLLAVFKNKNLQAPMYFFICSLAISDMLGSLYKILENILIILRNMGYLKPRGSFETTADDIIDSLFVLSLLGSIFSLSVIAADRYITIFHALRYHSIVTMRRTVVVLTVIWTFCTGTGITMVIFSHHVPTVITFTSLFPLMLVFILCLYVHMFLLARSHTRKISTLPRANMKGAITLTILLGVFIFCWAPFVLHVLLMTFCPSNPYCACYMSLFQVNGMLIMCNAVIDPFIYAFRSPELRDAFKKMIFCSRYW

SEQ ID NO: 50027 - protein, 123 aa, Homo sapiens
  Payload ID: 9988
  Gene Symbol: MC2R
  Gene Name: melanocortin 2 receptor (adrenocorticotropic hormone)
  ENSP ID: ENSP00000382718
MKHIINSYENINNTARNNSDCPRVVLPEEIFFTISIVGVLENLIVLLAVFKNKNLQAPMYFFICSLAISDMLGSLYKILENILIILRNMGYLKPRGSFETTADDIIDSLFVLSLLGSIFSLSV

SEQ ID NO: 50028 - protein, 172 aa, Homo sapiens
  Payload ID: 9989
  Gene Symbol: MRAP
  Gene Name: melanocortin 2 receptor accessory protein
  Uniprot ID: Q8TCY5
  ENSP ID: ENSP00000306697
MANGTNASAPYYSYEYYLDYLDLIPVDEKKLKAHKHSIVIAFWVSLAAFVVLLFLILLYMSWSASPQMRNSPKHHQTCPWSHGLNLHLCIQKCLPCHREPLATSQAQASSVEPGSRTGPDQPLRQESSSTLPLGGFQTHPTLLWELTLNGGPLVRSKPSEPPPGDRTSQLQS

SEQ ID NO: 50029 - protein, 102 aa, Homo sapiens
  Payload ID: 9989
  Gene Symbol: MRAP
  Gene Name: melanocortin 2 receptor accessory protein
  Uniprot ID: Q8TCY5
  ENSP ID: ENSP00000343661
MANGTNASAPYYSYEYYLDYLDLIPVDEKKLKAHKHSIVIAFWVSLAAFVVLLFLILLYMSWSASPQMSFNTDESLLHSEVLPQTRAISCDELQAPREEGAA

SEQ ID NO: 50030 - protein, 172 aa, Homo sapiens; identical to SEQ ID NO: 50028
  Payload ID: 9989
  Gene Symbol: MRAP
  Gene Name: melanocortin 2 receptor accessory protein
  Uniprot ID: Q8TCY5
  ENSP ID: ENSP00000382684

SEQ ID NO: 50031 - protein, 205 aa, Homo sapiens
  Payload ID: 9990
  Gene Symbol: MRAP2
  Gene Name: melanocortin 2 receptor accessory protein 2
  Uniprot ID: Q96G30
  ENSP ID: ENSP00000257776
MSAQRLISNRTSQQSASNSDYTWEYEYYEIGPVSFEGLKAHKYSIVIGFWVGLAVFVIFMFFVLTLLTKTGAPHQDNAESSEKRFRMNSFVSDFGRPLEPDKVFSRQGNEESRSLFHCYINEVERLDRAKACHQTTALDSDVQLQEAIRSSGQPEEELNRLMKFDIPNFVNTDQNYFGEDDLLISEPPIVLETKPLSQTSHKDLD

SEQ ID NO: 50032 - protein, 323 aa, Homo sapiens
  Payload ID: 9991
  Gene Symbol: MC3R
  Gene Name: melanocortin 3 receptor
  Uniprot ID: P41968
  ENSP ID: ENSP00000243911
MNASCCLPSVQPTLPNGSEHLQAPFFSNQSSSAFCEQVFIKPEVFLSLGIVSLLENILVILAVVRNGNLHSPMYFFLCSLAVADMLVSVSNALETIMIAIVHSDYLTFEDQFIQHMDNIFDSMICISLVASICNLLAIAVDRYVTIFYALRYHSIMTVRKALTLIVAIWVCCGVCGVVFIVYSESKMVIVCLITMFFAMMLLMGTLYVHMFLFARLHVKRIAALPPADGVAPQQHSCMKGAVTITILLGVFIFCWAPFFLHLVLIITCPTNPYCICYTAHFNTYLVLIMCNSVIDPLIYAFRSLELRNTFREILCGCNGMNLG

SEQ ID NO: 50033 - protein, 332 aa, Homo sapiens [sequence omitted]

SEQ ID NO: 50034 - protein, 325 aa, Homo sapiens
  Payload ID: 9993
  Gene Symbol: MC5R
  Gene Name: melanocortin 5 receptor
  Uniprot ID: P33032
  ENSP ID: ENSP00000318077
MNSSFHLHFLDLNLNATEGNLSGPNVKNKSSPCEDMGIAVEVFLTLGVISLLENILVIGAIVKNKNLHSPMYFFVCSLAVADMLVSMSSAWETITIYLLNNKHLVIADAFVRHIDNVFDSMICISVVASMCSLLAIAVDRYVTIFYALRYHHIMTARRSGAIIAGIWAFCTGCGIVFILYSESTYVILCLISMFFAMLFLLVSLYIHMFLLARTHVKRIAALPGASSARQRTSMQGAVTVTMLLGVFTVCWAPFFLHLTLMLSCPQNLYCSRFMSHFNMYLILIMCNSVMDPLIYAFRSQEMRKTFKEIICCRGFRIACSFPRRD

SEQ ID NO: 50035 - protein, 173 aa, Homo sapiens
  Payload ID: 9993
  Gene Symbol: MC5R
  Gene Name: melanocortin 5 receptor
  ENSP ID: ENSP00000468086
MNSSFHLHFLDLNLNATEGNLSGPNVKNKSSPCEDMGIAVEVFLTLGVISLLENILVIGAIVKNKNLHSPMYFFVCSLAVADMLVSMSSAWETITIYLLNNKHLVIADAFVRHIDNVFDSMICISVVASMCSLLAIAVDRYVTIFYALRYHHIMTARRSGAIIAGIWAFCTGC

SEQ ID NO: 50036 - protein, 309 aa, Homo sapiens
  Payload ID: 9994
  Gene Symbol: MAGEA1
  Gene Name: melanoma antigen family A1
  Uniprot ID: P43355
  ENSP ID: ENSP00000349085
MSLEQRSLHCKPEEALEAQQEALGLVCVQAATSSSSPLVLGTLEEVPTAGSTDPPQSPQGASAFPTTINFTRQRQPSEGSSSREEEGPSTSCILESLFRAVITKKVADLVGFLLLKYRAREPVTKAEMLESVIKNYKHCFPEIFGKASESLQLVFGIDVKEADPTGHSYVLVTCLGLSYDGLLGDNQIMPKTGFLIIVLVMIAMEGGHAPEEEIWEELSVMEVYDGREHSAYGEPRKLLTQDLVQEKYLEYRQVPDSDPARYEFLWGPRALAETSYVKVLEYVIKVSARVRFFFPSLREAALREEEEGV

SEQ ID NO: 50037 - protein, 369 aa, Homo sapiens
  Payload ID: 9995
  Gene Symbol: MAGEA10
  Gene Name: melanoma antigen family A10
  Uniprot ID: P43363
  ENSP ID: ENSP00000244096
MPRAPKRQRCMPEEDLQSQSETQGLEGAQAPLAVEEDASSSTSTSSSFPSSFPSSSSSSSSSCYPLIPSTPEEVSADDETPNPPQSAQIACSSPSVVASLPLDQSDEGSSSQKEESPSTLQVLPDSESLPRSEIDEKVTDLVQFLLFKYQMKEPITKAEILESVIRNYEDHFPLLFSEASECMLLVFGIDVKEVDPTGHSFVLVTSLGLTYDGMLSDVQSMPKTGILILILSIVFIEGYCTPEEVIWEALNMMGLYDGMEHLIYGEPRKLLTQDWVQENYLEYRQVPGSDPARYEFLWGPRAHAEIRKMSLLKFLAKVNGSDPRSFPLWYEEALKDEEERAQDRIATTDDTTAMASASSSATGSFSYPE

SEQ ID NO: 50038 - protein, 369 aa, Homo sapiens; identical to SEQ ID NO: 50037
  Payload ID: 9995
  Gene Symbol: MAGEA10
  Gene Name: melanoma antigen family A10
  Uniprot ID: P43363
  ENSP ID: ENSP00000359347

SEQ ID NO: 50039 - protein, 161 aa, Homo sapiens
  Payload ID: 9995
  Gene Symbol: MAGEA10
  Gene Name: melanoma antigen family A10
  ENSP ID: ENSP00000391977
MPRAPKRQRCMPEEDLQSQSETQGLEGAQAPLAVEEDASSSTSTSSSFPSSFPSSSSSSSSSCYPLIPSTPEEVSADDETPNPPQSAQIACSSPSVVASLPLDQSDEGSSSQKEESPSTLQVLPDSESLPRSEIDEKVTDLVQFLLFKYQMKEPITKAEIL

SEQ ID NO: 50040 - protein, 184 aa, Homo sapiens
  Payload ID: 9995
  Gene Symbol: MAGEA10
  Gene Name: melanoma antigen family A10
  ENSP ID: ENSP00000406161
MPRAPKRQRCMPEEDLQSQSETQGLEGAQAPLAVEEDASSSTSTSSSFPSSFPSSSSSSSSSCYPLIPSTPEEVSADDETPNPPQSAQIACSSPSVVASLPLDQSDEGSSSQKEESPSTLQVLPDSESLPRSEIDEKVTDLVQFLLFKYQMKEPITKAEILESVIRNYEDHFPLLFSEASECML

SEQ ID NO: 50041 - protein, 58 aa, Homo sapiens
  Payload ID: 9995
  Gene Symbol: MAGEA10
  Gene Name: melanoma antigen family A10
  ENSP ID: ENSP00000462833
MPRAPKRQRCMPEEDLQSQSETQGLEGAQAPLAVEEDASSSTSTSSSFPSSFPSSSSS

SEQ ID NO: 50042 - protein, 71 aa, Homo sapiens
  Payload ID: 9995
  Gene Symbol: MAGEA10
  Gene Name: melanoma antigen family A10
  ENSP ID: ENSP00000464160
MPRAPKRQRCMPEEDLQSQSETQGLEGAQAPLAVEEDASSSTSTSSSFPSSFPSSSSSSSSSCYPLIPSTP

SEQ ID NO: 50043 - protein, 400 aa, Homo sapiens
  Payload ID: 9996
  Gene Symbol: MAGEA11
  Gene Name: melanoma antigen family A11
  ENSP ID: ENSP00000328177
MSKVSTMFSEDDFQSTERAPYGPQLQWSQDLPRVQVFREQANLEDRSPRRTQRITGGEQVLWGPITQIFPTVRPADLTRVIMPLEQRSQHCKPEEGLQAQEEDLGLVGAQALQAEEQEAAFFSSTLNVGTLEELPAAESPSPPQSPQEESFSPTAMDAIFGSLSDEGSGSQEKEGPSTSPDLIDPESFSQDILHDKIIDLVHLLLRKYRVKGLITKAEMLGSVIKNYEDYFPEIFREASVCMQLLFGIDVKEVDPTSHSYVLVTSLNLSYDGIQCNEQSMPKSGLLIIVLGVIFMEGNCIPEEVMWEVLSIMGVYAGREHFLFGEPKRLLTQNWVQEKYLVYRQVPGTDPACYEFLWGPRAHAETSKMKVLEYIANANGRDPTSYPSLYEDALREEGEGV

SEQ ID NO: 50044 - protein, 429 aa, Homo sapiens
  Payload ID: 9996
  Gene Symbol: MAGEA11
  Gene Name: melanoma antigen family A11
  Uniprot ID: P43364
  ENSP ID: ENSP00000347358
METQFRRGGLGCSPASIKRKKKREDSGDFGLQVSTMFSEDDFQSTERAPYGPQLQWSQDLPRVQVFREQANLEDRSPRRTQRITGGEQVLWGPITQIFPTVRPADLTRVIMPLEQRSQHCKPEEGLQAQEEDLGLVGAQALQAEEQEAAFFSSTLNVGTLEELPAAESPSPPQSPQEESFSPTAMDAIFGSLSDEGSGSQEKEGPSTSPDLIDPESFSQDILHDKIIDLVHLLLRKYRVKGLITKAEMLGSVIKNYEDYFPEIFREASVCMQLLFGIDVKEVDPTSHSYVLVTSLNLSYDGIQCNEQSMPKSGLLIIVLGVIFMEGNCIPEEVMWEVLSIMGVYAGREHFLFGEPKRLLTQNWVQEKYLVYRQVPGTDPACYEFLWGPRAHAETSKMKVLEYIANANGRDPTSYPSLYEDALREEGEGV

SEQ ID NO: 50045 - protein, 295 aa, Homo sapiens
  Payload ID: 9996
  Gene Symbol: MAGEA11
  Gene Name: melanoma antigen family A11
  ENSP ID: ENSP00000391496
MSKVSTMFSEDDFQSTERAPYGPQLQWSQDLPRVQVFREQANLEDRSPRRTQRITGGEQVLWGPITQIFPTVRPADLTRVIMPLEQRSQHCKPEEGLQAQEEDLGLVGAQALQAEEQEAAFFSSTLNVGTLEELPAAESPSPPQSPQEESFSPTAMDAIFGSLSDEGSGSQEKEGPSTSPDLIDPESFSQDILHDKIIDLVHLLLRKYRVKGLITKAEMLGSVIKNYEDYFPEIFREASVCMQLLFGIDVKEVDPTSHSYVLVTSLNLSYDGIQCNEQSMPKSGLLIIVLGVIFM

SEQ ID NO: 50046 - protein, 314 aa, Homo sapiens
  Payload ID: 9997
  Gene Symbol: MAGEA12
  Gene Name: melanoma antigen family A12
  Uniprot ID: P43365
  ENSP ID: ENSP00000350592
MPLEQRSQHCKPEEGLEAQGEALGLVGAQAPATEEQETASSSSTLVEVTLREVPAAESPSPPHSPQGASTLPTTINYTLWSQSDEGSSNEEQEGPSTFPDLETSFQVALSRKMAELVHFLLLKYRAREPFTKAEMLGSVIRNFQDFFPVIFSKASEYLQLVFGIEVVEVVRIGHLYILVTCLGLSYDGLLGDNQIVPKTGLLIIVLAIIAKEGDCAPEEKIWEELSVLEASDGREDSVFAHPRKLLTQDLVQENYLEYRQVPGSDPACYEFLWGPRALVETSYVKVLHHLLKISGGPHISYPPLHEWAFREGEE

SEQ ID NO: 50047 - protein, 314 aa, Homo sapiens; identical to SEQ ID NO: 50046
  Payload ID: 9997
  Gene Symbol: MAGEA12
  Gene Name: melanoma antigen family A12
  Uniprot ID: P43365
  ENSP ID: ENSP00000377447

SEQ ID NO: 50048 - protein, 314 aa, Homo sapiens; identical to SEQ ID NO: 50046
  Payload ID: 9997
  Gene Symbol: MAGEA12
  Gene Name: melanoma antigen family A12
  Uniprot ID: P43365
  ENSP ID: ENSP00000377478

SEQ ID NO: 50049 - protein, 314 aa, Homo sapiens
  Payload ID: 9998
  Gene Symbol: MAGEA2
  Gene Name: melanoma antigen family A2
  Uniprot ID: P43356
  ENSP ID: ENSP00000469919
MPLEQRSQHCKPEEGLEARGEALGLVGAQAPATEEQQTASSSSTLVEVTLGEVPAADSPSPPHSPQGASSFSTTINYTLWRQSDEGSSNQEEEGPRMFPDLESEFQAAISRKMVELVHFLLLKYRAREPVTKAEMLESVLRNCQDFFPVIFSKASEYLQLVFGIEVVEVVPISHLYILVTCLGLSYDGLLGDNQVMPKTGLLIIVLAIIAIEGDCAPEEKIWEELSMLEVFEGREDSVFAHPRKLLMQDLVQENYLEYRQVPGSDPACYEFLWGPRALIETSYVKVLHHTLKIGGEPHISYPPLHERALREGEE

SEQ ID NO: 50050 - protein, 314 aa, Homo sapiens; identical to SEQ ID NO: 50049
  Payload ID: 9998
  Gene Symbol: MAGEA2
  Gene Name: melanoma antigen family A2
  Uniprot ID: P43356
  ENSP ID: ENSP00000470872

SEQ ID NO: 50051 - protein, 314 aa, Homo sapiens; identical to SEQ ID NO: 50049
  Payload ID: 9998
  Gene Symbol: MAGEA2
  Gene Name: melanoma antigen family A2
  Uniprot ID: P43356
  ENSP ID: ENSP00000480491

SEQ ID NO: 50052 - protein, 314 aa, Homo sapiens; identical to SEQ ID NO: 50049
  Payload ID: 9998
  Gene Symbol: MAGEA2
  Gene Name: melanoma antigen family A2
  Uniprot ID: P43356
  ENSP ID: ENSP00000480738

SEQ ID NO: 50053 - protein, 80 aa, Homo sapiens
  Payload ID: 9998
  Gene Symbol: MAGEA2
  Gene Name: melanoma antigen family A2
  ENSP ID: ENSP00000482879
MPLEQRSQHCKPEEGLEARGEALGLVGAQAPATEEQQTASSSSTLVEVTLGEVPAADSPSPPHSPQGASSFSTTINYTLW

SEQ ID NO: 50054 - protein, 37 aa, Homo sapiens
  Payload ID: 9998
  Gene Symbol: MAGEA2
  Gene Name: melanoma antigen family A2
  ENSP ID: ENSP00000483352
MPLEQRSQHCKPEEGLEARGEALGLVGAQAPATEEQQ

SEQ ID NO: 50055 - protein, 314 aa, Homo sapiens; identical to SEQ ID NO: 50049
  Payload ID: 9998
  Gene Symbol: MAGEA2
  Gene Name: melanoma antigen family A2
  Uniprot ID: P43356
  ENSP ID: ENSP00000484290

SEQ ID NO: 50056 - protein, 314 aa, Homo sapiens; identical to SEQ ID NO: 50049
  Payload ID: 9998
  Gene Symbol: MAGEA2
  Gene Name: melanoma antigen family A2
  Uniprot ID: P43356
  ENSP ID: ENSP00000485391

SEQ ID NO: 50057 - protein, 314 aa, Homo sapiens; identical to SEQ ID NO: 50049
  Payload ID: 9998
  Gene Symbol: MAGEA2
  Gene Name: melanoma antigen family A2
  Uniprot ID: P43356
  ENSP ID: ENSP00000485541

SEQ ID NO: 50058 - protein, 314 aa, Homo sapiens; identical to SEQ ID NO: 50049
  Payload ID: 9999
  Gene Symbol: MAGEA2B
  Gene Name: melanoma antigen family A2B
  Uniprot ID: P43356
  ENSP ID: ENSP00000333487

SEQ ID NO: 50059 - protein, 314 aa, Homo sapiens; identical to SEQ ID NO: 50049
  Payload ID: 9999
  Gene Symbol: MAGEA2B
  Gene Name: melanoma antigen family A2B
  Uniprot ID: P43356
  ENSP ID: ENSP00000359316

SEQ ID NO: 50060 - protein, 33 aa, Homo sapiens
  Payload ID: 9999
  Gene Symbol: MAGEA2B
  Gene Name: melanoma antigen family A2B
  ENSP ID: ENSP00000386463
MPLEQRSQHCKPEEGLEARGEALGLVGAQAPAT

SEQ ID NO: 50061 - protein, 89 aa, Homo sapiens
  Payload ID: 9999
  Gene Symbol: MAGEA2B
  Gene Name: melanoma antigen family A2B
  ENSP ID: ENSP00000389223
MPLEQRSQHCKPEEGLEARGEALGLVGAQAPATEEQQTASSSSTLVEVTLGEVPAADSPSPPHSPQGASSFSTTINYTLWRQSDEGSSN

SEQ ID NO: 50062 - protein, 37 aa, Homo sapiens; identical to SEQ ID NO: 50054
  Payload ID: 9999
  Gene Symbol: MAGEA2B
  Gene Name: melanoma antigen family A2B
  ENSP ID: ENSP00000389999

SEQ ID NO: 50063 - protein, 152 aa, Homo sapiens
  Payload ID: 9999
  Gene Symbol: MAGEA2B
  Gene Name: melanoma antigen family A2B
  ENSP ID: ENSP00000395386
MPLEQRSQHCKPEEGLEARGEALGLVGAQAPATEEQQTASSSSTLVEVTLGEVPAADSPSPPHSPQGASSFSTTINYTLWRQSDEGSSNQEEEGPRMFPDLESEFQAAISRKMVELVHFLLLKYRAREPVTKAEMLESVLRNCQDFFPVIFS

SEQ ID NO: 50064 - protein, 120 aa, Homo sapiens
  Payload ID: 9999
  Gene Symbol: MAGEA2B
  Gene Name: melanoma antigen family A2B
  ENSP ID: ENSP00000397216
MPLEQRSQHCKPEEGLEARGEALGLVGAQAPATEEQQTASSSSTLVEVTLGEVPAADSPSPPHSPQGASSFSTTINYTLWRQSDEGSSNQEEEGPRMFPDLESEFQAAISRKMVELVHFL

SEQ ID NO: 50065 - protein, 148 aa, Homo sapiens
  Payload ID: 9999
  Gene Symbol: MAGEA2B
  Gene Name: melanoma antigen family A2B
  ENSP ID: ENSP00000413384
MPLEQRSQHCKPEEGLEARGEALGLVGAQAPATEEQQTASSSSTLVEVTLGEVPAADSPSPPHSPQGASSFSTTINYTLWRQSDEGSSNQEEEGPRMFPDLESEFQAAISRKMVELVHFLLLKYRAREPVTKAEMLESVLRNCQDFFP

SEQ ID NO: 50066 - protein, 314 aa, Homo sapiens
  Payload ID: 10000
  Gene Symbol: MAGEA3
  Gene Name: melanoma antigen family A3
  Uniprot ID: P43357
  ENSP ID: ENSP00000359301
MPLEQRSQHCKPEEGLEARGEALGLVGAQAPATEEQEAASSSSTLVEVTLGEVPAAESPDPPQSPQGASSLPTTMNYPLWSQSYEDSSNQEEEGPSTFPDLESEFQAALSRKVAELVHFLLLKYRAREPVTKAEMLGSVVGNWQYFFPVIFSKASSSLQLVFGIELMEVDPIGHLYIFATCLGLSYDGLLGDNQIMPKAGLLIIVLAIIAREGDCAPEEKIWEELSVLEVFEGREDSILGDPKKLLTQHFVQENYLEYRQVPGSDPACYEFLWGPRALVETSYVKVLHHMVKISGGPHISYPPLHEWVLREGEE

SEQ ID NO: 50067 - protein, 198 aa, Homo sapiens
  Payload ID: 10000
  Gene Symbol: MAGEA3
  Gene Name: melanoma antigen family A3
  ENSP ID: ENSP00000392758
MPLEQRSQHCKPEEGLEARGEALGLVGAQAPATEEQEAASSSSTLVEVTLGEVPAAESPDPPQSPQGASSLPTTMNYPLWSQSYEDSSNQEEEGPSTFPDLESEFQAALSRKVAELVHFLLLKYRAREPVTKAEMLGSVVGNWQYFFPVIFSKASSSLQLVFGIELMEVDPIGHLYIFATCLGLSYDGLLGDNQIMPK

SEQ ID NO: 50068 - protein, 314 aa, Homo sapiens; identical to SEQ ID NO: 50066
  Payload ID: 10000
  Gene Symbol: MAGEA3
  Gene Name: melanoma antigen family A3
  Uniprot ID: P43357
  ENSP ID: ENSP00000473093

SEQ ID NO: 50069 - protein, 317 aa, Homo sapiens
  Payload ID: 10001
  Gene Symbol: MAGEA4
  Gene Name: melanoma antigen family A4
  Uniprot ID: P43358
  ENSP ID: ENSP00000276344
MSSEQKSQHCKPEEGVEAQEEALGLVGAQAPTTEEQEAAVSSSSPLVPGTLEEVPAAESAGPPQSPQGASALPTTISFTCWRQPNEGSSSQEEEGPSTSPDAESLFREALSNKVDELAHFLLRKYRAKELVTKAEMLERVIKNYKRCFPVIFGKASESLKMIFGIDVKEVDPASNTYTLVTCLGLSYDGLLGNNQIFPKTGLLIIVLGTIAMEGDSASEEEIWEELGVMGVYDGREHTVYGEPRKLLTQDWVQENYLEYRQVPGSNPARYEFLWGPRALAETSYVKVLEHVVRVNARVRIAYPSLREAALLEEEEGV

SEQ ID NO: 50070 - protein, 317 aa, Homo sapiens; identical to SEQ ID NO: 50069
  Payload ID: 10001
  Gene Symbol: MAGEA4
  Gene Name: melanoma antigen family A4
  Uniprot ID: P43358
  ENSP ID: ENSP00000353379

SEQ ID NO: 50071 - protein, 317 aa, Homo sapiens; identical to SEQ ID NO: 50069
  Payload ID: 10001
  Gene Symbol: MAGEA4
  Gene Name: melanoma antigen family A4
  Uniprot ID: P43358
  ENSP ID: ENSP00000359360

SEQ ID NO: 50072 - protein, 317 aa, Homo sapiens; identical to SEQ ID NO: 50069
  Payload ID: 10001
  Gene Symbol: MAGEA4
  Gene Name: melanoma antigen family A4
  Uniprot ID: P43358
  ENSP ID: ENSP00000359365

SEQ ID NO: 50073 - protein, 317 aa, Homo sapiens; identical to SEQ ID NO: 50069
  Payload ID: 10001
  Gene Symbol: MAGEA4
  Gene Name: melanoma antigen family A4
  Uniprot ID: P43358
  ENSP ID: ENSP00000377497

SEQ ID NO: 50074 - protein, 317 aa, Homo sapiens; identical to SEQ ID NO: 50069
  Payload ID: 10001
  Gene Symbol: MAGEA4
  Gene Name: melanoma antigen family A4
  Uniprot ID: P43358
  ENSP ID: ENSP00000377498

SEQ ID NO: 50075 - protein, 171 aa, Homo sapiens
  Payload ID: 10001
  Gene Symbol: MAGEA4
  Gene Name: melanoma antigen family A4
  ENSP ID: ENSP00000387777
MSSEQKSQHCKPEEGVEAQEEALGLVGAQAPTTEEQEAAVSSSSPLVPGTLEEVPAAESAGPPQSPQGASALPTTISFTCWRQPNEGSSSQEEEGPSTSPDAESLFREALSNKVDELAHFLLRKYRAKELVTKAEMLERVIKNYKRCFPVIFGKASESLKMIFGIDVKEVD

SEQ ID NO: 50076 - protein, 241 aa, Homo sapiens
  Payload ID: 10001
  Gene Symbol: MAGEA4
  Gene Name: melanoma antigen family A4
  ENSP ID: ENSP00000390096
MSSEQKSQHCKPEEGVEAQEEALGLVGAQAPTTEEQEAAVSSSSPLVPGTLEEVPAAESAGPPQSPQGASALPTTISFTCWRQPNEGSSSQEEEGPSTSPDAESLFREALSNKVDELAHFLLRKYRAKELVTKAEMLERVIKNYKRCFPVIFGKASESLKMIFGIDVKEVDPASNTYTLVTCLGLSYDGLLGNNQIFPKTGLLIIVLGTIAMEGDSASEEEIWEELGVMGVYDGREHTVYG

SEQ ID NO: 50077 - protein, 217 aa, Homo sapiens
  Payload ID: 10001
  Gene Symbol: MAGEA4
  Gene Name: melanoma antigen family A4
  ENSP ID: ENSP00000391904
MSSEQKSQHCKPEEGVEAQEEALGLVGAQAPTTEEQEAAVSSSSPLVPGTLEEVPAAESAGPPQSPQGASALPTTISFTCWRQPNEGSSSQEEEGPSTSPDAESLFREALSNKVDELAHFLLRKYRAKELVTKAEMLERVIKNYKRCFPVIFGKASESLKMIFGIDVKEVDPASNTYTLVTCLGLSYDGLLGNNQIFPKTGLLIIVLGTIAMEGDSA

SEQ ID NO: 50078 - protein, 230 aa, Homo sapiens
  Payload ID: 10001
  Gene Symbol: MAGEA4
  Gene Name: melanoma antigen family A4
  ENSP ID: ENSP00000394073
MSSEQKSQHCKPEEGVEAQEEALGLVGAQAPTTEEQEAAVSSSSPLVPGTLEEVPAAESAGPPQSPQGASALPTTISFTCWRQPNEGSSSQEEEGPSTSPDAESLFREALSNKVDELAHFLLRKYRAKELVTKAEMLERVIKNYKRCFPVIFGKASESLKMIFGIDVKEVDPASNTYTLVTCLGLSYDGLLGNNQIFPKTGLLIIVLGTIAMEGDSASEEEIWEELGVMG

SEQ ID NO: 50079 - protein, 241 aa, Homo sapiens; identical to SEQ ID NO: 50076
  Payload ID: 10001
  Gene Symbol: MAGEA4
  Gene Name: melanoma antigen family A4
  ENSP ID: ENSP00000394149

SEQ ID NO: 50080 - protein, 217 aa, Homo sapiens; identical to SEQ ID NO: 50077
  Payload ID: 10001
  Gene Symbol: MAGEA4
  Gene Name: melanoma antigen family A4
  ENSP ID: ENSP00000400900

SEQ ID NO: 50081 - protein, 241 aa, Homo sapiens; identical to SEQ ID NO: 50076
  Payload ID: 10001
  Gene Symbol: MAGEA4
  Gene Name: melanoma antigen family A4
  ENSP ID: ENSP00000402186

SEQ ID NO: 50082 - protein, 241 aa, Homo sapiens; identical to SEQ ID NO: 50076
  Payload ID: 10001
  Gene Symbol: MAGEA4
  Gene Name: melanoma antigen family A4
  ENSP ID: ENSP00000402624

SEQ ID NO: 50083 - protein, 314 aa, Homo sapiens
  Payload ID: 10002
  Gene Symbol: MAGEA6
  Gene Name: melanoma antigen family A6
  Uniprot ID: P43360
  ENSP ID: ENSP00000329199
MPLEQRSQHCKPEEGLEARGEALGLVGAQAPATEEQEAASSSSTLVEVTLGEVPAAESPDPPQSPQGASSLPTTMNYPLWSQSYEDSSNQEEEGPSTFPDLESEFQAALSRKVAKLVHFLLLKYRAREPVTKAEMLGSVVGNWQYFFPVIFSKASDSLQLVFGIELMEVDPIGHVYIFATCLGLSYDGLLGDNQIMPKTGFLIIILAIIAKEGDCAPEEKIWEELSVLEVFEGREDSIFGDPKKLLTQYFVQENYLEYRQVPGSDPACYEFLWGPRALIETSYVKVLHHMVKISGGPRISYPLLHEWALREGEE

SEQ ID NO: 50084 - protein, 235 aa, Homo sapiens
  Payload ID: 10002
  Gene Symbol: MAGEA6
  Gene Name: melanoma antigen family A6
  ENSP ID: ENSP00000401806
MPLEQRSQHCKPEEGLEARGEALGLVGAQAPATEEQEAASSSSTLVEVTLGEVPAAESPDPPQSPQGASSLPTTMNYPLWSQSYEDSSNQEEEGPSTFPDLESEFQAALSRKVAKLVHFLLLKYRAREPVTKAEMLGSVVGNWQYFFPVIFSKASDSLQLVFGIELMEVDPIGHVYIFATCLGLSYDGLLGDNQIMPKTGFLIIILAIIAKEGDCAPEEKIWEELSVLEVFEGRE

SEQ ID NO: 50085 - protein, 201 aa, Homo sapiens
  Payload ID: 10002
  Gene Symbol: MAGEA6
  Gene Name: melanoma antigen family A6
  ENSP ID: ENSP00000403303
MPLEQRSQHCKPEEGLEARGEALGLVGAQAPATEEQEAASSSSTLVEVTLGEVPAAESPDPPQSPQGASSLPTTMNYPLWSQSYEDSSNQEEEGPSTFPDLESEFQAALSRKVAKLVHFLLLKYRAREPVTKAEMLGSVVGNWQYFFPVIFSKASDSLQLVFGIELMEVDPIGHVYIFATCLGLSYDGLLGDNQIMPKTGF

SEQ ID NO: 50086 - protein, 314 aa, Homo sapiens; identical to SEQ ID NO: 50083
  Payload ID: 10002
  Gene Symbol: MAGEA6
  Gene Name: melanoma antigen family A6
  Uniprot ID: P43360
  ENSP ID: ENSP00000480637

SEQ ID NO: 50087 - protein, 318 aa, Homo sapiens
  Payload ID: 10003
  Gene Symbol: MAGEA8
  Gene Name: melanoma antigen family A8
  Uniprot ID: P43361
  ENSP ID: ENSP00000286482
MLLGQKSQRYKAEEGLQAQGEAPGLMDVQIPTAEEQKAASSSSTLIMGTLEEVTDSGSPSPPQSPEGASSSLTVTDSTLWSQSDEGSSSNEEEGPSTSPDPAHLESLFREALDEKVAELVRFLLRKYQIKEPVTKAEMLESVIKNYKNHFPDIFSKASECMQVIFGIDVKEVDPAGHSYILVTCLGLSYDGLLGDDQSTPKTGLLIIVLGMILMEGSRAPEEAIWEALSVMGLYDGREHSVYWKLRKLLTQEWVQENYLEYRQAPGSDPVRYEFLWGPRALAETSYVKVLEHVVRVNARVRISYPSLHEEALGEEKGV

SEQ ID NO: 50088 - protein, 318 aa, Homo sapiens; identical to SEQ ID NO: 50087
  Payload ID: 10003
  Gene Symbol: MAGEA8
  Gene Name: melanoma antigen family A8
  Uniprot ID: P43361
  ENSP ID: ENSP00000438293

SEQ ID NO: 50089 - protein, 318 aa, Homo sapiens; identical to SEQ ID NO: 50087
  Payload ID: 10003
  Gene Symbol: MAGEA8
  Gene Name: melanoma antigen family A8
  Uniprot ID: P43361
  ENSP ID: ENSP00000443776

SEQ ID NO: 50090 - protein, 315 aa, Homo sapiens
  Payload ID: 10004
  Gene Symbol: MAGEA9
  Gene Name: melanoma antigen family A9
  Uniprot ID: P43362
  ENSP ID: ENSP00000243314
MSLEQRSPHCKPDEDLEAQGEDLGLMGAQEPTGEEEETTSSSDSKEEEVSAAGSSSPPQSPQGGASSSISVYYTLWSQFDEGSSSQEEEEPSSSVDPAQLEFMFQEALKLKVAELVHFLLHKYRVKEPVTKAEMLESVIKNYKRYFPVIFGKASEFMQVIFGTDVKEVDPAGHSYILVTALGLSCDSMLGDGHSMPKAALLIIVLGVILTKDNCAPEEVIWEALSVMGVYVGKEHMFYGEPRKLLTQDWVQENYLEYRQVPGSDPAHYEFLWGSKAHAETSYEKVINYLVMLNAREPICYPSLYEEVLGEEQEGV

SEQ ID NO: 50091 - protein, 114 aa, Homo sapiens
  Payload ID: 10005
  Gene Symbol: MAGEA9B
  Gene Name: melanoma antigen family A9B
  ENSP ID: ENSP00000469924
MSLEQRSPHCKPDEDLEAQGEDLGLMGAQEPTGEEEETTSSSDSKEEEVSAAGSSSPPQSPQGGASSSISVYYTLWSQFDEGSSSQEEEEPSSSVDPAQLEFMFQEALKLKVAE

SEQ ID NO: 50092 - protein, 97 aa, Homo sapiens
  Payload ID: 10005
  Gene Symbol: MAGEA9B
  Gene Name: melanoma antigen family A9B
  ENSP ID: ENSP00000470594
MSLEQRSPHCKPDEDLEAQGEDLGLMGAQEPTGEEEETTSSSDSKEEEVSAAGSSSPPQSPQGGASSSISVYYTLWSQFDEGSSSQEEEEPSSSVDP

SEQ ID NO: 50093 - protein, 315 aa, Homo sapiens; identical to SEQ ID NO: 50090
  Payload ID: 10005
  Gene Symbol: MAGEA9B
  Gene Name: melanoma antigen family A9B
  Uniprot ID: P43362
  ENSP ID: ENSP00000471017

SEQ ID NO: 50094 - protein, 195 aa, Homo sapiens
  Payload ID: 10005
  Gene Symbol: MAGEA9B
  Gene Name: melanoma antigen family A9B
  ENSP ID: ENSP00000472733
MSLEQRSPHCKPDEDLEAQGEDLGLMGAQEPTGEEEETTSSSDSKEEEVSAAGSSSPPQSPQGGASSSISVYYTLWSQFDEGSSSQEEEEPSSSVDPAQLEFMFQEALKLKVAELVHFLLHKYRVKEPVTKAEMLESVIKNYKRYFPVIFGKASEFMQVIFGTDVKEVDPAGHSYILVTALGLSCDSMLGDGHSM

SEQ ID NO: 50095 - protein, 347 aa, Homo sapiens
  Payload ID: 10006
  Gene Symbol: MAGEB1
  Gene Name: melanoma antigen family B1
  Uniprot ID: P43366
  ENSP ID: ENSP00000368264
MPRGQKSKLRAREKRRKAREETQGLKVAHATAAEKEECPSSSPVLGDTPTSSPAAGIPQKPQGAPPTTTAAAAVSCTESDEGAKCQGEENASFSQATTSTESSVKDPVAWEAGMLMHFILRKYKMREPIMKADMLKVVDEKYKDHFTEILNGASRRLELVFGLDLKEDNPSGHTYTLVSKLNLTNDGNLSNDWDFPRNGLLMPLLGVIFLKGNSATEEEIWKFMNVLGAYDGEEHLIYGEPRKFITQDLVQEKYLKYEQVPNSDPPRYQFLWGPRAYAETTKMKVLEFLAKMNGATPRDFPSHYEEALRDEEERAQVRSSVRARRRTTATTFRARSRAPFSRSSHPM

SEQ ID NO: 50096 - protein, 347 aa, Homo sapiens; identical to SEQ ID NO: 50095
  Payload ID: 10006
  Gene Symbol: MAGEB1
  Gene Name: melanoma antigen family B1
  Uniprot ID: P43366
  ENSP ID: ENSP00000380681

SEQ ID NO: 50097 - protein, 347 aa, Homo sapiens; identical to SEQ ID NO: 50095
  Payload ID: 10006
  Gene Symbol: MAGEB1
  Gene Name: melanoma antigen family B1
  Uniprot ID: P43366
  ENSP ID: ENSP00000380683

SEQ ID NO: 50098 - protein, 347 aa, Homo sapiens
  Payload ID: 10007
  Gene Symbol: MAGEB10
  Gene Name: melanoma antigen family B10
  Uniprot ID: Q96LZ2
  ENSP ID: ENSP00000368304
MPRGQKSKLRAREKRRQARGGLEDLIDALDILEEEEESPPSASACLKDVFQSSLDGASNNPHGLREAQSTSTSATAASHTRHPEGVNDQMEERPICTQDLEATDSFPRGPVDEKVIILVHYLLYKYQMKEPITKADMLRNVTQMSKSQFPVILSRASEHLELIFGLDLKEVEPNKHIYVLVNKLDLGCDAKLSDETGVPKTGLLMTVLGIIFTNGNCVAEEEVWKVFNTMGLYDGIEHFMFGEPRKLLTKDLVKENYLEYQQVPNSDPPRYQFLWGPRAHAETSKMKVLEFLAKVNDTAPSEFSNWYTEALQDEEERARARVAAKARVSATAGARSKVKSSKSSQLQ

SEQ ID NO: 50099 - protein, 347 aa, Homo sapiens; identical to SEQ ID NO: 50098
  Payload ID: 10007
  Gene Symbol: MAGEB10
  Gene Name: melanoma antigen family B10
  Uniprot ID: Q96LZ2
  ENSP ID: ENSP00000480889

SEQ ID NO: 50100 - protein, 324 aa, Homo sapiens
  Payload ID: 10008
  Gene Symbol: MAGEB16
  Gene Name: melanoma antigen family B16
  Uniprot ID: A2A368
  ENSP ID: ENSP00000382867
MSQDQESPRCTHDQHLQTFSETQSLEVAQVSKALEKTLLSSSHPLVPGKLKEAPAAKAESPLEVPQSFCSSSIAVTTTSSSESDEASSNQEEEDSPSSSEDTSDPRNVPADALDQKVAFLVNFMLHKCQMKKPITKADMLKIIIKDDESHFSEILLRASEHLEMIFGLDVVEVDPTTHCYGLFIKLGLTYDGMLSGEKGVPKTGLLIIVLGVIFMKGNRATEEEVWEVLNLTGVYSGKKHFIFGEPRMLITKDFVKEKYLEYQQVANSDPARYEFLWGPRAKAETSKMKVLEFVAKVHGSYPHSFPSQYAEALKEEEERARARI

SEQ ID NO: 50101 - protein, 324 aa, Homo sapiens; identical to SEQ ID NO: 50100
  Payload ID: 10008
  Gene Symbol: MAGEB16
  Gene Name: melanoma antigen family B16
  Uniprot ID: A2A368
  ENSP ID: ENSP00000382869

SEQ ID NO: 50102 - protein, 324 aa, Homo sapiens; identical to SEQ ID NO: 50100
  Payload ID: 10008
  Gene Symbol: MAGEB16
  Gene Name: melanoma antigen family B16
  Uniprot ID: A2A368
  ENSP ID: ENSP00000382870

SEQ ID NO: 50103 - protein, 324 aa, Homo sapiens; identical to SEQ ID NO: 50100
  Payload ID: 10008
  Gene Symbol: MAGEB16
  Gene Name: melanoma antigen family B16
  Uniprot ID: A2A368
  ENSP ID: ENSP00000382871

SEQ ID NO: 50104 - protein, 356 aa, Homo sapiens
  Payload ID: 10008
  Gene Symbol: MAGEB16
  Gene Name: melanoma antigen family B16
  ENSP ID: ENSP00000382874
MGTEAQPVVKAVILHCLPSCPHSCLLPPTRVIMSQDQESPRCTHDQHLQTFSETQSLEVAQVSKALEKTLLSSSHPLVPGKLKEAPAAKAESPLEVPQSFCSSSIAVTTTSSSESDEASSNQEEEDSPSSSEDTSDPRNVPADALDQKVAFLVNFMLHKCQMKKPITKADMLKIIIKDDESHFSEILLRASEHLEMIFGLDVVEVDPTTHCYGLFIKLGLTYDGMLSGEKGVPKTGLLIIVLGVIFMKGNRATEEEVWEVLNLTGVYSGKKHFIFGEPRMLITKDFVKEKYLEYQQVANSDPARYEFLWGPRAKAETSKMKVLEFVAKVHGSYPHSFPSQYAEALKEEEERARARI

SEQ ID NO: 50105 - protein, 336 aa, Homo sapiens
  Payload ID: 10009
  Gene Symbol: MAGEB17
  Gene Name: melanoma antigen family B17
  Uniprot ID: A8MXT2
  ENSP ID: ENSP00000382883
MPRGQASKRRAREKRRQARGEDQCLGGAQATAAEKEKLPSSSSPACQSPPQSFPNAGIPQESQRASYPSSPASAVSLTSSDEGAKGQKGESPNSFHGPSSSESTGRDLLNTKTGELVQFLLNKYIRKEPITREAMLKVINRKYKQHFPEILRRSTENVEVVFGLYLKEMDPSRQSYVLVGKLDFPNQGSLSDGGGFPLSGLLMVLLSTIFMHGNRATEEEMWECLNALGMYKGRKHFIYGEPQELVTKDLVREGYLEYQQVPSSDPPRYEFLWGPRARAETSKMKVLEFVAKLNDTVASTYKSRYEEALREEEEQARARAVARDSARARASRSFQP

SEQ ID NO: 50106 - protein, 336 aa, Homo sapiens; identical to SEQ ID NO: 50105
  Payload ID: 10009
  Gene Symbol: MAGEB17
  Gene Name: melanoma antigen family B17
  Uniprot ID: A8MXT2
  ENSP ID: ENSP00000382884

SEQ ID NO: 50107 - protein, 343 aa, Homo sapiens
  Payload ID: 10010
  Gene Symbol: MAGEB18
  Gene Name: melanoma antigen family B18
  Uniprot ID: Q96M61
  ENSP ID: ENSP00000314543
MPRGQKSKLRAREKRHQARCENQDLGATQATVAEGESPSPAYLLFGDRPQNLPAAETPSIPEALQGAPSTTNAIAPVSCSSNEGASSQDEKSLGSSREAEGWKEDPLNKKVVSLVHFLLQKYETKEPITKGDMIKFVIRKDKCHFNEILKRASEHMELALGVDLKEVDPIRHYYAFFSKLDLTYDETTSDEEKIPKTGLLMIALGVIFLNGNRAPEEAVWEIMNMMGVYADRKHFLYGDPRKVMTKDLVQLKYLEYQQVPNSDPPRYEFLWGPRAHAETSKMKVLEFVAKIHDTVPSAFPSCYEEALRDEEQRTQARAAARAHTAAMANARSRTTSSSFSHAK

SEQ ID NO: 50108 - protein, 319 aa, Homo sapiens
  Payload ID: 10011
  Gene Symbol: MAGEB2
  Gene Name: melanoma antigen family B2
  Uniprot ID: O15479
  ENSP ID: ENSP00000368273
MPRGQKSKLRAREKRRKARDETRGLNVPQVTEAEEEEAPCCSSSVSGGAASSSPAAGIPQEPQRAPTTAAAAAAGVSSTKSKKGAKSHQGEKNASSSQASTSTKSPSEDPLTRKSGSLVQFLLYKYKIKKSVTKGEMLKIVGKRFREHFPEILKKASEGLSVVFGLELNKVNPNGHTYTFIDKVDLTDEESLLSSWDFPRRKLLMPLLGVIFLNGNSATEEEIWEFLNMLGVYDGEEHSVFGEPWKLITKDLVQEKYLEYKQVPSSDPPRFQFLWGPRAYAETSKMKVLEFLAKVNGTTPCAFPTHYEEALKDEEKAGV

SEQ ID NO: 50109 - protein, 346 aa, Homo sapiens
  Payload ID: 10012
  Gene Symbol: MAGEB3
  Gene Name: melanoma antigen family B3
  Uniprot ID: O15480
  ENSP ID: ENSP00000355198
MPRGQKSTLHAREKRQQTRGQTQDHQGAQITATNKKKVSFSSPLILGATIQKKSAGRSRSALKKPQRALSTTTSVDVSYKKSYKGANSKIEKKQSFSQGLSSTVQSRTDPLIMKTNMLVQFLMEMYKMKKPIMKADMLKIVQKSHKNCFPEILKKASFNMEVVFGVDLKKVDSTKDSYVLVSKMDLPNNGTVTRGRGFPKTGLLLNLLGVIFMKGNCATEEKIWEFLNKMRIYDGKKHFIFGEPRKLITQDLVKLKYLEYRQVPNSNPARYEFLWGPRAHAETSKMKVLEFWAKVNKTVPSAFQFWYEEALRDEEERVQAAAMLNDGSSAMGRKCSKAKASSSSHA

SEQ ID NO: 50110 - protein, 346 aa, Homo sapiens; identical to SEQ ID NO: 50109
  Payload ID: 10012
  Gene Symbol: MAGEB3
  Gene Name: melanoma antigen family B3
  Uniprot ID: O15480
  ENSP ID: ENSP00000478513

SEQ ID NO: 50111 - protein, 346 aa, Homo sapiens
  Payload ID: 10013
  Gene Symbol: MAGEB4
  Gene Name: melanoma antigen family B4
  Uniprot ID: O15481
  ENSP ID: ENSP00000368266
MPRGQKSKLRAREKRQRTRGQTQDLKVGQPTAAEKEESPSSSSSVLRDTASSSLAFGIPQEPQREPPTTSAAAAMSCTGSDKGDESQDEENASSSQASTSTERSLKDSLTRKTKMLVQFLLYKYKMKEPTTKAEMLKIISKKYKEHFPEIFRKVSQRTELVFGLALKEVNPTTHSYILVSMLGPNDGNQSSAWTLPRNGLLMPLLSVIFLNGNCAREEEIWEFLNMLGIYDGKRHLIFGEPRKLITQDLVQEKYLEYQQVPNSDPPRYQFLWGPRAHAETSKMKVLEFLAKVNDTTPNNFPLLYEEALRDEEERAGARPRVAARRGTTAMTSAYSRATSSSSSQPM

SEQ ID NO: 50112 - protein, 275 aa, Homo sapiens
  Payload ID: 10014
  Gene Symbol: MAGEB5
  Gene Name: melanoma antigen family B5
  Uniprot ID: Q9BZ81
  ENSP ID: ENSP00000473493
MTSAGVFNAGSDERANSRDEEYPCSSEVSPSTESSCSNFINIKVGLLEQFLLYKFKMKQRILKEDMLKIVNPRYQNQFAEIHRRASEHIEVVFAVDLKEVNPTCHLYDLVSKLKLPNNGRIHVGKVLPKTGLLMTFLVVIFLKGNCANKEDTWKFLDMMQIYDGKKYYIYGEPRKLITQDFVRLTYLEYHQVPCSYPAHYQFLWGPRAYTETSKMKVLEYLAKVNDIAPGAFSSQYEEALQDEEESPSQRCSRNWHYCSGQDCLRAKFSSFSQPY

SEQ ID NO: 50113 - protein, 407 aa, Homo sapiens
  Payload ID: 10015
  Gene Symbol: MAGEB6
  Gene Name: melanoma antigen family B6
  Uniprot ID: Q8N7X4
  ENSP ID: ENSP00000368320
MPRGHKSKLRTCEKRQETNGQPQGLTGPQATAEKQEESHSSSSSSRACLGDCRRSSDASIPQESQGVSPTGSPDAVVSYSKSDVAANGQDEKSPSTSRDASVPQESQGASPTGSPDAGVSGSKYDVAANGQDEKSPSTSHDVSVPQESQGASPTGSPDAGVSGSKYDVAAEGEDEESVSASQKAIIFKRLSKDAVKKKACTLAQFLQKKFEKKESILKADMLKCVRREYKPYFPQILNRTSQHLVVAFGVELKEMDSSGESYTLVSKLGLPSEGILSGDNALPKSGLLMSLLVVIFMNGNCATEEEVWEFLGLLGIYDGILHSIYGDARKIITEDLVQDKYVVYRQVCNSDPPCYEFLWGPRAYAETTKMRVLRVLADSSNTSPGLYPHLYEDALIDEVERALRLRA

SEQ ID NO: 50114 - protein, 407 aa, Homo sapiens
  Payload ID: 10016
  Gene Symbol: MAGEB6P1
  Gene Name: melanoma antigen family B6 pseudogene 1
  ENSP ID: ENSP00000488257
MPRGQKSKLRARGKRRETHDQPQGLTGPQATAEKQEESRSSSSSSAVCQGARRRSSGSSVPQESQGASPTGYPDAGASCSKYDVAAMGQDEKSPSTSRDASVSQESQGASPIGPPDAGISCSKSDEAAKGQNEKSPSTSRDASVPQESQGASPTGSPDADVSGSKSDVAAKGQDEESLSSSKRAAFFTTTDGDPIKRKANKMVQFLQKKFEKKEPILKADMLKRLRRQYKPCFPEILKRTSEHLTVFFGVELKETDSSGESYTLVSKLGLSNEGSLSGDNALPKSGLLMSILGLIFMRGNRATEEEVWKFLGLLGIYDGILHSIYGDARKIITEDLVQDKYVVYRQVCNSDPPCYEFLWGPRAYAETTKMRVLRVLAEINNTSPGLYPHLYEDALTDEVERALRLRA

SEQ ID NO: 50115 - protein, 1142 aa, Homo sapiens
  Payload ID: 10017
  Gene Symbol: MAGEC1
  Gene Name: melanoma antigen family C1
  Uniprot ID: O60732
  ENSP ID: ENSP00000285879
MGDKDMPTAGMPSLLQSSSESPQSCPEGEDSQSPLQIPQSSPESDDTLYPLQSPQSRSEGEDSSDPLQRPPEGKDSQSPLQIPQSSPEGDDTQSPLQNSQSSPEGKDSLSPLEISQSPPEGEDVQSPLQNPASSFFSSALLSIFQSSPESTQSPFEGFPQSVLQIPVSAASSSTLVSIFQSSPESTQSPFEGFPQSPLQIPVSRSFSSTLLSIFQSSPERTQSTFEGFAQSPLQIPVSPSSSSTLLSLFQSFSERTQSTFEGFAQSSLQIPVSPSFSSTLVSLFQSSPERTQSTFEGFPQSPLQIPVSSSSSSTLLSLFQSSPERTHSTFEGFPQSLLQIPMTSSFSSTLLSIFQSSPESAQSTFEGFPQSPLQIPGSPSFSSTLLSLFQSSPERTHSTFEGFPQSPLQIPMTSSFSSTLLSILQSSPESAQSAFEGFPQSPLQIPVSSSFSYTLLSLFQSSPERTHSTFEGFPQSPLQIPVSSSSSSSTLLSLFQSSPECTQSTFEGFPQSPLQIPQSPPEGENTHSPLQIVPSLPEWEDSLSPHYFPQSPPQGEDSLSPHYFPQSPPQGEDSLSPHYFPQSPQGEDSLSPHYFPQSPPQGEDSMSPLYFPQSPLQGEEFQSSLQSPVSICSSSTPSSLPQSFPESSQSPPEGPVQSPLHSPQSPPEGMHSQSPLQSPESAPEGEDSLSPLQIPQSPLEGEDSLSSLHFPQSPPEWEDSLSPLHFPQFPPQGEDFQSSLQSPVSICSSSTSLSLPQSFPESPQSPPEGPAQSPLQRPVSSFFSYTLASLLQSSHESPQSPPEGPAQSPLQSPVSSFPSSTSSSLSQSSPVSSFPSSTSSSLSKSSPESPLQSPVISFSSSTSLSPFSEESSSPVDEYTSSSDTLLESDSLTDSESLIESEPLFTYTLDEKVDELARFLLLKYQVKQPITKAEMLTNVISRYTGYFPVIFRKAREFIEILFGISLREVDPDDSYVFVNTLDLTSEGCLSDEQGMSQNRLLILILSIIFIKGTYASEEVIWDVLSGIGVRAGREHFAFGEPRELLTKVWVQEHYLEYREVPNSSPPRYEFLWGPRAHSEVIKRKVVEFLAMLKNTVPITFPSSYKDALKDVEERAQAIIDTTDDSTATESASSSVMSPSFSSE

SEQ ID NO: 50116 - protein, 209 aa, Homo sapiens
  Payload ID: 10017
  Gene Symbol: MAGEC1
  Gene Name: melanoma antigen family C1
  Uniprot ID: O60732
  ENSP ID: ENSP00000385500
MLTNVISRYTGYFPVIFRKAREFIEILFGISLREVDPDDSYVFVNTLDLTSEGCLSDEQGMSQNRLLILILSIIFIKGTYASEEVIWDVLSGIGVRAGREHFAFGEPRELLTKVWVQEHYLEYREVPNSSPPRYEFLWGPRAHSEVIKRKVVEFLAMLKNTVPITFPSSYKDALKDVEERAQAIIDTTDDSTATESASSSVMSPSFSSE

SEQ ID NO: 50117 - protein, 373 aa, Homo sapiens
  Payload ID: 10018
  Gene Symbol: MAGEC2
  Gene Name: melanoma antigen family C2
  Uniprot ID: Q9UBF1
  ENSP ID: ENSP00000354660
MPPVPGVPFRNVDNDSPTSVELEDWVDAQHPTDEEEEEASSASSTLYLVFSPSSFSTSSSLILGGPEEEEVPSGVIPNLTESIPSSPPQGPPQGPSQSPLSSCCSSFSWSSFSEESSSQKGEDTGTCQGLPDSESSFTYTLDEKVAELVEFLLLKYEAEEPVTEAEMLMIVIKYKDYFPVILKRAREFMELLFGLALIEVGPDHFCVFANTVGLTDEGSDDEGMPENSLLIIILSVIFIKGNCASEEVIWEVLNAVGVYAGREHFVYGEPRELLTKVWVQGHYLEYREVPHSSPPYYEFLWGPRAHSESIKKKVLEFLAKLNNTVPSSFPSWYKDALKDVEERVQATIDTADDATVMASESLSVMSSNVSFSE

SEQ ID NO: 50118 - protein, 643 aa, Homo sapiens
  Payload ID: 10019
  Gene Symbol: MAGEC3
  Gene Name: melanoma antigen family C3
  Uniprot ID: Q8TD91
  ENSP ID: ENSP00000298296
MLLPCHWVLDATFSDGSLGQWVKNTCATYALSPVVLPPQPQPRKKATDKDYSAFHLGHLREVRLFLRGGTSDQRMDSLVLCPTYFKLWRTLSGSPGLQLSDLHFGSQPEGKFSLRRAVSVKQREEPQDWPLNEKRTLWKDSDLPTWRRGTGYTLSLPAVSPGKRLWGEKAGSLPESEPLFTYTLDEKVDKLVQFLLLKYQAKEPLTRAEMQMNVINTYTGYFPMIFRKAREFIEILFGISLTEVDPDHFYVFVNTLDLTCEGSLSDEQGMPQNRLLILILSVIFIKGNCASEEVIWEVLNAIGPWSALAGFADVLSRLALWESEGPEAFCEESGLRSAEGSVLDLANPQGLAGHRQEDGRRGLTEASPQQKKGGEDEDMPAAGMPPLPQSPPEIPPQGPPKISPQGPPQSPPQSPLDSCSSPLLWTRLDEESSSEEEDTATWHALPESESLPRYALDEKVAELVQFLLLKYQTKEPVTKAEMLTTVIKKYKDYFPMIFGKAHEFIELIFGIALTDMDPDNHSYFFEDTLDLTYEGSLIDDQGMPKNCLLILILSMIFIKGSCVPEEVIWEVLSAIGPIQRPAREVLEFLSKLSSIIPSAFPSWYMDALKDMEDRAQAIIDTTDDATAMASASPSVMSTNFCPE

SEQ ID NO: 50119 - protein, 346 aa, Homo sapiens
  Payload ID: 10019
  Gene Symbol: MAGEC3
  Gene Name: melanoma antigen family C3
  Uniprot ID: Q8TD91
  ENSP ID: ENSP00000386566
MPLFPNLPRLSFEEDFQNPSVTEDLVDAQDSIDEEEEDASSTSSSSFHFLFPSSSSLSSSSPLSSPLPSTLILGVPEDEDMPAAGMPPLPQSPPEIPPQGPPKISPQGPPQSPPQSPLDSCSSPLLWTRLDEESSSEEEDTATWHALPESESLPRYALDEKVAELVQFLLLKYQTKEPVTKAEMLTTVIKKYKDYFPMIFGKAHEFIELIFGIALTDMDPDNHSYFFEDTLDLTYEGSLIDDQGMPKNCLLILILSMIFIKGSCVPEEVIWEVLSAIGVCAGREHFIYGDPRKLLTIHWVQRKYLEYREVPNSAPPRYEFLWGPRAHSEASKRSLRVFIQAIQYHP

SEQ ID NO: 50120 - protein, 266 aa, Homo sapiens
  Payload ID: 10019
  Gene Symbol: MAGEC3
  Gene Name: melanoma antigen family C3
  ENSP ID: ENSP00000438254
MPAAGMPPLPQSPPEIPPQGPPKISPQGPPQSPPQSPLDSCSSPLLWTRLDEESSSEEEDTATWHALPESESLPRYALDEKVAELVQFLLLKYQTKEPVTKAEMLTTVIKKYKDYFPMIFGKAHEFIELIFGIALTDMDPDNHSYFFEDTLDLTYEGSLIDDQGMPKNCLLILILSMIFIKGSCVPEEVIWEVLSAIGVCAGREHFIYGDPRKLLTIHWVQRKYLEYREVPNSAPPRYEFLWGPRAHSEASKRSLRVFIQAIQYHP

SEQ ID NO: 50121 - protein, 346 aa, Homo sapiens; identical to SEQ ID NO: 50119
  Payload ID: 10019
  Gene Symbol: MAGEC3
  Gene Name: melanoma antigen family C3
  Uniprot ID: Q8TD91
  ENSP ID: ENSP00000440444

SEQ ID NO: 50122 - protein, 778 aa, Homo sapiens
  Payload ID: 10020
  Gene Symbol: MAGED1
  Gene Name: melanoma antigen family D1
  Uniprot ID: Q9Y5V3
  ENSP ID: ENSP00000325333
MAQKMDCGAGLLGFQAEASVEDSALLMQTLMEAIQISEAPPTNQATAAASPQSSQPPTANEMADIQVSAAAARPKSAFKVQNATTKGPNGVYDFSQAHNAKDVPNTQPKAAFKSQNATPKGPNAAYDFSQAATTGELAANKSEMAFKAQNATTKVGPNATYNFSQSLNANDLANSRPKTPFKAWNDTTKAPTADTQTQNVNQAKMATSQADIETDPGISEPDGATAQTSADGSQAQNLESRTIIRGKRTRKINNLNVEENSSGDQRRAPLAAGTWRSAPVPVTTQNPPGAPPNVLWQTPLAWQNPSGWQNQTARQTPPARQSPPARQTPPAWQNPVAWQNPVIWPNPVIWQNPVIWPNPIVWPGPVVWPNPLAWQNPPGWQTPPGWQTPPGWQGPPDWQGPPDWPLPPDWPLPPDWPLPTDWPLPPDWIPADWPIPPDWQNLRPSPNLRPSPNSRASQNPGAAQPRDVALLQERANKLVKYLMLKDYTKVPIKRSEMLRDIIREYTDVYPEIIERACFVLEKKFGIQLKEIDKEEHLYILISTPESLAGILGTTKDTPKLGLLLVILGVIFMNGNRASEAVLWEALRKMGLRPGVRHPLLGDLRKLLTYEFVKQKYLDYRRVPNSNPPEYEFLWGLRSYHETSKMKVLRFIAEVQKRDPRDWTAQFMEAADEALDALDAAAAEAEARAEARTRMGIGDEAVSGPWSWDDIEFELLTWDEEGDFGDPWSRIPFTFWARYHQNARSRFPQTFAGPIIGPGGTASANFAANFGAIGFFWVE

SEQ ID NO: 50123 - protein, 834 aa, Homo sapiens
  Payload ID: 10020
  Gene Symbol: MAGED1
  Gene Name: melanoma antigen family D1
  Uniprot ID: Q9Y5V3
  ENSP ID: ENSP00000364847
MAQKMDCGAGLLGFQNPDACRAVCHPLPQPPASTLPLSAFPTLCDPPYSQLRDPPAVLSCYCTPLGASPAPAEASVEDSALLMQTLMEAIQISEAPPTNQATAAASPQSSQPPTANEMADIQVSAAAARPKSAFKVQNATTKGPNGVYDFSQAHNAKDVPNTQPKAAFKSQNATPKGPNAAYDFSQAATTGELAANKSEMAFKAQNATTKVGPNATYNFSQSLNANDLANSRPKTPFKAWNDTTKAPTADTQTQNVNQAKMATSQADIETDPGISEPDGATAQTSADGSQAQNLESRTIIRGKRTRKINNLNVEENSSGDQRRAPLAAGTWRSAPVPVTTQNPPGAPPNVLWQTPLAWQNPSGWQNQTARQTPPARQSPPARQTPPAWQNPVAWQNPVIWPNPVIWQNPVIWPNPIVWPGPVVWPNPLAWQNPPGWQTPPGWQTPPGWQGPPDWQGPPDWPLPPDWPLPPDWPLPTDWPLPPDWIPADWPIPPDWQNLRPSPNLRPSPNSRASQNPGAAQPRDVALLQERANKLVKYLMLKDYTKVPIKRSEMLRDIIREYTDVYPEIIERACFVLEKKFGIQLKEIDKEEHLYILISTPESLAGILGTTKDTPKLGLLLVILGVIFMNGNRASEAVLWEALRKMGLRPGVRHPLLGDLRKLLTYEFVKQKYLDYRRVPNSNPPEYEFLWGLRSYHETSKMKVLRFIAEVQKRDPRDWTAQFMEAADEALDALDAAAAEAEARAEARTRMGIGDEAVSGPWSWDDIEFELLTWDEEGDFGDPWSRIPFTFWARYHQNARSRFPQTFAGPIIGPGGTASANFAANFGAIGFFWVE

SEQ ID NO: 50124 - protein, 778 aa, Homo sapiens; identical to SEQ ID NO: 50122
  Payload ID: 10020
  Gene Symbol: MAGED1
  Gene Name: melanoma antigen family D1
  Uniprot ID: Q9Y5V3
  ENSP ID: ENSP00000364874

SEQ ID NO: 50125 - protein, 778 aa, Homo sapiens; identical to SEQ ID NO: 50122
  Payload ID: 10020
  Gene Symbol: MAGED1
  Gene Name: melanoma antigen family D1
  Uniprot ID: Q9Y5V3
  ENSP ID: ENSP00000364927

SEQ ID NO: 50126 - protein, 606 aa, Homo sapiens
  Payload ID: 10021
  Gene Symbol: MAGED2
  Gene Name: melanoma antigen family D2
  Uniprot ID: Q9UNF1
  ENSP ID: ENSP00000218439
MSDTSESGAGLTRFQAEASEKDSSSMMQTLLTVTQNVEVPETPKASKALEVSEDVKVSKASGVSKATEVSKTPEAREAPATQASSTTQLTDTQVLAAENKSLAADTKKQNADPQAVTMPATETKKVSHVADTKVNTKAQETEAAPSQAPADEPEPESAAAQSQENQDTRPKVKAKKARKVKHLDGEEDGSSDQSQASGTTGGRRVSKALMASMARRASRGPIAFWARRASRTRLAAWARRALLSLRSPKARRGKARRRAAKLQSSQEPEAPPPRDVALLQGRANDLVKYLLAKDQTKIPIKRSDMLKDIIKEYTDVYPEIIERAGYSLEKVFGIQLKEIDKNDHLYILLSTLEPTDAGILGTTKDSPKLGLLMVLLSIIFMNGNRSSEAVIWEVLRKLGLRPGIHHSLFGDVKKLITDEFVKQKYLDYARVPNSNPPEYEFFWGLRSYYETSKMKVLKFACKVQKKDPKEWAAQYREAMEADLKAAAEAAAEAKARAEIRARMGIGLGSENAAGPCNWDEADIGPWAKARIQAGAEAKAKAQESGSASTGASTSTNNSASASASTSGGFSAGASLTATLTFGLFAGLGGAGASTSGSSGACGFSYK

SEQ ID NO: 50127 - protein, 588 aa, Homo sapiens
  Payload ID: 10021
  Gene Symbol: MAGED2
  Gene Name: melanoma antigen family D2
  ENSP ID: ENSP00000336962
MSDTSESGAGLTRFQAEASEKDSSSMMQTLLTVTQNVEVPETPKASKATEVSKTPEAREAPATQASSTTQLTDTQVLAAENKSLAADTKKQNADPQAVTMPATETKKVSHVADTKVNTKAQETEAAPSQAPADEPEPESAAAQSQENQDTRPKVKAKKARKVKHLDGEEDGSSDQSQASGTTGGRRVSKALMASMARRASRGPIAFWARRASRTRLAAWARRALLSLRSPKARRGKARRRAAKLQSSQEPEAPPPRDVALLQGRANDLVKYLLAKDQTKIPIKRSDMLKDIIKEYTDVYPEIIERAGYSLEKVFGIQLKEIDKNDHLYILLSTLEPTDAGILGTTKDSPKLGLLMVLLSIIFMNGNRSSEAVIWEVLRKLGLRPGIHHSLFGDVKKLITDEFVKQKYLDYARVPNSNPPEYEFFWGLRSYYETSKMKVLKFACKVQKKDPKEWAAQYREAMEADLKAAAEAAAEAKARAEIRARMGIGLGSENAAGPCNWDEADIGPWAKARIQAGAEAKAKAQESGSASTGASTSTNNSASASASTSGGFSAGASLTATLTFGLFAGLGGAGASTSGSSGACGFSYK

SEQ ID NO: 50128 - protein, 606 aa, Homo sapiens; identical to SEQ ID NO: 50126
  Payload ID: 10021
  Gene Symbol: MAGED2
  Gene Name: melanoma antigen family D2
  Uniprot ID: Q9UNF1
  ENSP ID: ENSP00000364193

SEQ ID NO: 50129 - protein, 606 aa, Homo sapiens; identical to SEQ ID NO: 50126
  Payload ID: 10021
  Gene Symbol: MAGED2
  Gene Name: melanoma antigen family D2
  Uniprot ID: Q9UNF1
  ENSP ID: ENSP00000364198

SEQ ID NO: 50130 - protein, 521 aa, Homo sapiens
  Payload ID: 10021
  Gene Symbol: MAGED2
  Gene Name: melanoma antigen family D2
  ENSP ID: ENSP00000364200
MSDTSESGAGLTRFQAEASEKDSSSMMQTLLTVTQNVEVPETPKASSTTQLTDTQVLAAENKSLAADTKKQNADPQAVTMPATETKKVSHVADTKVNTKAQETEAAPSQAPADEPEPESAAAQSQENQDTRPKVKAKKARKVKHLDGEEDGSSDQSQASGTTGGRRVSKARRRAAKLQSSQEPEAPPPRDVALLQGRANDLVKYLLAKDQTKIPIKRSDMLKDIIKEYTDVYPEIIERAGYSLEKVFGIQLKEIDKNDHLYILLSTLEPTDAGILGTTKDSPKLGLLMVLLSIIFMNGNRSSEAVIWEVLRKLGLRPGIHHSLFGDVKKLITDEFVKQKYLDYARVPNSNPPEYEFFWGLRSYYETSKMKVLKFACKVQKKDPKEWAAQYREAMEADLKAAAEAAAEAKARAEIRARMGIGLGSENAAGPCNWDEADIGPWAKARIQAGAEAKAKAQESGSASTGASTSTNNSASASASTSGGFSAGASLTATLTFGLFAGLGGAGASTSGSSGACGFSYK

SEQ ID NO: 50131 - protein, 606 aa, Homo sapiens; identical to SEQ ID NO: 50126
  Payload ID: 10021
  Gene Symbol: MAGED2
  Gene Name: melanoma antigen family D2
  Uniprot ID: Q9UNF1
  ENSP ID: ENSP00000364209

SEQ ID NO: 50132 - protein, 606 aa, Homo sapiens; identical to SEQ ID NO: 50126
  Payload ID: 10021
  Gene Symbol: MAGED2
  Gene Name: melanoma antigen family D2
  Uniprot ID: Q9UNF1
  ENSP ID: ENSP00000379526

SEQ ID NO: 50133 - protein, 521 aa, Homo sapiens; identical to SEQ ID NO: 50130
  Payload ID: 10021
  Gene Symbol: MAGED2
  Gene Name: melanoma antigen family D2
  ENSP ID: ENSP00000486563

SEQ ID NO: 50134 - protein, 739 aa, Homo sapiens
  Payload ID: 10022
  Gene Symbol: MAGED4
  Gene Name: melanoma antigen family D4
  Uniprot ID: Q96JG8
  ENSP ID: ENSP00000364777
MAEGSFSVQSESYSVEDMDEGSDEVGEEEMVEGNDYEEFGAFGGYGTLTSFDIHILRAFGSLGPGLRILSNEPWELENPVLAQTLVEALQLDPETLANETAARAANVARAAASNRAARAAAAAARTAFSQVVASHRVATPQVSGEDTQPTTYAAEAQGPTPEPPLASPQTSQMLVTSKMAAPEAPATSAQSQTGSPAQEAATEGPSSACAFSQAPCAREVDANRPSTAFLGQNDVFDFTQPAGVSGMAFPRPKRPAPAQEAATEGPSAASGVPQTGPGREVAATRPKTTKSGKALAKTRWVEPQNVVAAAAAKAKMATSIPEPEGAAAATAQHSAEPWARMGGKRTKKSKHLDDEYESSEEERETPAVPPTWRASQPSLTVRAQLAPRPPMAPRSQIPSRHVLCLPPRNVTLLQERANKLVKYLMIKDYKKIPIKRADMLKDVIREYDEHFPEIIERATYTLEKKFGIHLKEIDKEEHLYILVCTRDSSARLLGKTKDTPRLSLLLVILGVIFMNGNRASEAVLWEALRKMGLRPGVRHPFLGDLRKLITDDFVKQKYLEYKKIPNSNPPEYEFLWGLRARHETSKMRVLRFIAQNQNRDPREWKAHFLEAVDDAFKTMDVDMAEEHARAQMRAQMNIGDEALIGRWSWDDIQVELLTWDEDGDFGDAWARIPFAFWARYHQYILNSNRANRRATWRAGVSSGTNGGASTSVLDGPSTSSTIRTRNAARAGASFFSWIQ

SEQ ID NO: 50135 - protein, 757 aa, Homo sapiens
  Payload ID: 10022
  Gene Symbol: MAGED4
  Gene Name: melanoma antigen family D4
  Uniprot ID: Q96JG8
  ENSP ID: ENSP00000472118
MAEGSFSVQSESYSVEDMDEGSDEVGEEEMVEGNDYEEFGAFGGYGTLTSFDIHILRAFGSLGPGLRILSNEPWELENPVLAQTLVEALQLDPETLANETAARAANVARAAASNRAARAAAAAARTAFSQVVASHRVATPQVSGEDTQPTTYAAEAQGPTPEPPLASPQTSQMLVTSKMAAPEAPATSAQSQTGSPAQEAATEGPSSACAFSQAPCAREVDANRPSTAFLGQNDVFDFTQPAGVSGMAFPRPKRPAPAQEAATEGPSAASGVPQTGPGREVAATRPKTTKSGKALAKTRWVEPQNVVAAAAAKAKMATSIPEPEGAAAATAQHSAEPWARMGGKRTKKSKHLDDEYESSEEERETPAVPPTWRASQPSLTVRAQLAPRPPMAPRSQIPSRHVLCLPPRNVTLLQERANKLVKYLMIKDYKKIPIKRADMLKDVIREYDEHFPEIIERATYTLEKKFGIHLKEIDKEEHLYILVCTRDSSARLLGKTKDTPRLSLLLVILGVIFMNGNRASEAVLWEALRKMGLRPGVRHPFLGDLRKLITDDFVKQKNPELREETPLSMAPSWYLEYKKIPNSNPPEYEFLWGLRARHETSKMRVLRFIAQNQNRDPREWKAHFLEAVDDAFKTMDVDMAEEHARAQMRAQMNIGDEALIGRWSWDDIQVELLTWDEDGDFGDAWARIPFAFWARYHQYILNSNRANRRATWRAGVSSGTNGGASTSVLDGPSTSSTIRTRNAARAGASFFSWIQHR

SEQ ID NO: 50136 - protein, 741 aa, Homo sapiens
  Payload ID: 10023
  Gene Symbol: MAGED4B
  Gene Name: melanoma antigen family D4B
  Uniprot ID: Q96JG8
  ENSP ID: ENSP00000335385
MAEGSFSVQSESYSVEDMDEGSDEVGEEEMVEGNDYEEFGAFGGYGTLTSFDIHILRAFGSLGPGLRILSNEPWELENPVLAQTLVEALQLDPETLANETAARAANVARAAASNRAARAAAAAARTAFSQVVASHRVATPQVSGEDTQPTTYAAEAQGPTPEPPLASPQTSQMLVTSKMAAPEAPATSAQSQTGSPAQEAATEGPSSACAFSQAPCAREVDANRPSTAFLGQNDVFDFTQPAGVSGMAFPRPKRPAPAQEAATEGPSAASGVPQTGPGREVAATRPKTTKSGKALAKTRWVEPQNVVAAAAAKAKMATSIPEPEGAAAATAQHSAEPWARMGGKRTKKSKHLDDEYESSEEERETPAVPPTWRASQPSLTVRAQLAPRPPMAPRSQIPSRHVLCLPPRNVTLLQERANKLVKYLMIKDYKKIPIKRADMLKDVIREYDEHFPEIIERATYTLEKKFGIHLKEIDKEEHLYILVCTRDSSARLLGKTKDTPRLSLLLVILGVIFMNGNRASEAVLWEALRKMGLRPGVRHPFLGDLRKLITDDFVKQKYLEYKKIPNSNPPEYEFLWGLRARHETSKMRVLRFIAQNQNRDPREWKAHFLEAVDDAFKTMDVDMAEEHARAQMRAQMNIGDEALIGRWSWDDIQVELLTWDEDGDFGDAWARIPFAFWARYHQYILNSNRANRRATWRAGVSSGTNGGASTSVLDGPSTSSTIRTRNAARAGASFFSWIQHR

SEQ ID NO: 50137 - protein, 739 aa, Homo sapiens; identical to SEQ ID NO: 50134
  Payload ID: 10023
  Gene Symbol: MAGED4B
  Gene Name: melanoma antigen family D4B
  Uniprot ID: Q96JG8
  ENSP ID: ENSP00000353252

SEQ ID NO: 50138 - protein, 757 aa, Homo sapiens; identical to SEQ ID NO: 50135
  Payload ID: 10023
  Gene Symbol: MAGED4B
  Gene Name: melanoma antigen family D4B
  Uniprot ID: Q96JG8
  ENSP ID: ENSP00000421861

SEQ ID NO: 50139 - protein, 48 aa, Homo sapiens
  Payload ID: 10023
  Gene Symbol: MAGED4B
  Gene Name: melanoma antigen family D4B
  ENSP ID: ENSP00000422633
VSLPCPHPFSEAGRRGLSAAHRSHTQRGLPGDCWMKGMIAWEPRTLPG

SEQ ID NO: 50140 - protein, 33 aa, Homo sapiens
  Payload ID: 10023
  Gene Symbol: MAGED4B
  Gene Name: melanoma antigen family D4B
  ENSP ID: ENSP00000422913
  MOD_RES (1)..(1): Any amino acid
XVLWEALRKMGLRPGYDWPLQLLPSVLSSGQRG

SEQ ID NO: 50141 - protein, 741 aa, Homo sapiens; identical to SEQ ID NO: 50136
  Payload ID: 10023
  Gene Symbol: MAGED4B
  Gene Name: melanoma antigen family D4B
  Uniprot ID: Q96JG8
  ENSP ID: ENSP00000423848

SEQ ID NO: 50142 - protein, 271 aa, Homo sapiens
  Payload ID: 10023
  Gene Symbol: MAGED4B
  Gene Name: melanoma antigen family D4B
  ENSP ID: ENSP00000423971
MAEGSFSVQSESYSVEDMDEGSDEVGEEEMVEGNDYEEFGAFGGYGTLTSFDIHILRAFGSLGPGLRILSNEPWELENPVLAQTLVEALQLDPETLANETAARAANVARAAASNRAARAAAAAARTAFSQVVASHRVATPQTSQMLVTSKMAAPEAPATSAQSQTGSPAQEAATEGPSSACAFSQAPCAREVDANRPSTAFLGQNDVFDFTQPAGVSGMAFPRPKRPAPAQEAATEGPSAASGVPQTGPGREVAATRPKTTKSGKALAKTR

SEQ ID NO: 50143 - protein, 957 aa, Homo sapiens
  Payload ID: 10024
  Gene Symbol: MAGEE1
  Gene Name: melanoma antigen family E1
  Uniprot ID: Q9HCI5
  ENSP ID: ENSP00000354912
MSLVSQNSRRRRRRVAKATAHNSSWGEMQAPNAPGLPADVPGSDVPQGPSDSQILQGLCASEGPSTSVLPTSAEGPSTFVPPTISEASSASGQPTISEGPGTSVLPTPSEGLSTSGPPTISKGLCTSVTLAASEGRNTSRPPTSSEEPSTSVPPTASEVPSTSLPPTPGEGTSTSVPPTAYEGPSTSVVPTPDEGPSTSVLPTPGEGPGTSVPLAATEGLSTSVQATPDEGPSTSVPPTATEGLSTPVPPTRDEGPSTSVPATPGEGPSTSVLPAASDGQSISLVPTRGKGSSTSVPPTATEGLSTSVQPTAGEGSSTSVPPTPGGGLSTSVPPTATEELSTSVPPTPGEGPSTSVLPIPGEGLSTSVPPTASDGSDTSVPPTPGEGASTLVQPTAPDGPGSSVLPNPGEGPSTLFSSSASVDRNPSKCSLVLPSPRVTKASVDSDSEGPKGAEGPIEFEVLRDCESPNSISIMGLNTSRVAITLKPQDPMEQNVAELLQFLLVKDQSKYPIRESEMREYIVKEYRNQFPEILRRAAAHLECIFRFELRELDPEAHTYILLNKLGPVPFEGLEESPNGPKMGLLMMILGQIFLNGNQAKEAEIWEMLWRMGVQRERRLSIFGNPKRLLSVEFVWQRYLDYRPVTDCKPVEYEFFWGPRSHLETTKMKILKFMAKIYNKDPMDWPEKYNEALEEDAARAFAEGWQALPHFRRPFFEEAAAEVPSPDSEVSSYSSKYAPHSWPESRLESKARKLVQLFLLMDSTKLPIPKKGILYYIGRECSKVFPDLLNRAARTLNHVYGTELVVLDPRNHSYTLYNRREMEETEEIVDSPNRPGNNFLMQVLSFIFIMGNHARESAVWAFLRGLGVQAGRKHVITCRYLSQRYIDSLRVPDSDPVQYEFVWGPRARLETSKMKALRYVARIHRKEPQDWPQQYREAMEDEANRADVGHRQIFVHNFR

SEQ ID NO: 50144 - protein, 523 aa, Homo sapiens
  Payload ID: 10025
  Gene Symbol: MAGEE2
  Gene Name: melanoma antigen family E2
  Uniprot ID: Q8TD90
  ENSP ID: ENSP00000362457
MSLVSQNARHCSAEITADYGDGRGEIQATNASGSPTSMLVVDAPQCPQAPINSQCVNTSQAVQDPNDLEVLIDEQSRRLGALRVHDPLEDRSIALVNFMRMKSQTEGSIQQSEMLEFLREYSDQFPEILRRASAHLDQVFGLNLRVIDPQADTYNLVSKRGFQITDRIAESLDMPKASLLALVLGHILLNGNRAREASIWDLLLKVDMWDKPQRINNLFGNTRNLLTTDFVCMRFLEYWPVYGTNPLEFEFLWGSRAHREITKMEALKFVSDAHDEEPWSWPEEYNKALEGDKTKERSLTAGLEFWSEDTMNDKANDLVQLAISVTEEMLPIHQDELLAHTGKEFEDVFPNILNRATLILDMFYGLSLIEVDTSEHIYLLVQQPESEEEQVMLESLGRPTQEYVMPILGLIFLMGNRVKEANVWNLLRRFSVDVGRKHSITRKLMRQRYLECRPLSYSNPVEYELLWGPRAHHETIKMKVLEYMARLYRKRPQNWPEQYREAVEDEEARAKSEATIMFFLDPT

SEQ ID NO: 50145 - protein, 307 aa, Homo sapiens
  Payload ID: 10026
  Gene Symbol: MAGEF1
  Gene Name: melanoma antigen family F1
  Uniprot ID: Q9HAY2
  ENSP ID: ENSP00000315064
MLQTPESRGLPVPQAEGEKDGGHDGETRAPTASQERPKEELGAGREEGAAEPALTRKGARALAAKALARRRAYRRLNRTVAELVQFLLVKDKKKSPITRSEMVKYVIGDLKILFPDIIARAAEHLRYVFGFELKQFDRKHHTYILINKLKPLEEEEEEDLGGDGPRLGLLMMILGLIYMRGNSAREAQVWEMLRRLGVQPSKYHFLFGYPKRLIMEDFVQQRYLSYRRVPHTNPPEYEFSWGPRSNLEISKMEVLGFVAKLHKKEPQHWPVQYREALADEADRARAKARAEASMRARASARAGIHLW

SEQ ID NO: 50146 - protein, 219 aa, Homo sapiens
  Payload ID: 10027
  Gene Symbol: MAGEH1
  Gene Name: melanoma antigen family H1
  Uniprot ID: Q9H213
  ENSP ID: ENSP00000343706
MPRGRKSRRRRNARAAEENRNNRKIQASEASETPMAASVVASTPEDDLSGPEEDPSTPEEASTTPEEASSTAQAQKPSVPRSNFQGTKKSLLMSILALIFIMGNSAKEALVWKVLGKLGMQPGRQHSIFGDPKKIVTEEFVRRGYLIYKPVPRSSPVEYEFFWGPRAHVESSKLKVMHFVARVRNRCSKDWPCNYDWDSDDDAEVEAILNSGARGYSAP

SEQ ID NO: 50147 - protein, 1249 aa, Homo sapiens
  Payload ID: 10028
  Gene Symbol: MAGEL2
  Gene Name: melanoma antigen family L2
  Uniprot ID: Q9UJ55
  ENSP ID: ENSP00000433433
MSQLSKNLGDSSPPAEAPKPPVYSRPTVLMRAPPASSRAPPVPWDPPPIDLQASLAAWQAPQPAWEAPQGQLPAPVVPMTQPPALGGPIVPAPPLGGPMGKPPTPGVLMVHPPPPGAPMAQPPTPGVLMVHPSAPGAPMAHPPPPGTPMSHPPPPGTPMAHPPPPGTPMAHPPPPGTPMVHPPPPGTPMAHPPPPGTPMAHPPPPGTPMAHPPPPGTPMAHPPPPGTPMAQPPAPGVLMAQPLTPGVLMVQPAAPGAPMVQPPPAAMMTQPQPSGAPMAKPPGPGVLMIHPPGARAPMTQPPASGAPMAQPAAPPAQPMAPPAQPMASWAPQAQPLILQIQSQVIRAPPQVPQGPQAPPAQLATPPGWQATSPGWQATQQGWQATPLTWQTTQVTWQAPAVTWQVPPPMRQGPPPIRPGPPPIRPGPPPVRQAPPLIRQAPPVIRQAPPVIRQAPPVIRQAPAVIRQAPPVIRQAPPVIRQAPPVIRQAPPLIRQAPPPIRPAPQVLATQPPLWQALPPPPPLRQAPQARLPAPQVQAAPQVPTAPPATQVPAAPPAGPQVPQPVLPAPLSAPLSAPQAVHCPSIIWQAPKGQPPVPHEIPTSMEFQEVQQTQALAWQAQKAPTHIWQPLPAQEAQRQAPPLVQLEQPFQGAPPSQKAVQIQLPPQQAQASGPQAEVPTLPLQPSWQAPPAVLQAQPGPPVAAANFPLGSAKSLMTPSGECRASSIDRRGSSKERRTSSKERRAPSKDRMIFAATFCAPKAVSAARAHLPAAWKNLPATPETFAPSSSVFPATSQFQPASLNAFKGPSAASETPKSLPYALQDPFACVEALPAVPWVPQPNMNASKASQAVPTFLMATAAAPQATATTQEASKTSVEPPRRSGKATRKKKHLEAQEDSRGHTLAFHDWQGPRPWENLNLSDWEVQSPIQVSGDWEHPNTPRGLSGWEGPSTSRILSGWEGPSASWALSAWEGPSTSRALGLSESPGSSLPVVVSEVASVSPGSSATQDNSKVEAQPLSPLDERANALVQFLLVKDQAKVPVQRSEMVKVILREYKDECLDIINRANNKLECAFGYQLKEIDTKNHAYIIINKLGYHTGNLVASYLDRPKFGLLMVVLSLIFMKGNCVREDLIFNFLFKLGLDVRETNGLFGNTKKLITEVFVRQKYLEYRRIPYTEPAEYEFLWGPRAFLETSKMLVLRFLAKLHKKDPQSWPFHYLEALAECEWEDTDEDEPDTGDSAHGPTSRPPPR

SEQ ID NO: 50148 - protein, 732 aa, Homo sapiens
  Payload ID: 10029
  Gene Symbol: MUM1
  Gene Name: melanoma associated antigen (mutated) 1
  Uniprot ID: Q2TAK8
  ENSP ID: ENSP00000394925
MMADAKYVLCRWEKRLWPAKVLARTATSTKNKRRKEYFLAVQILSLEEKIKVKSTEVEILEKSQIEAIASSLASQNEVPAAPLEELAYRRSLRVALDVLSEGSIWSQESSAGTGRADRSLRGKPMEHVSSPCDSNSSSLPRGDVLGSSRPHRRRPCVQQSLSSSFTCEKDPECKVDHKKGLRKSENPRGPLVLPAGGGAQDESGSRIHHKNWTLASKRGGNSAQKASLCLNGSSLSEDDTERDMGSKGGSWAAPSLPSGVREDDPCANAEGHDPGLPLGSLTAPPAPEPSACSEPGECPAKKRPRLDGSQRPPAVQLEPMAAGAAPSPGPGPGPRESVTPRSTARLGPPPSHASADATRCLPCPDSQKLEKECQSSEESMGSNSMRSILEEDEEDEEPPRVLLYHEPRSFEVGMLVWHKHKKYPFWPAVVKSVRQRDKKASVLYIEGHMNPKMKGFTVSLKSLKHFDCKEKQTLLNQAREDFNQDIGWCVSLITDYRVRLGCGSFAGSFLEYYAADISYPVRKSIQQDVLGTKLPQLSKGSPEEPVVGCPLGQRQPCRKMLPDRSRAARDRANQKLVEYIVKAKGAESHLRAILKSRKPSRWLQTFLSSSQYVTCVETYLEDEGQLDLVVKYLQGVYQEVGAKVLQRTNGDRIRFILDVLLPECWEMRVRALDPVRRRSRLLDPCAEMELLRSCQHQGVRTPSLLRAHRCFPASVGHHLCDLCGGRGGLQDG

SEQ ID NO: 50149 - protein, 79 aa, Homo sapiens
  Payload ID: 10029
  Gene Symbol: MUM1
  Gene Name: melanoma associated antigen (mutated) 1
  ENSP ID: ENSP00000465838
MMADAKYVLCRWEKRLWPAKVLARTATSTKNKRRKEYFLAVQILSLEEKIKVKSTEVEILEKSQIEAIASSLGNANPLS

SEQ ID NO: 50150 - protein, 48 aa, Homo sapiens
  Payload ID: 10029
  Gene Symbol: MUM1
  Gene Name: melanoma associated antigen (mutated) 1
  ENSP ID: ENSP00000466891
MMADAKYVLCRWEKRLWPAKVLARTATSTKNKRRKEYFLAVQILSLEE

SEQ ID NO: 50151 - protein, 711 aa, Homo sapiens
  Payload ID: 10029
  Gene Symbol: MUM1
  Gene Name: melanoma associated antigen (mutated) 1
  ENSP ID: ENSP00000467083
MMADAKYVLCRWEKRLWPAKVLARTATSTKNKRRKEYFLAVQILSLEEKIKVKSTEVEILEKSQIEAIASSLASQNEVPAAPLEELAYRRSLRVALDVLSEGSIWSQESSAGTGRADRSLRGKPMEHVSSPCDSNSSSLPRGDVLGSSRPHRRRPCVQQSLSSSFTCEKDPECKVDHKKGLRKSENPRGPLVLPAGGGAQDESGSRIHHKNWTLASKRGGNSAQKASLCLNGSSLSEDDTERDMGSKGGSWAAPSLPSGVREDDPCANAEGHDPGLPLGSLTAPPAPEPSACSEPGECPAKKRPRLDGSQRPPAVQLEPMAAGAAPSPGPGPGPRESVTPRSTARLGPPPSHASADATRCLPCPDSQKLEKECQSSEESMGSNSMRSILEEDEEDEEPPRVLLYHEPRSFEVGMLVWHKHKKYPFWPAVVKSVRQRDKKASVLYIEGHMNPKMKGFTVSLKSLKHFDCKEKQTLLNQAREDFNQDIGWCVSLITDYRVRLGCGSFAGSFLEYYAADISYPVRKSIQQDVLGTKLPQLSKGSPEEPVVGCPLGQRQPCRKMLPDRSRAARDRANQKLVEYIVKAKGAESHLRAILKSRKPSRWLQTFLSSSQYVTCVETYLEDEGQLDLVVKYLQGVYQEVGAKVLQRTNGDRIRFILDVLLPEAIICAISAVDEVDYKTAEEKYIKGPSLSYREKEIFDNQLLEERNRRRR

SEQ ID NO: 50152 - protein, 264 aa, Homo sapiens
  Payload ID: 10029
  Gene Symbol: MUM1
  Gene Name: melanoma associated antigen (mutated) 1
  ENSP ID: ENSP00000467287
MMADAKYVLCRWEKRLWPAKVLARTATSTKNKRRKEYFLAVQILSLEEKIKVKSTEVEILEKSQIEAIASSLASQNEVPAAPLEELAYRRSLRVALDVLSEGSIWSQESSAGTGRADRSLRGKPMEHVSSPCDSNSSSLPRGDVLGSSRPHRRRPCVQQSLSSSFTCEKDPECKVDHKKGLRKSENPRGPLVLPAGGGAQDESGSRIHHKNWTLASKRGGNSAQKASLCLNGSSLSEDDTERDMGSKGGSWAAPSLPSGVREDD

SEQ ID NO: 50153 - protein, 79 aa, Homo sapiens; identical to SEQ ID NO: 50149
  Payload ID: 10029
  Gene Symbol: MUM1
  Gene Name: melanoma associated antigen (mutated) 1
  ENSP ID: ENSP00000468322

SEQ ID NO: 50154 - protein, 79 aa, Homo sapiens; identical to SEQ ID NO: 50149
  Payload ID: 10029
  Gene Symbol: MUM1
  Gene Name: melanoma associated antigen (mutated) 1
  ENSP ID: ENSP00000468557

SEQ ID NO: 50155 - protein, 711 aa, Homo sapiens; identical to SEQ ID NO: 50151
  Payload ID: 10029
  Gene Symbol: MUM1
  Gene Name: melanoma associated antigen (mutated) 1
  ENSP ID: ENSP00000486562

SEQ ID NO: 50156 - protein, 732 aa, Homo sapiens; identical to SEQ ID NO: 50148
  Payload ID: 10029
  Gene Symbol: MUM1
  Gene Name: melanoma associated antigen (mutated) 1
  ENSP ID: ENSP00000487567

SEQ ID NO: 50157 - protein, 696 aa, Homo sapiens
  Payload ID: 10030
  Gene Symbol: MUM1L1
  Gene Name: melanoma associated antigen (mutated) 1-like 1
  Uniprot ID: Q5H9M0
  ENSP ID: ENSP00000338641
MESEYVLCNWKDQLWPAKVLSRSETSSNSKRKKAFSLEVQILSLDEKIKLDSTETKILNKSQIEAIAASLGLQSEDSAPPTEETAYGRSLKVALGILNERTNLSQASTSDEEEITMLSQNVPQKQSDSPPHKKYRKDEGDLPGCLEERENSACLLASSESDDSLYDDKSQAPTMVDTIPSEVETKSLQNSSWCETFPSLSEDNDEKENKNKIDISAVMSVHSAVKEESACVKDEKFAPPLSPLSSDMLIMPKALKEESEDTCLETLAVPSECSAFSENIEDPGEGPSNPCLDTSQNQPSMESEMGAAACPGSCSRECEVSFSASNPVWDYSHLMSSERNFQRLDFEELEEEGQASDKSLLPSRINLSLLDDDEEDEELPRFILHYETHPFETGMIVWFKYQKYPFWPAVIKSIRRKERKASVLFVEANMNSEKKGIRVNFRRLKKFDCKEKQMLVDKAREDYSESIDWCISLICDYRVRIGCGSFTGSLLEYYAADISYPVRKETKQDTFRNKFPKLHNEDAREPMAVTSQTKKMSFQKILPDRMKAARDRANKNLVDFIVNAKGTENHLLAIVNGTKGSRWLKSFLNANRFTPCIETYFEDEDQLDEVVKYLQEVCNQIDQIMPTWIKDDKIKFILEVLLPEAIICSISAVDGLDYEAAEAKYLKGPCLGYRERELFDAKIIYEKRRKAPTNEAH

SEQ ID NO: 50158 - protein, 696 aa, Homo sapiens; identical to SEQ ID NO: 50157
  Payload ID: 10030
  Gene Symbol: MUM1L1
  Gene Name: melanoma associated antigen (mutated) 1-like 1
  Uniprot ID: Q5H9M0
  ENSP ID: ENSP00000349699

SEQ ID NO: 50159 - protein, 696 aa, Homo sapiens; identical to SEQ ID NO: 50157
  Payload ID: 10030
  Gene Symbol: MUM1L1
  Gene Name: melanoma associated antigen (mutated) 1-like 1
  Uniprot ID: Q5H9M0
  ENSP ID: ENSP00000361632

SEQ ID NO: 50160 - protein, 424 aa, Homo sapiens
  Payload ID: 10030
  Gene Symbol: MUM1L1
  Gene Name: melanoma associated antigen (mutated) 1-like 1
  ENSP ID: ENSP00000484745
MESEYVLCNWKDQLWPAKVLSRSETSSNSKRKKAFSLEVQILSLDEKIKLDSTETKILNKSQIEAIAASLGLQSEDSAPPTEETAYGRSLKVALGILNERTNLSQASTSDEEEITMLSQNVPQKQSDSPPHKKYRKDEGDLPGCLEERENSACLLASSESDDSLYDDKSQAPTMVDTIPSEVETKSLQNSSWCETFPSLSEDNDEKENKNKIDISAVMSVHSAVKEESACVKDEKFAPPLSPLSSDMLIMPKALKEESEDTCLETLAVPSECSAFSENIEDPGEGPSNPCLDTSQNQPSMESEMGAAACPGSCSRECEVSFSASNPVWDYSHLMSSERNFQRLDFEELEEEGQASDKSLLPSRINLSLLDDDEEDEELPRFILHYETHPFETGMIVWFKYQKYPFGSSDKKYQTKREESKCAFC

SEQ ID NO: 50161 - protein, 646 aa, Homo sapiens
  Payload ID: 10031
  Gene Symbol: MCAM
  Gene Name: melanoma cell adhesion molecule
  Uniprot ID: P43121
  ENSP ID: ENSP00000264036
MGLPRLVCAFLLAACCCCPRVAGVPGEAEQPAPELVEVEVGSTALLKCGLSQSQGNLSHVDWFSVHKEKRTLIFRVRQGQGQSEPGEYEQRLSLQDRGATLALTQVTPQDERIFLCQGKRPRSQEYRIQLRVYKAPEEPNIQVNPLGIPVNSKEPEEVATCVGRNGYPIPQVIWYKNGRPLKEEKNRVHIQSSQTVESSGLYTLQSILKAQLVKEDKDAQFYCELNYRLPSGNHMKESREVTVPVFYPTEKVWLEVEPVGMLKEGDRVEIRCLADGNPPPHFSISKQNPSTREAEEETTNDNGVLVLEPARKEHSGRYECQGLDLDTMISLLSEPQELLVNYVSDVRVSPAAPERQEGSSLTLTCEAESSQDLEFQWLREETGQVLERGPVLQLHDLKREAGGGYRCVASVPSIPGLNRTQLVNVAIFGPPWMAFKERKVWVKENMVLNLSCEASGHPRPTISWNVNGTASEQDQDPQRVLSTLNVLVTPELLETGVECTASNDLGKNTSILFLELVNLTTLTPDSNTTTGLSTSTASPHTRANSTSTERKLPEPESRGVVIVAVIVCILVLAVLGAVLYFLYKKGKLPCRRSGKQEITLPPSRKSELVVEVKSDKLPEEMGLLQGSSGDKRAPGDQGEKYIDLRH

SEQ ID NO: 50162 - protein, 131 aa, Homo sapiens
  Payload ID: 10032
  Gene Symbol: MIA
  Gene Name: melanoma inhibitory activity
  Uniprot ID: Q16674
  ENSP ID: ENSP00000263369
MARSLVCLGVIILLSAFSGPGVRGGPMPKLADRKLCADQECSHPISMAVALQDYMAPDCRFLTIHRGQVVYVFSKLKGRGRLFWGGSVQGDYYGDLAARLGYFPSSIVREDQTLKPGKVDVKTDKWDFYCQ

SEQ ID NO: 50163 - protein, 131 aa, Homo sapiens; identical to SEQ ID NO: 50162
  Payload ID: 10032
  Gene Symbol: MIA
  Gene Name: melanoma inhibitory activity
  Uniprot ID: Q16674
  ENSP ID: ENSP00000469499

SEQ ID NO: 50164 - protein, 131 aa, Homo sapiens; identical to SEQ ID NO: 50162
  Payload ID: 10032
  Gene Symbol: MIA
  Gene Name: melanoma inhibitory activity
  Uniprot ID: Q16674
  ENSP ID: ENSP00000470129

SEQ ID NO: 50165 - protein, 95 aa, Homo sapiens
  Payload ID: 10032
  Gene Symbol: MIA
  Gene Name: melanoma inhibitory activity
  ENSP ID: ENSP00000470641
  MOD_RES (1)..(1): Any amino acid
XRSLVCLGVIILLSAFSGPGVRGGPMPKLADRKLCADQECSHPISMAVALQDYMAPDCRFLTIHRGQVVFREITMEIWLLAWAISPVALSERTRP

SEQ ID NO: 50166 - protein, 58 aa, Homo sapiens
  Payload ID: 10032
  Gene Symbol: MIA
  Gene Name: melanoma inhibitory activity
  ENSP ID: ENSP00000471439
  MOD_RES (1)..(1): Any amino acid
XSLVCLGVIILLSAFSGPGVRGGPMPKLADRKLCADQECSRSGRLLWRSGCSPGLFPQ

SEQ ID NO: 50167 - protein, 45 aa, Homo sapiens
  Payload ID: 10032
  Gene Symbol: MIA
  Gene Name: melanoma inhibitory activity
  ENSP ID: ENSP00000472982
MARSLVCLGVIILLSAFSGPGVRGGPMPKLADRKLCADQECSHPI

SEQ ID NO: 50168 - protein, 654 aa, Homo sapiens
  Payload ID: 10033
  Gene Symbol: MIA2
  Gene Name: melanoma inhibitory activity 2
  Uniprot ID: Q96PC5
  ENSP ID: ENSP00000280082
MAKFGVHRILLLAISLTKCLESTKLLADLKKCGDLECEALINRVSAMRDYRGPDCRYLNFTKGEEISVYVKLAGEREDLWAGSKGKEFGYFPRDAVQIEEVFISEEIQMSTKESDFLCLLGVSYTFDNEDSELNGDYGENIYPYEEDKDEKSSIYESDFQIEPGFYATYESTLFEDQVPALEAPEDIGSTSESKDWEEVVVESMEQDRIPEVHVPPSSAVSGVKEWFGLGGEQAEEKAFESVIEPVQESSFRSRKIAVEDENDLEELNNGEPQTEHQQESESEIDSVPKTQSELASESEHIPKPQSTGWFGGGFTSYLGFGDEDTGLELIAEESNPPLQDFPNSISSDKEATVPCTEILTEKKDTITNDSLSLKPSWFDFGFAILGFAYAKEDKIMLDDRKNEEDGGADEHEHPLTSELDPEKEQEIETIKIIETEDQIDKKPVSEKTDESDTIPYLKKFLYNFDNPWNFQNIPKETELPFPKQILDQNNVIENEETGEFSIDNYPTDNTKVMIFKSSYSLSDMVSNIELPTRIHEEVYFEPSSSKDSDENSKPSVDTEGPALVEIDRSVENTLLNSQMVSTDNSLSSQNYISQKEDASEFQILKYLFQIDVYDFMNSAFSPIVILTERVSLPFKPFAIILPILLNIRVATKYV

SEQ ID NO: 50169 - protein, 92 aa, Homo sapiens
  Payload ID: 10033
  Gene Symbol: MIA2
  Gene Name: melanoma inhibitory activity 2
  ENSP ID: ENSP00000451883
MAKFGVHRILLLAISLTKCLESTKLLADLKKCGDLECEALINRVSAMRDYRGPDCRYLNFTKGEEISVYVKLAGEREDLWAGSKGKEFGYFP

SEQ ID NO: 50170 - protein, 1907 aa, Homo sapiens
  Payload ID: 10034
  Gene Symbol: MIA3
  Gene Name: melanoma inhibitory activity family, member 3
  Uniprot ID: Q5JRA6
  ENSP ID: ENSP00000340900
MAAAPGLLVWLLVLRLPWRVPGQLDPSTGRRFSEHKLCADDECSMLMYRGEALEDFTGPDCRFVNFKKGDPVYVYYKLARGWPEVWAGSVGRTFGYFPKDLIQVVHEYTKEELQVPTDETDFVCFDGGRDDFHNYNVEELLGFLELYNSAATDSEKAVEKTLQDMEKNPELSKEREPEPEPVEANSEESDSVFSENTEDLQEQFTTQKHHSHANSQANHAQGEQASFESFEEMLQDKLKVPESENNKTSNSSQVSNEQDKIDAYKLLKKEMTLDLKTKFGSTADALVSDDETTRLVTSLEDDFDEELDTEYYAVGKEDEENQEDFDELPLLTFTDGEDMKTPAKSGVEKYPTDKEQNSNEEDKVQLTVPPGIKNDDKNILTTWGDTIFSIVTGGEETRDTMDLESSSSEEEKEDDDDALVPDSKQGKPQSATDYSDPDNVDDGLFIVDIPKTNNDKEVNAEHHIKGKGRGVQESKRGLVQDKTELEDENQEGMTVHSSVHSNNLNSMPAAEKGKDTLKSAYDDTENDLKGAAIHISKGMLHEEKPGEQILEGGSESESAQKAAGNQMNDRKIQQESLGSAPLMGDDHPNASRDSVEGDALVNGAKLHTLSVEHQREELKEELVLKTQNQPRFSSPDEIDLPRELEDEVPILGRNLPWQQERDVAATASKQMSEKIRLSEGEAKEDSLDEEFFHHKAMQGTEVGQTDQTDSTGGPAFLSKVEEDDYPSEELLEDENAINAKRSKEKNPGNQGRQFDVNLQVPDRAVLGTIHPDPEIEESKQETSMILDSEKTSETAAKGVNTGGREPNTMVEKERPLADKKAQRPFERSDFSDSIKIQTPELGEVFQNKDSDYLKNDNPEEHLKTSGLAGEPEGELSKEDHENTEKYMGTESQGSAAAEPEDDSFHWTPHTSVEPGHSDKREDLLIISSFFKEQQSLQRFQKYFNVHELEALLQEMSSKLKSAQQESLPYNMEKVLDKVFRASESQILSIAEKMLDTRVAENRDLGMNENNIFEEAAVLDDIQDLIYFVRYKHSTAEETATLVMAPPLEEGLGGAMEEMQPLHEDNFSREKTAELNVQVPEEPTHLDQRVIGDTHASEVSQKPNTEKDLDPGPVTTEDTPMDAIDANKQPETAAEEPASVTPLENAILLIYSFMFYLTKSLVATLPDDVQPGPDFYGLPWKPVFITAFLGIASFAIFLWRTVLVVKDRVYQVTEQQISEKLKTIMKENTELVQKLSNYEQKIKESKKHVQETRKQNMILSDEAIKYKDKIKTLEKNQEILDDTAKNLRVMLESEREQNVKNQDLISENKKSIEKLKDVISMNASEFSEVQIALNEAKLSEEKVKSECHRVQEENARLKKKKEQLQQEIEDWSKLHAELSEQIKSFEKSQKDLEVALTHKDDNINALTNCITQLNLLECESESEGQNKGGNDSDELANGEVGGDRNEKMKNQIKQMMDVSRTQTAISVVEEDLKLLQLKLRASVSTKCNLEDQVKKLEDDRNSLQAAKAGLEDECKTLRQKVEILNELYQQKEMALQKKLSQEEYERQEREHRLSAADEKAVSAAEEVKTYKRRIEEMEDELQKTERSFKNQIATHEKKAHENWLKARAAERAIAEEKREAANLRHKLLELTQKMAMLQEEPVIVKPMPGKPNTQNPPRRGPLSQNGSFGPSPVSGGECSPPLTVEPPVRPLSATLNRRDMPRSEFGSVDGPLPHPRWSAEASGKPSPSDPGSGTATMMNSSSRGSSPTRVLDEGKVNMAPKGPPPFPGVPLMSTPMGGPVPPPIRYGPPPQLCGPFGPRPLPPPFGPGMRPPLGLREFAPGVPPGRRDLPLHPRGFLPGHAPFRPLGSLGPREYFIPGTRLPPPTHGPQEYPPPPAVRDLLPSGSRDEPPPASQSTSQDCSQALKQSP

SEQ ID NO: 50171 - protein, 500 aa, Homo sapiens
  Payload ID: 10034
  Gene Symbol: MIA3
  Gene Name: melanoma inhibitory activity family, member 3
  Uniprot ID: Q5JRA6
  ENSP ID: ENSP00000341348
MAAAPGLLVWLLVLRLPWRVPGQLDPSTGRRFSEHKLCADDECSMLMYRGEALEDFTGPDCRFVNFKKGDPVYVYYKLARGWPEVWAGSVGRTFGYFPKDLIQVVHEYTKEELQVPTDETDFVCFDGGRDDFHNYNVEELLGFLELYNSAATDSEKAVEKTLQDMEKNPELSKEREPEPEPVEANSEESDSVFSENTEDLQEQFTTQKHHSHANSQANHAQGEQASFESFEEMLQDKLKVPESENNKTSNSSQVSNEQDKIDAYKLLKKEMTLDLKTKFGSTADALVSDDETTRLVTSLEDDFDEELDTEYYAVGKEDEENQEDFDELPLLTFTDGEDMKTPAKSGVEKYPTDKEQNSNEEDKVQLTVPPGIKNDDKNILTTWGDTIFSIVTGGEETRDTMDLESSSSEEEKEDDDDALVPDSKQGKPQSATDYSDPDNVDDGLFIVDIPKTNNDKEVNAEHHIKGKGRGVQESKRGLVQDKTELEDENQEGFKTEPIKL

SEQ ID NO: 50172 - protein, 785 aa, Homo sapiens
  Payload ID: 10034
  Gene Symbol: MIA3
  Gene Name: melanoma inhibitory activity family, member 3
  Uniprot ID: Q5JRA6
  ENSP ID: ENSP00000345866
MDSVPATVPSIAATPGDPELVGPLSVLYAAFIAKLLELVATLPDDVQPGPDFYGLPWKPVFITAFLGIASFAIFLWRTVLVVKDRVYQVTEQQISEKLKTIMKENTELVQKLSNYEQKIKESKKHVQETRKQNMILSDEAIKYKDKIKTLEKNQEILDDTAKNLRVMLESEREQNVKNQDLISENKKSIEKLKDVISMNASEFSEVQIALNEAKLSEEKVKSECHRVQEENARLKKKKEQLQQEIEDWSKLHAELSEQIKSFEKSQKDLEVALTHKDDNINALTNCITQLNLLECESESEGQNKGGNDSDELANGEVGGDRNEKMKNQIKQMMDVSRTQTAISVVEEDLKLLQLKLRASVSTKCNLEDQVKKLEDDRNSLQAAKAGLEDECKTLRQKVEILNELYQQKEMALQKKLSQEEYERQEREHRLSAADEKAVSAAEEVKTYKRRIEEMEDELQKTERSFKNQIATHEKKAHENWLKARAAERAIAEEKREAANLRHKLLELTQKMAMLQEEPVIVKPMPGKPNTQNPPRRGPLSQNGSFGPSPVSGGECSPPLTVEPPVRPLSATLNRRDMPRSEFGSVDGPLPHPRWSAEASGKPSPSDPGSGTATMMNSSSRGSSPTRVLDEGKVNMAPKGPPPFPGVPLMSTPMGGPVPPPIRYGPPPQLCGPFGPRPLPPPFGPGMRPPLGLREFAPGVPPGRRDLPLHPRGFLPGHAPFRPLGSLGPREYFIPGTRLPPPTHGPQEYPPPPAVRDLLPSGSRDEPPPASQSTSQDCSQALKQSP

SEQ ID NO: 50173 - protein, 1015 aa, Homo sapiens
  Payload ID: 10034
  Gene Symbol: MIA3
  Gene Name: melanoma inhibitory activity family, member 3
  ENSP ID: ENSP00000355062
  MOD_RES (1)..(1): Any amino acid
XLVPDSKQGKPQSATDYSDPDNVDDGLFIVDIPKTNNDKEVNAEHHIKGKGRGVQESKRGLVQDKTELEDENQEGMTVHSSVHSNNLNSMPAAEKGKDTLKSAYDDTENDLKGAAIHISKGMLHEEKPGEQILEGGSESESAQKAAGNQMNDRKIQQESLGSAPLMGDDHPNASRDSVEGDALVNGAKLHTLSVEHQREELKEELVLKTQNQPRFSSPDEIDLPRELEDEVPILGRNLPWQQERDVAATASKQMSEKIRLSEGEAKEDSLDEEFFHHKAMQGTEVGQTDQTDSTGGPAFLSKVEEDDYPSEELLEDENAINAKRSKEKNPGNQGRQFDVNLQVPDRAVLGTIHPDPEIEESKQETSMILDSEKTSETAAKGVNTGGREPNTMVEKERPLADKKAQRPFERSDFSDSIKIQTPELGEVFQNKDSDYLKNDNPEEHLKTSGLAGEPEGELSKEDHENTEKYMGTESQGSAAAEPEDDSFHWTPHTSVEPGHSDKREDLLIISSFFKEQQSLQRFQKYFNVHELEALLQEMSSKLKSAQQESLPYNMEKVLDKVFRASESQILSIAEKMLDTRVAENRDLGMNENNIFEEAAVLDDIQDLIYFVRYKHSTAEETATLVMAPPLEEGLGGAMEEMQPLHEDNFSREKTAELNVQVPEEPTHLDQRVIGDTHASEVSQKPNTEKDLDPGPVTTEDTPMDAIDANKQPETAAEEPASVTPLENAILLIYSFMFYLTKSLVATLPDDVQPGPDFYGLPWKPVFITAFLGIASFAIFLWRTVLVVKDRVYQVTEQQISEKLKTIMKENTELVQKLSNYEQKIKESKKHVQETRKQNMILSDEAIKYKDKIKTLEKNQEILDDTAKNLRVMLESEREQNVKNQDLLQQEIEDWSKLHAELSEQIKSFEKSQKDLEVALTHKDDNINALTNCITQLNLLECESESEGQNKGGNDSDELANGEVGGDRNEKMKNQIKQMMDVSRTQTAISVVEEDLKLLQLKLRASVSTKCNLEDQ

SEQ ID NO: 50174 - protein, 107 aa, Homo sapiens
  Payload ID: 10034
  Gene Symbol: MIA3
  Gene Name: melanoma inhibitory activity family, member 3
  ENSP ID: ENSP00000396598
  MOD_RES (1)..(1): Any amino acid
XSAEASGKPSPSDPGSGTATMMNSSSRGSSPTRVLDEGKVNMAPKGPPPFPGVPLMSTPMGGPVPPPIRYGPPPQLCGPFGPRPLPPPFDKDGRPGTVAHACNPSTL

SEQ ID NO: 50175 - protein, 600 aa, Homo sapiens
  Payload ID: 10035
  Gene Symbol: MLPH
  Gene Name: melanophilin
  Uniprot ID: Q9BV36
  ENSP ID: ENSP00000264605
MGKKLDLSKLTDEEAQHVLEVVQRDFDLRRKEEERLEALKGKIKKESSKRELLSDTAHLNETHCARCLQPYQLLVNSKRQCLECGLFTCKSCGRVHPEEQGWICDPCHLARVVKIGSLEWYYEHVKARFKRFGSAKVIRSLHGRLQGGAGPELISEERSGDSDQTDEDGEPGSEAQAQAQPFGSKKKRLLSVHDFDFEGDSDDSTQPQGHSLHLSSVPEARDSPQSLTDESCSEKAAPHKAEGLEEADTGASGCHSHPEEQPTSISPSRHGALAELCPPGGSHRMALGTAAALGSNVIRNEQLPLQYLADVDTSDEESIRAHVMASHHSKRRGRASSESQIFELNKHISAVECLLTYLENTVVPPLAKGLGAGVRTEADVEEEALRRKLEELTSNVSDQETSSEEEEAKDEKAEPNRDKSVGPLPQADPEVGTAAHQTNRQEKSPQDPGDPVQYNRTTDEELSELEDRVAVTASEVQQAESEVSDIESRIAALRAAGLTVKPSGKPRRKSNLPIFLPRVAGKLGKRPEDPNADPSSEAKAMAVPYLLRRKFSNSLKSQGKDDDSFDRKSVYRGSLTQRNPNARKGMASHTFAKPVVAHQS

SEQ ID NO: 50176 - protein, 572 aa, Homo sapiens
  Payload ID: 10035
  Gene Symbol: MLPH
  Gene Name: melanophilin
  Uniprot ID: Q9BV36
  ENSP ID: ENSP00000341845
MGKKLDLSKLTDEEAQHVLEVVQRDFDLRRKEEERLEALKGKIKKESSKRELLSDTAHLNETHCARCLQPYQLLVNSKRQCLECGLFTCKSCGRVHPEEQGWICDPCHLARVVKIGSLEWYYEHVKARFKRFGSAKVIRSLHGRLQGGAGPELISEERSGDSDQTDEDGEPGSEAQAQAQPFGSKKKRLLSVHDFDFEGDSDDSTQPQGHSLHLSSVPEARDSPQSLTDESCSEKAAPHKAEGLEEADTGASGCHSHPEEQPTSISPSRHGALAELCPPGGSHRMALGTAAALGSNVIRNEQLPLQYLADVDTSDEESIRAHVMASHHSKRRGRASSESQGLGAGVRTEADVEEEALRRKLEELTSNVSDQETSSEEEEAKDEKAEPNRDKSVGPLPQADPEVGTAAHQTNRQEKSPQDPGDPVQYNRTTDEELSELEDRVAVTASEVQQAESEVSDIESRIAALRAAGLTVKPSGKPRRKSNLPIFLPRVAGKLGKRPEDPNADPSSEAKAMAVPYLLRRKFSNSLKSQGKDDDSFDRKSVYRGSLTQRNPNARKGMASHTFAKPVVAHQS

SEQ ID NO: 50177 - protein, 457 aa, Homo sapiens
  Payload ID: 10035
  Gene Symbol: MLPH
  Gene Name: melanophilin
  Uniprot ID: Q9BV36
  ENSP ID: ENSP00000386338
MGKKLDLSKLTDEEAQHVLEVVQRDFDLRRKEEERLEALKGKIKKESSKRELLSDTAHLNETHCARCLQPYQLLVNSKRQCLECGLFTCKSCGRVHPEEQGWICDPCHLARVVKIGSLEWYYEHVKARFKRFGSAKVIRSLHGRLQGGAGPELISEERSGDSDQTDEDGEPGSEAQAQAQPFGSKKKRLLSVHDFDFEGDSDDSTQPQGHSLHLSSVPEARDSPQGLGAGVRTEADVEEEALRRKLEELTSNVSDQETSSEEEEAKDEKAEPNRDKSVGPLPQADPEVGTAAHQTNRQEKSPQDPGDPVQYNRTTDEELSELEDRVAVTASEVQQAESEVSDIESRIAALRAAGLTVKPSGKPRRKSNLPIFLPRVAGKLGKRPEDPNADPSSEAKAMAVPYLLRRKFSNSLKSQGKDDDSFDRKSVYRGSLTQRNPNARKGMASHTFAKPVVAHQS

SEQ ID NO: 50178 - protein, 480 aa, Homo sapiens
  Payload ID: 10035
  Gene Symbol: MLPH
  Gene Name: melanophilin
  Uniprot ID: Q9BV36
  ENSP ID: ENSP00000386780
MGKKLDLSKLTDEEAQHVLEVVQRDFDLRRKEEERLEALKGKIKKESSKRELLSDTAHLNETHCARCLQPYQLLVNSKRQCLECGLFTCKSCGRVHPEEQGWICDPCHLARVVKIGSLEWYYEHVKARFKRFGSAKVIRSLHGRLQGGAGPELISEERSGDSDQTDEDGEPGSEAQAQAQPFGSKSLTDESCSEKAAPHKAEGLEEADTGASGCHSHPEEQPTSISPSRHGALAELCPPGGSHRMALGTAAALGSNVIRNEQLPLQYLADVDTSDEESIRAHVMASHHSKRRGRASSESQGLGAGVRTEADVEEEALRRKLEELTSNVSDQETSSEEEEAKDEKAEPNRDKSVGPLPQADPEVSDIESRIAALRAAGLTVKPSGKPRRKSNLPIFLPRVAGKLGKRPEDPNADPSSEAKAMAVPYLLRRKFSNSLKSQGKDDDSFDRKSVYRGSLTQRNPNARKGMASHTFAKPVVAHQS

SEQ ID NO: 50179 - protein, 199 aa, Homo sapiens
  Payload ID: 10035
  Gene Symbol: MLPH
  Gene Name: melanophilin
  ENSP ID: ENSP00000393010
  MOD_RES (1)..(1): Any amino acid
XSEEEEAKDEKAEPNRDKSVGPLPQADPEVGTAAHQTNRQEKSPQDPGDPVQYNRTTDEELSELEDRVAVTASEVQQAESEVSDIESRIAALRAAGLTVKPSGKPRRKSNLPIFLPRVAGKLGKRPEDPNADPSSEAKAMAVPYLLRRKFSNSLKSQGKDDDSFDRKSVYRGSLTQRNPNARKGMASHTFAMKEWPQPM

SEQ ID NO: 50180 - protein, 145 aa, Homo sapiens
  Payload ID: 10035
  Gene Symbol: MLPH
  Gene Name: melanophilin
  ENSP ID: ENSP00000399081
VQYNRTTDEELSELEDRVAVTASEVQQAESEVSDIESRIAALRAAGLTVKPSGKPRRKSNLPIFLPRVAGKLGKRPEDPNADPSSEAKAMAVPYLLRRKFSNSLKSQGKDDDSFDRKSVYRGSLTQRNPNARKGMASHTFASPSQ

SEQ ID NO: 50181 - protein, 70 aa, Homo sapiens
  Payload ID: 10035
  Gene Symbol: MLPH
  Gene Name: melanophilin
  ENSP ID: ENSP00000403909
MGKKLDLSKLTDEEAQHVLEVVQRDFDLRRKEEERLEALKGKIKKESSKRELLSDTAHLNETHCARCLQP

SEQ ID NO: 50182 - protein, 203 aa, Homo sapiens
  Payload ID: 10035
  Gene Symbol: MLPH
  Gene Name: melanophilin
  ENSP ID: ENSP00000405337
  MOD_RES (1)..(1): Any amino acid
XRHGALAELCPPGGSHRMALGTAAALAFRFSLQVIQTHSRSEGSNVIRNEQLPLQYLADVDTSDEESIRAHVMASHHSKRRGRASSESQGLGAGVRTEADVEEEALRRKLEELTSNVSDQETSSEEEEAKDEKAEPNRDKSVGPLPQADPEVGTAAHQTNRQEKSPQDPGDPVQYNRTTDEELSELEDRVAVTASEVQQAESE

SEQ ID NO: 50183 - protein, 131 aa, Homo sapiens
  Payload ID: 10035
  Gene Symbol: MLPH
  Gene Name: melanophilin
  ENSP ID: ENSP00000409170
MGKKLDLSKLTDEEAQHVLEVVQRDFDLRRKEEERLEALKGKIKKESSKRELLSDTAHLNETHCARCLQPYQLLVNSKRQCLECGLFTCKSCGRVHPEEQGWICDPCHLARVVKIGSLEWYYEHVKARFKR

SEQ ID NO: 50184 - protein, 236 aa, Homo sapiens
  Payload ID: 10035
  Gene Symbol: MLPH
  Gene Name: melanophilin
  ENSP ID: ENSP00000409897
  MOD_RES (1)..(1): Any amino acid
XSDEESIRAHVMASHHSKRRGRASSESQIFELNKHISAVECLLTYLENTVVPPLAKGLGAGVRTEADVEEEALRRKLEELTSNVSDQETSSEEEEAKDEKAEPNRDKSVGPLPQADPEVSDIESRIAALRAAGLTVKPSGKPRRKSNLPIFLPRVAGKLGKRPEDPNADPSSEAKAMAVPYLLRRKFSNSLKSQGKDDDSFDRKSVYRGSLTQRNPNARKGMASHTFAKPVVAHQS

SEQ ID NO: 50185 - protein, 360 aa, Homo sapiens
  Payload ID: 10035
  Gene Symbol: MLPH
  Gene Name: melanophilin
  ENSP ID: ENSP00000412438
TSTSRETQMTPLSLKVTPCTCPQSLRPGTAHSPSQMSPAQRRQPLTRLRAWRRLILGPLGATPIRKSSRPASHLPDTAPWLSSARLEAPTGWPWGLLLHSIFELNKHISAVECLLTYLENTVVPPLAKGLGAGVRTEADVEEEALRRKLEELTSNVSDQETSSEEEEAKDEKAEPNRDKSVGPLPQADPEVGTAAHQTNRQEKSPQDPGDPVQYNRTTDEELSELEDRVAVTASEVQQAESEVSDIESRIAALRAAGLTVKPSGKPRRKSNLPIFLPRVAGKLGKRPEDPNADPSSEAKAMAVPYLLRRKFSNSLKSQGKDDDSFDRKSVYRGSLTQRNPNARKGMASHTFAKPVVAHQS

SEQ ID NO: 50186 - protein, 214 aa, Homo sapiens
  Payload ID: 10036
  Gene Symbol: MREG
  Gene Name: melanoregulin
  Uniprot ID: Q8N565
  ENSP ID: ENSP00000263268
MGLRDWLRTVCCCCGCECLEERALPEKEPLVSDNNPYSSFGATLVRDDEKNLWSMPHDVSHTEADDDRTLYNLIVIRNQQAKDSEEWQKLNYDIHTLRQVRREVRNRWKCILEDLGFQKEADSLLSVTKLSTISDSKNTRKAREMLLKLAEETNIFPTSWELSERYLFVVDRLIALDAAEEFFKLARRTYPKKPGVPCLADGQKELHYLPFPSP

SEQ ID NO: 50187 - protein, 115 aa, Homo sapiens
  Payload ID: 10036
  Gene Symbol: MREG
  Gene Name: melanoregulin
  ENSP ID: ENSP00000404470
MPHDVSHTEADDDRTLYNLIVIRNQQAKDSEEWQKLNYDIHTLRQVRREVRNRWKCILEDLGFQKEADSLLSVTKLSTISDSKNTRKAREMLLKLAEETNIFPTSWELSERYLFV

SEQ ID NO: 50188 - protein, 129 aa, Homo sapiens
  Payload ID: 10036
  Gene Symbol: MREG
  Gene Name: melanoregulin
  ENSP ID: ENSP00000411076
MPHDVSHTEADDDRTLYNLIVIRNQQAKDSEEWQKLNYDIHTLRQVRREVRNRWKCILEDLGFQKEADSLLSVTKLSTISDSKNTRKAREMLLKLAEETNIFPTSWELSERYLFVVDRLIALDAAEEFF

SEQ ID NO: 50189 - protein, 119 aa, Homo sapiens
  Payload ID: 10036
  Gene Symbol: MREG
  Gene Name: melanoregulin
  ENSP ID: ENSP00000413302
MPHDVSHTEADDDRTLYNLIVIRNQQAKDSEEWQKLNYDIHTLRQVRREVRNRWKCILEDLGFQKEADSLLSVTKLSTISDSKNTRKAREMLLKLAEETNIFPTSWELSERYLFVVDRL

SEQ ID NO: 50190 - protein, 214 aa, Homo sapiens; identical to SEQ ID NO: 50186
  Payload ID: 10036
  Gene Symbol: MREG
  Gene Name: melanoregulin
  Uniprot ID: Q8N565
  ENSP ID: ENSP00000484331

SEQ ID NO: 50191 - protein, 350 aa, Homo sapiens [sequence omitted]

SEQ ID NO: 50192 - protein, 362 aa, Homo sapiens
  Payload ID: 10038
  Gene Symbol: MTNR1B
  Gene Name: melatonin receptor 1B
  Uniprot ID: P49286
  ENSP ID: ENSP00000257068
MSENGSFANCCEAGGWAVRPGWSGAGSARPSRTPRPPWVAPALSAVLIVTTAVDVVGNLLVILSVLRNRKLRNAGNLFLVSLALADLVVAFYPYPLILVAIFYDGWALGEEHCKASAFVMGLSVIGSVFNITAIAINRYCYICHSMAYHRIYRRWHTPLHICLIWLLTVVALLPNFFVGSLEYDPRIYSCTFIQTASTQYTAAVVVIHFLLPIAVVSFCYLRIWVLVLQARRKAKPESRLCLKPSDLRSFLTMFVVFVIFAICWAPLNCIGLAVAINPQEMAPQIPEGLFVTSYLLAYFNSCLNAIVYGLLNQNFRREYKRILLALWNPRHCIQDASKGSHAEGLQSPAPPIIGVQHQADAL

SEQ ID NO: 50193 - protein, 113 aa, Homo sapiens
  Payload ID: 10038
  Gene Symbol: MTNR1B
  Gene Name: melatonin receptor 1B
  ENSP ID: ENSP00000433573
  MOD_RES (1)..(1): Any amino acid
XGLVGGWQRAALQDPSTSLGGSSAVRGAHRHHRRGRRGQPPGDPLRAQEPQAPERRFLVINQELRESKRMVKPRPRTSSNVHIWNDLMLWALIVNKNAFAETAKFGEACLPPP

SEQ ID NO: 50194 - protein, 79 aa, Homo sapiens
  Payload ID: 10038
  Gene Symbol: MTNR1B
  Gene Name: melatonin receptor 1B
  ENSP ID: ENSP00000436101
MSENGSFANCCEAGGWAVRPGWSGAGSARPSRTPRPPWVAPALSAVLIVTTAVDVVGNLLVILSVLRNRKLRNAGISYL

SEQ ID NO: 50195 - protein, 1287 aa, Homo sapiens
  Payload ID: 10039
  Gene Symbol: MAGI1
  Gene Name: membrane associated guanylate kinase, WW and PDZ domain containing 1
  Uniprot ID: Q96QZ7
  ENSP ID: ENSP00000331157
MSKVIQKKNHWTSRVHECTVKRGPQGELGVTVLGGAEHGEFPYVGAVAAVEAAGLPGGGEGPRLGEGELLLEVQGVRVSGLPRYDVLGVIDSCKEAVTFKAVRQGGRLNKDLRHFLNQRFQKGSPDHELQQTIRDNLYRHAVPCTTRSPREGEVPGVDYNFLTVKEFLDLEQSGTLLEVGTYEGNYYGTPKPPSQPVSGKVITTDALHSLQSGSKQSTPKRTKSYNDMQNAGIVHAENEEEDDVPEMNSSFTADSGEQEEHTLQETALPPVNSSIIAAPITDPSQKFPQYLPLSAEDNLGPLPENWEMAYTENGEVYFIDHNTKTTSWLDPRCLNKQQKPLEECEDDEGVHTEELDSELELPAGWEKIEDPVYGIYYVDHINRKTQYENPVLEAKRKKQLEQQQQQQQQQQQQQQQQQQQQTEEWTEDHSALVPPVIPNHPPSNPEPAREVPLQGKPFFTRNPSELKGKFIHTKLRKSSRGFGFTVVGGDEPDEFLQIKSLVLDGPAALDGKMETGDVIVSVNDTCVLGHTHAQVVKIFQSIPIGASVDLELCRGYPLPFDPDDPNTSLVTSVAILDKEPIIVNGQETYDSPASHSSKTGKVNGMKDARPSSPADVASNSSHGYPNDTVSLASSIATQPELITVHIVKGPMGFGFTIADSPGGGGQRVKQIVDSPRCRGLKEGDLIVEVNKKNVQALTHNQVVDMLVECPKGSEVTLLVQRGGLPVPKKSPKSQPLERKDSQNSSQHSVSSHRSLHTASPSHSTQVLPEFPPAEAQAPDQTDSSGQKKPDPFKIWAQSRSMYENRPMSPSPASGLSKGEREREINSTNFGECPIPDYQEQDIFLWRKETGFGFRILGGNEPGEPIYIGHIVPLGAADTDGRLRSGDELICVDGTPVIGKSHQLVVQLMQQAAKQGHVNLTVRRKVVFAVPKTENEVPSPASSHHSSNQPASLTEEKRTPQGSQNSLNTVSSGSGSTSGIGSGGGGGSGVVSTVVQPYDVEIRRGENEGFGFVIVSSVSRPEAGTTFGNACVAMPHKIGRIIEGSPADRCGKLKVGDRILAVNGCSITNKSHSDIVNLIKEAGNTVTLRIIPGDESSNATLLTNAEKIATITTTHTPSQQGTQETRNTTKPKQESQFEFKAPQATQEQDFYTVELERGAKGFGFSLRGGREYNMDLYVLRLAEDGPAERCGKMRIGDEILEINGETTKNMKHSRAIELIKNGGRRVRLFLKRGDGSVPEYAMIPPNIAACMRNEKLGEACFYLMGHNQTTTPAATATAPPPVHKVFRK

SEQ ID NO: 50196 - protein, 1462 aa, Homo sapiens
  Payload ID: 10039
  Gene Symbol: MAGI1
  Gene Name: membrane associated guanylate kinase, WW and PDZ domain containing 1
  Uniprot ID: Q96QZ7
  ENSP ID: ENSP00000385450
MSKVIQKKNHWTSRVHECTVKRGPQGELGVTVLGGAEHGEFPYVGAVAAVEAAGLPGGGEGPRLGEGELLLEVQGVRVSGLPRYDVLGVIDSCKEAVTFKAVRQGGRLNKDLRHFLNQRFQKGSPDHELQQTIRDNLYRHAVPCTTRSPREGEVPGVDYNFLTVKEFLDLEQSGTLLEVGTYEGNYYGTPKPPSQPVSGKVITTDALHSLQSGSKQSTPKRTKSYNDMQNAGIVHAENEEEDDVPEMNSSFTADSGEQEEHTLQETALPPVNSSIIAAPITDPSQKFPQYLPLSAEDNLGPLPENWEMAYTENGEVYFIDHNTKTTSWLDPRCLNKQQKPLEECEDDEGVHTEELDSELELPAGWEKIEDPVYGIYYVDHINRKTQYENPVLEAKRKKQLEQQQQQQQQQQQQQQQQQQQQTEEWTEDHSALVPPVIPNHPPSNPEPAREVPLQGKPFFTRNPSELKGKFIHTKLRKSSRGFGFTVVGGDEPDEFLQIKSLVLDGPAALDGKMETGDVIVSVNDTCVLGHTHAQVVKIFQSIPIGASVDLELCRGYPLPFDPDDPNTSLVTSVAILDKEPIIVNGQETYDSPASHSSKTGKVNGMKDARPSSPADVASNSSHGYPNDTVSLASSIATQPELITVHIVKGPMGFGFTIADSPGGGGQRVKQIVDSPRCRGLKEGDLIVEVNKKNVQALTHNQVVDMLVECPKGSEVTLLVQRGGLPVPKKSPKSQPLERKDSQNSSQHSVSSHRSLHTASPSHSTQVLPEFPPAEAQAPDQTDSSGQKKPDPFKIWAQSRSMYENRLPDYQEQDIFLWRKETGFGFRILGGNEPGEPIYIGHIVPLGAADTDGRLRSGDELICVDGTPVIGKSHQLVVQLMQQAAKQGHVNLTVRRKVVFAVPKTENEVPSPASSHHSSNQPASLTEEKRTPQGSQNSLNTVSSGSGSTSGIGSGGGGGSGVVSTVVQPYDVEIRRGENEGFGFVIVSSVSRPEAGTTFGNACVAMPHKIGRIIEGSPADRCGKLKVGDRILAVNGCSITNKSHSDIVNLIKEAGNTVTLRIIPGDESSNATLLTNAEKIATITTTHTPSQQGTQETRNTTKPKQESQFEFKAPQATQEQDFYTVELERGAKGFGFSLRGGREYNMDLYVLRLAEDGPAERCGKMRIGDEILEINGETTKNMKHSRAIELIKNGGRRVRLFLKRGDGSVPEYDPSSDRHGPATGPQGVPEVRAGPDRRQHPSLESSYPPDLHKSSPHGEKRAHARDPKGSREYSRQPNEHHTWNGTSRKPDSGACRPKDRAPEGRRDAQAERAAAANGPKRRSPEKRREGTRSADNTLERREKHEKRRDVSPERRRERSPTRRRDGSPSRRRRSLERLLEQRRSPERRRGGSPERRAKSTDRRRARSPERRRERSLDKRNREDRASHREREEANLKQDAGRSSRHPPEQRRRPYKECSTDLSI

SEQ ID NO: 50197 - protein, 185 aa, Homo sapiens
  Payload ID: 10039
  Gene Symbol: MAGI1
  Gene Name: membrane associated guanylate kinase, WW and PDZ domain containing 1
  ENSP ID: ENSP00000418044
EEEDDVPEMNSSFTADSGEQEEHTLQETALPPVNSSIIAAPITDPSQKFPQYLPLSAEDNLGPLPENWEMAYTENGEVYFIDHNTKTTSWLDPRCLNKQQKPLEECEDDELPAGWEKIEDPVYGIYYVDHINRKTQYENPVLEAKRKKQLEQQQQQQQQQQQQQQQQQQQQTEEWTEDHSALVPP

SEQ ID NO: 50198 - protein, 1131 aa, Homo sapiens
  Payload ID: 10039
  Gene Symbol: MAGI1
  Gene Name: membrane associated guanylate kinase, WW and PDZ domain containing 1
  ENSP ID: ENSP00000418177
AGGSLGTGRRRQRLPATGGTTRSPREGEVPGVDYNFLTVKEFLDLEQSGTLLEVGTYEGNYYGTPKPPSQPVSGKVITTDALHSLQSGSKQSTPKRTKSYNDMQNAGIVHAENEEEDDVPEMNSSFTADSGEQEEHTLQETALPPVNSSIIAAPITDPSQKFPQYLPLSAEDNLGPLPENWEMAYTENGEVYFIDHNTKTTSWLDPRCLNKQQKPLEECEDDEGVHTEELDSELELPAGWEKIEDPVYGIYYVDHINRKTQYENPVLEAKRKKQLEQQQQQQQQQQQQQQQQQQQQTEEWTEDHSALVPPVIPNHPPSNPEPAREVPLQGKPFFTRNPSELKGKFIHTKLRKSSRGFGFTVVGGDEPDEFLQIKSLVLDGPAALDGKMETGDVIVSVNDTCVLGHTHAQVVKIFQSIPIGASVDLELCRGYPLPFDPDDPNTSLVTSVAILDKEPIIVNGQETYDSPASHSSKTGKVNGMKDARPSSPADVASNSSHGYPNDTVSLASSIATQPELITVHIVKGPMGFGFTIADSPGGGGQRVKQIVDSPRCRGLKEGDLIVEVNKKNVQALTHNQVVDMLVECPKGSEVTLLVQRGGLPVPKKSPKSQPLERKDSQNSSQHSVSSHRSLHTASPSHSTQVLPEFPPAEAQAPDQTDSSGQKKPDPFKIWAQSRSMYENRPMSPSPASGLSKGEREREINSTNFGECPIPDYQEQDIFLWRKETGFGFRILGGNEPGEPIYIGHIVPLGAADTDGRLRSGDELICVDGTPVIGKSHQLVVQLMQQAAKQGHVNLTVRRKVVFAVPKTENEVPSPASSHHSSNQPASLTEEKRTPQGSQNSLNTVSSGSGSTSGIGSGGGGGSGVVSTVVQPYDVEIRRGENEGFGFVIVSSVSRPEAGTTFAGNACVAMPHKIGRIIEGSPADRCGKLKVGDRILAVNGCSITNKSHSDIVNLIKEAGNTVTLRIIPGDESSNATLLTNAEKIATITTTHTPSQQGTQETRNTTKPKQESQFEFKAPQATQEQDFYTVELERGAKGFGFSLRGGREYNMDLYVLRLAEDGPAERCGKMRIGDEILEINGETTKNMKHSRAIELIKNGGRRVRLFLKRGDGSVPEYGGSNYENIPSFPGMTP

SEQ ID NO: 50199 - protein, 1136 aa, Homo sapiens
  Payload ID: 10039
  Gene Symbol: MAGI1
  Gene Name: membrane associated guanylate kinase, WW and PDZ domain containing 1
  ENSP ID: ENSP00000418862
  MOD_RES (1)..(1): Any amino acid
XAWWEAVSGSQREGLILAIGLGFAGTTRSPREGEVPGVDYNFLTVKEFLDLEQSGTLLEVGTYEGNYYGTPKPPSQPVSGKVITTDALHSLQSGSKQSTPKRTKSYNDMQNAGIVHAENEEEDDVPEMNSSFTADSGEQEEHTLQETALPPVNSSIIAAPITDPSQKFPQYLPLSAEDNLGPLPENWEMAYTENGEVYFIDHNTKTTSWLDPRCLNKQQKPLEECEDDEGVHTEELDSELELPAGWEKIEDPVYGIYYVDHINRKTQYENPVLEAKRKKQLEQQQQQQQQQQQQQQQQQQQQTEEWTEDHSALVPPVIPNHPPSNPEPAREVPLQGKPFFTRNPSELKGKFIHTKLRKSSRGFGFTVVGGDEPDEFLQIKSLVLDGPAALDGKMETGDVIVSVNDTCVLGHTHAQVVKIFQSIPIGASVDLELCRGYPLPFDPDDPNTSLVTSVAILDKEPIIVNGQETYDSPASHSSKTGKVNGMKDARPSSPADVASNSSHGYPNDTVSLASSIATQPELITVHIVKGPMGFGFTIADSPGGGGQRVKQIVDSPRCRGLKEGDLIVEVNKKNVQALTHNQVVDMLVECPKGSEVTLLVQRGGLPVPKKSPKSQPLERKDSQNSSQHSVSSHRSLHTASPSHSTQVLPEFPPAEAQAPDQTDSSGQKKPDPFKIWAQSRSMYENRPMSPSPASGLSKGEREREINSTNFGECPIPDYQEQDIFLWRKETGFGFRILGGNEPGEPIYIGHIVPLGAADTDGRLRSGDELICVDGTPVIGKSHQLVVQLMQQAAKQGHVNLTVRRKVVFAVPKTENEVPSPASSHHSSNQPASLTEEKRTPQGSQNSLNTVSSGSGSTSGIGSGGGGGSGVVSTVVQPYDVEIRRGENEGFGFVIVSSVSRPEAGTTFGNACVAMPHKIGRIIEGSPADRCGKLKVGDRILAVNGCSITNKSHSDIVNLIKEAGNTVTLRIIPGDESSNATLLTNAEKIATITTTHTPSQQGTQETRNTTKPKQESQFEFKAPQATQEQDFYTVELERGAKGFGFSLRGGREYNMDLYVLRLAEDGPAERCGKMRIGDEILEINGETTKNMKHSRAIELIKNGGRRVRLFLKRGDGSVPEYGGSNYENIPSFPGMTP

SEQ ID NO: 50200 - protein, 1256 aa, Homo sapiens
  Payload ID: 10039
  Gene Symbol: MAGI1
  Gene Name: membrane associated guanylate kinase, WW and PDZ domain containing 1
  Uniprot ID: Q96QZ7
  ENSP ID: ENSP00000420323
MSKVIQKKNHWTSRVHECTVKRGPQGELGVTVLGGAEHGEFPYVGAVAAVEAAGLPGGGEGPRLGEGELLLEVQGVRVSGLPRYDVLGVIDSCKEAVTFKAVRQGGRLNKDLRHFLNQRFQKGSPDHELQQTIRDNLYRHAVPCTTRSPREGEVPGVDYNFLTVKEFLDLEQSGTLLEVGTYEGNYYGTPKPPSQPVSGKVITTDALHSLQSGSKQSTPKRTKSYNDMQNAGIVHAENEEEDDVPEMNSSFTADSGEQEEHTLQETALPPVNSSIIAAPITDPSQKFPQYLPLSAEDNLGPLPENWEMAYTENGEVYFIDHNTKTTSWLDPRCLNKQQKPLEECEDDEGVHTEELDSELELPAGWEKIEDPVYGIYYVDHINRKTQYENPVLEAKRKKQLEQQQQQQQQQQQQQQQQQQQQTEEWTEDHSALVPPVIPNHPPSNPEPAREVPLQGKPFFTRNPSELKGKFIHTKLRKSSRGFGFTVVGGDEPDEFLQIKSLVLDGPAALDGKMETGDVIVSVNDTCVLGHTHAQVVKIFQSIPIGASVDLELCRGYPLPFDPDDPNTSLVTSVAILDKEPIIVNGQETYDSPASHSSKTGKVNGMKDARPSSPADVASNSSHGYPNDTVSLASSIATQPELITVHIVKGPMGFGFTIADSPGGGGQRVKQIVDSPRCRGLKEGDLIVEVNKKNVQALTHNQVVDMLVECPKGSEVTLLVQRGGLPVPKKSPKSQPLERKDSQNSSQHSVSSHRSLHTASPSHSTQVLPEFPPAEAQAPDQTDSSGQKKPDPFKIWAQSRSMYENRPMSPSPASGLSKGEREREINSTNFGECPIPDYQEQDIFLWRKETGFGFRILGGNEPGEPIYIGHIVPLGAADTDGRLRSGDELICVDGTPVIGKSHQLVVQLMQQAAKQGHVNLTVRRKVVFAVPKTENEVPSPASSHHSSNQPASLTEEKRTPQGSQNSLNTVSSGSGSTSGIGSGGGGGSGVVSTVVQPYDVEIRRGENEGFGFVIVSSVSRPEAGTTFAGNACVAMPHKIGRIIEGSPADRCGKLKVGDRILAVNGCSITNKSHSDIVNLIKEAGNTVTLRIIPGDESSNATLLTNAEKIATITTTHTPSQQGTQETRNTTKPKQESQFEFKAPQATQEQDFYTVELERGAKGFGFSLRGGREYNMDLYVLRLAEDGPAERCGKMRIGDEILEINGETTKNMKHSRAIELIKNGGRRVRLFLKRGDGSVPEYGGSNYENIPSFPGMTP

SEQ ID NO: 50201 - protein, 1014 aa, Homo sapiens
  Payload ID: 10039
  Gene Symbol: MAGI1
  Gene Name: membrane associated guanylate kinase, WW and PDZ domain containing 1
  ENSP ID: ENSP00000420796
KQSTPKRTKSYNDMQNAGIVHAENEEEDDVPEMNSSFTADSGEQEEHTLQETALPPVNSSIIAAPITDPSQKFPQYLPLSAEDNLGPLPENWEMAYTENGEVYFIDHNTKTTSWLDPRCLNKQQKPLEECEDDEGVHTEELDSELELPAGWEKIEDPVYGIYYVDHINRKTQYENPVLEAKRKKQLEQQQQQQQQQQQQQQQQQQQQTEEWTEDHSALVPPVIPNHPPSNPEPAREVPLQGKPFFTRNPSELKGKFIHTKLRKSSRGFGFTVVGGDEPDEFLQIKSLVLDGPAALDGKMETGDVIVSVNDTCVLGHTHAQVVKIFQSIPIGASVDLELCRGYPLPFDPDDPNTSLVTSVAILDKEPIIVNGQETYDSPASHSSKTGKVNGMKDARPSSPADVASNSSHGYPNDTVSLASSIATQPELITVHIVKGPMGFGFTIADSPGGGGQRVKQIVDSPRCRGLKEGDLIVEVNKKNVQALTHNQVVDMLVECPKGSEVTLLVQRGGLPVPKKSPKSQPLERKDSQNSSQHSVSSHRSLHTASPSHSTQVLPEFPPAEAQAPDQTDSSGQKKPDPFKIWAQSRSMYENRLPDYQEQDIFLWRKETGFGFRILGGNEPGEPIYIGHIVPLGAADTDGRLRSGDELICVDGTPVIGKSHQLVVQLMQQAAKQGHVNLTVRRKVVFAVPKTENEVPSPASSHHSSNQPASLTEEKRTPQGSQNSLNTVSSGSGSTSGIGSGGGGGSGVVSTVVQPYDVEIRRGENEGFGFVIVSSVSRPEAGTTFAGNACVAMPHKIGRIIEGSPADRCGKLKVGDRILAVNGCSITNKSHSDIVNLIKEAGNTVTLRIIPGDESSNATLLTNAEKIATITTTHTPSQQGTQETRNTTKPKQESQFEFKAPQATQEQDFYTVELERGAKGFGFSLRGGREYNMDLYVLRLAEDGPAERCGKMRIGDEILEINGETTKNMKHSRAIELIKNGGRRVRLFLKRGDGSVPEYGGSNYENIPSFPGMTP

SEQ ID NO: 50202 - protein, 1160 aa, Homo sapiens
  Payload ID: 10039
  Gene Symbol: MAGI1
  Gene Name: membrane associated guanylate kinase, WW and PDZ domain containing 1
  Uniprot ID: Q96QZ7
  ENSP ID: ENSP00000424369
MSKVIQKKNHWTSRVHECTVKRGPQGELGVTVLGGAEHGEFPYVGAVAAVEAAGLPGGGEGPRLGEGELLLEVQGVRVSGLPRYDVLGVIDSCKEAVTFKAVRQGGRLNKDLRHFLNQRFQKGSPDHELQQTIRDNLYRHAVPCTTRSPREGEVPGVDYNFLTVKEFLDLEQSGTLLEVGTYEGNYYGTPKPPSQPVSGKVITTDALHSLQSGSKQSTPKRTKSYNDMQNAGIVHAENEEEDDVPEMNSSFTADSGEQEEHTLQETALPPVNSSIIAAPITDPSQKFPQYLPLSAEDNLGPLPENWEMAYTENGEVYFIDHNTKTTSWLDPRCLNKQQKPLEECEDDEGVHTEELDSELELPAGWEKIEDPVYGIYYVDHINRKTQYENPVLEAKRKKQLEQQQQQQQQQQQQQQQQQQQQTEEWTEDHSALVPPVIPNHPPSNPEPAREVPLQGKPFFTRNPSELKGKFIHTKLRKSSRGFGFTVVGGDEPDEFLQIKSLVLDGPAALDGKMETGDVIVSVNDTCVLGHTHAQVVKIFQSIPIGASVDLELCRGYPLPFDPDDPNTSLVTSVAILDKEPIIVNGQETYDSPASHSSKTGKVNGMKDARPSSPADVASNSSHGYPNDTVSLASSIATQPELITVHIVKGPMGFGFTIADSPGGGGQRVKQIVDSPRCRGLKEGDLIVEVNKKNVQALTHNQVVDMLVECPKGSEVTLLVQRGGLPVPKKSPKSQPLERKDSQNSSQHSVSSHRSLHTASPSHSTQVLPEFPPAEAQAPDQTDSSGQKKPDPFKIWAQSRSMYENRLPDYQEQDIFLWRKETGFGFRILGGNEPGEPIYIGHIVPLGAADTDGRLRSGDELICVDGTPVIGKSHQLVVQLMQQAAKQGHVNLTVRRKVVFAVPKTENEVPSPASSHHSSNQPASLTEEKRTPQGSQNSLNTVSSGSGSTSGIGSGGGGGSGVVSTVVQPYDVEIRRGENEGFGFVIVSSVSRPEAGTTFESSNATLLTNAEKIATITTTHTPSQQGTQETRNTTKPKQESQFEFKAPQATQEQDFYTVELERGAKGFGFSLRGGREYNMDLYVLRLAEDGPAERCGKMRIGDEILEINGETTKNMKHSRAIELIKNGGRRVRLFLKRGDGSVPEYGGSNYENIPSFPGMTP

SEQ ID NO: 50203 - protein, 1155 aa, Homo sapiens
  Payload ID: 10039
  Gene Symbol: MAGI1
  Gene Name: membrane associated guanylate kinase, WW and PDZ domain containing 1
  ENSP ID: ENSP00000477591
MAYTENGEVYFIDHNTKTTSWLDPRCLNKQQKPLEECEDDEGVHTEELDSELELPAGWEKIEDPVYGIYYVDHINRKTQYENPVLEAKRKKQLEQQQQQQQQQQQQQQQQQQQQTEEWTEDHSALVPPVIPNHPPSNPEPAREVPLQGKPFFTRNPSELKGKFIHTKLRKSSRGFGFTVVGGDEPDEFLQIKSLVLDGPAALDGKMETGDVIVSVNDTCVLGHTHAQVVKIFQSIPIGASVDLELCRGYPLPFDPDDPNTSLVTSVAILDKEPIIVNGQETYDSPASHSSKTGKVNGMKDARPSSPADVASNSSHGYPNDTVSLASSIATQPELITVHIVKGPMGFGFTIADSPGGGGQRVKQIVDSPRCRGLKEGDLIVEVNKKNVQALTHNQVVDMLVECPKGSEVTLLVQRGGLPVPKKSPKSQPLERKDSQNSSQHSVSSHRSLHTASPSHSTQVLPEFPPAEAQAPDQTDSSGQKKPDPFKIWAQSRSMYENRLPDYQEQDIFLWRKETGFGFRILGGNEPGEPIYIGHIVPLGAADTDGRLRSGDELICVDGTPVIGKSHQLVVQLMQQAAKQGHVNLTVRRKVVFAVPKTENEVPSPASSHHSSNQPASLTEEKRTPQGSQNSLNTVSSGSGSTSGIGSGGGGGSGVVSTVVQPYDVEIRRGENEGFGFVIVSSVSRPEAGTTFGNACVAMPHKIGRIIEGSPADRCGKLKVGDRILAVNGCSITNKSHSDIVNLIKEAGNTVTLRIIPGDESSNATLLTNAEKIATITTTHTPSQQGTQETRNTTKPKQESQFEFKAPQATQEQDFYTVELERGAKGFGFSLRGGREYNMDLYVLRLAEDGPAERCGKMRIGDEILEINGETTKNMKHSRAIELIKNGGRRVRLFLKRGDGSVPEYDPSSDRHGPATGPQGVPEVRAGPDRRQHPSLESSYPPDLHKSSPHGEKRAHARDPKGSREYSRQPNEHHTWNGTSRKPDSGACRPKDRAPEGRRDAQAERAAAANGPKRRSPEKRREGTRSADNTLERREKHEKRRDVSPERRRERSPTRRRDGSPSRRRRSLERLLEQRRSPERRRGGSPERRAKSTDRRRARSPERRRERSLDKRNREDRASHREREEANLKQDAGRSSRHPPEQRRRPYKECSTDLSI

SEQ ID NO: 50204 - protein, 980 aa, Homo sapiens
  Payload ID: 10039
  Gene Symbol: MAGI1
  Gene Name: membrane associated guanylate kinase, WW and PDZ domain containing 1
  ENSP ID: ENSP00000480920
MAYTENGEVYFIDHNTKTTSWLDPRCLNKQQKPLEECEDDEGVHTEELDSELELPAGWEKIEDPVYGIYYVDHINRKTQYENPVLEAKRKKQLEQQQQQQQQQQQQQQQQQQQQTEEWTEDHSALVPPVIPNHPPSNPEPAREVPLQGKPFFTRNPSELKGKFIHTKLRKSSRGFGFTVVGGDEPDEFLQIKSLVLDGPAALDGKMETGDVIVSVNDTCVLGHTHAQVVKIFQSIPIGASVDLELCRGYPLPFDPDDPNTSLVTSVAILDKEPIIVNGQETYDSPASHSSKTGKVNGMKDARPSSPADVASNSSHGYPNDTVSLASSIATQPELITVHIVKGPMGFGFTIADSPGGGGQRVKQIVDSPRCRGLKEGDLIVEVNKKNVQALTHNQVVDMLVECPKGSEVTLLVQRGGLPVPKKSPKSQPLERKDSQNSSQHSVSSHRSLHTASPSHSTQVLPEFPPAEAQAPDQTDSSGQKKPDPFKIWAQSRSMYENRPMSPSPASGLSKGEREREINSTNFGECPIPDYQEQDIFLWRKETGFGFRILGGNEPGEPIYIGHIVPLGAADTDGRLRSGDELICVDGTPVIGKSHQLVVQLMQQAAKQGHVNLTVRRKVVFAVPKTENEVPSPASSHHSSNQPASLTEEKRTPQGSQNSLNTVSSGSGSTSGIGSGGGGGSGVVSTVVQPYDVEIRRGENEGFGFVIVSSVSRPEAGTTFGNACVAMPHKIGRIIEGSPADRCGKLKVGDRILAVNGCSITNKSHSDIVNLIKEAGNTVTLRIIPGDESSNATLLTNAEKIATITTTHTPSQQGTQETRNTTKPKQESQFEFKAPQATQEQDFYTVELERGAKGFGFSLRGGREYNMDLYVLRLAEDGPAERCGKMRIGDEILEINGETTKNMKHSRAIELIKNGGRRVRLFLKRGDGSVPEYAMIPPNIAACMRNEKLGEACFYLMGHNQTTTPAATATAPPPVHKVFRK

SEQ ID NO: 50205 - protein, 1155 aa, Homo sapiens; identical to SEQ ID NO: 50203
  Payload ID: 10039
  Gene Symbol: MAGI1
  Gene Name: membrane associated guanylate kinase, WW and PDZ domain containing 1
  ENSP ID: ENSP00000489105

SEQ ID NO: 50206 - protein, 1160 aa, Homo sapiens; identical to SEQ ID NO: 50202
  Payload ID: 10039
  Gene Symbol: MAGI1
  Gene Name: membrane associated guanylate kinase, WW and PDZ domain containing 1
  ENSP ID: ENSP00000489322

SEQ ID NO: 50207 - protein, 1131 aa, Homo sapiens; identical to SEQ ID NO: 50198
  Payload ID: 10039
  Gene Symbol: MAGI1
  Gene Name: membrane associated guanylate kinase, WW and PDZ domain containing 1
  ENSP ID: ENSP00000489326

SEQ ID NO: 50208 - protein, 1256 aa, Homo sapiens; identical to SEQ ID NO: 50200
  Payload ID: 10039
  Gene Symbol: MAGI1
  Gene Name: membrane associated guanylate kinase, WW and PDZ domain containing 1
  ENSP ID: ENSP00000489391

SEQ ID NO: 50209 - protein, 1287 aa, Homo sapiens; identical to SEQ ID NO: 50195
  Payload ID: 10039
  Gene Symbol: MAGI1
  Gene Name: membrane associated guanylate kinase, WW and PDZ domain containing 1
  ENSP ID: ENSP00000489393

SEQ ID NO: 50210 - protein, 1462 aa, Homo sapiens; identical to SEQ ID NO: 50196
  Payload ID: 10039
  Gene Symbol: MAGI1
  Gene Name: membrane associated guanylate kinase, WW and PDZ domain containing 1
  ENSP ID: ENSP00000489444

SEQ ID NO: 50211 - protein, 185 aa, Homo sapiens; identical to SEQ ID NO: 50197
  Payload ID: 10039
  Gene Symbol: MAGI1
  Gene Name: membrane associated guanylate kinase, WW and PDZ domain containing 1
  ENSP ID: ENSP00000489449

SEQ ID NO: 50212 - protein, 1014 aa, Homo sapiens; identical to SEQ ID NO: 50201
  Payload ID: 10039
  Gene Symbol: MAGI1
  Gene Name: membrane associated guanylate kinase, WW and PDZ domain containing 1
  ENSP ID: ENSP00000489478

SEQ ID NO: 50213 - protein, 980 aa, Homo sapiens; identical to SEQ ID NO: 50204
  Payload ID: 10039
  Gene Symbol: MAGI1
  Gene Name: membrane associated guanylate kinase, WW and PDZ domain containing 1
  ENSP ID: ENSP00000489513

SEQ ID NO: 50214 - protein, 1136 aa, Homo sapiens; identical to SEQ ID NO: 50199
  Payload ID: 10039
  Gene Symbol: MAGI1
  Gene Name: membrane associated guanylate kinase, WW and PDZ domain containing 1
  ENSP ID: ENSP00000489580
  MOD_RES (1)..(1): Any amino acid

SEQ ID NO: 50215 - protein, 1455 aa, Homo sapiens
  Payload ID: 10040
  Gene Symbol: MAGI2
  Gene Name: membrane associated guanylate kinase, WW and PDZ domain containing 2
  Uniprot ID: Q86UL8
  ENSP ID: ENSP00000346151
MSKSLKKKSHWTSKVHESVIGRNPEGQLGFELKGGAENGQFPYLGEVKPGKVAYESGSKLVSEELLLEVNETPVAGLTIRDVLAVIKHCKDPLRLKCVKQGGIVDKDLRHYLNLRFQKGSVDHELQQIIRDNLYLRTVPCTTRPHKEGEVPGVDYIFITVEDFMELEKSGALLESGTYEDNYYGTPKPPAEPAPLLLNVTDQILPGATPSAEGKRKRNKSVSNMEKASIEPPEEEEEERPVVNGNGVVVTPESSEHEDKSAGASGEMPSQPYPAPVYSQPEELKEQMDDTKPTKPEDNEEPDPLPDNWEMAYTEKGEVYFIDHNTKTTSWLDPRLAKKAKPPEECKENELPYGWEKIDDPIYGTYYVDHINRRTQFENPVLEAKRKLQQHNMPHTELGTKPLQAPGFREKPLFTRDASQLKGTFLSTTLKKSNMGFGFTIIGGDEPDEFLQVKSVIPDGPAAQDGKMETGDVIVYINEVCVLGHTHADVVKLFQSVPIGQSVNLVLCRGYPLPFDPEDPANSMVPPLAIMERPPPVMVNGRHNYETYLEYISRTSQSVPDITDRPPHSLHSMPTDGQLDGTYPPPVHDDNVSMASSGATQAELMTLTIVKGAQGFGFTIADSPTGQRVKQILDIQGCPGLCEGDLIVEINQQNVQNLSHTEVVDILKDCPIGSETSLIIHRGGFFSPWKTPKPIMDRWENQGSPQTSLSAPAIPQNLPFPPALHRSSFPDSTEAFDPRKPDPYELYEKSRAIYESRQQVPPRTSFRMDSSGPDYKELDVHLRRMESGFGFRILGGDEPGQPILIGAVIAMGSADRDGRLHPGDELVYVDGIPVAGKTHRYVIDLMHHAARNGQVNLTVRRKVLCGGEPCPENGRSPGSVSTHHSSPRSDYATYTNSNHAAPSSNASPPEGFASHSLQTSDVVIHRKENEGFGFVIISSLNRPESGSTITVPHKIGRIIDGSPADRCAKLKVGDRILAVNGQSIINMPHADIVKLIKDAGLSVTLRIIPQEELNSPTSAPSSEKQSPMAQQSPLAQQSPLAQPSPATPNSPIAQPAPPQPLQLQGHENSYRSEVKARQDVKPDIRQPPFTDYRQPPLDYRQPPGGDYQQPPPLDYRQPPLLDYRQHSPDTRQYPLSDYRQPQDFDYFTVDMEKGAKGFGFSIRGGREYKMDLYVLRLAEDGPAIRNGRMRVGDQIIEINGESTRDMTHARAIELIKSGGRRVRLLLKRGTGQVPEYDEPAPWSSPAAAAPGLPEVGVSLDDGLAPFSPSHPAPPSDPSHQISPGPTWDIKREHDVRKPKELSACGQKKQRLGEQRERSASPQRAARPRLEEAPGGQGRPEAGRPASEARAPGLAAADAADAARAGGKEAPRAAAGSELCRREGPGAAPAFAGPGGGGSGALEAEGRAGARAGPRPGPRPPGGAPARKAAVAPGPWKVPGSDKLPSVLKPGASAASR

SEQ ID NO: 50216 - protein, 1441 aa, Homo sapiens
  Payload ID: 10040
  Gene Symbol: MAGI2
  Gene Name: membrane associated guanylate kinase, WW and PDZ domain containing 2
  Uniprot ID: Q86UL8
  ENSP ID: ENSP00000405766
MSKSLKKKSHWTSKVHESVIGRNPEGQLGFELKGGAENGQFPYLGEVKPGKVAYESGSKLVSEELLLEVNETPVAGLTIRDVLAVIKHCKDPLRLKCVKQGGIVDKDLRHYLNLRFQKGSVDHELQQIIRDNLYLRTVPCTTRPHKEGEVPGVDYIFITVEDFMELEKSGALLESGTYEDNYYGTPKPPAEPAPLLLNVTDQILPGATPSAEGKRKRNKSVSNMEKASIEPPEEEEEERPVVNGNGVVVTPESSEHEDKSAGASGEMPSQPYPAPVYSQPEELKEQMDDTKPTKPEDNEEPDPLPDNWEMAYTEKGEVYFIDHNTKTTSWLDPRLAKKAKPPEECKENELPYGWEKIDDPIYGTYYVDHINRRTQFENPVLEAKRKLQQHNMPHTELGTKPLQAPGFREKPLFTRDASQLKGTFLSTTLKKSNMGFGFTIIGGDEPDEFLQVKSVIPDGPAAQDGKMETGDVIVYINEVCVLGHTHADVVKLFQSVPIGQSVNLVLCRGYPLPFDPEDPANSMVPPLAIMERPPPVMVNGRHNYETYLEYISRTSQSVPDITDRPPHSLHSMPTDGQLDGTYPPPVHDDNVSMASSGATQAELMTLTIVKGAQGFGFTIADSPTGQRVKQILDIQGCPGLCEGDLIVEINQQNVQNLSHTEVVDILKDCPIGSETSLIIHRGGFFSPWKTPKPIMDRWENQGSPQTSLSAPAIPQNLPFPPALHRSSFPDSTEAFDPRKPDPYELYEKSRAIYESRRPDYKELDVHLRRMESGFGFRILGGDEPGQPILIGAVIAMGSADRDGRLHPGDELVYVDGIPVAGKTHRYVIDLMHHAARNGQVNLTVRRKVLCGGEPCPENGRSPGSVSTHHSSPRSDYATYTNSNHAAPSSNASPPEGFASHSLQTSDVVIHRKENEGFGFVIISSLNRPESGSTITVPHKIGRIIDGSPADRCAKLKVGDRILAVNGQSIINMPHADIVKLIKDAGLSVTLRIIPQEELNSPTSAPSSEKQSPMAQQSPLAQQSPLAQPSPATPNSPIAQPAPPQPLQLQGHENSYRSEVKARQDVKPDIRQPPFTDYRQPPLDYRQPPGGDYQQPPPLDYRQPPLLDYRQHSPDTRQYPLSDYRQPQDFDYFTVDMEKGAKGFGFSIRGGREYKMDLYVLRLAEDGPAIRNGRMRVGDQIIEINGESTRDMTHARAIELIKSGGRRVRLLLKRGTGQVPEYDEPAPWSSPAAAAPGLPEVGVSLDDGLAPFSPSHPAPPSDPSHQISPGPTWDIKREHDVRKPKELSACGQKKQRLGEQRERSASPQRAARPRLEEAPGGQGRPEAGRPASEARAPGLAAADAADAARAGGKEAPRAAAGSELCRREGPGAAPAFAGPGGGGSGALEAEGRAGARAGPRPGPRPPGGAPARKAAVAPGPWKVPGSDKLPSVLKPGASAASR

SEQ ID NO: 50217 - protein, 1283 aa, Homo sapiens
  Payload ID: 10040
  Gene Symbol: MAGI2
  Gene Name: membrane associated guanylate kinase, WW and PDZ domain containing 2
  ENSP ID: ENSP00000428389
MSKSLKKKSHWTSKVHESVIGRNPEGQLGFELKGGAENGQFPYLGEVKPGKVAYESGSKLVSEELLLEVNETPVAGLTIRDVLAVIKHCKDPLRLKCVKQGGIVDKDLRHYLNLRFQKGSVDHELQQIIRDNLYLRTVPCTTRPHKEGEVPGVDYIFITVEDFMELEKSGALLESGTYEDNYYGTPKPPAEPAPLLLNVTDQILPGATPSAEGKRKRNKSVSNMEKASIEPPEEEEEERPVVNGNGVVVTPESSEHEDKSAGASGEMPSQPYPAPVYSQPEELKEQMDDTKPTKPEDNEEPDPLPDNWEMAYTEKGEVYFIDHNTKTTSWLDPRLAKKAKPPEECKENELPYGWEKIDDPIYGTYYVDHINRRTQFENPVLEAKRKLQQHNMPHTELGTKPLQAPGFREKPLFTRDASQLKGTFLSTTLKKSNMGFGFTIIGGDEPDEFLQVKSVIPDGPAAQDGKMETGDVIVYINEVCVLGHTHADVVKLFQSVPIGQSVNLVLCRGYPLPFDPEDPANSMVPPLAIMERPPPVMVNGRHNYETYLEYISRTSQSVPDITDRPPHSLHSMPTDGQLDGTYPPPVHDDNVSMASSGATQAELMTLTIVKGAQGFGFTIADSPTGQRVKQILDIQGCPGLCEGDLIVEINQQNVQNLSHTEVVDILKDCPIGSETSLIIHRGGFFSPWKTPKPIMDRWENQGSPQTSLSAPAIPQNLPFPPALHRSSFPDSTEAFDPRKPDPYELYEKSRAIYESRQQVPPRTSFRMDSSGPDYKELDVHLRRMESGFGFRILGGDEPGQPILIGAVIAMGSADRDGRLHPGDELVYVDGIPVAGKTHRYVIDLMHHAARNGQVNLTVRRKVLCGGEPCPENGRSPGSVSTHHSSPRSDYATYTNSNHAAPSSNASPPEGFASHSLQTSDVVIHRKENEGFGFVIISSLNRPESGSTITVPHKIGRIIDGSPADRCAKLKVGDRILAVNGQSIINMPHADIVKLIKDAGLSVTLRIIPQEELNSPTSAPSSEKQSPMAQQSPLAQQSPLAQPSPATPNSPIAQPAPPQPLQLQGHENSYRSEVKARQDVKPDIRQPPFTDYRQPPLDYRQPPGGDYQQPPPLDYRQPPLLDYRQHSPDTRQYPLSDYRQPQDFDYFTVDMEKGAKGFGFSIRGGREYKMDLYVLRLAEDGPAIRNGRMRVGDQIIEINGESTRDMTHARAIELIKSGGRRVRLLLKRGTGQVPEYGMVPSSLSMCMKSDKHGSPYFYLLGHPKDTTNPPPGVLPLPPPQVCRK

SEQ ID NO: 50218 - protein, 1303 aa, Homo sapiens [sequence omitted]

SEQ ID NO: 50219 - protein, 555 aa, Homo sapiens
  Payload ID: 10040
  Gene Symbol: MAGI2
  Gene Name: membrane associated guanylate kinase, WW and PDZ domain containing 2
  ENSP ID: ENSP00000485970
MELEKSGALLESGTYEDNYYGTPKPPAEPAPLLLNVTDQILPGATPSAEGKRKRNKSVSNMEKASIEPPEEEEEERPVVNGNGVVVTPESSEHEDKSAGASGEMPSQPYPAPVYSQPEELKEQMDDTKPTKPEDNEEPDPLPDNWEMAYTEKGEVYFIDHNTKTTSWLDPRLAKKAKPPEECKENELPYGWEKIDDPIYGTYYVDHINRRTQFENPVLEAKRKLQQHNMPHTELGTKPLQAPGFREKPLFTRDASQLKGTFLSTTLKKSNMGFGFTIIGGDEPDEFLQVKSVIPDGPAAQDGKMETGDVIVYINEVCVLGHTHADVVKLFQSVPIGQSVNLVLCRGYPLPFDPEDPANSMVPPLAIMERPPPVMVNGRHNYETYLEYISRTSQSVPDITDRPPHSLHSMPTDGQLDGTYPPPVHDDNVSMASSGATQAELMTLTIVKGAQGFGFTIADSPTGQRVKQILDIQGCPGLCEGDLIVEINQQNVQNLSHTEVVDILKDCPIGSETSLIIHRGGKTNTGSAIKYVGKIVGSFNNIVKMQISLELNEIIL

SEQ ID NO: 50220 - protein, 1120 aa, Homo sapiens
  Payload ID: 10040
  Gene Symbol: MAGI2
  Gene Name: membrane associated guanylate kinase, WW and PDZ domain containing 2
  ENSP ID: ENSP00000486131
MELEKSGALLESGTYEDNYYGTPKPPAEPAPLLLNVTDQILPGATPSAEGKRKRNKSVSNMEKASIEPPEEEEEERPVVNGNGVVVTPESSEHEDKSAGASGEMPSQPYPAPVYSQPEELKEQMDDTKPTKPEDNEEPDPLPDNWEMAYTEKGEVYFIDHNTKTTSWLDPRLAKKAKPPEECKENELPYGWEKIDDPIYGTYYVDHINRRTQFENPVLEAKRKLQQHNMPHTELGTKPLQAPGFREKPLFTRDASQLKGTFLSTTLKKSNMGFGFTIIGGDEPDEFLQVKSVIPDGPAAQDGKMETGDVIVYINEVCVLGHTHADVVKLFQSVPIGQSVNLVLCRGYPLPFDPEDPANSMVPPLAIMERPPPVMVNGRHNYETYLEYISRTSQSVPDITDRPPHSLHSMPTDGQLDGTYPPPVHDDNVSMASSGATQAELMTLTIVKGAQGFGFTIADSPTGQRVKQILDIQGCPGLCEGDLIVEINQQNVQNLSHTEVVDILKDCPIGSETSLIIHRGGFFSPWKTPKPIMDRWENQGSPQTSLSAPAIPQNLPFPPALHRSSFPDSTEAFDPRKPDPYELYEKSRAIYESRQQVPPRTSFRMDSSGPDYKELDVHLRRMESGFGFRILGGDEPGQPILIGAVIAMGSADRDGRLHPGDELVYVDGIPVAGKTHRYVIDLMHHAARNGQVNLTVRRKVLCGGEPCPENGRSPGSVSTHHSSPRSDYATYTNSNHAAPSSNASPPEGFASHSLQTSDVVIHRKENEGFGFVIISSLNRPESGSTITVPHKIGRIIDGSPADRCAKLKVGDRILAVNGQSIINMPHADIVKLIKDAGLSVTLRIIPQEELNSPTSAPSSEKQSPMAQQSPLAQQSPLAQPSPATPNSPIAQPAPPQPLQLQGHENSYRSEVKARQDVKPDIRQPPFTDYRQPPLDYRQPPGGDYQQPPPLDYRQPPLLDYRQHSPDTRQYPLSDYRQPQDFDYFTVDMEKGAKGFGFSIRGGREYKMDLYVLRLAEDGPAIRNGRMRVGDQIIEINGESTRDMTHARAIELIKSGGRRVRLLLKRGTGQVPEYGMVPSSLSMCMKSDKHGSPYFYLLGHPKDTTNPPPGVLPLPPPQVCRK

SEQ ID NO: 50221 - protein, 238 aa, Homo sapiens
  Payload ID: 10040
  Gene Symbol: MAGI2
  Gene Name: membrane associated guanylate kinase, WW and PDZ domain containing 2
  ENSP ID: ENSP00000486154
IMDRWENQGSPQTSLSAPAIPQNLPFPPALHRSSFPDSTEAFDPRKPDPYELYEKSRAIYEKQVPPRTSFRMDSSGPDYKELDVHLRRMESGFGFRILGGDEPGQPILIGAVIAMGSADRDGRLHPGDELVYVDGIPVAGKTHRYVIDLMHHAARNGQVNLTVRRKVLCGGEPCPENGRSPGSVSTHHSSPRSDYATYTNSNHAAPSSNASPPEGFASHSLQTSDVVIHRKENEGFGF

SEQ ID NO: 50222 - protein, 183 aa, Homo sapiens
  Payload ID: 10040
  Gene Symbol: MAGI2
  Gene Name: membrane associated guanylate kinase, WW and PDZ domain containing 2
  ENSP ID: ENSP00000486379
RMESGFGFRILGGDEPGQPILIGAVIAMGSADRDGRLHPGDELVYVDGIPVAGKTHRYVIDLMHHAARNGQVNLTVRRKVLCGGEPCPENGRSPGSVSTHHSSPRSDYATYTNSNHAAPSSNASPPEGFASHSLQTSDVVIHRKENEGFGFVIISSLNRPESGSTIIFQSSFSSLQAVEQKRG

SEQ ID NO: 50223 - protein, 861 aa, Homo sapiens
  Payload ID: 10040
  Gene Symbol: MAGI2
  Gene Name: membrane associated guanylate kinase, WW and PDZ domain containing 2
  ENSP ID: ENSP00000486774
MPHTELGTKPLQAPGFREKPLFTRDASQLKGTFLSTTLKKSNMGFGFTIIGGDEPDEFLQVKSVIPDGPAAQDGKMETGDVIVYINEVCVLGHTHADVVKLFQSVPIGQSVNLVLCRGYPLPFDPEDPANSMVPPLAIMERPPPVMVNGRHNYETYLEYISRTSQSVPDITDRPPHSLHSMPTDGQLDGTYPPPVHDDNVSMASSGATQAELMTLTIVKGAQGFGFTIADSPTGQRVKQILDIQGCPGLCEGDLIVEINQQNVQNLSHTEVVDILKDCPIGSETSLIIHRGGFFSPWKTPKPIMDRWENQGSPQTSLSAPAIPQNLPFPPALHRSSFPDSTEAFDPRKPDPYELYEKSRAIYESPDYKELDVHLRRMESGFGFRILGGDEPGQPILIGAVIAMGSADRDGRLHPGDELVYVDGIPVAGKTHRYVIDLMHHAARNGQVNLTVRRKVLCGGEPCPENGRSPGSVSTHHSSPRSDYATYTNSNHAAPSSNASPPEGFASHSLQTSDVVIHRKENEGFGFVIISSLNRPESGSTITVPHKIGRIIDGSPADRCAKLKVGDRILAVNGQSIINMPHADIVKLIKDAGLSVTLRIIPQEELNSPTSAPSSEKQSPMAQQSPLAQQSPLAQPSPATPNSPIAQPAPPQPLQLQGHENSYRSEVKARQDVKPDIRQPPFTDYRQPPLDYRQPPGGDYQQPPPLDYRQPPLLDYRQHSPDTRQYPLSDYRQPQDFDYFTVDMEKGAKGFGFSIRGGREYKMDLYVLRLAEDGPAIRNGRMRVGDQIIEINGESTRDMTHARAIELIKSGGRRVRLLLKRGTGQVPEYGTFHVLIHPFALPSVNHKCLWLFIKLHQFSTST

SEQ ID NO: 50224 - protein, 105 aa, Homo sapiens
  Payload ID: 10040
  Gene Symbol: MAGI2
  Gene Name: membrane associated guanylate kinase, WW and PDZ domain containing 2
  ENSP ID: ENSP00000487001
HAARNGQVNLTVRRKVLCGGEPCPENGRSPGSVSTHHSSPRSDYATYTNSNHAAPSSNASPPEGFASHSLQTSDVVIHRKENEGFGFVIISSLNRPESGSTISKC

SEQ ID NO: 50225 - protein, 495 aa, Homo sapiens
  Payload ID: 10040
  Gene Symbol: MAGI2
  Gene Name: membrane associated guanylate kinase, WW and PDZ domain containing 2
  ENSP ID: ENSP00000487435
MEKASIEPPEEEEEERPVVNGNGVVVTPESSEHEDKSAGASGEMPSQPYPAPVYSQPEELKEQMDDTKPTKPEDNEEPDPLPDNWEMAYTEKGEVYFIDHNTKTTSWLDPRLAKKAKPPEECKENELPYGWEKIDDPIYGTYYVDHINRRTQFENPVLEAKRKLQQHNMPHTELGTKPLQAPGFREKPLFTRDASQLKGTFLSTTLKKSNMGFGFTIIGGDEPDEFLQVKSVIPDGPAAQDGKMETGDVIVYINEVCVLGHTHADVVKLFQSVPIGQSVNLVLCRGYPLPFDPEDPANSMVPPLAIMERPPPVMVNGRHNYETYLEYISRTSQSVPDITDRPPHSLHSMPTDGQLDGTYPPPVHDDNVSMASSGATQAELMTLTIVKGAQGFGFTIADSPTGQRVKQILDIQGCPGLCEGDLIVEINQQNVQNLSHTEVVDILKDCPIGSETSLIIHRGGKTNTGSAIKYVGKIVGSFNNIVKMQISLELNEIIL

SEQ ID NO: 50226 - protein, 1106 aa, Homo sapiens
  Payload ID: 10040
  Gene Symbol: MAGI2
  Gene Name: membrane associated guanylate kinase, WW and PDZ domain containing 2
  ENSP ID: ENSP00000487448
MELEKSGALLESGTYEDNYYGTPKPPAEPAPLLLNVTDQILPGATPSAEGKRKRNKSVSNMEKASIEPPEEEEEERPVVNGNGVVVTPESSEHEDKSAGASGEMPSQPYPAPVYSQPEELKEQMDDTKPTKPEDNEEPDPLPDNWEMAYTEKGEVYFIDHNTKTTSWLDPRLAKKAKPPEECKENELPYGWEKIDDPIYGTYYVDHINRRTQFENPVLEAKRKLQQHNMPHTELGTKPLQAPGFREKPLFTRDASQLKGTFLSTTLKKSNMGFGFTIIGGDEPDEFLQVKSVIPDGPAAQDGKMETGDVIVYINEVCVLGHTHADVVKLFQSVPIGQSVNLVLCRGYPLPFDPEDPANSMVPPLAIMERPPPVMVNGRHNYETYLEYISRTSQSVPDITDRPPHSLHSMPTDGQLDGTYPPPVHDDNVSMASSGATQAELMTLTIVKGAQGFGFTIADSPTGQRVKQILDIQGCPGLCEGDLIVEINQQNVQNLSHTEVVDILKDCPIGSETSLIIHRGGFFSPWKTPKPIMDRWENQGSPQTSLSAPAIPQNLPFPPALHRSSFPDSTEAFDPRKPDPYELYEKSRAIYESRRPDYKELDVHLRRMESGFGFRILGGDEPGQPILIGAVIAMGSADRDGRLHPGDELVYVDGIPVAGKTHRYVIDLMHHAARNGQVNLTVRRKVLCGGEPCPENGRSPGSVSTHHSSPRSDYATYTNSNHAAPSSNASPPEGFASHSLQTSDVVIHRKENEGFGFVIISSLNRPESGSTITVPHKIGRIIDGSPADRCAKLKVGDRILAVNGQSIINMPHADIVKLIKDAGLSVTLRIIPQEELNSPTSAPSSEKQSPMAQQSPLAQQSPLAQPSPATPNSPIAQPAPPQPLQLQGHENSYRSEVKARQDVKPDIRQPPFTDYRQPPLDYRQPPGGDYQQPPPLDYRQPPLLDYRQHSPDTRQYPLSDYRQPQDFDYFTVDMEKGAKGFGFSIRGGREYKMDLYVLRLAEDGPAIRNGRMRVGDQIIEINGESTRDMTHARAIELIKSGGRRVRLLLKRGTGQVPEYGMVPSSLSMCMKSDKHGSPYFYLLGHPKDTTNPPPGVLPLPPPQVCRK

SEQ ID NO: 50227 - protein, 1317 aa, Homo sapiens [sequence omitted]

SEQ ID NO: 50228 - protein, 75 aa, Homo sapiens
  Payload ID: 10040
  Gene Symbol: MAGI2
  Gene Name: membrane associated guanylate kinase, WW and PDZ domain containing 2
  ENSP ID: ENSP00000489533
MPHTELGTKPLQAPGFRVDSSSWTLPRPKSIRPRAAPERSRSVNDLSYYQRDPAGRPWLFEKPLFTRDASQLKGT

SEQ ID NO: 50229 - protein, 1481 aa, Homo sapiens
  Payload ID: 10041
  Gene Symbol: MAGI3
  Gene Name: membrane associated guanylate kinase, WW and PDZ domain containing 3
  Uniprot ID: Q5TCQ9
  ENSP ID: ENSP00000304604
MSKTLKKKKHWLSKVQECAVSWAGPPGDFGAEIRGGAERGEFPYLGRLREEPGGGTCCVVSGKAPSPGDVLLEVNGTPVSGLTNRDTLAVIRHFREPIRLKTVKPGKVINKDLRHYLSLQFQKGSIDHKLQQVIRDNLYLRTIPCTTRAPRDGEVPGVDYNFISVEQFKALEESGALLESGTYDGNFYGTPKPPAEPSPFQPDPVDQVLFDNEFDAESQRKRTTSVSKMERMDSSLPEEEEDEDKEAINGSGNAENRERHSESSDWMKTVPSYNQTNSSMDFRNYMMRDETLEPLPKNWEMAYTDTGMIYFIDHNTKTTTWLDPRLCKKAKAPEDCEDGELPYGWEKIEDPQYGTYYVDHLNQKTQFENPVEEAKRKKQLGQVEIGSSKPDMEKSHFTRDPSQLKGVLVRASLKKSTMGFGFTIIGGDRPDEFLQVKNVLKDGPAAQDGKIAPGDVIVDINGNCVLGHTHADVVQMFQLVPVNQYVNLTLCRGYPLPDDSEDPVVDIVAATPVINGQSLTKGETCMNPQDFKPGAMVLEQNGKSGHTLTGDGLNGPSDASEQRVSMASSGSSQPELVTIPLIKGPKGFGFAIADSPTGQKVKMILDSQWCQGLQKGDIIKEIYHQNVQNLTHLQVVEVLKQFPVGADVPLLILRGGPPSPTKTAKMKTDKKENAGSLEAINEPIPQPMPFPPSIIRSGSPKLDPSEVYLKSKTLYEDKPPNTKDLDVFLRKQESGFGFRVLGGDGPDQSIYIGAIIPLGAAEKDGRLRAADELMCIDGIPVKGKSHKQVLDLMTTAARNGHVLLTVRRKIFYGEKQPEDDSSQAFISTQNGSPRLNRAEVPARPAPQEPYDVVLQRKENEGFGFVILTSKNKPPPGVIPHKIGRVIEGSPADRCGKLKVGDHISAVNGQSIVELSHDNIVQLIKDAGVTVTLTVIAEEEHHGPPSGTNSARQSPALQHRPMGQSQANHIPGDRSALEGEIGKDVSTSYRHSWSDHKHLAQPDTAVISVVGSRHNQNLGCYPVELERGPRGFGFSLRGGKEYNMGLFILRLAEDGPAIKDGRIHVGDQIVEINGEPTQGITHTRAIELIQAGGNKVLLLLRPGTGLIPDHGDWDINNPSSSNVIYDEQSPLPPSSHFASIFEESHVPVIEESLRVQICEKAEELKDIVPEKKSTLNENQPEIKHQSLLQKNVSKRDPPSSHGHSNKKNLLKVENGVTRRGRSVSPKKPASQHSEEHLDKIPSPLKNNPKRRPRDQSLSPSKGENKSCQVSTRAGSGQDQCRKSRGRSASPKKQQKIEGSKAPSNAEAKLLEGKSRRIAGYTGSNAEQIPDGKEKSDVIRKDAKQNQLEKSRTRSPEKKIKRMVEKSLPSKMTNKTTSKEVSENEKGKKVTTGETSSSNDKIGENVQLSEKRLKQEPEEKVVSNKTEDHKGKELEAADKNKETGRFKPESSSPVKKTLITPGPWKVPSGNKVTGTIGMAEKRQ

SEQ ID NO: 50230 - protein, 1125 aa, Homo sapiens
  Payload ID: 10041
  Gene Symbol: MAGI3
  Gene Name: membrane associated guanylate kinase, WW and PDZ domain containing 3
  Uniprot ID: Q5TCQ9
  ENSP ID: ENSP00000358624
MSKTLKKKKHWLSKVQECAVSWAGPPGDFGAEIRGGAERGEFPYLGRLREEPGGGTCCVVSGKAPSPGDVLLEVNGTPVSGLTNRDTLAVIRHFREPIRLKTVKPGKVINKDLRHYLSLQFQKGSIDHKLQQVIRDNLYLRTIPCTTRAPRDGEVPGVDYNFISVEQFKALEESGALLESGTYDGNFYGTPKPPAEPSPFQPDPVDQVLFDNEFDAESQRKRTTSVSKMERMDSSLPEEEEDEDKEAINGSGNAENRERHSESSDWMKTVPSYNQTNSSMDFRNYMMRDETLEPLPKNWEMAYTDTGMIYFIDHNTKTTTWLDPRLCKKAKAPEDCEDGELPYGWEKIEDPQYGTYYVDHLNQKTQFENPVEEAKRKKQLGQVEIGSSKPDMEKSHFTRDPSQLKGVLVRASLKKSTMGFGFTIIGGDRPDEFLQVKNVLKDGPAAQDGKIAPGDVIVDINGNCVLGHTHADVVQMFQLVPVNQYVNLTLCRGYPLPDDSEDPVVDIVAATPVINGQSLTKGETCMNPQDFKPGAMVLEQNGKSGHTLTGDGLNGPSDASEQRVSMASSGSSQPELVTIPLIKGPKGFGFAIADSPTGQKVKMILDSQWCQGLQKGDIIKEIYHQNVQNLTHLQVVEVLKQFPVGADVPLLILRGGPPSPTKTAKMKTDKKENAGSLEAINEPIPQPMPFPPSIIRSGSPKLDPSEVYLKSKTLYEDKPPNTKDLDVFLRKQESGFGFRVLGGDGPDQSIYIGAIIPLGAAEKDGRLRAADELMCIDGIPVKGKSHKQVLDLMTTAARNGHVLLTVRRKIFYGEKQPEDDSSQAFISTQNGSPRLNRAEVPARPAPQEPYDVVLQRKENEGFGFVILTSKNKPPPGVIPHKIGRVIEGSPADRCGKLKVGDHISAVNGQSIVELSHDNIVQLIKDAGVTVTLTVIAEEEHHGPPSGTNSARQSPALQHRPMGQSQANHIPGDRSALEGEIGKDVSTSYRHSWSDHKHLAQPDTAVISVVGSRHNQNLGCYPVELERGPRGFGFSLRGGKEYNMGLFILRLAEDGPAIKDGRIHVGDQIVEINGEPTQGITHTRAIELIQAGGNKVLLLLRPGTGLIPDHGLAPSGLCSYVKPEQH

SEQ ID NO: 50231 - protein, 1125 aa, Homo sapiens; identical to SEQ ID NO: 50230
  Payload ID: 10041
  Gene Symbol: MAGI3
  Gene Name: membrane associated guanylate kinase, WW and PDZ domain containing 3
  Uniprot ID: Q5TCQ9
  ENSP ID: ENSP00000358628

SEQ ID NO: 50232 - protein, 1150 aa, Homo sapiens
  Payload ID: 10041
  Gene Symbol: MAGI3
  Gene Name: membrane associated guanylate kinase, WW and PDZ domain containing 3
  Uniprot ID: Q5TCQ9
  ENSP ID: ENSP00000358630
MSKTLKKKKHWLSKVQECAVSWAGPPGDFGAEIRGGAERGEFPYLGRLREEPGGGTCCVVSGKAPSPGDVLLEVNGTPVSGLTNRDTLAVIRHFREPIRLKTVKPGKVINKDLRHYLSLQFQKGSIDHKLQQVIRDNLYLRTIPCTTRAPRDGEVPGVDYNFISVEQFKALEESGALLESGTYDGNFYGTPKPPAEPSPFQPDPVDQVLFDNEFDAESQRKRTTSVSKMERMDSSLPEEEEDEDKEAINGSGNAENRERHSESSDWMKTVPSYNQTNSSMDFRNYMMRDETLEPLPKNWEMAYTDTGMIYFIDHNTKTTTWLDPRLCKKAKAPEDCEDGELPYGWEKIEDPQYGTYYVDFTLVAQAGVQWHDLGSLQPPPPGFNHLNQKTQFENPVEEAKRKKQLGQVEIGSSKPDMEKSHFTRDPSQLKGVLVRASLKKSTMGFGFTIIGGDRPDEFLQVKNVLKDGPAAQDGKIAPGDVIVDINGNCVLGHTHADVVQMFQLVPVNQYVNLTLCRGYPLPDDSEDPVVDIVAATPVINGQSLTKGETCMNPQDFKPGAMVLEQNGKSGHTLTGDGLNGPSDASEQRVSMASSGSSQPELVTIPLIKGPKGFGFAIADSPTGQKVKMILDSQWCQGLQKGDIIKEIYHQNVQNLTHLQVVEVLKQFPVGADVPLLILRGGPPSPTKTAKMKTDKKENAGSLEAINEPIPQPMPFPPSIIRSGSPKLDPSEVYLKSKTLYEDKPPNTKDLDVFLRKQESGFGFRVLGGDGPDQSIYIGAIIPLGAAEKDGRLRAADELMCIDGIPVKGKSHKQVLDLMTTAARNGHVLLTVRRKIFYGEKQPEDDSSQAFISTQNGSPRLNRAEVPARPAPQEPYDVVLQRKENEGFGFVILTSKNKPPPGVIPHKIGRVIEGSPADRCGKLKVGDHISAVNGQSIVELSHDNIVQLIKDAGVTVTLTVIAEEEHHGPPSGTNSARQSPALQHRPMGQSQANHIPGDRSALEGEIGKDVSTSYRHSWSDHKHLAQPDTAVISVVGSRHNQNLGCYPVELERGPRGFGFSLRGGKEYNMGLFILRLAEDGPAIKDGRIHVGDQIVEINGEPTQGITHTRAIELIQAGGNKVLLLLRPGTGLIPDHGLAPSGLCSYVKPEQH

SEQ ID NO: 50233 - protein, 495 aa, Homo sapiens
  Payload ID: 10042
  Gene Symbol: MBOAT1
  Gene Name: membrane bound O-acyltransferase domain containing 1
  Uniprot ID: Q6ZNC8
  ENSP ID: ENSP00000324944
MAAEPQPSSLSYRTTGSTYLHPLSELLGIPLDQVNFVVCQLVALFAAFWFRIYLRPGTTSSDVRHAVATIFGIYFVIFCFGWYSVHLFVLVLMCYAIMVTASVSNIHRYSFFVAMGYLTICHISRIYIFHYGILTTDFSGPLMIVTQKITTLAFQVHDGLGRRAEDLSAEQHRLAIKVKPSFLEYLSYLLNFMSVIAGPCNNFKDYIAFIEGKHIHMKLLEVNWKRKGFHSLPEPSPTGAVIHKLGITLVSLLLFLTLTKTFPVTCLVDDWFVHKASFPARLCYLYVVMQASKPKYYFAWTLADAVNNAAGFGFSGVDKNGNFCWDLLSNLNIWKIETATSFKMYLENWNIQTATWLKCVCYQRVPWYPTVLTFILSALWHGVYPGYYFTFLTGILVTLAARAVRNNYRHYFLSSRALKAVYDAGTWAVTQLAVSYTVAPFVMLAVEPTISLYKSMYFYLHIISLLIILFLPMKPQAHTQRRPQTLNSINKRKTD

SEQ ID NO: 50234 - protein, 520 aa, Homo sapiens
  Payload ID: 10043
  Gene Symbol: MBOAT2
  Gene Name: membrane bound O-acyltransferase domain containing 2
  Uniprot ID: Q6ZWT7
  ENSP ID: ENSP00000302177
MATTSTTGSTLLQPLSNAVQLPIDQVNFVVCQLFALLAAIWFRTYLHSSKTSSFIRHVVATLLGLYLALFCFGWYALHFLVQSGISYCIMIIIGVENMHNYCFVFALGYLTVCQVTRVYIFDYGQYSADFSGPMMIITQKITSLACEIHDGMFRKDEELTSSQRDLAVRRMPSLLEYLSYNCNFMGILAGPLCSYKDYITFIEGRSYHITQSGENGKEETQYERTEPSPNTAVVQKLLVCGLSLLFHLTICTTLPVEYNIDEHFQATASWPTKIIYLYISLLAARPKYYFAWTLADAINNAAGFGFRGYDENGAARWDLISNLRIQQIEMSTSFKMFLDNWNIQTALWLKRVCYERTSFSPTIQTFILSAIWHGVYPGYYLTFLTGVLMTLAARAMRNNFRHYFIEPSQLKLFYDVITWIVTQVAISYTVVPFVLLSIKPSLTFYSSWYYCLHILGILVLLLLPVKKTQRRKNTHENIQLSQSKKFDEGENSLGQNSFSTTNNVCNQNQEIASRHSSLKQ

SEQ ID NO: 50235 - protein, 176 aa, Homo sapiens
  Payload ID: 10043
  Gene Symbol: MBOAT2
  Gene Name: membrane bound O-acyltransferase domain containing 2
  ENSP ID: ENSP00000417409
MATTSTTGSTLLQPLSNAVQLPIDQAARHMIPGCLSPSVCLTYLAESTGEKYALHFLVQSGISYCIMIIIGVENMHNYCFVFALGYLTVCQVTRVYIFDYGQYSADFSGPMMIITQKITSLACEIHDGMFRKDEELTSSQRDLAVRRMPSLLEYLSYNCNFMGILAGPLCSYKDYI

SEQ ID NO: 50236 - protein, 158 aa, Homo sapiens
  Payload ID: 10043
  Gene Symbol: MBOAT2
  Gene Name: membrane bound O-acyltransferase domain containing 2
  ENSP ID: ENSP00000419573
KDYITFIEGRSYHITQSGENGKEETQYERTEPSPNTAVVQKLLVCGLSLLFHLTICTTLPVEYNIDEHFQATASWPTKIIYLYISLLAARPKYYFAWTLADAINNAAGFGFRGYDENGAARWDLISNLRIQQIEMSTSFKMFLDNWNIQTALWLKRIF

SEQ ID NO: 50237 - protein, 46 aa, Homo sapiens
  Payload ID: 10043
  Gene Symbol: MBOAT2
  Gene Name: membrane bound O-acyltransferase domain containing 2
  ENSP ID: ENSP00000420114
MATTSTTGSTLLQPLSNAVQLPIDQLLLCVCSGIPHSVPSYSSLYL

SEQ ID NO: 50238 - protein, 435 aa, Homo sapiens
  Payload ID: 10044
  Gene Symbol: MBOAT4
  Gene Name: membrane bound O-acyltransferase domain containing 4
  Uniprot ID: Q96T53
  ENSP ID: ENSP00000314196
MEWLWLFFLHPISFYQGAAFPFALLFNYLCIMDSFSTRARYLFLLTGGGALAVAAMGSYAVLVFTPAVCAVALLCSLAPQQVHRWTFCFQMSWQTLCHLGLHYTEYYLHEPPSVRFCITLSSLMLLTQRVTSLSLDICEGKVKAASGGFRSRSSLSEHVCKALPYFSYLLFFPALLGGSLCSFQRFQARVQGSSALHPRHSFWALSWRGLQILGLECLNVAVSRVVDAGAGLTDCQQFECIYVVWTTAGLFKLTYYSHWILDDSLLHAAGFGPELGQSPGEEGYVPDADIWTLERTHRISVFSRKWNQSTARWLRRLVFQHSRAWPLLQTFAFSAWWHGLHPGQVFGFVCWAVMVEADYLIHSFANEFIRSWPMRLFYRTLTWAHTQLIIAYIMLAVEVRSLSSLWLLCNSYNSVFPMVYCILLLLLAKRKHKCN

SEQ ID NO: 50239 - protein, 472 aa, Homo sapiens
  Payload ID: 10045
  Gene Symbol: MBOAT7
  Gene Name: membrane bound O-acyltransferase domain containing 7
  Uniprot ID: Q96N66
  ENSP ID: ENSP00000245615
MSPEEWTYLVVLLISIPIGFLFKKAGPGLKRWGAAAVGLGLTLFTCGPHTLHSLVTILGTWALIQAQPCSCHALALAWTFSYLLFFRALSLLGLPTPTPFTNAVQLLLTLKLVSLASEVQDLHLAQRKEMASGFSKGPTLGLLPDVPSLMETLSYSYCYVGIMTGPFFRYRTYLDWLEQPFPGAVPSLRPLLRRAWPAPLFGLLFLLSSHLFPLEAVREDAFYARPLPARLFYMIPVFFAFRMRFYVAWIAAECGCIAAGFGAYPVAAKARAGGGPTLQCPPPSSPEKAASLEYDYETIRNIDCYSTDFCVRVRDGMRYWNMTVQWWLAQYIYKSAPARSYVLRSAWTMLLSAYWHGLHPGYYLSFLTIPLCLAAEGRLESALRGRLSPGGQKAWDWVHWFLKMRAYDYMCMGFVLLSLADTLRYWASIYFCIHFLALAALGLGLALGGGSPSRRKAASQPTSLAPEKLREE

SEQ ID NO: 50240 - protein, 399 aa, Homo sapiens
  Payload ID: 10045
  Gene Symbol: MBOAT7
  Gene Name: membrane bound O-acyltransferase domain containing 7
  Uniprot ID: Q96N66
  ENSP ID: ENSP00000344377
MGSSRCGPGAHPVHLWPPHFAFSGHHPRDLGPHSGPALLVSLASEVQDLHLAQRKEMASGFSKGPTLGLLPDVPSLMETLSYSYCYVGIMTGPFFRYRTYLDWLEQPFPGAVPSLRPLLRRAWPAPLFGLLFLLSSHLFPLEAVREDAFYARPLPARLFYMIPVFFAFRMRFYVAWIAAECGCIAAGFGAYPVAAKARAGGGPTLQCPPPSSPEKAASLEYDYETIRNIDCYSTDFCVRVRDGMRYWNMTVQWWLAQYIYKSAPARSYVLRSAWTMLLSAYWHGLHPGYYLSFLTIPLCLAAEGRLESALRGRLSPGGQKAWDWVHWFLKMRAYDYMCMGFVLLSLADTLRYWASIYFCIHFLALAALGLGLALGGGSPSRRKAASQPTSLAPEKLREE

SEQ ID NO: 50241 - protein, 344 aa, Homo sapiens
  Payload ID: 10045
  Gene Symbol: MBOAT7
  Gene Name: membrane bound O-acyltransferase domain containing 7
  Uniprot ID: Q96N66
  ENSP ID: ENSP00000375634
MSPEEWTYLVVLLISIPIGFLFKKAGPGLKRWGAAAVGLGLTLFTCGPHTLHSLVTILGTWALIQAQPCSCHALALAWTFSYLLFFRALSLLGLPTPTPFTNAVQLLLTLKLVSLASEVQDLHLAQRKEMASGFSKGPTLGLLPDVPSLMETLSYSYCYVGIMTGPFFRYRTYLDWLEQPFPGAVPSLRPLLRRAWPAPLFGLLFLLSSHLFPLEAVREDAFYARPLPARLFYMIPVFFAFRMRFYVAWIAAECGCIAAGFGAYPVAAKARAGGGPTLQCPPPSSPEKAASLEYDYETIRNIDCYSTDFCVRVRDGMRYWNMTVQWWLAQYIYKSAPARSYVLR

SEQ ID NO: 50242 - protein, 256 aa, Homo sapiens
  Payload ID: 10045
  Gene Symbol: MBOAT7
  Gene Name: membrane bound O-acyltransferase domain containing 7
  ENSP ID: ENSP00000388250
MSPEEWTYLVVLLISIPIGFLFKKAGPGLKRWGAAAVGLGLTLFTCGPHTLHSLVTILGTWALIQAQPCSCHALALAWTFSYLLFFRALSLLGLPTPTPFTNAVQLLLTLKLVSLASEVQDLHLAQRKEMASGFSKGPTLGLLPDVPSLMETLSYSYCYVGIMTGPFFRYRTYLDWLEQPFPGAVPSLRPLLRRAWPAPLFGLLFLLSSHLFPLEAVREDAFYARPLPARLFYMIPVFFAFRMRFYVAWIAAECGC

SEQ ID NO: 50243 - protein, 70 aa, Homo sapiens
  Payload ID: 10045
  Gene Symbol: MBOAT7
  Gene Name: membrane bound O-acyltransferase domain containing 7
  ENSP ID: ENSP00000404915
MSPEEWTYLVVLLISIPIGFLFKKAGPGLKRWGAAAVGLGLTLFTCGPHTLHSLVTILGTWALIQAQPCW

SEQ ID NO: 50244 - protein, 123 aa, Homo sapiens
  Payload ID: 10045
  Gene Symbol: MBOAT7
  Gene Name: membrane bound O-acyltransferase domain containing 7
  ENSP ID: ENSP00000406794
HTLHSLVTILGTWALIQAQPCSCHALALAWTFSYLLFFRALSLLGLPTPTPFTNAVQLLLTLKLVSLASEVQDLHLAQRKEMASGFSKGPTLGLLPDVPSLMETLSYSYCYVGIMTGAPGPCC

SEQ ID NO: 50245 - protein, 170 aa, Homo sapiens
  Payload ID: 10045
  Gene Symbol: MBOAT7
  Gene Name: membrane bound O-acyltransferase domain containing 7
  ENSP ID: ENSP00000410320
MSPEEWTYLVVLLISIPIGFLFKKAGPGLKRWGAAAVGLGLTLFTCGPHTLHSLVTILGTWALIQAQPCSCHALALAWTFSYLLFFRALSLLGLPTPTPFTNAVQLLLTLKLVSLASEVQDLHLAQRKEMASGFSKGPTLGLLPDVPSLMETLSYSYCYVGIMTGPFFRY

SEQ ID NO: 50246 - protein, 399 aa, Homo sapiens; identical to SEQ ID NO: 50240
  Payload ID: 10045
  Gene Symbol: MBOAT7
  Gene Name: membrane bound O-acyltransferase domain containing 7
  Uniprot ID: Q96N66
  ENSP ID: ENSP00000410503

SEQ ID NO: 50247 - protein, 181 aa, Homo sapiens
  Payload ID: 10045
  Gene Symbol: MBOAT7
  Gene Name: membrane bound O-acyltransferase domain containing 7
  ENSP ID: ENSP00000472209
  MOD_RES (1)..(1): Any amino acid
XKEMASGFSKGPTLGLLPDVPSLMETLSYSYCYVGIMTGPFFRYRTYLDWLEQPFPGAVPSLRPLLRRAWPAPLFGLLFLLSSHLFPLEAVREDAFYARPLPARLFYMIPVFFAFRMRFYVAWIAAECGCIAAGFGAYPVAAKARAGGGPTLQCPPPSRSGGAREASQDPAAPTSKGWLCP

SEQ ID NO: 50248 - protein, 256 aa, Homo sapiens; identical to SEQ ID NO: 50242
  Payload ID: 10045
  Gene Symbol: MBOAT7
  Gene Name: membrane bound O-acyltransferase domain containing 7
  ENSP ID: ENSP00000477618

SEQ ID NO: 50249 - protein, 399 aa, Homo sapiens; identical to SEQ ID NO: 50240
  Payload ID: 10045
  Gene Symbol: MBOAT7
  Gene Name: membrane bound O-acyltransferase domain containing 7
  ENSP ID: ENSP00000477891

SEQ ID NO: 50250 - protein, 472 aa, Homo sapiens; identical to SEQ ID NO: 50239
  Payload ID: 10045
  Gene Symbol: MBOAT7
  Gene Name: membrane bound O-acyltransferase domain containing 7
  ENSP ID: ENSP00000478041

SEQ ID NO: 50251 - protein, 472 aa, Homo sapiens; identical to SEQ ID NO: 50239
  Payload ID: 10045
  Gene Symbol: MBOAT7
  Gene Name: membrane bound O-acyltransferase domain containing 7
  ENSP ID: ENSP00000478088

SEQ ID NO: 50252 - protein, 399 aa, Homo sapiens; identical to SEQ ID NO: 50240
  Payload ID: 10045
  Gene Symbol: MBOAT7
  Gene Name: membrane bound O-acyltransferase domain containing 7
  Uniprot ID: Q96N66
  ENSP ID: ENSP00000478522

SEQ ID NO: 50253 - protein, 256 aa, Homo sapiens; identical to SEQ ID NO: 50242
  Payload ID: 10045
  Gene Symbol: MBOAT7
  Gene Name: membrane bound O-acyltransferase domain containing 7
  ENSP ID: ENSP00000478623

SEQ ID NO: 50254 - protein, 472 aa, Homo sapiens; identical to SEQ ID NO: 50239
  Payload ID: 10045
  Gene Symbol: MBOAT7
  Gene Name: membrane bound O-acyltransferase domain containing 7
  ENSP ID: ENSP00000478965

SEQ ID NO: 50255 - protein, 170 aa, Homo sapiens; identical to SEQ ID NO: 50245
  Payload ID: 10045
  Gene Symbol: MBOAT7
  Gene Name: membrane bound O-acyltransferase domain containing 7
  ENSP ID: ENSP00000479717

SEQ ID NO: 50256 - protein, 344 aa, Homo sapiens; identical to SEQ ID NO: 50241
  Payload ID: 10045
  Gene Symbol: MBOAT7
  Gene Name: membrane bound O-acyltransferase domain containing 7
  Uniprot ID: Q96N66
  ENSP ID: ENSP00000479750

SEQ ID NO: 50257 - protein, 399 aa, Homo sapiens; identical to SEQ ID NO: 50240
  Payload ID: 10045
  Gene Symbol: MBOAT7
  Gene Name: membrane bound O-acyltransferase domain containing 7
  ENSP ID: ENSP00000479760

SEQ ID NO: 50258 - protein, 256 aa, Homo sapiens; identical to SEQ ID NO: 50242
  Payload ID: 10045
  Gene Symbol: MBOAT7
  Gene Name: membrane bound O-acyltransferase domain containing 7
  ENSP ID: ENSP00000480282

SEQ ID NO: 50259 - protein, 344 aa, Homo sapiens; identical to SEQ ID NO: 50241
  Payload ID: 10045
  Gene Symbol: MBOAT7
  Gene Name: membrane bound O-acyltransferase domain containing 7
  ENSP ID: ENSP00000480531

SEQ ID NO: 50260 - protein, 399 aa, Homo sapiens; identical to SEQ ID NO: 50240
  Payload ID: 10045
  Gene Symbol: MBOAT7
  Gene Name: membrane bound O-acyltransferase domain containing 7
  ENSP ID: ENSP00000480575

SEQ ID NO: 50261 - protein, 399 aa, Homo sapiens; identical to SEQ ID NO: 50240
  Payload ID: 10045
  Gene Symbol: MBOAT7
  Gene Name: membrane bound O-acyltransferase domain containing 7
  ENSP ID: ENSP00000480894

SEQ ID NO: 50262 - protein, 344 aa, Homo sapiens; identical to SEQ ID NO: 50241
  Payload ID: 10045
  Gene Symbol: MBOAT7
  Gene Name: membrane bound O-acyltransferase domain containing 7
  ENSP ID: ENSP00000481119

SEQ ID NO: 50263 - protein, 70 aa, Homo sapiens; identical to SEQ ID NO: 50243
  Payload ID: 10045
  Gene Symbol: MBOAT7
  Gene Name: membrane bound O-acyltransferase domain containing 7
  ENSP ID: ENSP00000481141

SEQ ID NO: 50264 - protein, 472 aa, Homo sapiens; identical to SEQ ID NO: 50239
  Payload ID: 10045
  Gene Symbol: MBOAT7
  Gene Name: membrane bound O-acyltransferase domain containing 7
  Uniprot ID: Q96N66
  ENSP ID: ENSP00000481455

SEQ ID NO: 50265 - protein, 399 aa, Homo sapiens; identical to SEQ ID NO: 50240
  Payload ID: 10045
  Gene Symbol: MBOAT7
  Gene Name: membrane bound O-acyltransferase domain containing 7
  ENSP ID: ENSP00000481544

SEQ ID NO: 50266 - protein, 399 aa, Homo sapiens; identical to SEQ ID NO: 50240
  Payload ID: 10045
  Gene Symbol: MBOAT7
  Gene Name: membrane bound O-acyltransferase domain containing 7
  ENSP ID: ENSP00000481758

SEQ ID NO: 50267 - protein, 399 aa, Homo sapiens; identical to SEQ ID NO: 50240
  Payload ID: 10045
  Gene Symbol: MBOAT7
  Gene Name: membrane bound O-acyltransferase domain containing 7
  ENSP ID: ENSP00000481864

SEQ ID NO: 50268 - protein, 399 aa, Homo sapiens; identical to SEQ ID NO: 50240
  Payload ID: 10045
  Gene Symbol: MBOAT7
  Gene Name: membrane bound O-acyltransferase domain containing 7
  ENSP ID: ENSP00000481947

SEQ ID NO: 50269 - protein, 472 aa, Homo sapiens; identical to SEQ ID NO: 50239
  Payload ID: 10045
  Gene Symbol: MBOAT7
  Gene Name: membrane bound O-acyltransferase domain containing 7
  ENSP ID: ENSP00000482252

SEQ ID NO: 50270 - protein, 172 aa, Homo sapiens
  Payload ID: 10045
  Gene Symbol: MBOAT7
  Gene Name: membrane bound O-acyltransferase domain containing 7
  ENSP ID: ENSP00000482316
MSPEEWTYLVVLLISIPIGFLFKKAGPGLKRWGAAAVGLGLTLFTCGPHTLHSLVTILGTWALIQAQPCSCHALALAWTFSYLLFFRALSLLGLPTPTPFTNAVQLLLTLKLVSLASEVQDLHLAQRKEMASGFSKGPTLGLLPDVPSLMETLSYSYCYVGIMTGPFFRYRT

SEQ ID NO: 50271 - protein, 181 aa, Homo sapiens; identical to SEQ ID NO: 50247
  Payload ID: 10045
  Gene Symbol: MBOAT7
  Gene Name: membrane bound O-acyltransferase domain containing 7
  ENSP ID: ENSP00000482357
  MOD_RES (1)..(1): Any amino acid

SEQ ID NO: 50272 - protein, 399 aa, Homo sapiens; identical to SEQ ID NO: 50240
  Payload ID: 10045
  Gene Symbol: MBOAT7
  Gene Name: membrane bound O-acyltransferase domain containing 7
  ENSP ID: ENSP00000482369

SEQ ID NO: 50273 - protein, 472 aa, Homo sapiens; identical to SEQ ID NO: 50239
  Payload ID: 10045
  Gene Symbol: MBOAT7
  Gene Name: membrane bound O-acyltransferase domain containing 7
  ENSP ID: ENSP00000482625

SEQ ID NO: 50274 - protein, 399 aa, Homo sapiens; identical to SEQ ID NO: 50240
  Payload ID: 10045
  Gene Symbol: MBOAT7
  Gene Name: membrane bound O-acyltransferase domain containing 7
  ENSP ID: ENSP00000482742

SEQ ID NO: 50275 - protein, 399 aa, Homo sapiens; identical to SEQ ID NO: 50240
  Payload ID: 10045
  Gene Symbol: MBOAT7
  Gene Name: membrane bound O-acyltransferase domain containing 7
  ENSP ID: ENSP00000482884

SEQ ID NO: 50276 - protein, 399 aa, Homo sapiens; identical to SEQ ID NO: 50240
  Payload ID: 10045
  Gene Symbol: MBOAT7
  Gene Name: membrane bound O-acyltransferase domain containing 7
  ENSP ID: ENSP00000483526

SEQ ID NO: 50277 - protein, 123 aa, Homo sapiens; identical to SEQ ID NO: 50244
  Payload ID: 10045
  Gene Symbol: MBOAT7
  Gene Name: membrane bound O-acyltransferase domain containing 7
  ENSP ID: ENSP00000483561

SEQ ID NO: 50278 - protein, 399 aa, Homo sapiens; identical to SEQ ID NO: 50240
  Payload ID: 10045
  Gene Symbol: MBOAT7
  Gene Name: membrane bound O-acyltransferase domain containing 7
  Uniprot ID: Q96N66
  ENSP ID: ENSP00000483839

SEQ ID NO: 50279 - protein, 399 aa, Homo sapiens; identical to SEQ ID NO: 50240
  Payload ID: 10045
  Gene Symbol: MBOAT7
  Gene Name: membrane bound O-acyltransferase domain containing 7
  Uniprot ID: Q96N66
  ENSP ID: ENSP00000483987

SEQ ID NO: 50280 - protein, 172 aa, Homo sapiens; identical to SEQ ID NO: 50270
  Payload ID: 10045
  Gene Symbol: MBOAT7
  Gene Name: membrane bound O-acyltransferase domain containing 7
  ENSP ID: ENSP00000484102

SEQ ID NO: 50281 - protein, 472 aa, Homo sapiens; identical to SEQ ID NO: 50239
  Payload ID: 10045
  Gene Symbol: MBOAT7
  Gene Name: membrane bound O-acyltransferase domain containing 7
  ENSP ID: ENSP00000484199

SEQ ID NO: 50282 - protein, 472 aa, Homo sapiens; identical to SEQ ID NO: 50239
  Payload ID: 10045
  Gene Symbol: MBOAT7
  Gene Name: membrane bound O-acyltransferase domain containing 7
  Uniprot ID: Q96N66
  ENSP ID: ENSP00000484933

SEQ ID NO: 50283 - protein, 472 aa, Homo sapiens; identical to SEQ ID NO: 50239
  Payload ID: 10045
  Gene Symbol: MBOAT7
  Gene Name: membrane bound O-acyltransferase domain containing 7
  ENSP ID: ENSP00000484954

SEQ ID NO: 50284 - protein, 461 aa, Homo sapiens
  Payload ID: 10046
  Gene Symbol: MFRP
  Gene Name: membrane frizzled-related protein
  Uniprot ID: Q9BY79
  ENSP ID: ENSP00000353291
MKDFSDVILCMEATESSKTEFCNPAFEPESGPPCPPPVFPEDASYSVPAPWHGRRPRGLRPDCRFSWLCVLLLSSLLLLLLGLLVAIILAQLQAAPPSGASHSPLPAGGLTTTTTTPTITTSQAAGTPKGQQESGVSPSPQSTCGGLLSGPRGFFSSPNYPDPYPPNTHCVWHIQVATDHAIQLKIEALSIESVASCLFDRLELSPEPEGPLLRVCGRVPPPTLNTNASHLLVVFVSDSSVEGFGFHAWYQAMAPGRGSCAHDEFRCDQLICLLPDSVCDGFANCADGSDETNCSAKFSGSVEQSHPPTSSPRTMSWLCCLGQIMASAVEASQPPTWPSMPRRTPVGPVSSPARQEGVRVCSGCVTCGETAPMAAMTTAAAPCSHPQSLTSLPCYQHFRRLLCGLLVPRCTPLGSVLPPCRSVCQEAEHQCQSGLALLGTPWPFNCNRLPEAADLEACAQP

SEQ ID NO: 50285 - protein, 188 aa, Homo sapiens
  Payload ID: 10046
  Gene Symbol: MFRP
  Gene Name: membrane frizzled-related protein
  Uniprot ID: Q9BY79
  ENSP ID: ENSP00000391664
  MOD_RES (1)..(1): Any amino acid
XHLVSSHHELAVLFRTDHGISSGGFSATYLAFNATESRCPWANPCGPSELSCQAGGCKGVQWMCDMWRDCTDGSDDNCSGPLFPPPELACEPVQVEMCLGLSYNTTAFPNIWVGMITQEEVVEVLSGYKSLTSLPCYQHFRRLLCGLLVPRCTPLGSVLPPCRSVCQEAEHQCQSGLALLGTPWPFNC

SEQ ID NO: 50286 - protein, 579 aa, Homo sapiens
  Payload ID: 10046
  Gene Symbol: MFRP
  Gene Name: membrane frizzled-related protein
  Uniprot ID: Q9BY79
  ENSP ID: ENSP00000481824
MKDFSDVILCMEATESSKTEFCNPAFEPESGPPCPPPVFPEDASYSVPAPWHGRRPRGLRPDCRFSWLCVLLLSSLLLLLLGLLVAIILAQLQAAPPSGASHSPLPAGGLTTTTTTPTITTSQAAGTPKGQQESGVSPSPQSTCGGLLSGPRGFFSSPNYPDPYPPNTHCVWHIQVATDHAIQLKIEALSIESVASCLFDRLELSPEPEGPLLRVCGRVPPPTLNTNASHLLVVFVSDSSVEGFGFHAWYQAMAPGRGSCAHDEFRCDQLICLLPDSVCDGFANCADGSDETNCSAKFSGCGGNLTGLQGTFSTPSYLQQYPHQLLCTWHISVPAGHSIELQFHNFSLEAQDECKFDYVEVYETSSSGAFSLLGRFCGAEPPPHLVSSHHELAVLFRTDHGISSGGFSATYLAFNATENPCGPSELSCQAGGCKGVQWMCDMWRDCTDGSDDNCSGPLFPPPELACEPVQVEMCLGLSYNTTAFPNIWVGMITQEEVVEVLSGYKSLTSLPCYQHFRRLLCGLLVPRCTPLGSVLPPCRSVCQEAEHQCQSGLALLGTPWPFNCNRLPEAADLEACAQP

SEQ ID NO: 50287 - protein, 101 aa, Homo sapiens
  Payload ID: 10046
  Gene Symbol: MFRP
  Gene Name: membrane frizzled-related protein
  ENSP ID: ENSP00000488979
MKDFSDVILCMEATESSKVGVLEGYGQTAASPGSVSSCSPACSSCCLGCWWPSSWPSCRLHPHLGRPIAHCLPEALPRPPPPPPSPPLRQLGPLKGSRSQA

SEQ ID NO: 50288 - protein, 131 aa, Homo sapiens
  Payload ID: 10047
  Gene Symbol: MMGT1
  Gene Name: membrane magnesium transporter 1
  Uniprot ID: Q8N4V1
  ENSP ID: ENSP00000306220
MAPSLWKGLVGIGLFALAHAAFSAAQHRSYMRLTEKEDESLPIDIVLQTLLAFAVTCYGIVHIAGEFKDMDATSELKNKTFDTLRNHPSFYVFNHRGRVLFRPSDTANSSNQDALSSNTSLKLRKLESLRR

SEQ ID NO: 50289 - protein, 750 aa, Homo sapiens
  Payload ID: 10048
  Gene Symbol: MME
  Gene Name: membrane metallo-endopeptidase
  Uniprot ID: P08473
  ENSP ID: ENSP00000353679
MGKSESQMDITDINTPKPKKKQRWTPLEISLSVLVLLLTIIAVTMIALYATYDDGICKSSDCIKSAARLIQNMDATTEPCTDFFKYACGGWLKRNVIPETSSRYGNFDILRDELEVVLKDVLQEPKTEDIVAVQKAKALYRSCINESAIDSRGGEPLLKLLPDIYGWPVATENWEQKYGASWTAEKAIAQLNSKYGKKVLINLFVGTDDKNSVNHVIHIDQPRLGLPSRDYYECTGIYKEACTAYVDFMISVARLIRQEERLPIDENQLALEMNKVMELEKEIANATAKPEDRNDPMLLYNKMTLAQIQNNFSLEINGKPFSWLNFTNEIMSTVNISITNEEDVVVYAPEYLTKLKPILTKYSARDLQNLMSWRFIMDLVSSLSRTYKESRNAFRKALYGTTSETATWRRCANYVNGNMENAVGRLYVEAAFAGESKHVVEDLIAQIREVFIQTLDDLTWMDAETKKRAEEKALAIKERIGYPDDIVSNDNKLNNEYLELNYKEDEYFENIIQNLKFSQSKQLKKLREKVDKDEWISGAAVVNAFYSSGRNQIVFPAGILQPPFFSAQQSNSLNYGGIGMVIGHEITHGFDDNGRNFNKDGDLVDWWTQQSASNFKEQSQCMVYQYGNFSWDLAGGQHLNGINTLGENIADNGGLGQAYRAYQNYIKKNGEEKLLPGLDLNHKQLFFLNFAQVWCGTYRPEYAVNSIKTDVHSPGNFRIIGTLQNSAEFSEAFHCRKNSYMNPEKKCRVW

SEQ ID NO: 50290 - protein, 80 aa, Homo sapiens
  Payload ID: 10048
  Gene Symbol: MME
  Gene Name: membrane metallo-endopeptidase
  ENSP ID: ENSP00000372450
MGKSESQMDITDINTPKPKKKQRWTPLEISLSVLVLLLTIIAVTMIALYATYDDGICKSSDCIKSGMVARAYNPRGRRIA

SEQ ID NO: 50291 - protein, 750 aa, Homo sapiens; identical to SEQ ID NO: 50289
  Payload ID: 10048
  Gene Symbol: MME
  Gene Name: membrane metallo-endopeptidase
  Uniprot ID: P08473
  ENSP ID: ENSP00000417079

SEQ ID NO: 50292 - protein, 161 aa, Homo sapiens
  Payload ID: 10048
  Gene Symbol: MME
  Gene Name: membrane metallo-endopeptidase
  ENSP ID: ENSP00000417595
MGKSESQMDITDINTPKPKKKQRWTPLEISLSVLVLLLTIIAVTMIALYATYDDGICKSSDCIKSAARLIQNMDATTEPCTDFFKYACGGWLKRNVIPETSSRYGNFDILRDELEVVLKDVLQEPKTEDIVAVQKAKALYRSCINESAIDSRGGEPLLKLL

SEQ ID NO: 50293 - protein, 15 aa, Homo sapiens
  Payload ID: 10048
  Gene Symbol: MME
  Gene Name: membrane metallo-endopeptidase
  ENSP ID: ENSP00000418238
MGKSESQMDITDINT

SEQ ID NO: 50294 - protein, 750 aa, Homo sapiens; identical to SEQ ID NO: 50289
  Payload ID: 10048
  Gene Symbol: MME
  Gene Name: membrane metallo-endopeptidase
  Uniprot ID: P08473
  ENSP ID: ENSP00000418525

SEQ ID NO: 50295 - protein, 119 aa, Homo sapiens
  Payload ID: 10048
  Gene Symbol: MME
  Gene Name: membrane metallo-endopeptidase
  ENSP ID: ENSP00000418791
MGKSESQMDITDINTPKPKKKQRWTPLEISLSVLVLLLTIIAVTMIALYATYDDGICKSSDCIKSAARLIQNMDATTEPCTDFFKYACGGWLKRNVIPETSSRYGNFDILRDELEVVLK

SEQ ID NO: 50296 - protein, 750 aa, Homo sapiens; identical to SEQ ID NO: 50289
  Payload ID: 10048
  Gene Symbol: MME
  Gene Name: membrane metallo-endopeptidase
  Uniprot ID: P08473
  ENSP ID: ENSP00000419653

SEQ ID NO: 50297 - protein, 233 aa, Homo sapiens
  Payload ID: 10048
  Gene Symbol: MME
  Gene Name: membrane metallo-endopeptidase
  ENSP ID: ENSP00000420101
MGKSESQMDITDINTPKPKKKQRWTPLEISLSVLVLLLTIIAVTMIALYATYDDGICKSSDCIKSAARLIQNMDATTEPCTDFFKYACGGWLKRNVIPETSSRYGNFDILRDELEVVLKDVLQEPKTEDIVAVQKAKALYRSCINESAIDSRGGEPLLKLLPDIYGWPVATENWEQKYGASWTAEKAIAQLNSKYGKKVLINLFVGTDDKNSVNHVIHIDQPRLGLPSRDYYE

SEQ ID NO: 50298 - protein, 750 aa, Homo sapiens; identical to SEQ ID NO: 50289
  Payload ID: 10048
  Gene Symbol: MME
  Gene Name: membrane metallo-endopeptidase
  Uniprot ID: P08473
  ENSP ID: ENSP00000420389

SEQ ID NO: 50299 - protein, 93 aa, Homo sapiens
  Payload ID: 10048
  Gene Symbol: MME
  Gene Name: membrane metallo-endopeptidase
  ENSP ID: ENSP00000420542
MGKSESQMDITDINTPKPKKKQRWTPLEISLSVLVLLLTIIAVTMIALYATYDDGICKSSDCIKSAARLIQNMDATTEPCTDFFKYACGGWLK

SEQ ID NO: 50300 - protein, 750 aa, Homo sapiens; identical to SEQ ID NO: 50289
  Payload ID: 10048
  Gene Symbol: MME
  Gene Name: membrane metallo-endopeptidase
  Uniprot ID: P08473
  ENSP ID: ENSP00000478173

SEQ ID NO: 50301 - protein, 79 aa, Homo sapiens
  Payload ID: 10048
  Gene Symbol: MME
  Gene Name: membrane metallo-endopeptidase
  ENSP ID: ENSP00000480349
MGKSESQMDITDINTPKPKKKQRWTPLEISLSVLVLLLTIIAVTMIALYATYDGELLPHLCISASMVARAYNPRGRRIA

SEQ ID NO: 50302 - protein, 80 aa, Homo sapiens; identical to SEQ ID NO: 50290
  Payload ID: 10048
  Gene Symbol: MME
  Gene Name: membrane metallo-endopeptidase
  ENSP ID: ENSP00000485791

SEQ ID NO: 50303 - protein, 779 aa, Homo sapiens
  Payload ID: 10049
  Gene Symbol: MMEL1
  Gene Name: membrane metallo-endopeptidase-like 1
  Uniprot ID: Q495T6
  ENSP ID: ENSP00000367668
MGKSEGPVGMVESAGRAGQKRPGFLEGGLLLLLLLVTAALVALGVLYADRRGKQLPRLASRLCFLQEERTFVKRKPRGIPEAQEVSEVCTTPGCVIAAARILQNMDPTTEPCDDFYQFACGGWLRRHVIPETNSRYSIFDVLRDELEVILKAVLENSTAKDRPAVEKARTLYRSCMNQSVIEKRGSQPLLDILEVVGGWPVAMDRWNETVGLEWELERQLALMNSQFNRRVLIDLFIWNDDQNSSRHIIYIDQPTLGMPSREYYFNGGSNRKVREAYLQFMVSVATLLREDANLPRDSCLVQEDMVQVLELETQLAKATVPQEERHDVIALYHRMGLEELQSQFGLKGFNWTLFIQTVLSSVKIKLLPDEEVVVYGIPYLQNLENIIDTYSARTIQNYLVWRLVLDRIGSLSQRFKDTRVNYRKALFGTMVEEVRWRECVGYVNSNMENAVGSLYVREAFPGDSKSMVRELIDKVRTVFVETLDELGWMDEESKKKAQEKAMSIREQIGHPDYILEEMNRRLDEEYSNLNFSEDLYFENSLQNLKVGAQRSLRKLREKVDPNLWIIGAAVVNAFYSPNRNQIVFPAGILQPPFFSKEQPQALNFGGIGMVIGHEITHGFDDNGRNFDKNGNMMDWWSNFSTQHFREQSECMIYQYGNYSWDLADEQNVNGFNTLGENIADNGGVRQAYKAYLKWMAEGGKDQQLPGLDLTHEQLFFINYAQVWCGSYRPEFAIQSIKTDVHSPLKYRVLGSLQNLAAFADTFHCARGTPMHPKERCRVW

SEQ ID NO: 50304 - protein, 622 aa, Homo sapiens
  Payload ID: 10049
  Gene Symbol: MMEL1
  Gene Name: membrane metallo-endopeptidase-like 1
  Uniprot ID: Q495T6
  ENSP ID: ENSP00000422492
MGKSEGPVGMVESAGRAGQKRPGFLEGGLLLLLLLVTAALVALGVLYADRRGKQLPRLASRLCFLQEERTFVKRKPRGIPEAQEVSEVCTTPGCVIAAARILQNMDPTTEPCDDFYQFACGGWLRRHVIPETNSRYSIFDVLRDELEVILKAVLENSTAKATVPQEERHDVIALYHRMGLEELQSQFGLKGFNWTLFIQTVLSSVKIKLLPDEEVVVYGIPYLQNLENIIDTYSARTIQNYLVWRLVLDRIGSLSQRFKDTRVNYRKALFGTMVEEVRWRECVGYVNSNMENAVGSLYVREAFPGDSKSMVRELIDKVRTVFVETLDELGWMDEESKKKAQEKAMSIREQIGHPDYILEEMNRRLDEEYSNLNFSEDLYFENSLQNLKVGAQRSLRKLREKVDPNLWIIGAAVVNAFYSPNRNQIVFPAGILQPPFFSKEQPQALNFGGIGMVIGHEITHGFDDNGRNFDKNGNMMDWWSNFSTQHFREQSECMIYQYGNYSWDLADEQNVNGFNTLGENIADNGGVRQAYKAYLKWMAEGGKDQQLPGLDLTHEQLFFINYAQVWCGSYRPEFAIQSIKTDVHSPLKYRVLGSLQNLAAFADTFHCARGTPMHPKERCRVW

SEQ ID NO: 50305 - protein, 611 aa, Homo sapiens
  Payload ID: 10049
  Gene Symbol: MMEL1
  Gene Name: membrane metallo-endopeptidase-like 1
  Uniprot ID: Q495T6
  ENSP ID: ENSP00000425477
MGKSEGPVGMVESAGRAGQKRPGFLEGGLLLLLLLVTAALVALGVLYADRRGKQLPRLASRLCFLQEERTFVKRKPRGIPEAQEVSEVCTTPGCVIAAARILQNMDPTTEPCDDFYQFACGGWLRRHVIPETNSRYSIFDVLRDELEVILKAVLENSTAKDRPAVEKARTLYRSCMNQSVIEKRGSQPLLDILEVVGGWPVAMDRWNETVGLEWELERQLALMNSQFNRRVLIDLFIWNDDQNSSRHIIYIDQPTLGMPSREYYFNGGSNRKVREAYLQFMVSVATLLREDANLPRDSCLVQEDMVQVLELETQLAKATVPQEERHDVIALYHRMGLEELQSQFGLKGFNWTLFIQTVLSSVKIKLLPDEEVVVYGIPYLQNLENIIDTYSARTIQNYLVWRLVLDRIGSLSQRFKDTRVNYRKALFGTMVEEVRWRECVGYVNSNMENAVGSLYVREAFPGDSKSMVRELIDKVRTVFVETLDELGWMDEESKKKAQEKAMSIREQIGHPDYILEEMNRRLDEEYSNLNFSEDLYFENSLQNLKVGAQRSLRKLREKVDPNLWIIGAAVVNAFYSPNRNQIAYSLSRPWGQYSLPGSSSPPSSARSSHRP

SEQ ID NO: 50306 - protein, 66 aa, Homo sapiens
  Payload ID: 10049
  Gene Symbol: MMEL1
  Gene Name: membrane metallo-endopeptidase-like 1
  ENSP ID: ENSP00000461938
GGVRQAYKVWCGSYRPEFAIQSIKTDVHSPLKYRVLGSLQNLAAFADTFHCARGTPMHPKERCRVW

SEQ ID NO: 50307 - protein, 622 aa, Homo sapiens; identical to SEQ ID NO: 50304
  Payload ID: 10049
  Gene Symbol: MMEL1
  Gene Name: membrane metallo-endopeptidase-like 1
  Uniprot ID: Q495T6
  ENSP ID: ENSP00000482173

SEQ ID NO: 50308 - protein, 779 aa, Homo sapiens; identical to SEQ ID NO: 50303
  Payload ID: 10049
  Gene Symbol: MMEL1
  Gene Name: membrane metallo-endopeptidase-like 1
  Uniprot ID: Q495T6
  ENSP ID: ENSP00000484606

SEQ ID NO: 50309 - protein, 611 aa, Homo sapiens; identical to SEQ ID NO: 50305
  Payload ID: 10049
  Gene Symbol: MMEL1
  Gene Name: membrane metallo-endopeptidase-like 1
  Uniprot ID: Q495T6
  ENSP ID: ENSP00000486668

SEQ ID NO: 50310 - protein, 66 aa, Homo sapiens; identical to SEQ ID NO: 50306
  Payload ID: 10049
  Gene Symbol: MMEL1
  Gene Name: membrane metallo-endopeptidase-like 1
  ENSP ID: ENSP00000487339

SEQ ID NO: 50311 - protein, 131 aa, Homo sapiens
  Payload ID: 10050
  Gene Symbol: MPP1
  Gene Name: membrane protein, palmitoylated 1, 55kDa
  ENSP ID: ENSP00000358544
MTLKASEGESGGSMHTALSDLYLEHLLQKRSRPEAVSHPLNTVTEDMYTNGSPAPGSPAQVKGQEGITLKLNEKQSCTVARILHGGMIHRQGSLHVGDEILEINGTNVTNHSVDQLQKAMKETKGMISLKV

SEQ ID NO: 50312 - protein, 466 aa, Homo sapiens
  Payload ID: 10050
  Gene Symbol: MPP1
  Gene Name: membrane protein, palmitoylated 1, 55kDa
  Uniprot ID: Q00013
  ENSP ID: ENSP00000358547
MTLKASEGESGGSMHTALSDLYLEHLLQKRSRPEAVSHPLNTVTEDMYTNGSPAPGSPAQVKGQEVRKVRLIQFEKVTEEPMGITLKLNEKQSCTVARILHGGMIHRQGSLHVGDEILEINGTNVTNHSVDQLQKAMKETKGMISLKVIPNQQSRLPALQMFMRAQFDYDPKKDNLIPCKEAGLKFATGDIIQIINKDDSNWWQGRVEGSSKESAGLIPSPELQEWRVASMAQSAPSEAPSCSPFGKKKKYKDKYLAKHSSIFDQLDVVSYEEVVRLPAFKRKTLVLIGASGVGRSHIKNALLSQNPEKFVYPVPYTTRPPRKSEEDGKEYHFISTEEMTRNISANEFLEFGSYQGNMFGTKFETVHQIHKQNKIAILDIEPQTLKIVRTAELSPFIVFIAPTDQGTQTEALQQLQKDSEAIRSQYAHYFDLSLVNNGVDETLKKLQEAFDQACSSPQWVPVSWVY

SEQ ID NO: 50313 - protein, 241 aa, Homo sapiens
  Payload ID: 10050
  Gene Symbol: MPP1
  Gene Name: membrane protein, palmitoylated 1, 55kDa
  ENSP ID: ENSP00000377163
MYTNGSPAPGSPAQVKGQEVRKVRLIQFEKVTEEPMGITLKLNEKQSCTVARILHGGMIHRQGSLHVGDEILEINGTNVTNHSVDQLQKAMKETKGMISLKVIPNQQSRLPALQMFMRAQFDYDPKKDNLIPCKEAGLKFATGDIIQIINKDDSNWWQGRVEGSSKESAGLIPSPELQEWRVASMAQSAPSEAPSCSPFGKKKKYKDKYLAKHSSIFDQLDVVSYEEVVRLPAFKRKTLVL

SEQ ID NO: 50314 - protein, 446 aa, Homo sapiens
  Payload ID: 10050
  Gene Symbol: MPP1
  Gene Name: membrane protein, palmitoylated 1, 55kDa
  Uniprot ID: Q00013
  ENSP ID: ENSP00000377165
MTLKASEGESGGSMHTALSDLYLEHLLQKRSRPEAVSHPLNTVTEDMYTNGSPAPGSPAQVKGQEVRKVRLIQFEKVTEEPMGITLKLNEKQSCTVARILHGGMIHRQGSLHVGDEILEINGTNVTNHSVDQLQKAMKETKGMISLKVIPNQQSRLPALQEAGLKFATGDIIQIINKDDSNWWQGRVEGSSKESAGLIPSPELQEWRVASMAQSAPSEAPSCSPFGKKKKYKDKYLAKHSSIFDQLDVVSYEEVVRLPAFKRKTLVLIGASGVGRSHIKNALLSQNPEKFVYPVPYTTRPPRKSEEDGKEYHFISTEEMTRNISANEFLEFGSYQGNMFGTKFETVHQIHKQNKIAILDIEPQTLKIVRTAELSPFIVFIAPTDQGTQTEALQQLQKDSEAIRSQYAHYFDLSLVNNGVDETLKKLQEAFDQACSSPQWVPVSWVY

SEQ ID NO: 50315 - protein, 89 aa, Homo sapiens
  Payload ID: 10050
  Gene Symbol: MPP1
  Gene Name: membrane protein, palmitoylated 1, 55kDa
  ENSP ID: ENSP00000389321
MTLKASEGESGGSMHTALSDLYLEHLLQKRSRPELPLSNCLCPLNPAADVSSEGAFRAAGIATPALCLIKGQRLQNKGQTWSPGLYRIH

SEQ ID NO: 50316 - protein, 156 aa, Homo sapiens
  Payload ID: 10050
  Gene Symbol: MPP1
  Gene Name: membrane protein, palmitoylated 1, 55kDa
  ENSP ID: ENSP00000391701
MTLKASEGESGGSMHTALSDLYLEHLLQKRSRPEKETKGMISLKVIPNQQSRLPALQMFMRAQFDYDPKKDNLIPCKEAGLKFATGDIIQIINKDDSNWWQGRVEGSSKESAGLIPSPELQEWRVASMAQSAPSEAPSCSPFGKKKKYKDKYLAKH

SEQ ID NO: 50317 - protein, 436 aa, Homo sapiens
  Payload ID: 10050
  Gene Symbol: MPP1
  Gene Name: membrane protein, palmitoylated 1, 55kDa
  Uniprot ID: Q00013
  ENSP ID: ENSP00000400155
MESWAVSHPLNTVTEDMYTNGSPAPGSPAQVKGQEVRKVRLIQFEKVTEEPMGITLKLNEKQSCTVARILHGGMIHRQGSLHVGDEILEINGTNVTNHSVDQLQKAMKETKGMISLKVIPNQQSRLPALQMFMRAQFDYDPKKDNLIPCKEAGLKFATGDIIQIINKDDSNWWQGRVEGSSKESAGLIPSPELQEWRVASMAQSAPSEAPSCSPFGKKKKYKDKYLAKHSSIFDQLDVVSYEEVVRLPAFKRKTLVLIGASGVGRSHIKNALLSQNPEKFVYPVPYTTRPPRKSEEDGKEYHFISTEEMTRNISANEFLEFGSYQGNMFGTKFETVHQIHKQNKIAILDIEPQTLKIVRTAELSPFIVFIAPTDQGTQTEALQQLQKDSEAIRSQYAHYFDLSLVNNGVDETLKKLQEAFDQACSSPQWVPVSWVY

SEQ ID NO: 50318 - protein, 68 aa, Homo sapiens
  Payload ID: 10050
  Gene Symbol: MPP1
  Gene Name: membrane protein, palmitoylated 1, 55kDa
  ENSP ID: ENSP00000400700
MTLKASEGESGGSMHTALSDLYLEHLLQKRSRPEAGPLVLWCKEGGQCIFAGGTRNPDSRDGWLVNSY

SEQ ID NO: 50319 - protein, 205 aa, Homo sapiens
  Payload ID: 10050
  Gene Symbol: MPP1
  Gene Name: membrane protein, palmitoylated 1, 55kDa
  ENSP ID: ENSP00000410888
MTLKASEGESGGSMHTALSDLYLEHLLQKRSRPEMFMRAQFDYDPKKDNLIPCKEAGLKFATGDIIQIINKDDSNWWQGRVEGSSKESAGLIPSPELQEWRVASMAQSAPSEAPSCSPFGKKKKYKDKYLAKHSSIFDQLDVVSYEEVVRLPAFKRKTLVLIGASGVGRSHIKNALLSQNPEKFVYPVPYTTRPPRKSEEDGKEY

SEQ ID NO: 50320 - protein, 552 aa, Homo sapiens
  Payload ID: 10051
  Gene Symbol: MPP2
  Gene Name: membrane protein, palmitoylated 2 (MAGUK p55 subfamily member 2)
  ENSP ID: ENSP00000269095
MPVAATNSETAMQQVLDNLGSLPSATGAAELDLIFLRGIMESPIVRSLAKAHERLEETKLEAVRDNNLELVQEILRDLAQLAEQSSTAAELAHILQEPHFQSLLETHDSVASKTYETPPPSPGLDPTFSNQPVPPDAVRMVGIRKTAGEHLGVTFRVEGGELVIARILHGGMVAQQGLLHVGDIIKEVNGQPVGSDPRALQELLRNASGSVILKILPSYQEPHLPRQVFVKCHFDYDPARDSLIPCKEAGLRFNAGDLLQIVNQDDANWWQACHVEGGSAGLIPSQLLEEKRKAFVKRDLELTPNSGTLCGSLSGKKKKRMMYLTTKNAEFDRHELLIYEEVARMPPFRRKTLVLIGAQGVGRRSLKNKLIMWDPDRYGTTVPYTSRRPKDSEREGQGYSFVSRGEMEADVRAGRYLEHGEYEGNLYGTRIDSIRGVVAAGKVCVLDVNPQAVKVLRTAEFVPYVVFIEAPDFETLRAMNRAALESGISTKQLTEADLRRTVEESSRIQRGYGHYFDLCLVNSNLERTFRELQTAMEKLRTEPQWVPVSWVY

SEQ ID NO: 50321 - protein, 569 aa, Homo sapiens
  Payload ID: 10051
  Gene Symbol: MPP2
  Gene Name: membrane protein, palmitoylated 2 (MAGUK p55 subfamily member 2)
  ENSP ID: ENSP00000366389
MAGSPGSGVSLEGISLESSEEAELQREAMQQVLDNLGSLPSATGAAELDLIFLRGIMESPIVRSLAKAHERLEETKLEAVRDNNLELVQEILRDLAQLAEQSSTAAELAHILQEPHFQSLLETHDSVASKTYETPPPSPGLDPTFSNQPVPPDAVRMVGIRKTAGEHLGVTFRVEGGELVIARILHGGMVAQQGLLHVGDIIKEVNGQPVGSDPRALQELLRNASGSVILKILPSYQEPHLPRQVFVKCHFDYDPARDSLIPCKEAGLRFNAGDLLQIVNQDDANWWQACHVEGGSAGLIPSQLLEEKRKAFVKRDLELTPNSGTLCGSLSGKKKKRMMYLTTKNAEFDRHELLIYEEVARMPPFRRKTLVLIGAQGVGRRSLKNKLIMWDPDRYGTTVPYTSRRPKDSEREGQGYSFVSRGEMEADVRAGRYLEHGEYEGNLYGTRIDSIRGVVAAGKVCVLDVNPQAVKVLRTAEFVPYVVFIEAPDFETLRAMNRAALESGISTKQLTEADLRRTVEESSRIQRGYGHYFDLCLVNSNLERTFRELQTAMEKLRTEPQWVPVSWVY

SEQ ID NO: 50322 - protein, 413 aa, Homo sapiens
  Payload ID: 10051
  Gene Symbol: MPP2
  Gene Name: membrane protein, palmitoylated 2 (MAGUK p55 subfamily member 2)
  Uniprot ID: Q14168
  ENSP ID: ENSP00000428136
MVGIRKTAGEHLGVTFRVEGGELVIARILHGGMVAQQGLLHVGDIIKEVNGQPVGSDPRALQELLRNASGSVILKILPSYQEPHLPRQVFVKCHFDYDPARDSLIPCKEAGLRFNAGDLLQIVNQDDANWWQACHVEGGSAGLIPSQLLEEKRKAFVKRDLELTPNSGTLCGSLSGKKKKRMMYLTTKNAEFDRHELLIYEEVARMPPFRRKTLVLIGAQGVGRRSLKNKLIMWDPDRYGTTVPYTSRRPKDSEREGQGYSFVSRGEMEADVRAGRYLEHGEYEGNLYGTRIDSIRGVVAAGKVCVLDVNPQAVKVLRTAEFVPYVVFIEAPDFETLRAMNRAALESGISTKQLTEADLRRTVEESSRIQRGYGHYFDLCLVNSNLERTFRELQTAMEKLRTEPQWVPVSWVY

SEQ ID NO: 50323 - protein, 597 aa, Homo sapiens
  Payload ID: 10051
  Gene Symbol: MPP2
  Gene Name: membrane protein, palmitoylated 2 (MAGUK p55 subfamily member 2)
  ENSP ID: ENSP00000428182
MSWAPPPQVGQNLRSQTVLRILNGMEDLMWVAMEERRFRALASFTMPVAATNSETAMQQVLDNLGSLPSATGAAELDLIFLRGIMESPIVRSLAKAHERLEETKLEAVRDNNLELVQEILRDLAQLAEQSSTAAELAHILQEPHFQSLLETHDSVASKTYETPPPSPGLDPTFSNQPVPPDAVRMVGIRKTAGEHLGVTFRVEGGELVIARILHGGMVAQQGLLHVGDIIKEVNGQPVGSDPRALQELLRNASGSVILKILPSYQEPHLPRQVFVKCHFDYDPARDSLIPCKEAGLRFNAGDLLQIVNQDDANWWQACHVEGGSAGLIPSQLLEEKRKAFVKRDLELTPNSGTLCGSLSGKKKKRMMYLTTKNAEFDRHELLIYEEVARMPPFRRKTLVLIGAQGVGRRSLKNKLIMWDPDRYGTTVPYTSRRPKDSEREGQGYSFVSRGEMEADVRAGRYLEHGEYEGNLYGTRIDSIRGVVAAGKVCVLDVNPQAVKVLRTAEFVPYVVFIEAPDFETLRAMNRAALESGISTKQLTEADLRRTVEESSRIQRGYGHYFDLCLVNSNLERTFRELQTAMEKLRTEPQWVPVSWVY

SEQ ID NO: 50324 - protein, 140 aa, Homo sapiens
  Payload ID: 10051
  Gene Symbol: MPP2
  Gene Name: membrane protein, palmitoylated 2 (MAGUK p55 subfamily member 2)
  ENSP ID: ENSP00000428218
MQQVLDNLGSLPSATGAAELDLIFLRGIMESPIVRSLAKAHERLEETKLEAVRDNNLELVQEILRDLAQLAEQSSTAAELAHILQEPHFQSLLETHDSVASKTYETPPPSPGLDPTFSNQPVPPDAVRMVGIRKTAGEHL

SEQ ID NO: 50325 - protein, 576 aa, Homo sapiens
  Payload ID: 10051
  Gene Symbol: MPP2
  Gene Name: membrane protein, palmitoylated 2 (MAGUK p55 subfamily member 2)
  ENSP ID: ENSP00000428286
MPVAATNSETAMQQVLDNLGSLPSATGAAELDLIFLRGIMESPIVRSLAKVIMVLWFMQQNVFVPMKYMLKYFGAHERLEETKLEAVRDNNLELVQEILRDLAQLAEQSSTAAELAHILQEPHFQSLLETHDSVASKTYETPPPSPGLDPTFSNQPVPPDAVRMVGIRKTAGEHLGVTFRVEGGELVIARILHGGMVAQQGLLHVGDIIKEVNGQPVGSDPRALQELLRNASGSVILKILPSYQEPHLPRQVFVKCHFDYDPARDSLIPCKEAGLRFNAGDLLQIVNQDDANWWQACHVEGGSAGLIPSQLLEEKRKAFVKRDLELTPNSGTLCGSLSGKKKKRMMYLTTKNAEFDRHELLIYEEVARMPPFRRKTLVLIGAQGVGRRSLKNKLIMWDPDRYGTTVPYTSRRPKDSEREGQGYSFVSRGEMEADVRAGRYLEHGEYEGNLYGTRIDSIRGVVAAGKVCVLDVNPQAVKVLRTAEFVPYVVFIEAPDFETLRAMNRAALESGISTKQLTEADLRRTVEESSRIQRGYGHYFDLCLVNSNLERTFRELQTAMEKLRTEPQWVPVSWVY

SEQ ID NO: 50326 - protein, 151 aa, Homo sapiens
  Payload ID: 10051
  Gene Symbol: MPP2
  Gene Name: membrane protein, palmitoylated 2 (MAGUK p55 subfamily member 2)
  ENSP ID: ENSP00000428354
MPVAATNSETAMQQVLDNLGSLPSATGAAELDLIFLRGIMESPIVRSLAKAHERLEETKLEAVRDNNLELVQEILRDLAQLAEQSSTAAELAHILQEPHFQSLLETHDSVASKTYETPPPSPGLDPTFSNQPVPPDAVRMVGIRKTAGEHL

SEQ ID NO: 50327 - protein, 189 aa, Homo sapiens
  Payload ID: 10051
  Gene Symbol: MPP2
  Gene Name: membrane protein, palmitoylated 2 (MAGUK p55 subfamily member 2)
  ENSP ID: ENSP00000428468
MQQVLDNLGSLPSATGAAELDLIFLRGIMESPIAHERLEETKLEAVRDNNLELVQEILRDLAQLAEQSSTAAELAHILQEPHFQSLLETHDSVASKTYETPPPSPGLDPTFSNQPVPPDAVRMVGIRKTAGEHLGVTFRVEGGELVIARILHGGMVAQQGLLHVGDIIKEVNGQPVGSDPRALQELLRN

SEQ ID NO: 50328 - protein, 143 aa, Homo sapiens
  Payload ID: 10051
  Gene Symbol: MPP2
  Gene Name: membrane protein, palmitoylated 2 (MAGUK p55 subfamily member 2)
  ENSP ID: ENSP00000428938
MPVAATNSETAMQQVLDNLGSLPSATGAAELDLIFLRGIMESPIVRSLAKVQCSREAHERLEETKLEAVRDNNLELVQEILRDLAQLAEQSSTAAELAHILQEPHFQSLLETHDSVASKTYETPPPSPGLDPTFSNQPVPPDA

SEQ ID NO: 50329 - protein, 31 aa, Homo sapiens
  Payload ID: 10051
  Gene Symbol: MPP2
  Gene Name: membrane protein, palmitoylated 2 (MAGUK p55 subfamily member 2)
  ENSP ID: ENSP00000429364
MPVAATNSETAMQQVLDNLGSLPSATGAAEL

SEQ ID NO: 50330 - protein, 73 aa, Homo sapiens
  Payload ID: 10051
  Gene Symbol: MPP2
  Gene Name: membrane protein, palmitoylated 2 (MAGUK p55 subfamily member 2)
  ENSP ID: ENSP00000430349
MPVAATNSETAMQQVLDNLGSLPSATGAAELDLIFLRGIMESPIVRSLAKAHERLEETKLEAVRDNNLELVQE

SEQ ID NO: 50331 - protein, 126 aa, Homo sapiens
  Payload ID: 10051
  Gene Symbol: MPP2
  Gene Name: membrane protein, palmitoylated 2 (MAGUK p55 subfamily member 2)
  ENSP ID: ENSP00000430443
MPVAATNSETAMQQVLDNLGSLPSATGAAELDLIFLRGIMESPIVRSLAKAHERLEETKLEAVRDNNLELVQEILRDLAQLAEQSSTAAELAHILQEPHFQSLLETHDSVASKTYETPPPSPGLDP

SEQ ID NO: 50332 - protein, 541 aa, Homo sapiens
  Payload ID: 10051
  Gene Symbol: MPP2
  Gene Name: membrane protein, palmitoylated 2 (MAGUK p55 subfamily member 2)
  ENSP ID: ENSP00000430540
MQQVLDNLGSLPSATGAAELDLIFLRGIMESPIVRSLAKAHERLEETKLEAVRDNNLELVQEILRDLAQLAEQSSTAAELAHILQEPHFQSLLETHDSVASKTYETPPPSPGLDPTFSNQPVPPDAVRMVGIRKTAGEHLGVTFRVEGGELVIARILHGGMVAQQGLLHVGDIIKEVNGQPVGSDPRALQELLRNASGSVILKILPSYQEPHLPRQVFVKCHFDYDPARDSLIPCKEAGLRFNAGDLLQIVNQDDANWWQACHVEGGSAGLIPSQLLEEKRKAFVKRDLELTPNSGTLCGSLSGKKKKRMMYLTTKNAEFDRHELLIYEEVARMPPFRRKTLVLIGAQGVGRRSLKNKLIMWDPDRYGTTVPYTSRRPKDSEREGQGYSFVSRGEMEADVRAGRYLEHGEYEGNLYGTRIDSIRGVVAAGKVCVLDVNPQAVKVLRTAEFVPYVVFIEAPDFETLRAMNRAALESGISTKQLTEADLRRTVEESSRIQRGYGHYFDLCLVNSNLERTFRELQTAMEKLRTEPQWVPVSWVY

SEQ ID NO: 50333 - protein, 148 aa, Homo sapiens
  Payload ID: 10051
  Gene Symbol: MPP2
  Gene Name: membrane protein, palmitoylated 2 (MAGUK p55 subfamily member 2)
  ENSP ID: ENSP00000430797
MPVAATNSETAMQQVLDNLGSLPSATGAAELDLIFLRGIMESPIVRSLAKAHERLEETKLEAVRDNNLELVQEILRDLAQLAEQSSTAAELAHILQEPHFQSLLETHDSVASKTYETPPPSPGLDPTFSNQPVPPDAVRMVGIRKTAG

SEQ ID NO: 50334 - protein, 541 aa, Homo sapiens; identical to SEQ ID NO: 50332
  Payload ID: 10051
  Gene Symbol: MPP2
  Gene Name: membrane protein, palmitoylated 2 (MAGUK p55 subfamily member 2)
  ENSP ID: ENSP00000438012

SEQ ID NO: 50335 - protein, 552 aa, Homo sapiens; identical to SEQ ID NO: 50320
  Payload ID: 10051
  Gene Symbol: MPP2
  Gene Name: membrane protein, palmitoylated 2 (MAGUK p55 subfamily member 2)
  ENSP ID: ENSP00000478528

SEQ ID NO: 50336 - protein, 186 aa, Homo sapiens
  Payload ID: 10051
  Gene Symbol: MPP2
  Gene Name: membrane protein, palmitoylated 2 (MAGUK p55 subfamily member 2)
  ENSP ID: ENSP00000479767
MQQVLDNLGSLPSATGAAELDLIFLRGIMESPIVRSLAKAHERLEETKLEAVRDNNLELVQEILRDLAQLAEQSSTAAELAHILQEPHFQSLLETHDSVASKTYETPPPSPGLDPTFSNQPVPPDAVRMVGIRKTAGEHLGVTFRVEGGELVIARILHGGMVAQQGLLHVGDIIKEVNGQPVGSDP

SEQ ID NO: 50337 - protein, 541 aa, Homo sapiens; identical to SEQ ID NO: 50332
  Payload ID: 10051
  Gene Symbol: MPP2
  Gene Name: membrane protein, palmitoylated 2 (MAGUK p55 subfamily member 2)
  ENSP ID: ENSP00000480071

SEQ ID NO: 50338 - protein, 112 aa, Homo sapiens
  Payload ID: 10051
  Gene Symbol: MPP2
  Gene Name: membrane protein, palmitoylated 2 (MAGUK p55 subfamily member 2)
  ENSP ID: ENSP00000483278
MPVAATNSETAMQQVLDNLGSLPSATGAAELDLIFLRGIMESPIVRSLAKAHERLEETKLEAVRDNNLELVQEILRDLAQLAEQSSTAAELAHILQEPHFQSLLETHDSVAS

SEQ ID NO: 50339 - protein, 573 aa, Homo sapiens
  Payload ID: 10051
  Gene Symbol: MPP2
  Gene Name: membrane protein, palmitoylated 2 (MAGUK p55 subfamily member 2)
  ENSP ID: ENSP00000486553
MPVAATNSETAMQQVLDNLGSLPSATGAAELDLIFLRGIMESPIVRSLAKVQCSREVGTRALPHLFCFHPQAHERLEETKLEAVRDNNLELVQEILRDLAQLAEQSSTAAELAHILQEPHFQSLLETHDSVASKTYETPPPSPGLDPTFSNQPVPPDAVRMVGIRKTAGEHLGVTFRVEGGELVIARILHGGMVAQQGLLHVGDIIKEVNGQPVGSDPRALQELLRNASGSVILKILPSYQEPHLPRQVFVKCHFDYDPARDSLIPCKEAGLRFNAGDLLQIVNQDDANWWQACHVEGGSAGLIPSQLLEEKRKAFVKRDLELTPNSGTLCGSLSGKKKKRMMYLTTKNAEFDRHELLIYEEVARMPPFRRKTLVLIGAQGVGRRSLKNKLIMWDPDRYGTTVPYTSRRPKDSEREGQGYSFVSRGEMEADVRAGRYLEHGEYEGNLYGTRIDSIRGVVAAGKVCVLDVNPQAVKVLRTAEFVPYVVFIEAPDFETLRAMNRAALESGISTKQLTEADLRRTVEESSRIQRGYGHYFDLCLVNSNLERTFRELQTAMEKLRTEPQWVPVSWVY

SEQ ID NO: 50340 - protein, 585 aa, Homo sapiens
  Payload ID: 10052
  Gene Symbol: MPP3
  Gene Name: membrane protein, palmitoylated 3 (MAGUK p55 subfamily member 3)
  Uniprot ID: Q13368
  ENSP ID: ENSP00000381425
MPVLSEDSGLHETLALLTSQLRPDSNHKEEMGFLRDVFSEKSLSYLMKIHEKLRYYERQSPTPVLHSAVALAEDVMEELQAASVHSDERELLQLLSTPHLRAVLMVHDTVAQKNFDPVLPPLPDNIDEDFDEESVKIVRLVKNKEPLGATIRRDEHSGAVVVARIMRGGAADRSGLVHVGDELREVNGIAVLHKRPDEISQILAQSQGSITLKIIPATQEEDRLKESKVFMRALFHYNPREDRAIPCQEAGLPFQRRQVLEVVSQDDPTWWQAKRVGDTNLRAGLIPSKGFQERRLSYRRAAGTLPSPQSLRKPPYDQPCDKETCDCEGYLKGHYVAGLRRSFRLGCRERLGGSQEGKMSSGAESPELLTYEEVARYQHQPGERPRLVVLIGSLGARLHELKQKVVAENPQHFGVAVPHTTRPRKSHEKEGVEYHFVSKQAFEADLHHNKFLEHGEYKENLYGTSLEAIQAVMAKNKVCLVDVEPEALKQLRTSEFKPYIIFVKPAIQEKRKTPPMSPACEDTAAPFDEQQQEMAASAAFIDRHYGHLVDAVLVKEDLQGAYSQLKVVLEKLSKDTHWVPVSWVR

SEQ ID NO: 50341 - protein, 610 aa, Homo sapiens
  Payload ID: 10052
  Gene Symbol: MPP3
  Gene Name: membrane protein, palmitoylated 3 (MAGUK p55 subfamily member 3)
  ENSP ID: ENSP00000381430
MELQYPPPPPSPRICRERSGGDNASMPVLSEDSGLHETLALLTSQLRPDSNHKEEMGFLRDVFSEKSLSYLMKIHEKLRYYERQSPTPVLHSAVALAEDVMEELQAASVHSDERELLQLLSTPHLRAVLMVHDTVAQKNFDPVLPPLPDNIDEDFDEESVKIVRLVKNKEPLGATIRRDEHSGAVVVARIMRGGAADRSGLVHVGDELREVNGIAVLHKRPDEISQILAQSQGSITLKIIPATQEEDRLKESKVFMRALFHYNPREDRAIPCQEAGLPFQRRQVLEVVSQDDPTWWQAKRVGDTNLRAGLIPSKGFQERRLSYRRAAGTLPSPQSLRKPPYDQPCDKETCDCEGYLKGHYVAGLRRSFRLGCRERLGGSQEGKMSSGAESPELLTYEEVARYQHQPGERPRLVVLIGSLGARLHELKQKVVAENPQHFGVAVPHTTRPRKSHEKEGVEYHFVSKQAFEADLHHNKFLEHGEYKENLYGTSLEAIQAVMAKNKVCLVDVEPEALKQLRTSEFKPYIIFVKPAIQEKRKTPPMSPACEDTAAPFDEQQQEMAASAAFIDRHYGHLVDAVLVKEDLQGAYSQLKVVLEKLSKDTHWVPVSWVR

SEQ ID NO: 50342 - protein, 315 aa, Homo sapiens
  Payload ID: 10052
  Gene Symbol: MPP3
  Gene Name: membrane protein, palmitoylated 3 (MAGUK p55 subfamily member 3)
  ENSP ID: ENSP00000465486
MPVLSEDSGLHETLALLTSQLRPDSNHKEEMGFLRDVFSEKSLSYLMKIHEKLRYYERQSPTPVLHSAVALAEDVMEELQAASVHSDERELLQLLSTPHLRAVLMVHDTVAQKNFDPVLPPLPDNIDEDFDEESVKIVRLVKNKEPLGATIRRDEHSGAVVVARIMRGGAADRSGLVHVGDELREVNGIAVLHKRPDEISQILAQSQGSITLKIIPATQEEDRLKESKVFMRALFHYNPREDRAIPCQEAGLPFQRRQVLEVVSQDDPTWWQAKRVGDTNLRAGLIPSKGFQERRLSYRRAAGTLPSPQSLRKPP

SEQ ID NO: 50343 - protein, 20 aa, Homo sapiens
  Payload ID: 10052
  Gene Symbol: MPP3
  Gene Name: membrane protein, palmitoylated 3 (MAGUK p55 subfamily member 3)
  ENSP ID: ENSP00000467453
GDTNLRAGLIPSKGFQERRF

SEQ ID NO: 50344 - protein, 593 aa, Homo sapiens
  Payload ID: 10053
  Gene Symbol: MPP4
  Gene Name: membrane protein, palmitoylated 4 (MAGUK p55 subfamily member 4)
  Uniprot ID: Q96JB8
  ENSP ID: ENSP00000319363
MIQSDKGADPPDKKDMKLSTATNPQNGLSQILRLVLQELSLFYGRDVNGVCLLYDLLHSPWLQALLKIYDCLQEFKEKKLVPATPHAQVLSYEVVELLRETPTSPEIQELRQMLQAPHFKALLSAHDTIAQKDFEPLLPPLPDNIPESEEAMRIVCLVKNQQPLGATIKRHEMTGDILVARIIHGGLAERSGLLYAGDKLVEVNGVSVEGLDPEQVIHILAMSRGTIMFKVVPVSDPPVNSQQMDPDIPCMDAGLPFQKGDILQIVDQNDALWWQARKISDPATCAGLVPSNHLLKRKQREFWWSQPYQPHTCLKSTLYKEEFVGYGQKFFIAGFRRSMRLCRRKSHLSPLHASVCCTGSCYSAVGAPYEEVVRYQRRPSDKYRLIVLMGPSGVGVNELRRQLIEFNPSHFQSAVPHTTRTKKSYEMNGREYHYVSKETFENLIYSHRMLEYGEYKGHLYGTSVDAVQTVLVEGKICVMDLEPQDIQGVRTHELKPYVIFIKPSNMRCMKQSRKNAKVITDYYVDMKFKDEDLQEMENLAQRMETQFGQFFDHVIVNDSLHDACAQLLSAIQKAQEEPQWVPATWISSDTESQ

SEQ ID NO: 50345 - protein, 630 aa, Homo sapiens
  Payload ID: 10053
  Gene Symbol: MPP4
  Gene Name: membrane protein, palmitoylated 4 (MAGUK p55 subfamily member 4)
  ENSP ID: ENSP00000353047
MIQSDKGADPPDKKDMKLSTATNPQNGLSQILRLVLQELSLFYGRDVNGVCLLYDLLHSPWLQALLKIYDCLQEFKEKKLVPATPHAQVLSYEVVELLRETPTSPEIQELRQMLQAPHFKALLSAHDTIAQKDFEPLLPPLPDNIPESEEAMRIVCLVKNQQPLGATIKRHEMTGDILVARIIHGGLAERSGLLYAGDKLVEVNGVSVEGLDPEQVIHILAMSRGTIMFKVVPVSDPPVNSQQMVYVRAMTEYWPQEDPDIPCMDAGLPFQKGDILQIVDQNDALWWQARKISDPATCAGLVPSNHLLKRKQREFWWSQPYQPHTCLKSTLSISMEEEDDMKIDEKCVEAEELSEDKEEFVGYGQKFFIAGFRRSMRLCRRKSHLSPLHASVCCTGSCYSAVGAPYEEVVRYQRRPSDKYRLIVLMGPSGVGVNELRRQLIEFNPSHFQSAVPHTTRTKKSYEMNGREYHYVSKETFENLIYSHRMLEYGEYKGHLYGTSVDAVQTVLVEGKICVMDLEPQDIQGVRTHELKPYVIFIKPSNMRCMKQSRKNAKVITDYYVDMKFKDEDLQEMENLAQRMETQFGQFFDHVIVNDSLHDACAQLLSAIQKAQEEPQWVPATWISSDTESQ

SEQ ID NO: 50346 - protein, 562 aa, Homo sapiens
  Payload ID: 10053
  Gene Symbol: MPP4
  Gene Name: membrane protein, palmitoylated 4 (MAGUK p55 subfamily member 4)
  ENSP ID: ENSP00000380095
MIQSDKGADPPDKKDMKLSTATNPQNGLSQILRLVLQELSLFYGRDVNGVCLLYDLLHSPWLQALLKIYDCLQEFKEKKLVPATPHAQVLSYEVVELLRETPTSPEIQELRQMLQAPHFKGATIKRHEMTGDILVARIIHGGLAERSGLLYAGDKLVEVNGVSVEGLDPEQVIHILAMSRGTIMFKVVPVSDPPVNSQQMVYVRAMTEYWPQEDPDIPCMDAGLPFQKGDILQIVDQNDALWWQARKISDPATCAGLVPSNHLLKRKQREFWWSQPYQPHTCLKSTLYKEEFVGYGQKFFIAGFRRSMRLCRRKSHLSPLHASVCCTGSCYSAVGAPYEEVVRYQRRPSDKYRLIVLMGPSGVGVNELRRQLIEFNPSHFQSAVPHTTRTKKSYEMNGREYHYVSKETFENLIYSHRMLEYGEYKGHLYGTSVDAVQTVLVEGKICVMDLEPQDIQGVRTHELKPYVIFIKPSNMRCMKQSRKNAKVITDYYVDMKFKDEDLQEMENLAQRMETQFGQFFDHVIVNDSLHDACAQLLSAIQKAQEEPQWVPATWISSDTESQ

SEQ ID NO: 50347 - protein, 434 aa, Homo sapiens
  Payload ID: 10053
  Gene Symbol: MPP4
  Gene Name: membrane protein, palmitoylated 4 (MAGUK p55 subfamily member 4)
  ENSP ID: ENSP00000386580
MHVYSLAEAPAGRMIQSDKGADPPDKKDMKLSTATNPQNGLSQILRLVLQELSLFYGRDVNGVCLLYDLLHSPWLQALLKIYDCLQEFKEKKLVPATPHAQVLSYEVVELLRETPTSPEIQELRQMLQAPHFKALLSAHDTIAQKDFEPLLPPLPDNIPESEEAMRIVCLVKNQQPLGATIKRHEMTGDILVARIIHGGLAERSGLLYAGDKLVEVNGVSVEGLDPEQVIHILAMSRGTIMFKVVPVSDPPVNSQQMVYVRAMTEYWPQEDPDIPCMDAGLPFQKGDILQIVDQNDALWWQARKISDPATCAGLVPSNHLLKRKQREFWWSQPYQPHTCLKSTLFLGYMCRTCSNFYGRRWSFALVAQAGVQWHYLDSLQPLPPGFKRFSCLSLPRSWDYIEDDMKIDEKCVEAAPAAPLTVIMAQLPNTMCFM

SEQ ID NO: 50348 - protein, 637 aa, Homo sapiens
  Payload ID: 10053
  Gene Symbol: MPP4
  Gene Name: membrane protein, palmitoylated 4 (MAGUK p55 subfamily member 4)
  Uniprot ID: Q96JB8
  ENSP ID: ENSP00000387278
MIQSDKGADPPDKKDMKLSTATNPQNGLSQILRLVLQELSLFYGRDVNGVCLLYDLLHSPWLQALLKIYDCLQEFKEKKLVPATPHAQVLSYEVVELLRETPTSPEIQELRQMLQAPHFKALLSAHDTIAQKDFEPLLPPLPDNIPESEEAMRIVCLVKNQQPLGATIKRHEMTGDILVARIIHGGLAERSGLLYAGDKLVEVNGVSVEGLDPEQVIHILAMSRGTIMFKVVPVSDPPVNSQQMVYVRAMTEYWPQEDPDIPCMDAGLPFQKGDILQIVDQNDALWWQARKISDPATCAGLVPSNHLLKRKQREFWWSQPYQPHTCLKSTLSISMEEEDDMKIDEKCVEADEETFESEELSEDKEEFVGYGQKFFIAGFRRSMRLCRRKSHLSPLHASVCCTGSCYSAVGAPYEEVVRYQRRPSDKYRLIVLMGPSGVGVNELRRQLIEFNPSHFQSAVPHTTRTKKSYEMNGREYHYVSKETFENLIYSHRMLEYGEYKGHLYGTSVDAVQTVLVEGKICVMDLEPQDIQGVRTHELKPYVIFIKPSNMRCMKQSRKNAKVITDYYVDMKFKDEDLQEMENLAQRMETQFGQFFDHVIVNDSLHDACAQLLSAIQKAQEEPQWVPATWISSDTESQ

SEQ ID NO: 50349 - protein, 579 aa, Homo sapiens
  Payload ID: 10053
  Gene Symbol: MPP4
  Gene Name: membrane protein, palmitoylated 4 (MAGUK p55 subfamily member 4)
  ENSP ID: ENSP00000387293
MIQSDKGADPPDKKDMKLSTATNPQNGLSQILRLVLQELSLFYGRDVNGVCLLYDLLHSPWLQALLKIYDCLQEFKEKKLVPATPHAQVLSYEALLSAHDTIAQKDFEPLLPPLPDNIPESEEAMRIVCLVKNQQPLGATIKRHEMTGDILVARIIHGGLAERSGLLYAGDKLVEVNGVSVEGLDPEQVIHILAMSRGTIMFKVVPVSDPPVNSQQMVYVRAMTEYWPQEDPDIPCMDAGLPFQKGDILQIVDQNDALWWQARKISDPATCAGLVPSNHLLKRKQREFWWSQPYQPHTCLKSTLYKEEFVGYGQKFFIAGFRRSMRLCRRKSHLSPLHASVCCTGSCYSAVGAPYEEVVRYQRRPSDKYRLIVLMGPSGVGVNELRRQLIEFNPSHFQSAVPHTTRTKKSYEMNGREYHYVSKETFENLIYSHRMLEYGEYKGHLYGTSVDAVQTVLVEGKICVMDLEPQDIQGVRTHELKPYVIFIKPSNMRCMKQSRKNAKVITDYYVDMKFKDEDLQEMENLAQRMETQFGQFFDHVIVNDSLHDACAQLLSAIQKAQEEPQWVPATWISSDTESQ

SEQ ID NO: 50350 - protein, 630 aa, Homo sapiens; identical to SEQ ID NO: 50345
  Payload ID: 10053
  Gene Symbol: MPP4
  Gene Name: membrane protein, palmitoylated 4 (MAGUK p55 subfamily member 4)
  ENSP ID: ENSP00000406160

SEQ ID NO: 50351 - protein, 613 aa, Homo sapiens
  Payload ID: 10053
  Gene Symbol: MPP4
  Gene Name: membrane protein, palmitoylated 4 (MAGUK p55 subfamily member 4)
  ENSP ID: ENSP00000416781
MIQSDKGADPPDKKDMKLSTATNPQNGLSQILRLVLQELSLFYGRDVNGVCLLYDLLHSPWLQALLKIYDCLQEFKEKKLVPATPHAQVLSYEVVELLRETPTSPEIQELRQMLQAPHFKALLSAHDTIAQKDFEPLLPPLPDNIPESEEAMRIVCLVKNQQPLGATIKRHEMTGDILVARIIHGGLAERSGLLYAGDKLVEVNGVSVEGLDPEQVIHILAMSRGTIMFKVVPVSDPPVNSQQMVYVRAMTEYWPQEDPDIPCMDAGLPFQKGDILQIVDQNDALWWQARKISDPATCAGLVPSNHLLKRKQREFWWSQPYQPHTCLKSTLYEETFESDKEEFVGYGQKFFIAGFRRSMRLCRRKSHLSPLHASVCCTGSCYSAVGAPYEEVVRYQRRPSDKYRLIVLMGPSGVGVNELRRQLIEFNPSHFQSAVPHTTRTKKSYEMNGREYHYVSKETFENLIYSHRMLEYGEYKGHLYGTSVDAVQTVLVEGKICVMDLEPQDIQGVRTHELKPYVIFIKPSNMRCMKQSRKNAKVITDYYVDMKFKDEDLQEMENLAQRMETQFGQFFDHVIVNDSLHDACAQLLSAIQKAQEEPQWVPATWISSDTESQ

SEQ ID NO: 50352 - protein, 171 aa, Homo sapiens
  Payload ID: 10053
  Gene Symbol: MPP4
  Gene Name: membrane protein, palmitoylated 4 (MAGUK p55 subfamily member 4)
  ENSP ID: ENSP00000473500
MHVYSLAEAPAGRMIQSDKGADPPDKKDMKLSTATNPQNGLSQILRLVLQELSLFYGRDVNGVCLLYDLLHSPWLQALLKIYDCLQEFKEKKLVPATPHAQVLSYEVVELLRETPTSPEIQELRQMLQAPHFKALLSAHDTIAQKDFEPLLPPLPDNIPESEEAMRIVCLV

SEQ ID NO: 50353 - protein, 606 aa, Homo sapiens
  Payload ID: 10053
  Gene Symbol: MPP4
  Gene Name: membrane protein, palmitoylated 4 (MAGUK p55 subfamily member 4)
  ENSP ID: ENSP00000478875
MIQSDKGADPPDKKDMKLSTATNPQNGLSQILRLVLQELSLFYGRDVNGVCLLYDLLHSPWLQALLKIYDCLQEFKEKKLVPATPHAQVLSYEVVELLRETPTSPEIQELRQMLQAPHFKALLSAHDTIAQKDFEPLLPPLPDNIPESEEAMRIVCLVKNQQPLGATIKRHEMTGDILVARIIHGGLAERSGLLYAGDKLVEVNGVSVEGLDPEQVIHILAMSRGTIMFKVVPVSDPPVNSQQMVYVRAMTEYWPQEDPDIPCMDAGLPFQKGDILQIVDQNDALWWQARKISDPATCAGLVPSNHLLKRKQREFWWSQPYQPHTCLKSTLYKEEFVGYGQKFFIAGFRRSMRLCRRKSHLSPLHASVCCTGSCYSAVGAPYEEVVRYQRRPSDKYRLIVLMGPSGVGVNELRRQLIEFNPSHFQSAVPHTTRTKKSYEMNGREYHYVSKETFENLIYSHRMLEYGEYKGHLYGTSVDAVQTVLVEGKICVMDLEPQDIQGVRTHELKPYVIFIKPSNMRCMKQSRKNAKVITDYYVDMKFKDEDLQEMENLAQRMETQFGQFFDHVIVNDSLHDACAQLLSAIQKAQEEPQWVPATWISSDTESQ

SEQ ID NO: 50354 - protein, 675 aa, Homo sapiens
  Payload ID: 10054
  Gene Symbol: MPP5
  Gene Name: membrane protein, palmitoylated 5 (MAGUK p55 subfamily member 5)
  Uniprot ID: Q8N3R9
  ENSP ID: ENSP00000261681
MTTSHMNGHVTEESDSEVKNVDLASPEEHQKHREMAVDCPGDLGTRMMPIRRSAQLERIRQQQEDMRRRREEEGKKQELDLNSSMRLKKLAQIPPKTGIDNPMFDTEEGIVLESPHYAVKILEIEDLFSSLKHIQHTLVDSQSQEDISLLLQLVQNKDFQNAFKIHNAITVHMNKASPPFPLISNAQDLAQEVQTVLKPVHHKEGQELTALLNTPHIQALLLAHDKVAEQEMQLEPITDERVYESIGQYGGETVKIVRIEKARDIPLGATVRNEMDSVIISRIVKGGAAEKSGLLHEGDEVLEINGIEIRGKDVNEVFDLLSDMHGTLTFVLIPSQQIKPPPAKETVIHVKAHFDYDPSDDPYVPCRELGLSFQKGDILHVISQEDPNWWQAYREGDEDNQPLAGLVPGKSFQQQREAMKQTIEEDKEPEKSGKLWCAKKNKKKRKKVLYNANKNDDYDNEEILTYEEMSLYHQPANRKRPIILIGPQNCGQNELRQRLMNKEKDRFASAVPHTTRSRRDQEVAGRDYHFVSRQAFEADIAAGKFIEHGEFEKNLYGTSIDSVRQVINSGKICLLSLRTQSLKTLRNSDLKPYIIFIAPPSQERLRALLAKEGKNPKPEELREIIEKTREMEQNNGHYFDTAIVNSDLDKAYQELLRLINKLDTEPQWVPSTWLR

SEQ ID NO: 50355 - protein, 124 aa, Homo sapiens
  Payload ID: 10054
  Gene Symbol: MPP5
  Gene Name: membrane protein, palmitoylated 5 (MAGUK p55 subfamily member 5)
  ENSP ID: ENSP00000450550
MTTSHMNGHVTEESDSEVKNVDLASPEEHQKHREMAVDCPGDLGTRMMPIRRSAQLERIRQQQEDMRRRREEEGKKQELDLNSSMRLKKLAQIPPKTGIDNPMFDTEEGIVLESPHYAVKILGK

SEQ ID NO: 50356 - protein, 149 aa, Homo sapiens
  Payload ID: 10054
  Gene Symbol: MPP5
  Gene Name: membrane protein, palmitoylated 5 (MAGUK p55 subfamily member 5)
  ENSP ID: ENSP00000450656
MAVDCPGDLGTRMMPIRRSAQLERIRQQQEDMRRRREEEGKKQELDLNSSMRLKKLAQIPPKTGIDNPMFDTEEGIVLESPHYAVKILEIEDLFSSLKHIQHTLVDSQSQEDISLLLQLVQNKDFQNAFKIHNAITVHMNKASPPFPLI

SEQ ID NO: 50357 - protein, 641 aa, Homo sapiens
  Payload ID: 10054
  Gene Symbol: MPP5
  Gene Name: membrane protein, palmitoylated 5 (MAGUK p55 subfamily member 5)
  Uniprot ID: Q8N3R9
  ENSP ID: ENSP00000451488
MAVDCPGDLGTRMMPIRRSAQLERIRQQQEDMRRRREEEGKKQELDLNSSMRLKKLAQIPPKTGIDNPMFDTEEGIVLESPHYAVKILEIEDLFSSLKHIQHTLVDSQSQEDISLLLQLVQNKDFQNAFKIHNAITVHMNKASPPFPLISNAQDLAQEVQTVLKPVHHKEGQELTALLNTPHIQALLLAHDKVAEQEMQLEPITDERVYESIGQYGGETVKIVRIEKARDIPLGATVRNEMDSVIISRIVKGGAAEKSGLLHEGDEVLEINGIEIRGKDVNEVFDLLSDMHGTLTFVLIPSQQIKPPPAKETVIHVKAHFDYDPSDDPYVPCRELGLSFQKGDILHVISQEDPNWWQAYREGDEDNQPLAGLVPGKSFQQQREAMKQTIEEDKEPEKSGKLWCAKKNKKKRKKVLYNANKNDDYDNEEILTYEEMSLYHQPANRKRPIILIGPQNCGQNELRQRLMNKEKDRFASAVPHTTRSRRDQEVAGRDYHFVSRQAFEADIAAGKFIEHGEFEKNLYGTSIDSVRQVINSGKICLLSLRTQSLKTLRNSDLKPYIIFIAPPSQERLRALLAKEGKNPKPEELREIIEKTREMEQNNGHYFDTAIVNSDLDKAYQELLRLINKLDTEPQWVPSTWLR

SEQ ID NO: 50358 - protein, 4 aa, Homo sapiens
  Payload ID: 10054
  Gene Symbol: MPP5
  Gene Name: membrane protein, palmitoylated 5 (MAGUK p55 subfamily member 5)
  ENSP ID: ENSP00000451571
MAVD

SEQ ID NO: 50359 - protein, 540 aa, Homo sapiens
  Payload ID: 10055
  Gene Symbol: MPP6
  Gene Name: membrane protein, palmitoylated 6 (MAGUK p55 subfamily member 6)
  Uniprot ID: Q9NZW5
  ENSP ID: ENSP00000222644
MQQVLENLTELPSSTGAEEIDLIFLKGIMENPIVKSLAKAHERLEDSKLEAVSDNNLELVNEILEDITPLINVDENVAELVGILKEPHFQSLLEAHDIVASKCYDSPPSSPEMNNSSINNQLLPVDAIRILGIHKRAGEPLGVTFRVENNDLVIARILHGGMIDRQGLLHVGDIIKEVNGHEVGNNPKELQELLKNISGSVTLKILPSYRDTITPQQVFVKCHFDYNPYNDNLIPCKEAGLKFSKGEILQIVNREDPNWWQASHVKEGGSAGLIPSQFLEEKRKAFVRRDWDNSGPFCGTISSKKKKKMMYLTTRNAEFDRHEIQIYEEVAKMPPFQRKTLVLIGAQGVGRRSLKNRFIVLNPTRFGTTVPFTSRKPREDEKDGQAYKFVSRSEMEADIKAGKYLEHGEYEGNLYGTKIDSILEVVQTGRTCILDVNPQALKVLRTSEFMPYVVFIAAPELETLRAMHKAVVDAGITTKLLTDSDLKKTVDESARIQRAYNHYFDLIIINDNLDKAFEKLQTAIEKLRMEPQWVPISWVY

SEQ ID NO: 50360 - protein, 540 aa, Homo sapiens; identical to SEQ ID NO: 50359
  Payload ID: 10055
  Gene Symbol: MPP6
  Gene Name: membrane protein, palmitoylated 6 (MAGUK p55 subfamily member 6)
  Uniprot ID: Q9NZW5
  ENSP ID: ENSP00000379737

SEQ ID NO: 50361 - protein, 428 aa, Homo sapiens
  Payload ID: 10055
  Gene Symbol: MPP6
  Gene Name: membrane protein, palmitoylated 6 (MAGUK p55 subfamily member 6)
  ENSP ID: ENSP00000386262
MNNSSINNQLLPVDAIRILGIHKRAGEPLGVTFRVENNDLVIARILHGGMIDRQGLLHVGDIIKEVNGHEVGNNPKELQELLKNISGSVTLKILPSYRDTITPQQVFVKCHFDYNPYNDNLIPCKEAGLKFSKGEILQIVNREDPNWWQASHVKEGGSAGLIPSQFLEEKRKAFVRRDWDNSGPFCGTISSKKKKKMMYLTTRNAEFDRHEIQIYEEVAKMPPFQRKTLVLIGAQGVGRRSLKNRFIVLNPTRFGTTVPFTSRKPREDEKDGQAYKFVSRSEMEADIKAGKYLEHGEYEGNLYGTKIDSILEVVQTGRTCILDVNPQALKVLRTSEFMPYVVFIAAPELETLRAMHKAVVDAGITTKLLTDSDLKKTVDESARIQRAYNHYFDLIIINDNLDKAFEKLQTAIEKLRMEPQWVPISWVY

SEQ ID NO: 50362 - protein, 307 aa, Homo sapiens
  Payload ID: 10055
  Gene Symbol: MPP6
  Gene Name: membrane protein, palmitoylated 6 (MAGUK p55 subfamily member 6)
  ENSP ID: ENSP00000391020
MQQVLENLTELPSSTGAEEIDLIFLKGIMENPIVKSLAKAHERLEDSKLEAVSDNNLELVNEILEDITPLINVDENVAELVGILKEPHFQSLLEAHDIVASKCYDSPPSSPEMNNSSINNQLLPVDAIRILGIHKRAGEPLGVTFRVENNDLVIARILHGGMIDRQGLLHVGDIIKEVNGHEVGNNPKELQELLKNISGSVTLKILPSYRDTITPQQVFVKCHFDYNPYNDNLIPCKEAGLKFSKGEILQIVNREDPNWWQASHVKEGGSAGLIPSQFLEEKRKAFVRRDWDNSGPFCGTISSKKKK

SEQ ID NO: 50363 - protein, 217 aa, Homo sapiens
  Payload ID: 10055
  Gene Symbol: MPP6
  Gene Name: membrane protein, palmitoylated 6 (MAGUK p55 subfamily member 6)
  ENSP ID: ENSP00000395859
MQQVLENLTELPSSTGAEEIDLIFLKGIMENPIVKSLAKAHERLEDSKLEAVSDNNLELVNEILEDITPLINVDENVAELVGILKEPHFQSLLEAHDIVASKCYDSPPSSPEMNNSSINNQLLPVDAIRILGIHKRAGEPLGVTFRVENNDLVIARILHGGMIDRQGLLHVGDIIKEVNGHEVGNNPKELQELLKNISGSVTLKILPSYRDTITPQQ

SEQ ID NO: 50364 - protein, 41 aa, Homo sapiens
  Payload ID: 10055
  Gene Symbol: MPP6
  Gene Name: membrane protein, palmitoylated 6 (MAGUK p55 subfamily member 6)
  ENSP ID: ENSP00000400515
MQQVLENLTELPSSTGAEEIDLIFLKGIMENPIVKSLAKGL

SEQ ID NO: 50365 - protein, 64 aa, Homo sapiens
  Payload ID: 10055
  Gene Symbol: MPP6
  Gene Name: membrane protein, palmitoylated 6 (MAGUK p55 subfamily member 6)
  ENSP ID: ENSP00000473560
  MOD_RES (1)..(1): Any amino acid
XSGPFCGTISSKKKKKMMYLTTRNAVAEDDRNKKQLYESEISGGLIKGVGNFKSTFLTSELPLC

SEQ ID NO: 50366 - protein, 41 aa, Homo sapiens; identical to SEQ ID NO: 50364
  Payload ID: 10055
  Gene Symbol: MPP6
  Gene Name: membrane protein, palmitoylated 6 (MAGUK p55 subfamily member 6)
  ENSP ID: ENSP00000487215

SEQ ID NO: 50367 - protein, 576 aa, Homo sapiens
  Payload ID: 10056
  Gene Symbol: MPP7
  Gene Name: membrane protein, palmitoylated 7 (MAGUK p55 subfamily member 7)
  Uniprot ID: Q5T2T1
  ENSP ID: ENSP00000337907
MPALSTGSGSDTGLYELLAALPAQLQPHVDSQEDLTFLWDMFGEKSLHSLVKIHEKLHYYEKQSPVPILHGAAALADDLAEELQNKPLNSEIRELLKLLSKPNVKALLSVHDTVAQKNYDPVLPPMPEDIDDEEDSVKIIRLVKNREPLGATIKKDEQTGAIIVARIMRGGAADRSGLIHVGDELREVNGIPVEDKRPEEIIQILAQSQGAITFKIIPGSKEETPSKEGKMFIKALFDYNPNEDKAIPCKEAGLSFKKGDILQIMSQDDATWWQAKHEADANPRAGLIPSKHFQERRLALRRPEILVQPLKVSNRKSSGFRKSFRLSRKDKKTNKSMYECKKSDQYDTADVPTYEEVTPYRRQTNEKYRLVVLVGPVGVGLNELKRKLLISDTQHYGVTVPHTTRARRSQESDGVEYIFISKHLFETDVQNNKFIEYGEYKNNYYGTSIDSVRSVLAKNKVCLLDVQPHTVKHLRTLEFKPYVIFIKPPSIERLRETRKNAKIISSRDDQGAAKPFTEEDFQEMIKSAQIMESQYGHLFDKIIINDDLTVAFNELKTTFDKLETETHWVPVSWLHS

SEQ ID NO: 50368 - protein, 576 aa, Homo sapiens; identical to SEQ ID NO: 50367
  Payload ID: 10056
  Gene Symbol: MPP7
  Gene Name: membrane protein, palmitoylated 7 (MAGUK p55 subfamily member 7)
  Uniprot ID: Q5T2T1
  ENSP ID: ENSP00000364871

SEQ ID NO: 50369 - protein, 576 aa, Homo sapiens; identical to SEQ ID NO: 50367
  Payload ID: 10056
  Gene Symbol: MPP7
  Gene Name: membrane protein, palmitoylated 7 (MAGUK p55 subfamily member 7)
  Uniprot ID: Q5T2T1
  ENSP ID: ENSP00000364884

SEQ ID NO: 50370 - protein, 312 aa, Homo sapiens
  Payload ID: 10056
  Gene Symbol: MPP7
  Gene Name: membrane protein, palmitoylated 7 (MAGUK p55 subfamily member 7)
  ENSP ID: ENSP00000398319
MPALSTGSGSDTGLYELLAALPAQLQPHVDSQEDLTFLWDMFGEKSLHSLVKHFQERRLALRRPEILVQPLKVSNRKSSGFRKSFRLSRKDKKTNKSMYECKKSDQYDTADVPTYEEVTPYRRQTNEKYRLVVLVGPVGVGLNELKRKLLISDTQHYGVTVPHTTRARRSQESDGVEYIFISKHLFETDVQNNKFIEYGEYKNNYYGTSIDSVRSVLAKNKVCLLDVQPHTVKHLRTLEFKPYVIFIKPPSIERLRETRKNAKIISSRDDQGAAKPFTEEDFQEMIKSAQIMESQYGHLFDKIIINDDLTVA

SEQ ID NO: 50371 - protein, 454 aa, Homo sapiens
  Payload ID: 10056
  Gene Symbol: MPP7
  Gene Name: membrane protein, palmitoylated 7 (MAGUK p55 subfamily member 7)
  ENSP ID: ENSP00000473899
MPALSTGSGSDTGLYELLAALPAQLQPHVDSQEDLTFLWDMFGEKSLHSLVKIHEKLHYYEKQSPVPILHGAAALADDLAEELQNKPLNSEIRELLKLLSKPNVKALLSVHDTVAQKNYDPVLPPMPEDIDDEEDSVKIIRLVKNREPLGATIKKDEQTGAIIVARIMRGGAADRSGLIHVGDELREVNGIPVEDKRPEEIIQILAQSQGAITFKIIPGSKEETPSKEGKMFIKALFDYNPNEDKAIPCKEAGLSFKKGDILQIMSQDDATWWQAKHEADANPRAGLIPSKHFQERRLALRRPEILVQPLKVSNRKSSGFRKSFRLSRKDKKTNKSMYECKKSDQYDTADVPTYEEVTPYRRQTNEKYRLVVLVGPVGVGLNELKRKLLISDTQHYGVTVPHTTRARRSQESDGVEYIFISKHLFETDVQNNKYVDIFENFHVTVFYKHMPVPF

SEQ ID NO: 50372 - protein, 289 aa, Homo sapiens
  Payload ID: 10057
  Gene Symbol: MARCH1
  Gene Name: membrane-associated ring finger (C3HC4) 1, E3 ubiquitin protein ligase
  Uniprot ID: Q8TCQ1
  ENSP ID: ENSP00000274056
MLGWCEAIARNPHRIPNNTRTPEISGDLADASQTSTLNEKSPGRSASRSSNISKASSPTTGTAPRSQSRLSVCPSTQDICRICHCEGDEESPLITPCRCTGTLRFVHQSCLHQWIKSSDTRCCELCKYDFIMETKLKPLRKWEKLQMTTSERRKIFCSVTFHVIAITCVVWSLYVLIDRTAEEIKQGNDNGVLEWPFWTKLVVVAIGFTGGLVFMYVQCKVYVQLWRRLKAYNRVIFVQNCPDTAKKLEKNFSCNVNTDIKDAVVVPVPQTGANSLPSAEGGPPEVVSV

SEQ ID NO: 50373 - protein, 272 aa, Homo sapiens
  Payload ID: 10057
  Gene Symbol: MARCH1
  Gene Name: membrane-associated ring finger (C3HC4) 1, E3 ubiquitin protein ligase
  Uniprot ID: Q8TCQ1
  ENSP ID: ENSP00000345676
MTSSHVCCNFLNMWKKSKISTMYYLNQDAKLSNLFLQASSPTTGTAPRSQSRLSVCPSTQDICRICHCEGDEESPLITPCRCTGTLRFVHQSCLHQWIKSSDTRCCELCKYDFIMETKLKPLRKWEKLQMTTSERRKIFCSVTFHVIAITCVVWSLYVLIDRTAEEIKQGNDNGVLEWPFWTKLVVVAIGFTGGLVFMYVQCKVYVQLWRRLKAYNRVIFVQNCPDTAKKLEKNFSCNVNTDIKDAVVVPVPQTGANSLPSAEGGPPEVVSV

SEQ ID NO: 50374 - protein, 545 aa, Homo sapiens
  Payload ID: 10057
  Gene Symbol: MARCH1
  Gene Name: membrane-associated ring finger (C3HC4) 1, E3 ubiquitin protein ligase
  ENSP ID: ENSP00000421322
MLGWCEAIARNPHRIPNNTRTPEISGDLADASQTSTLNEKSPGRSASRSSNISKASSPTTGTAPRSQSRLSVCPSTQDICRSAILHDMSEESFEYCTPVMVLSPARKESGKKSVIQRPRRRRKASERYEHAAEEQIRGRKNDFHLQISSPRWRELYTDSSDSSSTDESHWIQAKRRAQVKFRLSRRRRRNNNKPCENLAGSSTPNGIELVDLGSKGKEQQELIECESCSLNLHRGKHTRYQECNPSLTQGSSEIKRSSRNHEKSKGRYHHRDPQLLQSLRKNEIMKKTFSETDSSTEILGVPEGSKDMNDAGLQVNNPVQKPPATYDDGSDNLEVCRICHCEGDEESPLITPCRCTGTLRFVHQSCLHQWIKSSDTRCCELCKYDFIMETKLKPLRKWEKLQMTTSERRKIFCSVTFHVIAITCVVWSLYVLIDRTAEEIKQGNDNGVLEWPFWTKLVVVAIGFTGGLVFMYVQCKVYVQLWRRLKAYNRVIFVQNCPDTAKKLEKNFSCNVNTDIKDAVVVPVPQTGANSLPSAEGGPPEVVSV

SEQ ID NO: 50375 - protein, 144 aa, Homo sapiens
  Payload ID: 10057
  Gene Symbol: MARCH1
  Gene Name: membrane-associated ring finger (C3HC4) 1, E3 ubiquitin protein ligase
  ENSP ID: ENSP00000424089
MTSSHVCCNFLNMWKKSKISTMYYLNQDAKLSNLFLQASSPTTGTAPRSQSRLSVCPSTQDICRICHCEGDEESPLITPCRCTGTLRFVHQSCLHQWIKSSDTRCCELCKYDFIMETKLKPLRKCLCFCLVHEHCLLNGKAMIT

SEQ ID NO: 50376 - protein, 141 aa, Homo sapiens
  Payload ID: 10057
  Gene Symbol: MARCH1
  Gene Name: membrane-associated ring finger (C3HC4) 1, E3 ubiquitin protein ligase
  ENSP ID: ENSP00000426731
MLGWCEAIARNPHRIPNNTRTPEISGDLADASQTSTLNEKSPGRSASRSSNISKASSPTTGTAPRSQSRLSVCPSTQDICRICHCEGDEESPLITPCRCTGTLRFVHQSCLHQWIKSSDTRCCELCKYDFIMETKLKPLRK

SEQ ID NO: 50377 - protein, 289 aa, Homo sapiens; identical to SEQ ID NO: 50372
  Payload ID: 10057
  Gene Symbol: MARCH1
  Gene Name: membrane-associated ring finger (C3HC4) 1, E3 ubiquitin protein ligase
  Uniprot ID: Q8TCQ1
  ENSP ID: ENSP00000427223

SEQ ID NO: 50378 - protein, 808 aa, Homo sapiens
  Payload ID: 10058
  Gene Symbol: MARCH10
  Gene Name: membrane-associated ring finger (C3HC4) 10, E3 ubiquitin protein ligase
  Uniprot ID: Q8NA82
  ENSP ID: ENSP00000311496
MLHDARDRQKFFSDVQYLRDMQHKVDSEYQACLRRQEYRRDPNEKKRDQFWGQETSFERSRFSSRSSSKQSSSEEDALTEPRSSIKISAFKCDSKLPAIDQTSVKQKHKSTMTVRKAEKVDPSEPSPADQAPMVLLRKRKPNLRRFTVSPESHSPRASGDRSRQKQQWPAKVPVPRGADQVVQQEGLMCNTKLKRPNQERRNLVPSSQPMTENAPDRAKKGDPSAPSQSELHPALSQAFQGKNSPQVLSEFSGPPLTPTTVGGPRKASFRFRDEDFYSILSLNSRRESDDTEEETQSEECLWVGVRSPCSPSHHKRSRFGGTSTPQAKNKNFEENAENCRGHSSRRSEPSHGSLRISNAMEPATERPSAGQRLSQDPGLPDRESATEKDRGGSENAKKSPLSWDTKSEPRQEVGVNAENVWSDCISVEHRPGTHDSEGYWKDYLNSSQNSLDYFISGRPISPRSSVNSSYNPPASFMHSALRDDIPVDLSMSSTSVHSSDSEGNSGFHVCQPLSPIRNRTPFASAENHNYFPVNSAHEFAVREAEDTTLTSQPQGAPLYTDLLLNPQGNLSLVDSSSSSPSRMNSEGHLHVSGSLQENTPFTFFAVSHFPNQNDNGSRMAASGFTDEKETSKIKADPEKLKKLQESLLEEDSEEEGDLCRICQIAGGSPSNPLLEPCGCVGSLQFVHQECLKKWLKVKITSGADLGAVKTCEMCKQGLLVDLGDFNMIEFYQKHQQSQAQNELMNSGLYLVLLLHLYEQRFAELMRLNHNQVERERLSRNYPQPRTEENENSELGDGNEGSISQSQVV

SEQ ID NO: 50379 - protein, 808 aa, Homo sapiens; identical to SEQ ID NO: 50378
  Payload ID: 10058
  Gene Symbol: MARCH10
  Gene Name: membrane-associated ring finger (C3HC4) 10, E3 ubiquitin protein ligase
  Uniprot ID: Q8NA82
  ENSP ID: ENSP00000416177

SEQ ID NO: 50380 - protein, 799 aa, Homo sapiens
  Payload ID: 10058
  Gene Symbol: MARCH10
  Gene Name: membrane-associated ring finger (C3HC4) 10, E3 ubiquitin protein ligase
  ENSP ID: ENSP00000443746
MLHDARDRQKFFSDVQYLRDMQHKVDSEYQACLRRQEYRRDPNEKKRDQFWGQETSFERSRFSSRSSSKQSSSEEDALTEPRSSIKISAFKCDSKLPAIDQTSVKQKHKSTMTVRKAEKVDPSEPSPDQAPMVLLRKRKPNLRRFTVSPESHSPRASGDRSRQKQQWPAKVPVPRGADQVVQQEGLMCNTKLKRPNQERRNLVPSSQPMTENAPDRAKKGDPSAPSQSELHPALSQAFQGKNSPQVLSEFSGPPLTPTTVGGPRKASFRFRDEDFYSILSLNSRRESDDTEEETQSEECLWVGVRSPCSPSHHKRSRFGGTSTPQAKNKNFEENAENCRGHSSRRSEPSHGSLRISNAMEPATERPSAGQRLSQDPGLPDRESATEKDRGGSENAKKSPLSWDTKSEPRQEVGVNAENVWSDCISVEHRPGTHDSEGYWKDYLNSSQNSLDYFISGRPISPRSSVNSSYNPPASFMHSALRDDIPVDLSMSSTSVHSSDSEGNSGFHVCQPLSPIRNRTPFASAENHNYFPVNSAHEFAVREAEDTTLTSQPQGAPLYTDLLLNPQGNLSLVDSSSSSPSRMNSEGHLHVSGSLQENTPFTFFAVSHFPNQNDNGSRMAASGFTDEKETSKIKADPEKLKKLQESLLEEDSEEEGDLCRICQIAGGSPSNPLLEPCGCVGSLQFVHQECLKKWLKVKITSGADLGAVKTCEMCKQGLLVDLGDFNMIEFYQKHQQSQAQNELMNSGLYLVLLLHLYEQRFAELMRLNHNQVERERLSRNYPQPRTEENESRFWGPVLPF

SEQ ID NO: 50381 - protein, 61 aa, Homo sapiens
  Payload ID: 10058
  Gene Symbol: MARCH10
  Gene Name: membrane-associated ring finger (C3HC4) 10, E3 ubiquitin protein ligase
  ENSP ID: ENSP00000463029
MLHDARDRQKFFSDVQYLRDMQHKVDSEYQACLRRQEYRRDPNEKKRDQFWGQETSFERSR

SEQ ID NO: 50382 - protein, 846 aa, Homo sapiens
  Payload ID: 10058
  Gene Symbol: MARCH10
  Gene Name: membrane-associated ring finger (C3HC4) 10, E3 ubiquitin protein ligase
  ENSP ID: ENSP00000463080
MLHDARDRQKFFSDVQYLRDMQHKVDSEYQACLRRQEYRRDPNEKKRDQFWGQETSFERSRFSSRSSSKQSSSEEDALTEPRSSIKISAFKCDSKLPAIDQTSVKQKHKSTMTVRKAEKVDPSEPSPAESEPTWWNKPETDLGGPSGWCSLGKKGPMSRSIPPCEADQAPMVLLRKRKPNLRRFTVSPESHSPRASGDRSRQKQQWPAKVPVPRGADQVVQQEGLMCNTKLKRPNQERRNLVPSSQPMTENAPDRAKKGDPSAPSQSELHPALSQAFQGKNSPQVLSEFSGPPLTPTTVGGPRKASFRFRDEDFYSILSLNSRRESDDTEEETQSEECLWVGVRSPCSPSHHKRSRFGGTSTPQAKNKNFEENAENCRGHSSRRSEPSHGSLRISNAMEPATERPSAGQRLSQDPGLPDRESATEKDRGGSENAKKSPLSWDTKSEPRQEVGVNAENVWSDCISVEHRPGTHDSEGYWKDYLNSSQNSLDYFISGRPISPRSSVNSSYNPPASFMHSALRDDIPVDLSMSSTSVHSSDSEGNSGFHVCQPLSPIRNRTPFASAENHNYFPVNSAHEFAVREAEDTTLTSQPQGAPLYTDLLLNPQGNLSLVDSSSSSPSRMNSEGHLHVSGSLQENTPFTFFAVSHFPNQNDNGSRMAASGFTDEKETSKIKADPEKLKKLQESLLEEDSEEEGDLCRICQIAGGSPSNPLLEPCGCVGSLQFVHQECLKKWLKVKITSGADLGAVKTCEMCKQGLLVDLGDFNMIEFYQKHQQSQAQNELMNSGLYLVLLLHLYEQRFAELMRLNHNQVERERLSRNYPQPRTEENENSELGDGNEGSISQSQVV

SEQ ID NO: 50383 - protein, 164 aa, Homo sapiens
  Payload ID: 10058
  Gene Symbol: MARCH10
  Gene Name: membrane-associated ring finger (C3HC4) 10, E3 ubiquitin protein ligase
  ENSP ID: ENSP00000463572
DALTEPRSSIKISAFKCDSKLPAIDQTSVKQKHKSTMTVRKAEKVDPSEPSPGGSSKHPLFCVEYTPYCSVFAFSPVLQPNTNYCCLLLPLVPPASPVAQEPPDCPLPLVTVPSFTSTASTSPDPVPESPAVLCYFPISCPTPAETPVLCLQGPRRPSRIYLMW

SEQ ID NO: 50384 - protein, 693 aa, Homo sapiens
  Payload ID: 10058
  Gene Symbol: MARCH10
  Gene Name: membrane-associated ring finger (C3HC4) 10, E3 ubiquitin protein ligase
  ENSP ID: ENSP00000464220
MVLLRKRKPNLRRFTVSPESHSPRASGDRSRQKQQWPAKVPVPRGADQVVQQEGLMCNTKLKRPNQERRNLVPSSQPMTENAPDRAKKGDPSAPSQSELHPALSQAFQGKNSPQVLSEFSGPPLTPTTVGGPRKASFRFRDEDFYSILSLNSRRESDDTEEETQSEECLWVGVRSPCSPSHHKRSRFGGTSTPQAKNKNFEENAENCRGHSSRRSEPSHGSLRISNAMEPATERPSAGQRLSQDPGLPDRESATEKDRGGSENAKKSPLSWDTKSEPRQEVGVNAENVWSDCISVEHRPGTHDSEGYWKDYLNSSQNSLDYFISGRPISPRSSVNSSYNPPASFMHSALRDDIPVDLSMSSTSVHSSDSEGNSGFHVCQPLSPIRNRTPFASAENHNYFPVNSAHEFAVREAEDTTLTSQPQGAPLYTDLLLNPQGNLSLVDSSSSSPSRMNSEGHLHVSGSLQENTPFTFFAVSHFPNQNDNGSRMAASGFTDEKETSKIKADPEKLKKLQESLLEEDSEEEGDLCRICQIAGGSPSNPLLEPCGCVGSLQFVHQECLKKWLKVKITSGADLGAVKTCEMCKQGLLVDLGDFNMIEFYQKHQQSQAQNELMNSGLYLVLLLHLYEQRFAELMRLNHNQVERERIRSWEMEMKAAFLKARSSSKEANCGARRRPLPPALLSTSPSASLPPPLY

SEQ ID NO: 50385 - protein, 402 aa, Homo sapiens
  Payload ID: 10059
  Gene Symbol: MARCH11
  Gene Name: membrane-associated ring finger (C3HC4) 11
  Uniprot ID: A6NNE9
  ENSP ID: ENSP00000333181
MSFEGGHGGSRCRGAESGDAEPPPQPPPPPPPTPPPGEPAPVPAAPRYLPPLPASPETPERAAGPSEPLGEVAPRCRGADELPPPPLPLQPAGQEVAAAGDSGEGPRRLPEAAAAKGGPGESEAGAGGERERRGAGDQPETRSVCSSRSSSSGGGDQRAGHQHQHHQPICKICFQGAEQGELLNPCRCDGSVRYTHQLCLLKWISERGSWTCELCCYRYHVIAIKMKQPCQWQSISITLVEKVQMIAVILGSLFLIASVTWLLWSAFSPYAVWQRKDILFQICYGMYGFMDLVCIGLIVHEGAAVYRVFKRWRAVNLHWDVLNYDKATDIEESSRGESSTSRTLWLPLTALRNRNLVHPTQLTSPRFQCGYVLLHLFNRMRPHEDLSEDNSSGEVVMRVTSV

SEQ ID NO: 50386 - protein, 54 aa, Homo sapiens
  Payload ID: 10059
  Gene Symbol: MARCH11
  Gene Name: membrane-associated ring finger (C3HC4) 11
  ENSP ID: ENSP00000424425
  MOD_RES (1)..(1): Any amino acid
XLCLLKWISERGSWTCELCCYRYHVIAIKMKQPCQVSLFMKELQFTECLSAGEL

SEQ ID NO: 50387 - protein, 246 aa, Homo sapiens
  Payload ID: 10060
  Gene Symbol: MARCH2
  Gene Name: membrane-associated ring finger (C3HC4) 2, E3 ubiquitin protein ligase
  Uniprot ID: Q9P0N8
  ENSP ID: ENSP00000215555
MTTGDCCHLPGSLCDCSGSPAFSKVVEATGLGPPQYVAQVTSRDGRLLSTVIRALDTPSDGPFCRICHEGANGECLLSPCGCTGTLGAVHKSCLEKWLSSSNTSYCELCHTEFAVEKRPRPLTEWLKDPGPRTEKRTLCCDMVCFLFITPLAAISGWLCLRGAQDHLRLHSQLEAVGLIALTIALFTIYVLWTLVSFRYHCQLYSEWRKTNQKVRLKIREADSPEGPQHSPLAAGLLKKVAEETPV

SEQ ID NO: 50388 - protein, 176 aa, Homo sapiens
  Payload ID: 10060
  Gene Symbol: MARCH2
  Gene Name: membrane-associated ring finger (C3HC4) 2, E3 ubiquitin protein ligase
  Uniprot ID: Q9P0N8
  ENSP ID: ENSP00000370423
MTTGDCCHLPGSLCDCSGSPAFSKVVEATGLGPPQYVAQVTSRDGRLLSTVIRALDTPSDGPFCRICHEGANGECLLSPCGCTGTLGAVHKSCLEKWLSSSNTSYCELCHTEFAVEKRPRPLTEVSFRYHCQLYSEWRKTNQKVRLKIREADSPEGPQHSPLAAGLLKKVAEETPV

SEQ ID NO: 50389 - protein, 40 aa, Homo sapiens
  Payload ID: 10060
  Gene Symbol: MARCH2
  Gene Name: membrane-associated ring finger (C3HC4) 2, E3 ubiquitin protein ligase
  ENSP ID: ENSP00000469386
MTTGDCCHLPGSLCDCSGSPAFSKVVEATGLGPPQYVTPV

SEQ ID NO: 50390 - protein, 56 aa, Homo sapiens
  Payload ID: 10060
  Gene Symbol: MARCH2
  Gene Name: membrane-associated ring finger (C3HC4) 2, E3 ubiquitin protein ligase
  ENSP ID: ENSP00000471411
MTTGDCCHLPGSLCDCSGSPAFSKVVEATGLGPPQYVAQVTSRDGRLLSTVIRALD

SEQ ID NO: 50391 - protein, 246 aa, Homo sapiens; identical to SEQ ID NO: 50387
  Payload ID: 10060
  Gene Symbol: MARCH2
  Gene Name: membrane-associated ring finger (C3HC4) 2, E3 ubiquitin protein ligase
  Uniprot ID: Q9P0N8
  ENSP ID: ENSP00000471536

SEQ ID NO: 50392 - protein, 80 aa, Homo sapiens
  Payload ID: 10060
  Gene Symbol: MARCH2
  Gene Name: membrane-associated ring finger (C3HC4) 2, E3 ubiquitin protein ligase
  ENSP ID: ENSP00000471619
MTTGDCCHLPGSLCDCSGSPAFSKVVEATGLGPPQYVAQVTSRDGRLLSTVIRALDTPSDGPFCRICHEGANGECLLSPC

SEQ ID NO: 50393 - protein, 78 aa, Homo sapiens
  Payload ID: 10060
  Gene Symbol: MARCH2
  Gene Name: membrane-associated ring finger (C3HC4) 2, E3 ubiquitin protein ligase
  ENSP ID: ENSP00000472027
MTTGDCCHLPGSLCDCSGSPAFSKVVEATGLGPPQYVAQVTSRDGRLLSTVIRALDTPSDGPFCRICHEGANGECLLS

SEQ ID NO: 50394 - protein, 253 aa, Homo sapiens
  Payload ID: 10061
  Gene Symbol: MARCH3
  Gene Name: membrane-associated ring finger (C3HC4) 3, E3 ubiquitin protein ligase
  Uniprot ID: Q86UD3
  ENSP ID: ENSP00000309141
MTTSRCSHLPEVLPDCTSSAAPVVKTVEDCGSLVNGQPQYVMQVSAKDGQLLSTVVRTLATQSPFNDRPMCRICHEGSSQEDLLSPCECTGTLGTIHRSCLEHWLSSSNTSYCELCHFRFAVERKPRPLVEWLRNPGPQHEKRTLFGDMVCFLFITPLATISGWLCLRGAVDHLHFSSRLEAVGLIALTVALFTIYLFWTLVSFRYHCRLYNEWRRTNQRVILLIPKSVNVPSNQPSLLGLHSVKRNSKETVV

SEQ ID NO: 50395 - protein, 138 aa, Homo sapiens
  Payload ID: 10061
  Gene Symbol: MARCH3
  Gene Name: membrane-associated ring finger (C3HC4) 3, E3 ubiquitin protein ligase
  Uniprot ID: Q86UD3
  ENSP ID: ENSP00000421979
MTTSRCSHLPEVLPDCTSSAAPVVKTVEDCGSLVNGQPQYVMQVSAKDGQLLSTVVRTLATQSPFNDRPMCRICHEGSSQEDLLSPCECTGTLGTIHRSCLEHWLSSSNTSYCELCHFRFAVERKPRPLVEVSKWGTS

SEQ ID NO: 50396 - protein, 410 aa, Homo sapiens
  Payload ID: 10062
  Gene Symbol: MARCH4
  Gene Name: membrane-associated ring finger (C3HC4) 4, E3 ubiquitin protein ligase
  Uniprot ID: Q9P2E8
  ENSP ID: ENSP00000273067
MLMPLCGLLWWWWCCCSGWYCYGLCAPAPQMLRHQGLLKCRCRMLFNDLKVFLLRRPPQAPLPMHGDPQPPGLAANNTLPALGAGGWAGWRGPREVVGREPPPVPPPPPLPPSSVEDDWGGPATEPPASLLSSASSDDFCKEKTEDRYSLGSSLDSGMRTPLCRICFQGPEQGELLSPCRCDGSVKCTHQPCLIKWISERGCWSCELCYYKYHVIAISTKNPLQWQAISLTVIEKVQVAAAILGSLFLIASISWLIWSTFSPSARWQRQDLLFQICYGMYGFMDVVCIGLIIHEGPSVYRIFKRWQAVNQQWKVLNYDKTKDLEDQKAGGRTNPRTSSSTQANIPSSEEETAGTPAPEQGPAQAAGHPSGPLSHHHCAYTILHILSHLRPHEQRSPPGSSRELVMRVTTV

SEQ ID NO: 50397 - protein, 278 aa, Homo sapiens
  Payload ID: 10063
  Gene Symbol: MARCH5
  Gene Name: membrane-associated ring finger (C3HC4) 5
  Uniprot ID: Q9NX47
  ENSP ID: ENSP00000351813
MPDQALQQMLDRSCWVCFATDEDDRTAEWVRPCRCRGSTKWVHQACLQRWVDEKQRGNSTARVACPQCNAEYLIVFPKLGPVVYVLDLADRLISKACPFAAAGIMVGSIYWTAVTYGAVTVMQVVGHKEGLDVMERADPLFLLIGLPTIPVMLILGKMIRWEDYVLRLWRKYSNKLQILNSIFPGIGCPVPRIPAEANPLADHVSATRILCGALVFPTIATIVGKLMFSSVNSNLQRTILGGIAFVAIKGAFKVYFKQQQYLRQAHRKILNYPEQEEA

SEQ ID NO: 50398 - protein, 910 aa, Homo sapiens
  Payload ID: 10064
  Gene Symbol: MARCH6
  Gene Name: membrane-associated ring finger (C3HC4) 6, E3 ubiquitin protein ligase
  Uniprot ID: O60337
  ENSP ID: ENSP00000274140
MDTAEEDICRVCRSEGTPEKPLYHPCVCTGSIKFIHQECLVQWLKHSRKEYCELCKHRFAFTPIYSPDMPSRLPIQDIFAGLVTSIGTAIRYWFHYTLVAFAWLGVVPLTACRIYKCLFTGSVSSLLTLPLDMLSTENLLADCLQGCFVVTCTLCAFISLVWLREQIVHGGAPIWLEHAAPPFNAAGHHQNEAPAGGNGAENVAADQPANPPAENAVVGENPDAQDDQAEEEEEDNEEEDDAGVEDAADANNGAQDDMNWNALEWDRAAEELTWERMLGLDGSLVFLEHVFWVVSLNTLFILVFAFCPYHIGHFSLVGLGFEEHVQASHFEGLITTIVGYILLAITLIICHGLATLVKFHRSRRLLGVCYIVVKVSLLVVVEIGVFPLICGWWLDICSLEMFDATLKDRELSFQSAPGTTMFLHWLVGMVYVFYFASFILLLREVLRPGVLWFLRNLNDPDFNPVQEMIHLPIYRHLRRFILSVIVFGSIVLLMLWLPIRIIKSVLPNFLPYNVMLYSDAPVSELSLELLLLQVVLPALLEQGHTRQWLKGLVRAWTVTAGYLLDLHSYLLGDQEENENSANQQVNNNQHARNNNAIPVVGEGLHAAHQAILQQGGPVGFQPYRRPLNFPLRIFLLIVFMCITLLIASLICLTLPVFAGRWLMSFWTGTAKIHELYTAACGLYVCWLTIRAVTVMVAWMPQGRRVIFQKVKEWSLMIMKTLIVAVLLAGVVPLLLGLLFELVIVAPLRVPLDQTPLFYPWQDWALGVLHAKIIAAITLMGPQWWLKTVIEQVYANGIRNIDLHYIVRKLAAPVISVLLLSLCVPYVIASGVVPLLGVTAEMQNLVHRRIYPFLLMVVVLMAILSFQVRQFKRLYEHIKNDKYLVGQRLVNYERKSGKQGSSPPPPQSSQE

SEQ ID NO: 50399 - protein, 862 aa, Homo sapiens
  Payload ID: 10064
  Gene Symbol: MARCH6
  Gene Name: membrane-associated ring finger (C3HC4) 6, E3 ubiquitin protein ligase
  Uniprot ID: O60337
  ENSP ID: ENSP00000414643
MDTAEEDICRVCRSEGTPEKPLYHPCVCTGSIKFIHQECLVQWLKHSRKEYCELCKHRFAFTPSRIYKCLFTGSVSSLLTLPLDMLSTENLLADCLQGCFVVTCTLCAFISLVWLREQIVHGGAPIWLEHAAPPFNAAGHHQNEAPAGGNGAENVAADQPANPPAENAVVGENPDAQDDQAEEEEEDNEEEDDAGVEDAADANNGAQDDMNWNALEWDRAAEELTWERMLGLDGSLVFLEHVFWVVSLNTLFILVFAFCPYHIGHFSLVGLGFEEHVQASHFEGLITTIVGYILLAITLIICHGLATLVKFHRSRRLLGVCYIVVKVSLLVVVEIGVFPLICGWWLDICSLEMFDATLKDRELSFQSAPGTTMFLHWLVGMVYVFYFASFILLLREVLRPGVLWFLRNLNDPDFNPVQEMIHLPIYRHLRRFILSVIVFGSIVLLMLWLPIRIIKSVLPNFLPYNVMLYSDAPVSELSLELLLLQVVLPALLEQGHTRQWLKGLVRAWTVTAGYLLDLHSYLLGDQEENENSANQQVNNNQHARNNNAIPVVGEGLHAAHQAILQQGGPVGFQPYRRPLNFPLRIFLLIVFMCITLLIASLICLTLPVFAGRWLMSFWTGTAKIHELYTAACGLYVCWLTIRAVTVMVAWMPQGRRVIFQKVKEWSLMIMKTLIVAVLLAGVVPLLLGLLFELVIVAPLRVPLDQTPLFYPWQDWALGVLHAKIIAAITLMGPQWWLKTVIEQVYANGIRNIDLHYIVRKLAAPVISVLLLSLCVPYVIASGVVPLLGVTAEMQNLVHRRIYPFLLMVVVLMAILSFQVRQFKRLYEHIKNDKYLVGQRLVNYERKSGKQGSSPPPPQSSQE

SEQ ID NO: 50400 - protein, 608 aa, Homo sapiens
  Payload ID: 10064
  Gene Symbol: MARCH6
  Gene Name: membrane-associated ring finger (C3HC4) 6, E3 ubiquitin protein ligase
  ENSP ID: ENSP00000424512
MGKPGCRTCCKIKFYLLFSYFQVQASHFEGLITTIVGYILLAITLIICHGLATLVKFHRSRRLLGVCYIVVKVSLLVVVEIGVFPLICGWWLDICSLEMFDATLKDRELSFQSAPGTTMFLHWLVGMVYVFYFASFILLLREVLRPGVLWFLRNLNDPDFNPVQEMIHLPIYRHLRRFILSVIVFGSIVLLMLWLPIRIIKSVLPNFLPYNVMLYSDAPVSELSLELLLLQVVLPALLEQGHTRQWLKGLVRAWTVTAGYLLDLHSYLLGDQEENENSANQQVNNNQHARNNNAIPVVGEGLHAAHQAILQQGGPVGFQPYRRPLNFPLRIFLLIVFMCITLLIASLICLTLPVFAGRWLMSFWTGTAKIHELYTAACGLYVCWLTIRAVTVMVAWMPQGRRVIFQKVKEWSLMIMKTLIVAVLLAGVVPLLLGLLFELVIVAPLRVPLDQTPLFYPWQDWALGVLHAKIIAAITLMGPQWWLKTVIEQVYANGIRNIDLHYIVRKLAAPVISVLLLSLCVPYVIASGVVPLLGVTAEMQNLVHRRIYPFLLMVVVLMAILSFQVRQFKRLYEHIKNDKYLVGQRLVNYERKSGKQGSSPPPPQSSQE

SEQ ID NO: 50401 - protein, 805 aa, Homo sapiens
  Payload ID: 10064
  Gene Symbol: MARCH6
  Gene Name: membrane-associated ring finger (C3HC4) 6, E3 ubiquitin protein ligase
  Uniprot ID: O60337
  ENSP ID: ENSP00000425930
MDTAEEGRIYKCLFTGSVSSLLTLPLDMLSTENLLADCLQGCFVVTCTLCAFISLVWLREQIVHGGAPIWLEHAAPPFNAAGHHQNEAPAGGNGAENVAADQPANPPAENAVVGENPDAQDDQAEEEEEDNEEEDDAGVEDAADANNGAQDDMNWNALEWDRAAEELTWERMLGLDGSLVFLEHVFWVVSLNTLFILVFAFCPYHIGHFSLVGLGFEEHVQASHFEGLITTIVGYILLAITLIICHGLATLVKFHRSRRLLGVCYIVVKVSLLVVVEIGVFPLICGWWLDICSLEMFDATLKDRELSFQSAPGTTMFLHWLVGMVYVFYFASFILLLREVLRPGVLWFLRNLNDPDFNPVQEMIHLPIYRHLRRFILSVIVFGSIVLLMLWLPIRIIKSVLPNFLPYNVMLYSDAPVSELSLELLLLQVVLPALLEQGHTRQWLKGLVRAWTVTAGYLLDLHSYLLGDQEENENSANQQVNNNQHARNNNAIPVVGEGLHAAHQAILQQGGPVGFQPYRRPLNFPLRIFLLIVFMCITLLIASLICLTLPVFAGRWLMSFWTGTAKIHELYTAACGLYVCWLTIRAVTVMVAWMPQGRRVIFQKVKEWSLMIMKTLIVAVLLAGVVPLLLGLLFELVIVAPLRVPLDQTPLFYPWQDWALGVLHAKIIAAITLMGPQWWLKTVIEQVYANGIRNIDLHYIVRKLAAPVISVLLLSLCVPYVIASGVVPLLGVTAEMQNLVHRRIYPFLLMVVVLMAILSFQVRQFKRLYEHIKNDKYLVGQRLVNYERKSGKQGSSPPPPQSSQE

SEQ ID NO: 50402 - protein, 77 aa, Homo sapiens
  Payload ID: 10064
  Gene Symbol: MARCH6
  Gene Name: membrane-associated ring finger (C3HC4) 6, E3 ubiquitin protein ligase
  ENSP ID: ENSP00000426000
MDTAEEDICRVCRSEGTPEKPLYHPCVCTGSIKFIHQECLVQWLKHSRKEYCELCKHRFAFTPRKICWQIVCRVVLW

SEQ ID NO: 50403 - protein, 704 aa, Homo sapiens
  Payload ID: 10065
  Gene Symbol: MARCH7
  Gene Name: membrane-associated ring finger (C3HC4) 7, E3 ubiquitin protein ligase
  Uniprot ID: Q9H992
  ENSP ID: ENSP00000259050
MESKPSRIPRRISVQPSSSLSARMMSGSRGSSLNDTYHSRDSSFRLDSEYQSTSASASASPFQSAWYSESEITQGARSRSQNQQRDHDSKRPKLSCTNCTTSAGRNVGNGLNTLSDSSWRHSQVPRSSSMVLGSFGTDLMRERRDLERRTDSSISNLMDYSHRSGDFTTSSYVQDRVPSYSQGARPKENSMSTLQLNTSSTNHQLPSEHQTILSSRDSRNSLRSNFSSRESESSRSNTQPGFSYSSSRDEAPIISNSERVVSSQRPFQESSDNEGRRTTRRLLSRIASSMSSTFFSRRSSQDSLNTRSLNSENSYVSPRILTASQSRSNVPSASEVPDNRASEASQGFRFLRRRWGLSSLSHNHSSESDSENFNQESEGRNTGPWLSSSLRNRCTPLFSRRRREGRDESSRIPTSDTSSRSHIFRRESNEVVHLEAQNDPLGAAANRPQASAASSSATTGGSTSDSAQGGRNTGISGILPGSLFRFAVPPALGSNLTDNVMITVDIIPSGWNSADGKSDKTKSAPSRDPERLQKIKESLLLEDSEEEEGDLCRICQMAAASSSNLLIEPCKCTGSLQYVHQDCMKKWLQAKINSGSSLEAVTTCELCKEKLELNLEDFDIHELHRAHANEQAEYEFISSGLYLVVLLHLCEQSFSDMMGNTNEPSTRVRFINLARTLQAHMEDLETSEDDSEEDGDHNRTFDIA

SEQ ID NO: 50404 - protein, 704 aa, Homo sapiens; identical to SEQ ID NO: 50403
  Payload ID: 10065
  Gene Symbol: MARCH7
  Gene Name: membrane-associated ring finger (C3HC4) 7, E3 ubiquitin protein ligase
  Uniprot ID: Q9H992
  ENSP ID: ENSP00000386830

SEQ ID NO: 50405 - protein, 666 aa, Homo sapiens
  Payload ID: 10065
  Gene Symbol: MARCH7
  Gene Name: membrane-associated ring finger (C3HC4) 7, E3 ubiquitin protein ligase
  Uniprot ID: Q9H992
  ENSP ID: ENSP00000387238
MIGNYDHLMSLVTSTSASASASPFQSAWYSESEITQGARSRSQNQQRDHDSKRPKLSCTNCTTSAGRNVGNGLNTLSDSSWRHSQVPRSSSMVLGSFGTDLMRERRDLERRTDSSISNLMDYSHRSGDFTTSSYVQDRVPSYSQGARPKENSMSTLQLNTSSTNHQLPSEHQTILSSRDSRNSLRSNFSSRESESSRSNTQPGFSYSSSRDEAPIISNSERVVSSQRPFQESSDNEGRRTTRRLLSRIASSMSSTFFSRRSSQDSLNTRSLNSENSYVSPRILTASQSRSNVPSASEVPDNRASEASQGFRFLRRRWGLSSLSHNHSSESDSENFNQESEGRNTGPWLSSSLRNRCTPLFSRRRREGRDESSRIPTSDTSSRSHIFRRESNEVVHLEAQNDPLGAAANRPQASAASSSATTGGSTSDSAQGGRNTGISGILPGSLFRFAVPPALGSNLTDNVMITVDIIPSGWNSADGKSDKTKSAPSRDPERLQKIKESLLLEDSEEEEGDLCRICQMAAASSSNLLIEPCKCTGSLQYVHQDCMKKWLQAKINSGSSLEAVTTCELCKEKLELNLEDFDIHELHRAHANEQAEYEFISSGLYLVVLLHLCEQSFSDMMGNTNEPSTRVRFINLARTLQAHMEDLETSEDDSEEDGDHNRTFDIA

SEQ ID NO: 50406 - protein, 124 aa, Homo sapiens
  Payload ID: 10065
  Gene Symbol: MARCH7
  Gene Name: membrane-associated ring finger (C3HC4) 7, E3 ubiquitin protein ligase
  ENSP ID: ENSP00000391493
EPCKCTGSLQYVHQDCMKKWLQAKINSGSSLEAVTTCELCKEKLELNLEDFDIHELHRAHANEQAEYEFISSGLYLVVLLHLCEQSFSDMMGNTNEPSTRVRLQRMIPKKTETITGHLILPNFI

SEQ ID NO: 50407 - protein, 101 aa, Homo sapiens
  Payload ID: 10065
  Gene Symbol: MARCH7
  Gene Name: membrane-associated ring finger (C3HC4) 7, E3 ubiquitin protein ligase
  ENSP ID: ENSP00000392862
MESKPSRIPRRISVQPSSSLSARMMSGSRGSSLNDTYHSRDSSFRLDSEYQSTSASASASPFQSAWYSESEITQGARSRSQNQQRDHDSKRPKLSCTNCTT

SEQ ID NO: 50408 - protein, 635 aa, Homo sapiens
  Payload ID: 10065
  Gene Symbol: MARCH7
  Gene Name: membrane-associated ring finger (C3HC4) 7, E3 ubiquitin protein ligase
  ENSP ID: ENSP00000442992
MESKPSRIPRRISVQPSSSLSARMMSGSRGSSLNDTYHSRDSSFRLDSEYQSTSASASASPFQSAWYSESEITQGARSRSQNQQRDHDSKRPKLSCTNCTTSAGRNVGNGLNTLSDVQDRVPSYSQGARPKENSMSTLQLNTSSTNHQLPSEHQTILSSRDSRNSLRSNFSSRESESSRSNTQPGFSYSSSRDEAPIISNSERVVSSQRPFQESSDNEGRRTTRRLLSRIASSMSSTFFSRRSSQDSLNTRSLNSENSYVSPRILTASQSRSNVPSASEVPDNRASEASQGFRFLRRRWGLSSLSHNHSSESDSENFNQESEGRNTGPWLSSSLRNRCTPLFSRRRREGRDESSRIPTSDTSSRSHIFRRESNEVVHLEAQNDPLGAAANRPQASAASSSATTGGSTSDSAQGGRNTGISGILPGSLFRFAVPPALGSNLTDNVMITVDIIPSGWNSADGKSDKTKSAPSRDPERLQKIKESLLLEDSEEEEGDLCRICQMAAASSSNLLIEPCKCTGSLQYVHQDCMKKWLQAKINSGSSLEAVTTCELCKEKLELNLEDFDIHELHRAHANEQAEYEFISSGLYLVVLLHLCEQSFSDMMGNTNEPSTRVRLQRMIPKKTETITGHLILPNFI

SEQ ID NO: 50409 - protein, 291 aa, Homo sapiens
  Payload ID: 10066
  Gene Symbol: MARCH8
  Gene Name: membrane-associated ring finger (C3HC4) 8, E3 ubiquitin protein ligase
  Uniprot ID: Q5T0T0
  ENSP ID: ENSP00000317087
MSMPLHQISAIPSQDAISARVYRSKTKEKEREEQNEKTLGHFMSHSSNISKAGSPPSASAPAPVSSFSRTSITPSSQDICRICHCEGDDESPLITPCHCTGSLHFVHQACLQQWIKSSDTRCCELCKYEFIMETKLKPLRKWEKLQMTSSERRKIMCSVTFHVIAITCVVWSLYVLIDRTAEEIKQGQATGILEWPFWTKLVVVAIGFTGGLLFMYVQCKVYVQLWKRLKAYNRVIYVQNCPETSKKNIFEKSPLTEPNFENKHGYGICHSDTNSSCCTEPEDTGAEIIHV

SEQ ID NO: 50410 - protein, 291 aa, Homo sapiens; identical to SEQ ID NO: 50409
  Payload ID: 10066
  Gene Symbol: MARCH8
  Gene Name: membrane-associated ring finger (C3HC4) 8, E3 ubiquitin protein ligase
  Uniprot ID: Q5T0T0
  ENSP ID: ENSP00000379116

SEQ ID NO: 50411 - protein, 240 aa, Homo sapiens
  Payload ID: 10066
  Gene Symbol: MARCH8
  Gene Name: membrane-associated ring finger (C3HC4) 8, E3 ubiquitin protein ligase
  Uniprot ID: Q5T0T0
  ENSP ID: ENSP00000379118
AGSPPSASAPAPVSSFSRTSITPSSQDICRICHCEGDDESPLITPCHCTGSLHFVHQACLQQWIKSSDTRCCELCKYEFIMETKLKPLRKWEKLQMTSSERRKIMCSVTFHVIAITCVVWSLYVLIDRTAEEIKQGQATGILEWPFWTKLVVVAIGFTGGLLFMYVQCKVYVQLWKRLKAYNRVIYVQNCPETSKKNIFEKSPLTEPNFENKHGYGICHSDTNSSCCTEPEDTGAEIIHV

SEQ ID NO: 50412 - protein, 89 aa, Homo sapiens
  Payload ID: 10066
  Gene Symbol: MARCH8
  Gene Name: membrane-associated ring finger (C3HC4) 8, E3 ubiquitin protein ligase
  ENSP ID: ENSP00000396678
MSMPLHQISAIPSQDAISARVYRSKTKEKEREEQNEKTLGHFMSHSSNISKAGSPPSASAPAPVSSFSRTSITPSSQDICRICHCEGDD

SEQ ID NO: 50413 - protein, 573 aa, Homo sapiens
  Payload ID: 10066
  Gene Symbol: MARCH8
  Gene Name: membrane-associated ring finger (C3HC4) 8, E3 ubiquitin protein ligase
  Uniprot ID: Q5T0T0
  ENSP ID: ENSP00000411848
MSMPLHQISAIPSQDAISARVYRSKTKEKEREEQNEKTLGHFMSHSSNISKAGSPPSASAPAPVSSFSRTSITPSSQDICSSSAVFSECCHHSSVQSAVVSKAPHCQSSLTQGLTVTVICKDTLQASKRNSFGSEWAQALKPAKNTKARRTLKFSRSLNDVGEKAQDTSESFAYVERTCSEGKLILPQDTCLRTNRFHHKEKRTLNHKPLGNSKHSCVSCLSAGRSTASEVEAGKGGRPGLLLEEKADGEATSRSRQLLQYLFSLSHGLSASSLHRFHELESCAARLHTAKSSSGLAGSMGFCSDEMGDDDVFEDSTSAKLKSRVLRAPLCSTEKDSDLDCPSPFSEKLPPISPVSTSGDVCRICHCEGDDESPLITPCHCTGSLHFVHQACLQQWIKSSDTRCCELCKYEFIMETKLKPLRKWEKLQMTSSERRKIMCSVTFHVIAITCVVWSLYVLIDRTAEEIKQGQATGILEWPFWTKLVVVAIGFTGGLLFMYVQCKVYVQLWKRLKAYNRVIYVQNCPETSKKNIFEKSPLTEPNFENKHGYGICHSDTNSSCCTEPEDTGAEIIHV

SEQ ID NO: 50414 - protein, 38 aa, Homo sapiens
  Payload ID: 10066
  Gene Symbol: MARCH8
  Gene Name: membrane-associated ring finger (C3HC4) 8, E3 ubiquitin protein ligase
  ENSP ID: ENSP00000482034
AGSPPSASAPAPVSSFSRTSITPSSQDICRICHCEGDD

SEQ ID NO: 50415 - protein, 346 aa, Homo sapiens
  Payload ID: 10067
  Gene Symbol: MARCH9
  Gene Name: membrane-associated ring finger (C3HC4) 9
  Uniprot ID: Q86YJ5
  ENSP ID: ENSP00000266643
MLKSRLRMFLNELKLLVLTGGGRPRAEPQPRGGRGGGCGWAPFAGCSTRDGDGDEEEYYGSEPRARGLAGDKEPRAGPLPPPAPPLPPPGALDALSLSSSLDSGLRTPQCRICFQGPEQGELLSPCRCDGSVRCTHQPCLIRWISERGSWSCELCYFKYQVLAISTKNPLQWQAISLTVIEKVQIAAIVLGSLFLVASISWLIWSSLSPSAKWQRQDLLFQICYGMYGFMDVVCIGLIIHEGSSVYRIFKRWQAVNQQWKVLNYDKTKDIGGDAGGGTAGKSGPRNSRTGPTSGATSRPPAAQRMRTLLPQRCGYTILHLLGQLRPPDARSSSHSGREVVMRVTTV

SEQ ID NO: 50416 - protein, 233 aa, Homo sapiens
  Payload ID: 10067
  Gene Symbol: MARCH9
  Gene Name: membrane-associated ring finger (C3HC4) 9
  Uniprot ID: Q86YJ5
  ENSP ID: ENSP00000446758
MVSDKCHILDLIKAQRRQMLILPEGFREGSWSTLLFRATHHLALHPFLGLFGALSPTQWQAISLTVIEKVQIAAIVLGSLFLVASISWLIWSSLSPSAKWQRQDLLFQICYGMYGFMDVVCIGLIIHEGSSVYRIFKRWQAVNQQWKVLNYDKTKDIGGDAGGGTAGKSGPRNSRTGPTSGATSRPPAAQRMRTLLPQRCGYTILHLLGQLRPPDARSSSHSGREVVMRVTTV

SEQ ID NO: 50417 - protein, 1052 aa, Homo sapiens
  Payload ID: 10068
  Gene Symbol: MBTPS1
  Gene Name: membrane-bound transcription factor peptidase, site 1
  Uniprot ID: Q14703
  ENSP ID: ENSP00000344223
MKLVNIWLLLLVVLLCGKKHLGDRLEKKSFEKAPCPGCSHLTLKVEFSSTVVEYEYIVAFNGYFTAKARNSFISSALKSSEVDNWRIIPRNNPSSDYPSDFEVIQIKEKQKAGLLTLEDHPNIKRVTPQRKVFRSLKYAESDPTVPCNETRWSQKWQSSRPLRRASLSLGSGFWHATGRHSSRRLLRAIPRQVAQTLQADVLWQMGYTGANVRVAVFDTGLSEKHPHFKNVKERTNWTNERTLDDGLGHGTFVAGVIASMRECQGFAPDAELHIFRVFTNNQVSYTSWFLDAFNYAILKKIDVLNLSIGGPDFMDHPFVDKVWELTANNVIMVSAIGNDGPLYGTLNNPADQMDVIGVGGIDFEDNIARFSSRGMTTWELPGGYGRMKPDIVTYGAGVRGSGVKGGCRALSGTSVASPVVAGAVTLLVSTVQKRELVNPASMKQALIASARRLPGVNMFEQGHGKLDLLRAYQILNSYKPQASLSPSYIDLTECPYMWPYCSQPIYYGGMPTVVNVTILNGMGVTGRIVDKPDWQPYLPQNGDNIEVAFSYSSVLWPWSGYLAISISVTKKAASWEGIAQGHVMITVASPAETESKNGAEQTSTVKLPIKVKIIPTPPRSKRVLWDQYHNLRYPPGYFPRDNLRMKNDPLDWNGDHIHTNFRDMYQHLRSMGYFVEVLGAPFTCFDASQYGTLLMVDSEEEYFPEEIAKLRRDVDNGLSLVIFSDWYNTSVMRKVKFYDENTRQWWMPDTGGANIPALNELLSVWNMGFSDGLYEGEFTLANHDMYYASGCSIAKFPEDGVVITQTFKDQGLEVLKQETAVVENVPILGLYQIPAEGGGRIVLYGDSNCLDDSHRQKDCFWLLDALLQYTSYGVTPPSLSHSGNRQRPPSGAGSVTPERMEGNHLHRYSKVLEAHLGDPKPRPLPACPRLSWAKPQPLNETAPSNLWKHQKLLSIDLDKVVLPNFRSNRPQVRPLSPGESGAWDIPGGIMPGRYNQEVGQTIPVFAFLGAMVVLAFFVVQINKAKSRPKRRKPRVKRPQLMQQVHPPKTPSV

SEQ ID NO: 50418 - protein, 16 aa, Homo sapiens
  Payload ID: 10068
  Gene Symbol: MBTPS1
  Gene Name: membrane-bound transcription factor peptidase, site 1
  ENSP ID: ENSP00000456553
MKLVNIWLLLLVVLLC

SEQ ID NO: 50419 - protein, 81 aa, Homo sapiens
  Payload ID: 10068
  Gene Symbol: MBTPS1
  Gene Name: membrane-bound transcription factor peptidase, site 1
  ENSP ID: ENSP00000457508
  MOD_RES (1)..(1): Any amino acid
XLNLSIGGPDFMDHPFVDKVWELTANNVIMVSAIGNDGPLYGTLNNPADQMDVIGVGGIDFEDNIARFSSRGMTTWHSPEA

SEQ ID NO: 50420 - protein, 146 aa, Homo sapiens
  Payload ID: 10068
  Gene Symbol: MBTPS1
  Gene Name: membrane-bound transcription factor peptidase, site 1
  ENSP ID: ENSP00000457954
MRECQGFAPDAELHIFRVFTNNQVSYTSWFLDAFNYAILKKIDVLNLSIGGPDFMDHPFVDKVWELTANNVIMVSAIGNDGPLYGTLNNPADQMDVIGVGGIDFEDNIARFSSRGMTTWELPGGYGRMKPDIVTYGAGVRGSGVKG

SEQ ID NO: 50421 - protein, 134 aa, Homo sapiens
  Payload ID: 10068
  Gene Symbol: MBTPS1
  Gene Name: membrane-bound transcription factor peptidase, site 1
  ENSP ID: ENSP00000481088
VASPVVAGAVTLLVSTVQKRELVNPASMKQALIASARRLPGVNMFEQGHGKLDLLRAYQILNSYKPQARSVHRPADGSFSPSLGSGRIFPLHKIQASKQKMMTKHRILGVLGEVLLLLLQGAAGRTGSCFRLLM

SEQ ID NO: 50422 - protein, 330 aa, Homo sapiens
  Payload ID: 10069
  Gene Symbol: MBTPS2
  Gene Name: membrane-bound transcription factor peptidase, site 2
  ENSP ID: ENSP00000368796
MIPVSLVVVVVGGWTVVYLTDLVLKSSVYFKHSYEDWLENNGLSISPFHIRWQTAVFNRAFYSWGRRKARMLYQWFNFGMVFGVIAMFSSFFLLGKTLMQTLAQMMADSPSSYSSSSSSSSSSSSSSSSSSSSSSSLHNEQVLQVVVPGINLPVNQLTYFFTAVLISGVVHEIGHGIAAIREQVRFNGFGIFLFIIYPGAFVDLFTTHLQLISPVQQLRIFCAGIWHNFVLALLGILALVLLPVILLPFYYTGVGVLITEVAEDSPAIGPRGLFVGDLVTHLQDCPVTNVQDWNECLDTIAYEPQIGYCISASTLQQLSFPVRGVYISSI

SEQ ID NO: 50423 - protein, 519 aa, Homo sapiens
  Payload ID: 10069
  Gene Symbol: MBTPS2
  Gene Name: membrane-bound transcription factor peptidase, site 2
  Uniprot ID: O43462
  ENSP ID: ENSP00000368798
MIPVSLVVVVVGGWTVVYLTDLVLKSSVYFKHSYEDWLENNGLSISPFHIRWQTAVFNRAFYSWGRRKARMLYQWFNFGMVFGVIAMFSSFFLLGKTLMQTLAQMMADSPSSYSSSSSSSSSSSSSSSSSSSSSSSLHNEQVLQVVVPGINLPVNQLTYFFTAVLISGVVHEIGHGIAAIREQVRFNGFGIFLFIIYPGAFVDLFTTHLQLISPVQQLRIFCAGIWHNFVLALLGILALVLLPVILLPFYYTGVGVLITEVAEDSPAIGPRGLFVGDLVTHLQDCPVTNVQDWNECLDTIAYEPQIGYCISASTLQQLSFPVRAYKRLDGSTECCNNHSLTDVCFSYRNNFNKRLHTCLPARKAVEATQVCRTNKDCKKSSSSSFCIIPSLETHTRLIKVKHPPQIDMLYVGHPLHLHYTVSITSFIPRFNFLSIDLPVVVETFVKYLISLSGALAIVNAVPCFALDGQWILNSFLDATLTSVIGDNDVKDLIGFFILLGGSVLLAANVTLGLWMVTAR

SEQ ID NO: 50424 - protein, 297 aa, Homo sapiens
  Payload ID: 10070
  Gene Symbol: MS4A1
  Gene Name: membrane-spanning 4-domains, subfamily A, member 1
  Uniprot ID: P11836
  ENSP ID: ENSP00000314620
MTTPRNSVNGTFPAEPMKGPIAMQSGPKPLFRRMSSLVGPTQSFFMRESKTLGAVQIMNGLFHIALGGLLMIPAGIYAPICVTVWYPLWGGIMYIISGSLLAATEKNSRKCLVKGKMIMNSLSLFAAISGMILSIMDILNIKISHFLKMESLNFIRAHTPYINIYNCEPANPSEKNSPSTQYCYSIQSLFLGILSVMLIFAFFQELVIAGIVENEWKRTCSRPKSNIVLLSAEEKKEQTIEIKEEVVGLTETSSQPKNEEDIEIIPIQEEEEEETETNFPEPPQDQESSPIENDSSP

SEQ ID NO: 50425 - protein, 297 aa, Homo sapiens; identical to SEQ ID NO: 50424
  Payload ID: 10070
  Gene Symbol: MS4A1
  Gene Name: membrane-spanning 4-domains, subfamily A, member 1
  Uniprot ID: P11836
  ENSP ID: ENSP00000374589

SEQ ID NO: 50426 - protein, 6 aa, Homo sapiens
  Payload ID: 10070
  Gene Symbol: MS4A1
  Gene Name: membrane-spanning 4-domains, subfamily A, member 1
  ENSP ID: ENSP00000432219
MTTPRN

SEQ ID NO: 50427 - protein, 130 aa, Homo sapiens
  Payload ID: 10070
  Gene Symbol: MS4A1
  Gene Name: membrane-spanning 4-domains, subfamily A, member 1
  Uniprot ID: P11836
  ENSP ID: ENSP00000432270
MTTPRNSVNGTFPAEPMKGPIAMQSGPKPLFRRMSSLELVIAGIVENEWKRTCSRPKSNIVLLSAEEKKEQTIEIKEEVVGLTETSSQPKNEEDIEIIPIQEEEEEETETNFPEPPQDQESSPIENDSSP

SEQ ID NO: 50428 - protein, 7 aa, Homo sapiens
  Payload ID: 10070
  Gene Symbol: MS4A1
  Gene Name: membrane-spanning 4-domains, subfamily A, member 1
  ENSP ID: ENSP00000433179
MTTPRNS

SEQ ID NO: 50429 - protein, 297 aa, Homo sapiens; identical to SEQ ID NO: 50424
  Payload ID: 10070
  Gene Symbol: MS4A1
  Gene Name: membrane-spanning 4-domains, subfamily A, member 1
  Uniprot ID: P11836
  ENSP ID: ENSP00000433277

SEQ ID NO: 50430 - protein, 284 aa, Homo sapiens
  Payload ID: 10070
  Gene Symbol: MS4A1
  Gene Name: membrane-spanning 4-domains, subfamily A, member 1
  ENSP ID: ENSP00000433519
MTTPRNSVNGTFPAEPMKGPIAMQSGPKPLFRRMSSLVGPTQSFFMRESKTLGAVQIMNGLFHIALGGLLMIPAGIYAPICVTVWYPLWGGIMYIISGSLLAATEKNSRKCLVKGKMIMNSLSLFAAISGMILSIMDILNIKISHFLKMESLNFIRAHTPYINIYNCEPANPSEKNSPSTQYCYSIQSLFLELVIAGIVENEWKRTCSRPKSNIVLLSAEEKKEQTIEIKEEVVGLTETSSQPKNEEDIEIIPIQEEEEEETETNFPEPPQDQESSPIENDSSP

SEQ ID NO: 50431 - protein, 123 aa, Homo sapiens
  Payload ID: 10070
  Gene Symbol: MS4A1
  Gene Name: membrane-spanning 4-domains, subfamily A, member 1
  ENSP ID: ENSP00000437002
MTLMEEMLREAFRCMTQEPMKGPIAMQSGPKPLFRRMSSLVGPTQSFFMRESKTLGAVQIMNGLFHIALGGLLMIPAGIYAPICVTVWYPLWGGIMYIISGSLLAATEKNSRKCLVKGKMIMN

SEQ ID NO: 50432 - protein, 267 aa, Homo sapiens
  Payload ID: 10071
  Gene Symbol: MS4A10
  Gene Name: membrane-spanning 4-domains, subfamily A, member 10
  Uniprot ID: Q96PG2
  ENSP ID: ENSP00000311862
MKAEATVIPSRCARGLPSWQVLSPVQPWQTSAPQNTTQPKLLAPHQHEKSQKKSSLLKELGAFHITIALLHLVFGGYLASIVKNLHLVVLKSWYPFWGAASFLISGILAITMKTFSKTYLKMLCLMTNLISLFCVLSGLFVISKDLFLESPFESPIWRMYPNSTVHIQRLELALLCFTVLELFLPVPTAVTAWRGDCPSAKNDDACLVPNTPLHLKGLPVEPPPSYQSVIQGDAQHKQHQRLREVKQVAPDTWIVTDGAAIWTQTAN

SEQ ID NO: 50433 - protein, 267 aa, Homo sapiens
  Payload ID: 10072
  Gene Symbol: MS4A12
  Gene Name: membrane-spanning 4-domains, subfamily A, member 12
  Uniprot ID: Q9NXJ0
  ENSP ID: ENSP00000016913
MMSSKPTSHAEVNETIPNPYPPSSFMAPGFQQPLGSINLENQAQGAQRAQPYGITSPGIFASSQPGQGNIQMINPSVGTAVMNFKEEAKALGVIQIMVGLMHIGFGIVLCLISFSFREVLGFASTAVIGGYPFWGGLSFIISGSLSVSASKELSRCLVKGSLGMNIVSSILAFIGVILLLVDMCINGVAGQDYWAVLSGKGISATLMIFSLLEFFVACATAHFANQANTTTNMSVLVIPNMYESNPVTPASSSAPPRCNNYSANAPK

SEQ ID NO: 50434 - protein, 173 aa, Homo sapiens
  Payload ID: 10072
  Gene Symbol: MS4A12
  Gene Name: membrane-spanning 4-domains, subfamily A, member 12
  ENSP ID: ENSP00000431959
MMSSKPTSHAEVNETIPNPYPPSSFMAPGFQQPLGSINLENQAQGAQRAQPYGITSPGIFASSQPGQGNIQMINPSVGTAVMNFKEEAKALGFIISGSLSVSASKELSRCLVKGSLGMNIVSSILAFIGVILLLVDMCINGVAGQDYWAVLSGKGISATLMIFSLLEFFVACA

SEQ ID NO: 50435 - protein, 114 aa, Homo sapiens
  Payload ID: 10072
  Gene Symbol: MS4A12
  Gene Name: membrane-spanning 4-domains, subfamily A, member 12
  ENSP ID: ENSP00000434783
MMSSKPTSHAEVNETIPNPYPPSSFMAPGFQQPLGSINLENQAQGAQRAQPYGITSPGIFASSQPGQGNIQMINPSVGTAVMNFKEEAKALGVIQIMVGLMHIGFGIVLCLISF

SEQ ID NO: 50436 - protein, 221 aa, Homo sapiens
  Payload ID: 10072
  Gene Symbol: MS4A12
  Gene Name: membrane-spanning 4-domains, subfamily A, member 12
  Uniprot ID: Q9NXJ0
  ENSP ID: ENSP00000440424
MMSSKPTSHAEVNETIPNPYPPSSFMAPGFQQPLGSINLENQAQGAQRAQPYGITSPGIFASSQPGQGNIQMINPSVGTAVMNFKEEAKALGFIISGSLSVSASKELSRCLVKGSLGMNIVSSILAFIGVILLLVDMCINGVAGQDYWAVLSGKGISATLMIFSLLEFFVACATAHFANQANTTTNMSVLVIPNMYESNPVTPASSSAPPRCNNYSANAPK

SEQ ID NO: 50437 - protein, 112 aa, Homo sapiens
  Payload ID: 10073
  Gene Symbol: MS4A13
  Gene Name: membrane-spanning 4-domains, subfamily A, member 13
  Uniprot ID: Q5J8X5
  ENSP ID: ENSP00000367427
MIGIFHIFMWYFLLVLYMGQIKGAFGTYEPVTYKTGCTLWGIFFIIAGVFLIRVTKYPTRSGKLGREVSRILLFFYGLEFSIALTHSIYSCSNLFRRQNDLTSVTEEAESTP

SEQ ID NO: 50438 - protein, 152 aa, Homo sapiens
  Payload ID: 10073
  Gene Symbol: MS4A13
  Gene Name: membrane-spanning 4-domains, subfamily A, member 13
  Uniprot ID: Q5J8X5
  ENSP ID: ENSP00000367428
MIGIFHIFMWYFLLVLYMGQIKGAFGTYEPVTYKTGCTLWGIFFIIAGVFLIRVTKYPTRSGIISTLIINIICIITTITAVTLTIIELSHFNSVSYRNYGQAKLGREVSRILLFFYGLEFSIALTHSIYSCSNLFRRQNDLTSVTEEAESTP

SEQ ID NO: 50439 - protein, 93 aa, Homo sapiens
  Payload ID: 10073
  Gene Symbol: MS4A13
  Gene Name: membrane-spanning 4-domains, subfamily A, member 13
  Uniprot ID: Q5J8X5
  ENSP ID: ENSP00000415535
MIGIFHIFMWYFLLVLYMGQIKGAFGTYEPVTYKTGCTLWGIFKLGREVSRILLFFYGLEFSIALTHSIYSCSNLFRRQNDLTSVTEEAESTP

SEQ ID NO: 50440 - protein, 61 aa, Homo sapiens
  Payload ID: 10073
  Gene Symbol: MS4A13
  Gene Name: membrane-spanning 4-domains, subfamily A, member 13
  ENSP ID: ENSP00000432713
MIGIFHIFMWYFLLVLYMGQIKGAFGTYEPVTYKTGCTLWGIFFRRQNDLTSVTEEAESTP

SEQ ID NO: 50441 - protein, 679 aa, Homo sapiens
  Payload ID: 10074
  Gene Symbol: MS4A14
  Gene Name: membrane-spanning 4-domains, subfamily A, member 14
  Uniprot ID: Q96JA4
  ENSP ID: ENSP00000300187
MESTSQDRRATHVITIKPNETVLTAFPYRPHSSLLDFLKGEPRVLGATQILLALIIVGFGTIFALNYIGFSQRLPLVVLTGYPFWGALIFILTGYLTVTDKKSKLLGQGVTGMNVISSLVAITGITFTILSYRHQDKYCQMPSFEEICVFSRTLFIVLFFLPSDVTQNSEQPAPEENDQLQFVLQEEFSSDDSTTNAQSVIFGGYAFFKLTLSRSPLVSQPGNKGREFVPDEQKQSILPSPKFSEEEIEPLPPTLEKKPSENMSIQLDSTFKQMKDEDLQSAIVQPSQMQTKLLQDQAASLQVFPSHSALKLEDISPEDLPSQALPVEGLSEQTMPSKSTSSHVKQSSNLTANDLPPQGILSQDTSSQDMLFHDMTSQDMQSLDMLSQDTPSHAMPPQDIPSQDMLSQALSAHAILPEASTSHIVQFPEIQHLLQQPPDLQPENTEPQNQQILQMSYQDIRSEVMEETKEWKSEEELHRRKSSRRHSLNQQTKALQYLRRHSLDVQAKGQKSSKRHSLDQQSKGWQSPKQKSLDQQIKDWLSPKRHSVDKQAQLNQTKEQLPDQQAEDQQAKGEQYPEGQSKDGQVKDQQTDKEQNSKKQTQDQQTEDQPAQEKKSPKGQFQNVQAEGQQAQVEKVPKLLCQDSESQIQQYQFWQFHKGNLQAGQPRTVNLLAKNPLTG

SEQ ID NO: 50442 - protein, 695 aa, Homo sapiens
  Payload ID: 10074
  Gene Symbol: MS4A14
  Gene Name: membrane-spanning 4-domains, subfamily A, member 14
  ENSP ID: ENSP00000378449
MESTSQDRRATHVITIKPNETVLTAFPYRPHSSLLDFLKGEPRVLGATQILLALIIVGFGTIFALNYIGFSQRLPLVVLTGYPFWGALIGQGVTGMNVISSLVAITGITFTILSYRHQDKYCQMPSFEEICVFSRTLFIGILLILLIISIAELSISVTIASFRSKCWTQSDEVLFFLPSDVTQNSEQPAPEENDQLQFVLQEEFSSDDSTTNAQSVIFGGYAFFKLTLSRSPLVSQPGNKGREFVPDEQKQSILPSPKFSEEEIEPLPPTLEKKPSENMSIQLDSTFKQMKDEDLQSAIVQPSQMQTKLLQDQAASLQVFPSHSALKLEDISPEDLPSQALPVEGLSEQTMPSKSTSSHVKQSSNLTANDLPPQGILSQDTSSQDMLFHDMTSQDMQSLDMLSQDTPSHAMPPQDIPSQDMLSQALSAHAILPEASTSHIVQFPEIQHLLQQPPDLQPENTEPQNQQILQMSYQDIRSEVMEETKEWKSEEELHRRKSSRRHSLNQQTKALQYLRRHSLDVQAKGQKSSKRHSLDQQSKGWQSPKQKSLDQQIKDWLSPKRHSVDKQAQLNQTKEQLPDQQAEDQQAKGEQYPEGQSKDGQVKDQQTDKEQNSKKQTQDQQTEDQPAQEKKSPKGQFQNVQAEGQQAQVEKVPKLLCQDSESQIQQYQFWQFHKGNLQAGQPRTVNLLAKNPLTG

SEQ ID NO: 50443 - protein, 662 aa, Homo sapiens
  Payload ID: 10074
  Gene Symbol: MS4A14
  Gene Name: membrane-spanning 4-domains, subfamily A, member 14
  Uniprot ID: Q96JA4
  ENSP ID: ENSP00000378453
MESTSQDRRATHVITIKPNETVLTAFPYRPHSSLLDFLKGEPRVLGATQILLALIIVGFGTIFALNYIGFSQRLPLVVLTGYPFWGALIGQGVTGMNVISSLVAITGITFTILSYRHQDKYCQMPSFEEICVFSRTLFIVLFFLPSDVTQNSEQPAPEENDQLQFVLQEEFSSDDSTTNAQSVIFGGYAFFKLTLSRSPLVSQPGNKGREFVPDEQKQSILPSPKFSEEEIEPLPPTLEKKPSENMSIQLDSTFKQMKDEDLQSAIVQPSQMQTKLLQDQAASLQVFPSHSALKLEDISPEDLPSQALPVEGLSEQTMPSKSTSSHVKQSSNLTANDLPPQGILSQDTSSQDMLFHDMTSQDMQSLDMLSQDTPSHAMPPQDIPSQDMLSQALSAHAILPEASTSHIVQFPEIQHLLQQPPDLQPENTEPQNQQILQMSYQDIRSEVMEETKEWKSEEELHRRKSSRRHSLNQQTKALQYLRRHSLDVQAKGQKSSKRHSLDQQSKGWQSPKQKSLDQQIKDWLSPKRHSVDKQAQLNQTKEQLPDQQAEDQQAKGEQYPEGQSKDGQVKDQQTDKEQNSKKQTQDQQTEDQPAQEKKSPKGQFQNVQAEGQQAQVEKVPKLLCQDSESQIQQYQFWQFHKGNLQAGQPRTVNLLAKNPLTG

SEQ ID NO: 50444 - protein, 94 aa, Homo sapiens
  Payload ID: 10074
  Gene Symbol: MS4A14
  Gene Name: membrane-spanning 4-domains, subfamily A, member 14
  ENSP ID: ENSP00000432323
MESTSQDRRATHVITIKPNETVLTAFPYRPHSSLLDFLKGEPRVLGATQILLALIIVGFGTIFALNYIGFSQRLPLVVLTGYPFWGALIVSTVD

SEQ ID NO: 50445 - protein, 139 aa, Homo sapiens
  Payload ID: 10074
  Gene Symbol: MS4A14
  Gene Name: membrane-spanning 4-domains, subfamily A, member 14
  ENSP ID: ENSP00000433014
  MOD_RES (1)..(1): Any amino acid
XRVLGATQILLALIIVGFGTIFALNYIGFSQRLPLVVLTGYPFWGALIFILTGYLTVTDKKSKLLGQGVTGMNVISSLVAITGITFTILSYRHQDKYCQMPSFEEICVFSRTLFIVSGLILHEESLKSSLNCVHDVMIH

SEQ ID NO: 50446 - protein, 712 aa, Homo sapiens
  Payload ID: 10074
  Gene Symbol: MS4A14
  Gene Name: membrane-spanning 4-domains, subfamily A, member 14
  Uniprot ID: Q96JA4
  ENSP ID: ENSP00000433761
MESTSQDRRATHVITIKPNETVLTAFPYRPHSSLLDFLKGEPRVLGATQILLALIIVGFGTIFALNYIGFSQRLPLVVLTGYPFWGALIFILTGYLTVTDKKSKLLGQGVTGMNVISSLVAITGITFTILSYRHQDKYCQMPSFEEICVFSRTLFIGILLILLIISIAELSISVTIASFRSKCWTQSDEVLFFLPSDVTQNSEQPAPEENDQLQFVLQEEFSSDDSTTNAQSVIFGGYAFFKLTLSRSPLVSQPGNKGREFVPDEQKQSILPSPKFSEEEIEPLPPTLEKKPSENMSIQLDSTFKQMKDEDLQSAIVQPSQMQTKLLQDQAASLQVFPSHSALKLEDISPEDLPSQALPVEGLSEQTMPSKSTSSHVKQSSNLTANDLPPQGILSQDTSSQDMLFHDMTSQDMQSLDMLSQDTPSHAMPPQDIPSQDMLSQALSAHAILPEASTSHIVQFPEIQHLLQQPPDLQPENTEPQNQQILQMSYQDIRSEVMEETKEWKSEEELHRRKSSRRHSLNQQTKALQYLRRHSLDVQAKGQKSSKRHSLDQQSKGWQSPKQKSLDQQIKDWLSPKRHSVDKQAQLNQTKEQLPDQQAEDQQAKGEQYPEGQSKDGQVKDQQTDKEQNSKKQTQDQQTEDQPAQEKKSPKGQFQNVQAEGQQAQVEKVPKLLCQDSESQIQQYQFWQFHKGNLQAGQPRTVNLLAKNPLTG

SEQ ID NO: 50447 - protein, 170 aa, Homo sapiens
  Payload ID: 10074
  Gene Symbol: MS4A14
  Gene Name: membrane-spanning 4-domains, subfamily A, member 14
  ENSP ID: ENSP00000434271
MESTSQDRRATHVITIKPNETVLTAFPYRPHSSLLDFLKGEPRVLGATQILLALIIVGFGTIFALNYIGFSQRLPLVVLTGYPFWGALIFILTGYLTVTDKKSKLLGQGVTGMNVISSLVAITGITFTILSYRHQDKYCQMPSFEEICVFSRTLFIDFILLTPPHSSHFL

SEQ ID NO: 50448 - protein, 153 aa, Homo sapiens
  Payload ID: 10074
  Gene Symbol: MS4A14
  Gene Name: membrane-spanning 4-domains, subfamily A, member 14
  ENSP ID: ENSP00000434649
MESTSQDRRATHVITIKPNETVLTAFPYRPHSSLLDFLKGEPRVLGATQILLALIIVGFGTIFALNYIGFSQRLPLVVLTGYPFWGALIGQGVTGMNVISSLVAITGITFTILSYRHQDKYCQMPSFEEICVFSRTLFIDFILLTPPHSSHFL

SEQ ID NO: 50449 - protein, 148 aa, Homo sapiens
  Payload ID: 10074
  Gene Symbol: MS4A14
  Gene Name: membrane-spanning 4-domains, subfamily A, member 14
  ENSP ID: ENSP00000435764
MESTSQDRRATHVITIKPNETVLTAFPYRPHSSLLDFLKGEPRVLGATQILLALIIVGFGTIFALNYIGFSQRLPLVVLTGYPFWGALIGQGVTGMNVISSLVAITGITFTILSYRHQDKYCQMPSFEEICVFSRTLFIGILLILLII

SEQ ID NO: 50450 - protein, 153 aa, Homo sapiens; identical to SEQ ID NO: 50448
  Payload ID: 10074
  Gene Symbol: MS4A14
  Gene Name: membrane-spanning 4-domains, subfamily A, member 14
  ENSP ID: ENSP00000437003

SEQ ID NO: 50451 - protein, 567 aa, Homo sapiens
  Payload ID: 10074
  Gene Symbol: MS4A14
  Gene Name: membrane-spanning 4-domains, subfamily A, member 14
  ENSP ID: ENSP00000437222
MNVISSLVAITGITFTILSYRHQDKYCQMPSFEEICVFSRTLFIVLFFLPSDVTQNSEQPAPEENDQLQFVLQEEFSSDDSTTNAQSVIFGGYAFFKLTLSRSPLVSQPGNKGREFVPDEQKQSILPSPKFSEEEIEPLPPTLEKKPSENMSIQLDSTFKQMKDEDLQSAIVQPSQMQTKLLQDQAASLQVFPSHSALKLEDISPEDLPSQALPVEGLSEQTMPSKSTSSHVKQSSNLTANDLPPQGILSQDTSSQDMLFHDMTSQDMQSLDMLSQDTPSHAMPPQDIPSQDMLSQALSAHAILPEASTSHIVQFPEIQHLLQQPPDLQPENTEPQNQQILQMSYQDIRSEVMEETKEWKSEEELHRRKSSRRHSLNQQTKALQYLRRHSLDVQAKGQKSSKRHSLDQQSKGWQSPKQKSLDQQIKDWLSPKRHSVDKQAQLNQTKEQLPDQQAEDQQAKGEQYPEGQSKDGQVKDQQTDKEQNSKKQTQDQQTEDQPAQEKKSPKGQFQNVQAEGQQAQVEKVPKLLCQDSESQIQQYQFWQFHKGNLQAGQPRTVNLLAKNPLTG

SEQ ID NO: 50452 - protein, 147 aa, Homo sapiens
  Payload ID: 10075
  Gene Symbol: MS4A15
  Gene Name: membrane-spanning 4-domains, subfamily A, member 15
  Uniprot ID: Q8N5U1
  ENSP ID: ENSP00000338692
MVRRGHVGIFFIEGGVPFWGGACFIISGSLSVAAEKNHTSCLVRSSLGTNILSVMAAFAGTAILLMDFGVTNRDVDRGYLAVLTIFTVLEFFTAVIAMHFGCQAIHAQASAPVIFLPNAFSADFNIPSPAASAPPAYDNVAYAQGVV

SEQ ID NO: 50453 - protein, 240 aa, Homo sapiens
  Payload ID: 10075
  Gene Symbol: MS4A15
  Gene Name: membrane-spanning 4-domains, subfamily A, member 15
  Uniprot ID: Q8N5U1
  ENSP ID: ENSP00000386022
MSAAPASNGVFVVIPPNNASGLCPPPAILPTSMCQPPGIMQFEEPPLGAQTPRATQPPDLRPVETFLTGEPKVLGTVQILIGLIHLGFGSVLLMVRRGHVGIFFIEGGVPFWGGACFIISGSLSVAAEKNHTSCLVRSSLGTNILSVMAAFAGTAILLMDFGVTNRDVDRGYLAVLTIFTVLEFFTAVIAMHFGCQAIHAQASAPVIFLPNAFSADFNIPSPAASAPPAYDNVAYAQGVV

SEQ ID NO: 50454 - protein, 187 aa, Homo sapiens
  Payload ID: 10075
  Gene Symbol: MS4A15
  Gene Name: membrane-spanning 4-domains, subfamily A, member 15
  ENSP ID: ENSP00000413918
MSAAPASNGVFVVIPPNNASGLCPPPAILPTSMCQPPGIMQFEEPPLGAQTPRATQPPDLRPVETFLTGEPKVLGALAACCSWFAAATWASSSSRAASPSGEEPASSSPDPSQWQPRRTTPVACSFPSTSGDLQSARGGAPPRQTRRRLCMSRRRRQGYSFNTQARVESEVHAHGHSEKGKMLEDLL

SEQ ID NO: 50455 - protein, 199 aa, Homo sapiens
  Payload ID: 10075
  Gene Symbol: MS4A15
  Gene Name: membrane-spanning 4-domains, subfamily A, member 15
  Uniprot ID: Q8N5U1
  ENSP ID: ENSP00000434165
MSAAPASNGVFVVIPPNNASGLCPPPAILPTSMCQPPGIMQFEEPPLGAQTPRATQPPDLRPVETFLTGEPKVLGFIISGSLSVAAEKNHTSCLVRSSLGTNILSVMAAFAGTAILLMDFGVTNRDVDRGYLAVLTIFTVLEFFTAVIAMHFGCQAIHAQASAPVIFLPNAFSADFNIPSPAASAPPAYDNVAYAQGVV

SEQ ID NO: 50456 - protein, 323 aa, Homo sapiens
  Payload ID: 10076
  Gene Symbol: MS4A18
  Gene Name: membrane-spanning 4-domains, subfamily A, member 18
  Uniprot ID: Q3C1V0
  ENSP ID: ENSP00000381953
MTEQVIGANSVPGIIAPDNVHVIQPSNPVASGNHLQPSEVTTYPISPKVIHCDTGRANLQNLLVVNQNSAAGVQSQPIGYQRQYPVGTASLQTVPGVIQYTQGTTNLQTWPGDLQNPLNANPGLTHTSNSSQWNTSFASFTSFNPKKFINEEVRTLGAIQILIGLTHIFSAINPVLYYYPFVTWLSGYPLWGGLSYIVSGSLSVWAAKDPSPCVVNSSISFNIISALFAFAGIFIIITDLSLYYVTTYSKAVSGGLLPFALLEFILTCVVSHFGCQATCCRQFENVAVIPTVFSFNPANTTTSPVNATTGPVNAATGPVSATN

SEQ ID NO: 50457 - protein, 400 aa, Homo sapiens
  Payload ID: 10076
  Gene Symbol: MS4A18
  Gene Name: membrane-spanning 4-domains, subfamily A, member 18
  ENSP ID: ENSP00000431607
MTEQVIGANSVPGIIAPDNVHVIQPSNPVASGNHLQPSEVTTYPISPKVIHCDTGRANLQNLLVVNQNSAAGVQSQPIGYQRQYPVGTASLQTVPGVIQYTQGTTNLQTWPGDLQNPLNANPGLTHTSNSSQWNTSFASFTSFNPKKFINEEVRTLGVSAIQILIGLTHIFSAINPVLYYYPFVTWLSGYPLWGGLSYIVSGSLSVWAAKDPSPCVVNSSISFNIISALFAFAGIFIIITDLSLYYVTTYSKAVSGGLLPFALLEFILTCVVSHFGCQATCCRQFENVAVIPTVFSFNPANTTTSPVNATTGPVNAATGPVSATNGPVNTTIHPVNTTTSPVNTTTSPVNVTTGPVNANIGPVNVTTGPVNTTTAPAKATTSCVNAIHTSNVPPNPRTKK

SEQ ID NO: 50458 - protein, 244 aa, Homo sapiens
  Payload ID: 10077
  Gene Symbol: MS4A2
  Gene Name: membrane-spanning 4-domains, subfamily A, member 2
  Uniprot ID: Q01362
  ENSP ID: ENSP00000278888
MDTESNRRANLALPQEPSSVPAFEVLEISPQEVSSGRLLKSASSPPLHTWLTVLKKEQEFLGVTQILTAMICLCFGTVVCSVLDISHIEGDIFSSFKAGYPFWGAIFFSISGMLSIISERRNATYLVRGSLGANTASSIAGGTGITILIINLKKSLAYIHIHSCQKFFETKCFMASFSTEIVVMMLFLTILGLGSAVSLTICGAGEELKGNKVPEDRVYEELNIYSATYSELEDPGEMSPPIDL

SEQ ID NO: 50459 - protein, 41 aa, Homo sapiens
  Payload ID: 10077
  Gene Symbol: MS4A2
  Gene Name: membrane-spanning 4-domains, subfamily A, member 2
  ENSP ID: ENSP00000433311
MDTESNRRANLALPQEPSSVPAFEVLEISPQEVSSGRLLKS

SEQ ID NO: 50460 - protein, 199 aa, Homo sapiens
  Payload ID: 10077
  Gene Symbol: MS4A2
  Gene Name: membrane-spanning 4-domains, subfamily A, member 2
  ENSP ID: ENSP00000482594
MDTESNRRANLALPQEPSSVPAFEVLEISPQEVSSGRLLKSASSPPLHTWLTVLKKEQEFLGFSISGMLSIISERRNATYLVRGSLGANTASSIAGGTGITILIINLKKSLAYIHIHSCQKFFETKCFMASFSTEIVVMMLFLTILGLGSAVSLTICGAGEELKGNKVPEDRVYEELNIYSATYSELEDPGEMSPPIDL

SEQ ID NO: 50461 - protein, 214 aa, Homo sapiens
  Payload ID: 10078
  Gene Symbol: MS4A3
  Gene Name: membrane-spanning 4-domains, subfamily A, member 3 (hematopoietic cell-specific)
  Uniprot ID: Q96HJ5
  ENSP ID: ENSP00000278865
MASHEVDNAELGSASAHGTPGSEAGPEELNTSVYQPIDGSPDYQKAKLQVLGAIQILNAAMILALGVFLGSLQYPYHFQKHFFFFTFYTGYPIWGAVFFCSSGTLSVVAGIKPTRTWIQNSFGMNIASATIALVGTAFLSLNIAVNIQSLRSCHSSSESPDLCNYMGSISNGMVSLLLILTLLELCVTISTIAMWCNANCCNSREEISSPPNSV

SEQ ID NO: 50462 - protein, 168 aa, Homo sapiens
  Payload ID: 10078
  Gene Symbol: MS4A3
  Gene Name: membrane-spanning 4-domains, subfamily A, member 3 (hematopoietic cell-specific)
  Uniprot ID: Q96HJ5
  ENSP ID: ENSP00000350872
MASHEVDNAELGSASAHGTPGSEAGPEELNTSVYQPIDGSPDYQKAKLQVLGFCSSGTLSVVAGIKPTRTWIQNSFGMNIASATIALVGTAFLSLNIAVNIQSLRSCHSSSESPDLCNYMGSISNGMVSLLLILTLLELCVTISTIAMWCNANCCNSREEISSPPNSV

SEQ ID NO: 50463 - protein, 91 aa, Homo sapiens
  Payload ID: 10078
  Gene Symbol: MS4A3
  Gene Name: membrane-spanning 4-domains, subfamily A, member 3 (hematopoietic cell-specific)
  Uniprot ID: Q96HJ5
  ENSP ID: ENSP00000378473
MNIASATIALVGTAFLSLNIAVNIQSLRSCHSSSESPDLCNYMGSISNGMVSLLLILTLLELCVTISTIAMWCNANCCNSREEISSPPNSV

SEQ ID NO: 50464 - protein, 83 aa, Homo sapiens
  Payload ID: 10078
  Gene Symbol: MS4A3
  Gene Name: membrane-spanning 4-domains, subfamily A, member 3 (hematopoietic cell-specific)
  ENSP ID: ENSP00000434109
MASHEVDNAELGSASAHGTPGSEAGPEELNTSVYQPIDGSPDYQKAKLQVLGSIQREEDEDEDLYDNLLPLNEYSVVQEPCLL

SEQ ID NO: 50465 - protein, 168 aa, Homo sapiens; identical to SEQ ID NO: 50462
  Payload ID: 10078
  Gene Symbol: MS4A3
  Gene Name: membrane-spanning 4-domains, subfamily A, member 3 (hematopoietic cell-specific)
  Uniprot ID: Q96HJ5
  ENSP ID: ENSP00000434117

SEQ ID NO: 50466 - protein, 239 aa, Homo sapiens [sequence omitted]

SEQ ID NO: 50467 - protein, 68 aa, Homo sapiens
  Payload ID: 10079
  Gene Symbol: MS4A4A
  Gene Name: membrane-spanning 4-domains, subfamily A, member 4A
  ENSP ID: ENSP00000340356
MHQTYSRHCRPEERWSQEGWNIPANGFNICRCLNIGMKLRLWNNLNKSNILGALKIKRREIRAPFLLP

SEQ ID NO: 50468 - protein, 186 aa, Homo sapiens
  Payload ID: 10079
  Gene Symbol: MS4A4A
  Gene Name: membrane-spanning 4-domains, subfamily A, member 4A
  Uniprot ID: Q96JQ5
  ENSP ID: ENSP00000434506
MHQTYSRHCRPEESTFSAAMTTMQGMEQAMPGAGPGVPQLGNMAVIHSHLWKGLQEKFLKGEPKVLGVVQILTALMSLSMGITMMCMASNTYGSNPISVYIGYTIWGSVMFIISGSLSIAAGIRTTKGLGLDGMVLLLSVLEFCIAVSLSAFGCKVLCCTPGGVVLILPSHSHMAETASPTPLNEV

SEQ ID NO: 50469 - protein, 35 aa, Homo sapiens
  Payload ID: 10079
  Gene Symbol: MS4A4A
  Gene Name: membrane-spanning 4-domains, subfamily A, member 4A
  ENSP ID: ENSP00000434983
TYSRHCRPEERLVSRISTSFFMDSNGGLIQRLIAF

SEQ ID NO: 50470 - protein, 68 aa, Homo sapiens; identical to SEQ ID NO: 50467
  Payload ID: 10079
  Gene Symbol: MS4A4A
  Gene Name: membrane-spanning 4-domains, subfamily A, member 4A
  ENSP ID: ENSP00000435309

SEQ ID NO: 50471 - protein, 132 aa, Homo sapiens
  Payload ID: 10080
  Gene Symbol: MS4A4E
  Gene Name: membrane-spanning 4-domains, subfamily A, member 4E
  Uniprot ID: Q96PG1
  ENSP ID: ENSP00000381954
MTTMQGMEQTTPGAGPDVPQLGNIDVIHSYLCKGLQEKFFKRKPKVLGVVRILIALMSLSMGIIMMCVAFSSYEEHPIFVYVAYTIWGSVMYPYQLQQELEQQKVWNYLKNLSWRIMGSYLCFGERSELKPL

SEQ ID NO: 50472 - protein, 167 aa, Homo sapiens
  Payload ID: 10080
  Gene Symbol: MS4A4E
  Gene Name: membrane-spanning 4-domains, subfamily A, member 4E
  ENSP ID: ENSP00000381956
MTTMQGMEQTTPGAGPDVPQLGNIDVIHSYLCKGLQEKFFKRKPKVLGVVRILIALMSLSMGIIMMCVAFSSYEEHPIFVYVAYTIWGSVMFIISVSLSVAAGIRTTKGLGTDGMVLLLSVLEFCIAVALSAFGCKVLCCSPSEFVLITPSNSHMAEIASPTPLKTV

SEQ ID NO: 50473 - protein, 89 aa, Homo sapiens
  Payload ID: 10080
  Gene Symbol: MS4A4E
  Gene Name: membrane-spanning 4-domains, subfamily A, member 4E
  Uniprot ID: Q96PG1
  ENSP ID: ENSP00000389556
MTTMQGMEQTTPGAGPDVPQLGNIDVIHSYLCKGLQEKFFKRKPKVLGYPYQLQQELEQQKVWNYLKNLSWRIMGSYLCFGERSELKPL

SEQ ID NO: 50474 - protein, 70 aa, Homo sapiens
  Payload ID: 10080
  Gene Symbol: MS4A4E
  Gene Name: membrane-spanning 4-domains, subfamily A, member 4E
  ENSP ID: ENSP00000435345
MTTMQGMEQTTPGAGPDVPQLGNIDVIHSYLCKGLQEKFFKRKPKVLGVLCGHKFSTHSGCADSDCLDEP

SEQ ID NO: 50475 - protein, 110 aa, Homo sapiens
  Payload ID: 10080
  Gene Symbol: MS4A4E
  Gene Name: membrane-spanning 4-domains, subfamily A, member 4E
  Uniprot ID: Q96PG1
  ENSP ID: ENSP00000435601
MTTMQGMEQTTPGAGPDVPQLGNIDVIHSYLCKGLQEKFFKRKPKVLGVLCGHKFSTHSVSLSVAAGIRTTKGLELSEEFKLENNGIIFVFWREIRVETTIRRQVRRLLK

SEQ ID NO: 50476 - protein, 67 aa, Homo sapiens
  Payload ID: 10080
  Gene Symbol: MS4A4E
  Gene Name: membrane-spanning 4-domains, subfamily A, member 4E
  ENSP ID: ENSP00000436124
  MOD_RES (1)..(1): Any amino acid
XQGMEQTTPGAGPDVPQLGNIDVIHSYLCKGLQEKFFKRKPKVLGVLCGHKFSTHSGCADSDCLDEP

SEQ ID NO: 50477 - protein, 132 aa, Homo sapiens; identical to SEQ ID NO: 50471
  Payload ID: 10080
  Gene Symbol: MS4A4E
  Gene Name: membrane-spanning 4-domains, subfamily A, member 4E
  Uniprot ID: Q96PG1
  ENSP ID: ENSP00000436446

SEQ ID NO: 50478 - protein, 200 aa, Homo sapiens
  Payload ID: 10081
  Gene Symbol: MS4A5
  Gene Name: membrane-spanning 4-domains, subfamily A, member 5
  Uniprot ID: Q9H3V2
  ENSP ID: ENSP00000300190
MDSSTAHSPVFLVFPPEITASEYESTELSATTFSTQSPLQKLFARKMKILGTIQILFGIMTFSFGVIFLFTLLKPYPRFPFIFLSGYPFWGSVLFINSGAFLIAVKRKTTETLIILSRIMNFLSALGAIAGIILLTFGFILDQNYICGYSHQNSQCKAVTVLFLGILITLMTFSIIELFISLPFSILGCHSEDCDCEQCC

SEQ ID NO: 50479 - protein, 34 aa, Homo sapiens
  Payload ID: 10081
  Gene Symbol: MS4A5
  Gene Name: membrane-spanning 4-domains, subfamily A, member 5
  ENSP ID: ENSP00000432836
  MOD_RES (1)..(1): Any amino acid
XTQSPLQKLFARKMKILGDIHSGALFCSLILEPS

SEQ ID NO: 50480 - protein, 123 aa, Homo sapiens
  Payload ID: 10081
  Gene Symbol: MS4A5
  Gene Name: membrane-spanning 4-domains, subfamily A, member 5
  ENSP ID: ENSP00000433802
  MOD_RES (1)..(1): Any amino acid
XLSATTFSTQSPLQKLFARKMKILGTIQILFGIMTFSFGVIFLFTLLKPYPRFPFIFLSGYPFWGSVLFINSGAFLIAVKRKTTETLGILITLMTFSIIELFISLPFSILGCHSEDCDCEQCC

SEQ ID NO: 50481 - protein, 67 aa, Homo sapiens
  Payload ID: 10081
  Gene Symbol: MS4A5
  Gene Name: membrane-spanning 4-domains, subfamily A, member 5
  ENSP ID: ENSP00000435192
MDSSTAHSPVFLVFPPEITASEYESTELSATTFSTQSPLQKLFARKMKILGDIHSGALFCSLILEPS

SEQ ID NO: 50482 - protein, 114 aa, Homo sapiens
  Payload ID: 10081
  Gene Symbol: MS4A5
  Gene Name: membrane-spanning 4-domains, subfamily A, member 5
  ENSP ID: ENSP00000435330
MDSSTAHSPVFLVFPPEITASEYESTELSATTFSTQSPLQKLFARKMKILGTIQILFGIMTFSFGVIFLFTLLKPYPRFPFIFLSGYPFWGSVLFINSGAFLIAVKRKTTETLK

SEQ ID NO: 50483 - protein, 253 aa, Homo sapiens
  Payload ID: 10082
  Gene Symbol: MS4A6A
  Gene Name: membrane-spanning 4-domains, subfamily A, member 6A
  Uniprot ID: Q9H2W1
  ENSP ID: ENSP00000392770
MVLLKLLEVYRKGSAGTFHKSTIFGNTIMTSQPVPNETIIVLPSNVINFSQAEKPEPTNQGQDSLKKHLHAEIKVIGTIQILCGMMVLSLGIILASASFSPNFTQVTSTLLNSAYPFIGPFFFIISGSLSIATEKRLTKLLVHSSLVGSILSALSALVGFIILSVKQATLNPASLQCELDKNNIPTRSYVSYFYHDSLYTTDCYTAKASLAGTLSLMLICTLLEFCLAVLTAVLRWKQAYSDFPGVSVLAGFT

SEQ ID NO: 50484 - protein, 178 aa, Homo sapiens
  Payload ID: 10082
  Gene Symbol: MS4A6A
  Gene Name: membrane-spanning 4-domains, subfamily A, member 6A
  Uniprot ID: Q9H2W1
  ENSP ID: ENSP00000392921
MTSQPVPNETIIVLPSNVINFSQAEKPEPTNQGQDSLKKHLHAEIKVIGTIQILCGMMVLSLGIILASASFSPNFTQVTSTLLNSAYPFIGPFFFIISGSLSIATEKRLTKLLVHSSLVGSILSALSALVGFIILSVKQATLNPASLQWNSLSDADLHSAGILPSCAHCCAAVETGLL

SEQ ID NO: 50485 - protein, 253 aa, Homo sapiens; identical to SEQ ID NO: 50483
  Payload ID: 10082
  Gene Symbol: MS4A6A
  Gene Name: membrane-spanning 4-domains, subfamily A, member 6A
  Uniprot ID: Q9H2W1
  ENSP ID: ENSP00000403212

SEQ ID NO: 50486 - protein, 141 aa, Homo sapiens
  Payload ID: 10082
  Gene Symbol: MS4A6A
  Gene Name: membrane-spanning 4-domains, subfamily A, member 6A
  Uniprot ID: Q9H2W1
  ENSP ID: ENSP00000431266
MTSQPVPNETIIVLPSNVINFSQAEKPEPTNQGQDSLKKHLHAEIKVIGTIQILCGMMVLSLGIILASASFSPNFTQVTSTLLNSAYPFIGPFFVSRVSEEGRMGQRGEEDANSLDFPPASLLCLICQEQGVNGESCSPVG

SEQ ID NO: 50487 - protein, 225 aa, Homo sapiens
  Payload ID: 10082
  Gene Symbol: MS4A6A
  Gene Name: membrane-spanning 4-domains, subfamily A, member 6A
  Uniprot ID: Q9H2W1
  ENSP ID: ENSP00000431901
MTSQPVPNETIIVLPSNVINFSQAEKPEPTNQGQDSLKKHLHAEIKVIGTIQILCGMMVLSLGIILASASFSPNFTQVTSTLLNSAYPFIGPFFFIISGSLSIATEKRLTKLLVHSSLVGSILSALSALVGFIILSVKQATLNPASLQCELDKNNIPTRSYVSYFYHDSLYTTDCYTAKASLAGTLSLMLICTLLEFCLAVLTAVLRWKQAYSDFPGVSVLAGFT

SEQ ID NO: 50488 - protein, 77 aa, Homo sapiens
  Payload ID: 10082
  Gene Symbol: MS4A6A
  Gene Name: membrane-spanning 4-domains, subfamily A, member 6A
  ENSP ID: ENSP00000433012
MVLLKLLEVYRKGSAGTFHKSTIFGNTIMTSQPVPNETIIVLPSNVINFSQAEKPEPTNQGQDSLKKHLHAEIKVIG

SEQ ID NO: 50489 - protein, 101 aa, Homo sapiens
  Payload ID: 10082
  Gene Symbol: MS4A6A
  Gene Name: membrane-spanning 4-domains, subfamily A, member 6A
  ENSP ID: ENSP00000433436
MVLLKLLEVYRKGSAGTFHKSTIFGNTIMTSQPVPNETIIVLPSNVINFSQAEKPEPTNQGQDSLKKHLHAEIKVIGTIQILCGMMVLSLGIILASASFSP

SEQ ID NO: 50490 - protein, 120 aa, Homo sapiens
  Payload ID: 10082
  Gene Symbol: MS4A6A
  Gene Name: membrane-spanning 4-domains, subfamily A, member 6A
  ENSP ID: ENSP00000435630
MTSQPVPNETIIVLPSNVINFSQAEKPEPTNQGQDSLKKHLHAEIKVIGTIQILCGMMVLSLGIILASASFSPNFTQVTSTLLNSAYPFIGPFFSMVMNFWVVMMSLSSLALYQSPQRKG

SEQ ID NO: 50491 - protein, 276 aa, Homo sapiens
  Payload ID: 10082
  Gene Symbol: MS4A6A
  Gene Name: membrane-spanning 4-domains, subfamily A, member 6A
  ENSP ID: ENSP00000435844
MVLLKLLEVYRKGSAGTFHKSTIFGNTIMTSQPVPNETIIVLPSNVINFSQAEKPEPTNQGQDSLKKHLHAEIKVIGTIQILCGMMVLSLGIILASASFSPNFTQVTSTLLNSAYPFIGPFFFIISGSLSIATEKRLTKLLVHSSLVGSILSALSALVGFIILSVKQATLNPASLQCELDKNNIPTRSYVSYFYHDSLYTTDCYTAKASLAGTLSLMLICTLLEFCLAVLTAVLRWKQAYSDFPGSVLFLPHSYIGNSGMSSKMTHDCGYEELLTS

SEQ ID NO: 50492 - protein, 113 aa, Homo sapiens
  Payload ID: 10082
  Gene Symbol: MS4A6A
  Gene Name: membrane-spanning 4-domains, subfamily A, member 6A
  ENSP ID: ENSP00000436133
  MOD_RES (1)..(1): Any amino acid
XSQAEKPEPTNQGQDSLKKHLHAEIKVIGFIISGSLSIATEKRLTKLLVHSSLVGSILSALSALVGFIILSVKQATLNPASLQWNSLSDADLHSAGILPSCAHCCAAVETGLL

SEQ ID NO: 50493 - protein, 114 aa, Homo sapiens
  Payload ID: 10082
  Gene Symbol: MS4A6A
  Gene Name: membrane-spanning 4-domains, subfamily A, member 6A
  ENSP ID: ENSP00000436172
MTSQPVPNETIIVLPSNVINFSQAEKPEPTNQGQDSLKKHLHAEIKVIGVHSSLVGSILSALSALVGFIILSVKQATLNPASLQWNSLSDADLHSAGILPSCAHCCAAVETGLL

SEQ ID NO: 50494 - protein, 248 aa, Homo sapiens
  Payload ID: 10082
  Gene Symbol: MS4A6A
  Gene Name: membrane-spanning 4-domains, subfamily A, member 6A
  Uniprot ID: Q9H2W1
  ENSP ID: ENSP00000436979
MTSQPVPNETIIVLPSNVINFSQAEKPEPTNQGQDSLKKHLHAEIKVIGTIQILCGMMVLSLGIILASASFSPNFTQVTSTLLNSAYPFIGPFFFIISGSLSIATEKRLTKLLVHSSLVGSILSALSALVGFIILSVKQATLNPASLQCELDKNNIPTRSYVSYFYHDSLYTTDCYTAKASLAGTLSLMLICTLLEFCLAVLTAVLRWKQAYSDFPGSVLFLPHSYIGNSGMSSKMTHDCGYEELLTS

SEQ ID NO: 50495 - protein, 23 aa, Homo sapiens
  Payload ID: 10082
  Gene Symbol: MS4A6A
  Gene Name: membrane-spanning 4-domains, subfamily A, member 6A
  ENSP ID: ENSP00000437152
MTSQPVPNETIIVLPSNVINFSQ

SEQ ID NO: 50496 - protein, 147 aa, Homo sapiens
  Payload ID: 10083
  Gene Symbol: MS4A6E
  Gene Name: membrane-spanning 4-domains, subfamily A, member 6E
  Uniprot ID: Q96DS6
  ENSP ID: ENSP00000300182
MTSQPISNETIIMLPSNVINFSQAEKPEPTNQGQDSLKKRLQAKVKVIGVHSSLAGSILSALSALVGFILLSVNPAALNPASLQCKLDEKDIPTRLLLSYDYHSPYTMDCHRAKASLAGTLSLMLVSTVLEFCLAVLTAVLQWKQTV

SEQ ID NO: 50497 - protein, 122 aa, Homo sapiens
  Payload ID: 10083
  Gene Symbol: MS4A6E
  Gene Name: membrane-spanning 4-domains, subfamily A, member 6E
  ENSP ID: ENSP00000432963
KPEPTNQGQDSLKKRLQAKVKVIGVHSSLAGSILSALSALVGFILLSVNPAALNPASLQCKLDEKDIPTRLLLSYDYHSPYTMDCHRAKASLAGTLSLMLVSTVLEFCLAVLTAVLQWKQTV

SEQ ID NO: 50498 - protein, 59 aa, Homo sapiens
  Payload ID: 10083
  Gene Symbol: MS4A6E
  Gene Name: membrane-spanning 4-domains, subfamily A, member 6E
  ENSP ID: ENSP00000436675
EPTNQGQDSLKKRLQAKVKVIGSLLKKLYCMKGGEKEGIYLGLGGKHRVLVSRIASALM

SEQ ID NO: 50499 - protein, 240 aa, Homo sapiens
  Payload ID: 10084
  Gene Symbol: MS4A7
  Gene Name: membrane-spanning 4-domains, subfamily A, member 7
  Uniprot ID: Q9GZW8
  ENSP ID: ENSP00000300184
MLLQSQTMGVSHSFTPKGITIPQREKPGHMYQNEDYLQNGLPTETTVLGTVQILCCLLISSLGAILVFAPYPSHFNPAISTTLMSGYPFLGALCFGITGSLSIISGKQSTKPFDLSSLTSNAVSSVTAGAGLFLLADSMVALRTASQHCGSEMDYLSSLPYSEYYYPIYEIKDCLLTSVSLTGVLVVMLIFTVLELLLAAYSSVFWWKQLYSNNPGSSFSSTQSQDHIQQVKKSSSRSWI

SEQ ID NO: 50500 - protein, 195 aa, Homo sapiens
  Payload ID: 10084
  Gene Symbol: MS4A7
  Gene Name: membrane-spanning 4-domains, subfamily A, member 7
  Uniprot ID: Q9GZW8
  ENSP ID: ENSP00000350983
MLLQSQTMGVSHSFTPKGITIPQREKPGHMYQNEDYLQNGLPTETTVLGFGITGSLSIISGKQSTKPFDLSSLTSNAVSSVTAGAGLFLLADSMVALRTASQHCGSEMDYLSSLPYSEYYYPIYEIKDCLLTSVSLTGVLVVMLIFTVLELLLAAYSSVFWWKQLYSNNPGSSFSSTQSQDHIQQVKKSSSRSWI

SEQ ID NO: 50501 - protein, 39 aa, Homo sapiens
  Payload ID: 10084
  Gene Symbol: MS4A7
  Gene Name: membrane-spanning 4-domains, subfamily A, member 7
  ENSP ID: ENSP00000431408
MYQNEDYLQNGLPTETTVLGFGITGSLSIISGKQSTKPF

SEQ ID NO: 50502 - protein, 98 aa, Homo sapiens
  Payload ID: 10084
  Gene Symbol: MS4A7
  Gene Name: membrane-spanning 4-domains, subfamily A, member 7
  ENSP ID: ENSP00000433184
MLLQSQTMGVSHSFTPKGITIPQREKPGHMYQNEDYLQNGLPTETTVLGTVQILCCLLISSLGAILVFAPYPSHFNPAISTTLMSGYPFLGALCGRSQ

SEQ ID NO: 50503 - protein, 169 aa, Homo sapiens
  Payload ID: 10084
  Gene Symbol: MS4A7
  Gene Name: membrane-spanning 4-domains, subfamily A, member 7
  ENSP ID: ENSP00000433861
MLLQSQTMGVSHSFTPKGITIPQREKPGHMYQNEDYLQNGLPTETTVLGFGITGSLSIISGKQSTKPFDLSSLTSNAVSSVTAGAGLFLLADSMVALRTASQHCGSEMDYLSSLPYSEYYYPIYEIKDCLLTSVSLTGVLVVMLIFTVLELLLAAYSSVFWWKQLYSNN

SEQ ID NO: 50504 - protein, 195 aa, Homo sapiens; identical to SEQ ID NO: 50500
  Payload ID: 10084
  Gene Symbol: MS4A7
  Gene Name: membrane-spanning 4-domains, subfamily A, member 7
  Uniprot ID: Q9GZW8
  ENSP ID: ENSP00000434637

SEQ ID NO: 50505 - protein, 161 aa, Homo sapiens
  Payload ID: 10084
  Gene Symbol: MS4A7
  Gene Name: membrane-spanning 4-domains, subfamily A, member 7
  ENSP ID: ENSP00000434819
MLLQSQTMGVSHSFTPKGITIPQREKPGHMYQNEDYLQNGLPTETTVLGDLSSLTSNAVSSVTAGAGLFLLADSMVALRTASQHCGSEMDYLSSLPYSEYYYPIYEIKDCLLTSVSLTGVLVVMLIFTVLELLLAAYSSVFWWKQLYSNNPGSSFSSTQSQ

SEQ ID NO: 50506 - protein, 250 aa, Homo sapiens
  Payload ID: 10085
  Gene Symbol: MS4A8
  Gene Name: membrane-spanning 4-domains, subfamily A, member 8
  Uniprot ID: Q9BY19
  ENSP ID: ENSP00000300226
MNSMTSAVPVANSVLVVAPHNGYPVTPGIMSHVPLYPNSQPQVHLVPGNPPSLVSNVNGQPVQKALKEGKTLGAIQIIIGLAHIGLGSIMATVLVGEYLSISFYGGFPFWGGLWFIISGSLSVAAENQPYSYCLLSGSLGLNIVSAICSAVGVILFITDLSIPHPYAYPDYYPYAWGVNPGMAISGVLLVFCLLEFGIACASSHFGCQLVCCQSSNVSVIYPNIYAANPVITPEPVTSPPSYSSEIQANK

SEQ ID NO: 50507 - protein, 163 aa, Homo sapiens
  Payload ID: 10085
  Gene Symbol: MS4A8
  Gene Name: membrane-spanning 4-domains, subfamily A, member 8
  ENSP ID: ENSP00000433200
  MOD_RES (1)..(1): Any amino acid
XHNGYPVTPGIMSHVPLYPNSQPQVHLVPGNPPSLVSNVNGQPVQKALKEGKTLGAIQIIIGLAHIGLGSIMATVLVGEYLSISFYGGFPFWGGLWFIISGSLSVAAENQPYSYCLLSGSLGLNIVSAICSAVGVILFITDLSIPHPYAYPDYYPYAWGVFCQ

SEQ ID NO: 50508 - protein, 88 aa, Homo sapiens
  Payload ID: 10085
  Gene Symbol: MS4A8
  Gene Name: membrane-spanning 4-domains, subfamily A, member 8
  ENSP ID: ENSP00000435567
MNSMTSAVPVANSVLVVAPHNGYPVTPGIMSHVPLYPNSQPQVHLVPGNPPSLVSNVNGQPVQKALKEGKTLGAFSERERKATKKQHA

SEQ ID NO: 50509 - protein, 224 aa, Homo sapiens
  Payload ID: 10085
  Gene Symbol: MS4A8
  Gene Name: membrane-spanning 4-domains, subfamily A, member 8
  ENSP ID: ENSP00000436857
MNSMTSAVPVANSVLVVAPHNGYPVTPGIMSHVPLYPNSQPQVHLVPGNPPSLVSNVNGQPVQKALKEGKTLGAIQIIIGLAHIGLGSIMATVLVGEYLSISFYGGFPFWGGLWFIISGSLSVAAENQPYSYCLLSGSLGLNIVSAICSAVGVILFITDLKPWNGDFWRAAGLLPPGVWHRMRIFPLWLPVGLLSIKQCECHLSKHLCSKPSDHPRTGDLTTKL

SEQ ID NO: 50510 - protein, 1320 aa, Homo sapiens
  Payload ID: 10086
  Gene Symbol: MN1
  Gene Name: meningioma (disrupted in balanced translocation) 1
  Uniprot ID: Q10571
  ENSP ID: ENSP00000304956
MFGLDQFEPQVNSRNAGQGERNFNETGLSMNTHFKAPAFHTGGPPGPVDPAMSALGEPPILGMNMEPYGFHARGHSELHAGGLQAQPVHGFFGGQQPHHGHPGSHHPHQHHPHFGGNFGGPDPGASCLHGGRLLGYGGAAGGLGSQPPFAEGYEHMAESQGPESFGPQRPGNLPDFHSSGASSHAVPAPCLPLDQSPNRAASFHGLPSSSGSDSHSLEPRRVTNQGAVDSLEYNYPGEAPSGHFDMFSPSDSEGQLPHYAAGRQVPGGAFPGASAMPRAAGMVGLSKMHAQPPQQQPQQQQQPQQQQQQHGVFFERFSGARKMPVGLEPSVGSRHPLMQPPQQAPPPPQQQPPQQPPQQQPPPPPGLLVRQNSCPPALPRPQQGEAGTPSGGLQDGGPMLPSQHAQFEYPIHRLENRSMHPYSEPVFSMQHPPPQQAPNQRLQHFDAPPYMNVAKRPRFDFPGSAGVDRCASWNGSMHNGALDNHLSPSAYPGLPGEFTPPVPDSFPSGPPLQHPAPDHQSLQQQQQQQQQQQQQQQQQQQQQQQQQQQQRQNAALMIKQMASRNQQQRLRQPNLAQLGHPGDVGQGGLVHGGPVGGLAQPNFEREGGSTGAGRLGTFEQQAPHLAQESAWFSGPHPPPGDLLPRRMGGSGLPADCGPHDPSLAPPPPPGGSGVLFRGPLQEPMRMPGEGHVPALPSPGLQFGGSLGGLGQLQSPGAGVGLPSAASERRPPPPDFATSALGGQPGFPFGAAGRQSTPHSGPGVNSPPSAGGGGGSSGGGGGGGAYPPQPDFQPSQRTSASKLGALSLGSFNKPSSKDNLFGQSCLAALSTACQNMIASLGAPNLNVTFNKKNPPEGKRKLSQNETDGAAVAGNPGSDYFPGGTAPGAPGPGGPSGTSSSGSKASGPPNPPAQGDGTSLSPNYTLESTSGNDGKPVSGGGGRGRGRRKRDSGHVSPGTFFDKYSAAPDSGGAPGVSPGQQQASGAAVGGSSAGETRGAPTPHEKALTSPSWGKGAELLLGDQPDLIGSLDGGAKSDSSSPNVGEFASDEVSTSYANEDEVSSSSDNPQALVKASRSPLVTGSPKLPPRGVGAGEHGPKAPPPALGLGIMSNSTSTPDSYGGGGGPGHPGTPGLEQVRTPTSSSGAPPPDEIHPLEILQAQIQLQRQQFSISEDQPLGLKGGKKGECAVGASGAQNGDSELGSCCSEAVKSAMSTIDLDSLMAEHSAAWYMPADKALVDSADDDKTLAPWEKAKPQNPNSKEAHDLPANKASASQPGSHLQCLSVHCTDDVGDAKARASVPTWRSLHSDISNRFGTFVAALT

SEQ ID NO: 50511 - protein, 105 aa, Homo sapiens
  Payload ID: 10086
  Gene Symbol: MN1
  Gene Name: meningioma (disrupted in balanced translocation) 1
  ENSP ID: ENSP00000397805
  MOD_RES (1)..(1): Any amino acid
XDSLMAEHSAAWYMPADKALVDSADDDKTLAPWEKAKPQNPNSKEAHDLPANKASASQPGSHLQCLSVHCTDDVGDAKARASVPTWRSLHSDISNRFGTFVAALT

SEQ ID NO: 50512 - protein, 849 aa, Homo sapiens
  Payload ID: 10087
  Gene Symbol: MGEA5
  Gene Name: meningioma expressed antigen 5 (hyaluronidase)
  Uniprot ID: O60502
  ENSP ID: ENSP00000350445
MVQKESQATLEERESELSSNPAASAGASLEPPAAPAPGEDNPAGAGGAAVAGAAGGARRFLCGVVEGFYGRPWVMEQRKELFRRLQKWELNTYLYAPKDDYKHRMFWREMYSVEEAEQLMTLISAAREYEIEFIYAISPGLDITFSNPKEVSTLKRKLDQVSQFGCRSFALLFDDIDHNMCAADKEVFSSFAHAQVSITNEIYQYLGEPETFLFCPTEYCGTFCYPNVSQSPYLRTVGEKLLPGIEVLWTGPKVVSKEIPVESIEEVSKIIKRAPVIWDNIHANDYDQKRLFLGPYKGRSTELIPRLKGVLTNPNCEFEANYVAIHTLATWYKSNMNGVRKDVVMSRQVAHSGAKASVVDGTPLVAAPSLNATTVVTTVYQEPIMSQGAALSGEPTTLTKEEEKKQPDEEPMDMVVEKQEETDHKNDNQILSEIVEAKMAEELKPMDTDKESIAESKSPEMSMQEDCISDIAPMQTDEQTNKEQFVPGPNEKPLYTAEPVTLEDLQLLADLFYLPYEHGPKGAQMLREFQWLRANSSVVSVNCKGKDSEKIEEWRSRAAKFEEMCGLVMGMFTRLSNCANRTILYDMYSYVWDIKSIMSMVKSFVQWLGCRSHSSAQFLIGDQEPWAFRGGLAGEFQPPPLTPTSKVYTIRPYFPKDEASVYKICREMYDDGVGLPFQSQPDLIGDKLVGGLLSLSLDYCFVLEDEDGICGYALGTVDVTPFIKKCKISWIPFMQEKYTKPNGDKELSEAEKIMLSFHEEQEVLPETFLANFPSLIKMDIHKKVTDPSVAKSMMACLLSSLKANGSRGAFCEVRPDDKRILEFYSKLGCFEIAKMEGFPKDVVILGRSL

SEQ ID NO: 50513 - protein, 916 aa, Homo sapiens
  Payload ID: 10087
  Gene Symbol: MGEA5
  Gene Name: meningioma expressed antigen 5 (hyaluronidase)
  Uniprot ID: O60502
  ENSP ID: ENSP00000354850
MVQKESQATLEERESELSSNPAASAGASLEPPAAPAPGEDNPAGAGGAAVAGAAGGARRFLCGVVEGFYGRPWVMEQRKELFRRLQKWELNTYLYAPKDDYKHRMFWREMYSVEEAEQLMTLISAAREYEIEFIYAISPGLDITFSNPKEVSTLKRKLDQVSQFGCRSFALLFDDIDHNMCAADKEVFSSFAHAQVSITNEIYQYLGEPETFLFCPTEYCGTFCYPNVSQSPYLRTVGEKLLPGIEVLWTGPKVVSKEIPVESIEEVSKIIKRAPVIWDNIHANDYDQKRLFLGPYKGRSTELIPRLKGVLTNPNCEFEANYVAIHTLATWYKSNMNGVRKDVVMTDSEDSTVSIQIKLENEGSDEDIETDVLYSPQMALKLALTEWLQEFGVPHQYSSRQVAHSGAKASVVDGTPLVAAPSLNATTVVTTVYQEPIMSQGAALSGEPTTLTKEEEKKQPDEEPMDMVVEKQEETDHKNDNQILSEIVEAKMAEELKPMDTDKESIAESKSPEMSMQEDCISDIAPMQTDEQTNKEQFVPGPNEKPLYTAEPVTLEDLQLLADLFYLPYEHGPKGAQMLREFQWLRANSSVVSVNCKGKDSEKIEEWRSRAAKFEEMCGLVMGMFTRLSNCANRTILYDMYSYVWDIKSIMSMVKSFVQWLGCRSHSSAQFLIGDQEPWAFRGGLAGEFQRLLPIDGANDLFFQPPPLTPTSKVYTIRPYFPKDEASVYKICREMYDDGVGLPFQSQPDLIGDKLVGGLLSLSLDYCFVLEDEDGICGYALGTVDVTPFIKKCKISWIPFMQEKYTKPNGDKELSEAEKIMLSFHEEQEVLPETFLANFPSLIKMDIHKKVTDPSVAKSMMACLLSSLKANGSRGAFCEVRPDDKRILEFYSKLGCFEIAKMEGFPKDVVILGRSL

SEQ ID NO: 50514 - protein, 677 aa, Homo sapiens
  Payload ID: 10087
  Gene Symbol: MGEA5
  Gene Name: meningioma expressed antigen 5 (hyaluronidase)
  Uniprot ID: O60502
  ENSP ID: ENSP00000359112
MVQKESQATLEERESELSSNPAASAGASLEPPAAPAPGEDNPAGAGGAAVAGAAGGARRFLCGVVEGFYGRPWVMEQRKELFRRLQKWELNTYLYAPKDDYKHRMFWREMYSVEEAEQLMTLISAAREYEIEFIYAISPGLDITFSNPKEVSTLKRKLDQVSQFGCRSFALLFDDIDHNMCAADKEVFSSFAHAQVSITNEIYQYLGEPETFLFCPTEYCGTFCYPNVSQSPYLRTVGEKLLPGIEVLWTGPKVVSKEIPVESIEEVSKIIKRAPVIWDNIHANDYDQKRLFLGPYKGRSTELIPRLKGVLTNPNCEFEANYVAIHTLATWYKSNMNGVRKDVVMTDSEDSTVSIQIKLENEGSDEDIETDVLYSPQMALKLALTEWLQEFGVPHQYSSRQVAHSGAKASVVDGTPLVAAPSLNATTVVTTVYQEPIMSQGAALSGEPTTLTKEEEKKQPDEEPMDMVVEKQEETDHKNDNQILSEIVEAKMAEELKPMDTDKESIAESKSPEMSMQEDCISDIAPMQTDEQTNKEQFVPGPNEKPLYTAEPVTLEDLQLLADLFYLPYEHGPKGAQMLREFQWLRANSSVVSVNCKGKDSEKIEEWRSRAAKFEEMCGLVMGMFTRLSNCANRTILYDMYSYVWDIKSIMSMVKSFVQWLGRCTRNNLFSSNILSL

SEQ ID NO: 50515 - protein, 863 aa, Homo sapiens
  Payload ID: 10087
  Gene Symbol: MGEA5
  Gene Name: meningioma expressed antigen 5 (hyaluronidase)
  Uniprot ID: O60502
  ENSP ID: ENSP00000409973
MVQKESQATLEERESELSSNPAASAGASLEPPAAPAPGEDNPAGAGGAAVAGAAGGARRFLCGVVEGFYGRPWVMEQRKELFRRLQKWELNTYLYAPKDDYKHRMFWREMYSVEEAEQLMTLISAAREYEIEFIYAISPGLDITFSNPKEVSTLKRKLDQVSQFGCRSFALLFDDIDHNMCAADKEVFSSFAHAQVSITNEIYQYLGEPETFLFCPTEYCGTFCYPNVSQSPYLRTVGEKLLPGIEVLWTGPKVVSKEIPVESIEEVSKIIKRAPVIWDNIHANDYDQKRLFLGPYKGRSTELIPRLKGVLTNPNCEFEANYVAIHTLATWYKSNMNGVRKDVVMSRQVAHSGAKASVVDGTPLVAAPSLNATTVVTTVYQEPIMSQGAALSGEPTTLTKEEEKKQPDEEPMDMVVEKQEETDHKNDNQILSEIVEAKMAEELKPMDTDKESIAESKSPEMSMQEDCISDIAPMQTDEQTNKEQFVPGPNEKPLYTAEPVTLEDLQLLADLFYLPYEHGPKGAQMLREFQWLRANSSVVSVNCKGKDSEKIEEWRSRAAKFEEMCGLVMGMFTRLSNCANRTILYDMYSYVWDIKSIMSMVKSFVQWLGCRSHSSAQFLIGDQEPWAFRGGLAGEFQRLLPIDGANDLFFQPPPLTPTSKVYTIRPYFPKDEASVYKICREMYDDGVGLPFQSQPDLIGDKLVGGLLSLSLDYCFVLEDEDGICGYALGTVDVTPFIKKCKISWIPFMQEKYTKPNGDKELSEAEKIMLSFHEEQEVLPETFLANFPSLIKMDIHKKVTDPSVAKSMMACLLSSLKANGSRGAFCEVRPDDKRILEFYSKLGCFEIAKMEGFPKDVVILGRSL

SEQ ID NO: 50516 - protein, 256 aa, Homo sapiens
  Payload ID: 10087
  Gene Symbol: MGEA5
  Gene Name: meningioma expressed antigen 5 (hyaluronidase)
  ENSP ID: ENSP00000414235
AAGGARRFLCGVVEGFYGRPWVMEQRKELFRRLQKWELNTYLYAPKDDYKHRMFWREMYSVEEAEQLMTLISAAREYEIEFIYAISPGLDITFSNPKEVSTLKRKLDQVSQFGCRSFALLFDDIDHNMCAADKEVFSSFAHAQVSITNEIYQYLGEPETFLFCPTGPKVVSKEIPVESIEEVSKIIKRAPVIWDNIHANDYDQKRLFLGPYKGRSTELIPRLKGVLTNPNCEFEANYVAIHTLATWYKSNMNGVRK

SEQ ID NO: 50517 - protein, 746 aa, Homo sapiens
  Payload ID: 10088
  Gene Symbol: MEP1A
  Gene Name: meprin A, alpha (PABA peptide hydrolase)
  Uniprot ID: Q16819
  ENSP ID: ENSP00000230588
MAWIRSTCILFFTLLFAHIAAVPIKYLPEENVHDADFGEQKDISEINLAAGLDLFQGDILLQKSRNGLRDPNTRWTFPIPYILADNLGLNAKGAILYAFEMFRLKSCVDFKPYEGESSYIIFQQFDGCWSEVGDQHVGQNISIGQGCAYKAIIEHEILHALGFYHEQSRTDRDDYVNIWWDQILSGYQHNFDTYDDSLITDLNTPYDYESLMHYQPFSFNKNASVPTITAKIPEFNSIIGQRLDFSAIDLERLNRMYNCTTTHTLLDHCTFEKANICGMIQGTRDDTDWAHQDSAQAGEVDHTLLGQCTGAGYFMQFSTSSGSAEEAALLESRILYPKRKQQCLQFFYKMTGSPSDRLVVWVRRDDSTGNVRKLVKVQTFQGDDDHNWKIAHVVLKEEQKFRYLFQGTKGDPQNSTGGIYLDDITLTETPCPTGVWTVRNFSQVLENTSKGDKLQSPRFYNSEGYGFGVTLYPNSRESSGYLRLAFHVCSGENDAILEWPVENRQVIITILDQEPDVRNRMSSSMVFTTSKSHTSPAINDTVIWDRPSRVGTYHTDCNCFRSIDLGWSGFISHQMLKRRSFLKNDDLIIFVDFEDITHLSQTEVPTKGKRLSPQGLILQGQEQQVSEEGSGKAMLEEALPVSLSQGQPSRQKRSVENTGPLEDHNWPQYFRDPCDPNPCQNDGICVNVKGMASCRCISGHAFFYTGERCQAVQVHGSVLGMVIGGTAGVIFLTFSIIAILSQRPRK

SEQ ID NO: 50518 - protein, 774 aa, Homo sapiens
  Payload ID: 10088
  Gene Symbol: MEP1A
  Gene Name: meprin A, alpha (PABA peptide hydrolase)
  ENSP ID: ENSP00000480465
MAWIRSTCILFFTLLFAHIAAVPVSRVLLFGYLEILILVYIIHFLYIYFFQIKYLPEENVHDADFGEQKDISEINLAAGLDLFQGDILLQKSRNGLRDPNTRWTFPIPYILADNLGLNAKGAILYAFEMFRLKSCVDFKPYEGESSYIIFQQFDGCWSEVGDQHVGQNISIGQGCAYKAIIEHEILHALGFYHEQSRTDRDDYVNIWWDQILSGYQHNFDTYDDSLITDLNTPYDYESLMHYQPFSFNKNASVPTITAKIPEFNSIIGQRLDFSAIDLERLNRMYNCTTTHTLLDHCTFEKANICGMIQGTRDDTDWAHQDSAQAGEVDHTLLGQCTGAGYFMQFSTSSGSAEEAALLESRILYPKRKQQCLQFFYKMTGSPSDRLVVWVRRDDSTGNVRKLVKVQTFQGDDDHNWKIAHVVLKEEQKFRYLFQGTKGDPQNSTGGIYLDDITLTETPCPTGVWTVRNFSQVLENTSKGDKLQSPRFYNSEGYGFGVTLYPNSRESSGYLRLAFHVCSGENDAILEWPVENRQVIITILDQEPDVRNRMSSSMVFTTSKSHTSPAINDTVIWDRPSRVGTYHTDCNCFRSIDLGWSGFISHQMLKRRSFLKNDDLIIFVDFEDITHLSQTEVPTKGKRLSPQGLILQGQEQQVSEEGSGKAMLEEALPVSLSQGQPSRQKRSVENTGPLEDHNWPQYFRDPCDPNPCQNDGICVNVKGMASCRCISGHAFFYTGERCQAVQVHGSVLGMVIGGTAGVIFLTFSIIAILSQRPRK

SEQ ID NO: 50519 - protein, 701 aa, Homo sapiens
  Payload ID: 10089
  Gene Symbol: MEP1B
  Gene Name: meprin A, beta
  Uniprot ID: Q16820
  ENSP ID: ENSP00000269202
MDLWNLSWFLFLDALLVISGLATPENFDVDGGMDQDIFDINEGLGLDLFEGDIRLDRAQIRNSIIGEKYRWPHTIPYVLEDSLEMNAKGVILNAFERYRLKTCIDFKPWAGETNYISVFKGSGCWSSVGNRRVGKQELSIGANCDRIATVQHEFLHALGFWHEQSRSDRDDYVRIMWDRILSGREHNFNTYSDDISDSLNVPYDYTSVMHYSKTAFQNGTEPTIVTRISDFEDVIGQRMDFSDSDLLKLNQLYNCSSSLSFMDSCSFELENVCGMIQSSGDNADWQRVSQVPRGPESDHSNMGQCQGSGFFMHFDSSSVNVGATAVLESRTLYPKRGFQCLQFYLYNSGSESDQLNIYIREYSADNVDGNLTLVEEIKEIPTGSWQLYHVTLKVTKKFRVVFEGRKGSGASLGGLSIDDINLSETRCPHHIWHIRNFTQFIGSPNGTLYSPPFYSSKGYAFQIYLNLAHVTNAGIYFHLISGANDDQLQWPCPWQQATMTLLDQNPDIRQRMSNQRSITTDPFMTTDNGNYFWDRPSKVGTVALFSNGTQFRRGGGYGTSAFITHERLKSRDFIKGDDVYILLTVEDISHLNSTQIQLTPAPSVQDLCSKTTCKNDGVCTVRDGKAECRCQSGEDWWYMGERCEKRGSTRDTIVIAVSSTVAVFALMLIITLVSVYCTRKKYRERMSSNRPNLTPQNQHAF

SEQ ID NO: 50520 - protein, 114 aa, Homo sapiens
  Payload ID: 10089
  Gene Symbol: MEP1B
  Gene Name: meprin A, beta
  ENSP ID: ENSP00000462038
MDQDIFDINEGLGLDLFEGDIRLDRAQIRNSIIGEKYRWPHTIPYVLEDSLEMNAKGVILNAFERYRLKTCIDFKPWAGETNYISVFKGSGCWSSVGNRRVGKQELSIGANCDR

SEQ ID NO: 50521 - protein, 700 aa, Homo sapiens
  Payload ID: 10089
  Gene Symbol: MEP1B
  Gene Name: meprin A, beta
  ENSP ID: ENSP00000463280
MDLWNLSWFLFLDALLVISGLATPENFDVDGGMDQDIFDINEGLGLDLFEGDIRLDRAQIRNSIIGEKYRWPHTIPYVLEDSLEMNAKGVILNAFERYRLKTCIDFKPWAGETNYISVFKGSGCWSSVGNRRVGKQELSIGANCDRIATVQHEFLHALGFWHEQSRSDRDDYVRIMWDRILSGREHNFNTYSDDISDSLNVPYDYTSVMHYSKTAFQNGTEPTIVTRISDFEDVIGQRMDFSDSDLLKLNQLYNCSSSLSFMDSCSFELENVCGMIQSSGDNADWQRVSQVPRGPESDHSNMGQCQGSGFFMHFDSSSVNVGATAVLESRTLYPKRGFQCLQFYLYNSGSESDQLNIYIREYSADNVDGNLTLVEEIKEIPTGSWQLYHVTLKVTKKFRVVFEGRKGSGASLGGLSIDDINLSETRCPHHIWHIRNFTQFIGSPNGTLYSPPFYSSKGYAFQIYLNLAHVTNAGIYFHLISGANDDQLQWPCPWQQATMTLLDQNPDIRQRMSNQRSITTDPFMTTDNGNYFWDRPSKVGTVALFSNGTQFRRGGGYGTSAFITHERLKSRDFIKGDDVYILLTVEDISHLNSTQIQLTPAPSVQDLCSKTTCKNDGVCTVRDGKAECRCQSGEDWWYMGERCEKRGSTRDTIVIAVSSTVAVFALMLIITLVSVYCTRKKYRERMSSNRPNLTPQNHAF

SEQ ID NO: 50522 - protein, 999 aa, Homo sapiens
  Payload ID: 10090
  Gene Symbol: MERTK
  Gene Name: MER proto-oncogene, tyrosine kinase
  Uniprot ID: Q12866
  ENSP ID: ENSP00000295408
MGPAPLPLLLGLFLPALWRRAITEAREEAKPYPLFPGPFPGSLQTDHTPLLSLPHASGYQPALMFSPTQPGRPHTGNVAIPQVTSVESKPLPPLAFKHTVGHIILSEHKGVKFNCSISVPNIYQDTTISWWKDGKELLGAHHAITQFYPDDEVTAIIASFSITSVQRSDNGSYICKMKINNEEIVSDPIYIEVQGLPHFTKQPESMNVTRNTAFNLTCQAVGPPEPVNIFWVQNSSRVNEQPEKSPSVLTVPGLTEMAVFSCEAHNDKGLTVSKGVQINIKAIPSPPTEVSIRNSTAHSILISWVPGFDGYSPFRNCSIQVKEADPLSNGSVMIFNTSALPHLYQIKQLQALANYSIGVSCMNEIGWSAVSPWILASTTEGAPSVAPLNVTVFLNESSDNVDIRWMKPPTKQQDGELVGYRISHVWQSAGISKELLEEVGQNGSRARISVQVHNATCTVRIAAVTRGGVGPFSDPVKIFIPAHGWVDYAPSSTPAPGNADPVLIIFGCFCGFILIGLILYISLAIRKRVQETKFGNAFTEEDSELVVNYIAKKSFCRRAIELTLHSLGVSEELQNKLEDVVIDRNLLILGKILGEGEFGSVMEGNLKQEDGTSLKVAVKTMKLDNSSQREIEEFLSEAACMKDFSHPNVIRLLGVCIEMSSQGIPKPMVILPFMKYGDLHTYLLYSRLETGPKHIPLQTLLKFMVDIALGMEYLSNRNFLHRDLAARNCMLRDDMTVCVADFGLSKKIYSGDYYRQGRIAKMPVKWIAIESLADRVYTSKSDVWAFGVTMWEIATRGMTPYPGVQNHEMYDYLLHGHRLKQPEDCLDELYEIMYSCWRTDPLDRPTFSVLRLQLEKLLESLPDVRNQADVIYVNTQLLESSEGLAQGSTLAPLDLNIDPDSIIASCTPRAAISVVTAEVHDSKPHEGRYILNGGSEEWEDLTSAPSAAVTAEKNSVLPGERLVRNGVSWSHSSMLPLGSSLPDELLFADDSSEGSEVLM

SEQ ID NO: 50523 - protein, 823 aa, Homo sapiens
  Payload ID: 10090
  Gene Symbol: MERTK
  Gene Name: MER proto-oncogene, tyrosine kinase
  ENSP ID: ENSP00000387277
MKINNEEIVSDPIYIEVQGLPHFTKQPESMNVTRNTAFNLTCQAVGPPEPVNIFWVQNSSRVNEQPEKSPSVLTVPGLTEMAVFSCEAHNDKGLTVSKGVQINIKAIPSPPTEVSIRNSTAHSILISWVPGFDGYSPFRNCSIQVKEADPLSNGSVMIFNTSALPHLYQIKQLQALANYSIGVSCMNEIGWSAVSPWILASTTEGAPSVAPLNVTVFLNESSDNVDIRWMKPPTKQQDGELVGYRISHVWQSAGISKELLEEVGQNGSRARISVQVHNATCTVRIAAVTRGGVGPFSDPVKIFIPAHGWVDYAPSSTPAPGNADPVLIIFGCFCGFILIGLILYISLAIRKRVQETKFGNAFTEEDSELVVNYIAKKSFCRRAIELTLHSLGVSEELQNKLEDVVIDRNLLILGKILGEGEFGSVMEGNLKQEDGTSLKVAVKTMKLDNSSQREIEEFLSEAACMKDFSHPNVIRLLGVCIEMSSQGIPKPMVILPFMKYGDLHTYLLYSRLETGPKHIPLQTLLKFMVDIALGMEYLSNRNFLHRDLAARNCMLRDDMTVCVADFGLSKKIYSGDYYRQGRIAKMPVKWIAIESLADRVYTSKSDVWAFGVTMWEIATRGMTPYPGVQNHEMYDYLLHGHRLKQPEDCLDELYEIMYSCWRTDPLDRPTFSVLRLQLEKLLESLPDVRNQADVIYVNTQLLESSEGLAQGSTLAPLDLNIDPDSIIASCTPRAAISVVTAEVHDSKPHEGRYILNGGSEEWEDLTSAPSAAVTAEKNSVLPGERLVRNGVSWSHSSMLPLGSSLPDELLFADDSSEGSEVLM

SEQ ID NO: 50524 - protein, 999 aa, Homo sapiens; identical to SEQ ID NO: 50522
  Payload ID: 10090
  Gene Symbol: MERTK
  Gene Name: MER proto-oncogene, tyrosine kinase
  Uniprot ID: Q12866
  ENSP ID: ENSP00000389152

SEQ ID NO: 50525 - protein, 96 aa, Homo sapiens
  Payload ID: 10090
  Gene Symbol: MERTK
  Gene Name: MER proto-oncogene, tyrosine kinase
  ENSP ID: ENSP00000402129
MGPAPLPLLLGLFLPALWRRAITEAREEAKPYPLFPGPFPGSLQTDHTPLLSLPHASGYQPALMFSPTQPGRPHTGNVAIPQHNQCAAFRQWVVYL

SEQ ID NO: 50526 - protein, 257 aa, Homo sapiens
  Payload ID: 10090
  Gene Symbol: MERTK
  Gene Name: MER proto-oncogene, tyrosine kinase
  ENSP ID: ENSP00000412660
HIPLQTLLKFMVDIALGMEYLSNRNFLHRDLAARNCITHLAILARSPASCSYCRLRDDMTVCVADFGLSKKIYSGDYYRQGRIAKMPVKWIAIESLADRVYTSKSDVWAFGVTMWEIATRGMTPYPGVQNHEMYDYLLHGHRLKQPEDCLDELYEIMYSCWRTDPLDRPTFSVLRLQLEKLLESLPDVRNQADVIYVNTQLLESSEGLAQGSTLAPLDLNIDPDSIIASCTPRAAISVVTAEVHDSKPHEGRYILNG

SEQ ID NO: 50527 - protein, 588 aa, Homo sapiens [sequence omitted]

SEQ ID NO: 50528 - protein, 297 aa, Homo sapiens
  Payload ID: 10091
  Gene Symbol: MPST
  Gene Name: mercaptopyruvate sulfurtransferase
  Uniprot ID: P25325
  ENSP ID: ENSP00000342333
MASPQLCRALVSAQWVAEALRAPRAGQPLQLLDASWYLPKLGRDARREFEERHIPGAAFFDIDQCSDRTSPYDHMLPGAEHFAEYAGRLGVGAATHVVIYDASDQGLYSAPRVWWMFRAFGHHAVSLLDGGLRHWLRQNLPLSSGKSQPAPAEFRAQLDPAFIKTYEDIKENLESRRFQVVDSRATGRFRGTEPEPRDGIEPGHIPGTVNIPFTDFLSQEGLEKSPEEIRHLFQEKKVDLSKPLVATCGSGVTACHVALGAYLCGKPDVPIYDGSWVEWYMRARPEDVISEGRGKTH

SEQ ID NO: 50529 - protein, 297 aa, Homo sapiens; identical to SEQ ID NO: 50528
  Payload ID: 10091
  Gene Symbol: MPST
  Gene Name: mercaptopyruvate sulfurtransferase
  Uniprot ID: P25325
  ENSP ID: ENSP00000380402

SEQ ID NO: 50530 - protein, 297 aa, Homo sapiens; identical to SEQ ID NO: 50528
  Payload ID: 10091
  Gene Symbol: MPST
  Gene Name: mercaptopyruvate sulfurtransferase
  Uniprot ID: P25325
  ENSP ID: ENSP00000383950

SEQ ID NO: 50531 - protein, 297 aa, Homo sapiens; identical to SEQ ID NO: 50528
  Payload ID: 10091
  Gene Symbol: MPST
  Gene Name: mercaptopyruvate sulfurtransferase
  Uniprot ID: P25325
  ENSP ID: ENSP00000384812

SEQ ID NO: 50532 - protein, 224 aa, Homo sapiens
  Payload ID: 10091
  Gene Symbol: MPST
  Gene Name: mercaptopyruvate sulfurtransferase
  ENSP ID: ENSP00000385062
MASPQLCRALVSAQWVAEALRAPRAGQPLQLLDASWYLPKLGRDARREFEERHIPGAAFFDIDQCSDRTSPYDHMLPGAEHFAEYAGRLGVGAATHVVIYDASDQGLYSAPRVWWMFRAFGHHAVSLLDGGLRHWLRQNLPLSSGKSQPAPAEFRAQLDPAFIKTYEDIKENLESRRFQVVDSRATGRFRGTEPEPRDGSGSTAQAGVQWHNHGSLQPQPPGLR

SEQ ID NO: 50533 - protein, 317 aa, Homo sapiens
  Payload ID: 10091
  Gene Symbol: MPST
  Gene Name: mercaptopyruvate sulfurtransferase
  Uniprot ID: P25325
  ENSP ID: ENSP00000411719
MAEPGSRESETRARSPSVAAMASPQLCRALVSAQWVAEALRAPRAGQPLQLLDASWYLPKLGRDARREFEERHIPGAAFFDIDQCSDRTSPYDHMLPGAEHFAEYAGRLGVGAATHVVIYDASDQGLYSAPRVWWMFRAFGHHAVSLLDGGLRHWLRQNLPLSSGKSQPAPAEFRAQLDPAFIKTYEDIKENLESRRFQVVDSRATGRFRGTEPEPRDGIEPGHIPGTVNIPFTDFLSQEGLEKSPEEIRHLFQEKKVDLSKPLVATCGSGVTACHVALGAYLCGKPDVPIYDGSWVEWYMRARPEDVISEGRGKTH

SEQ ID NO: 50534 - protein, 224 aa, Homo sapiens; identical to SEQ ID NO: 50532
  Payload ID: 10091
  Gene Symbol: MPST
  Gene Name: mercaptopyruvate sulfurtransferase
  ENSP ID: ENSP00000486251

SEQ ID NO: 50535 - protein, 71 aa, Homo sapiens
  Payload ID: 10092
  Gene Symbol: MANF
  Gene Name: mesencephalic astrocyte-derived neurotrophic factor
  ENSP ID: ENSP00000405280
  MOD_RES (1)..(1): Any amino acid
XATQGLAVALALSVLPGSRALRPGDCEVCISYLGRFYQDLKDRDVTFSPATIENELIKFCREARGKENRLV

SEQ ID NO: 50536 - protein, 185 aa, Homo sapiens
  Payload ID: 10092
  Gene Symbol: MANF
  Gene Name: mesencephalic astrocyte-derived neurotrophic factor
  ENSP ID: ENSP00000432799
MRRMRRMWATQGLAVALALSVLPGSRALRPGDCEVCISYLGRFYQDLKDRDVTFSPATIENELIKFCREARGKENRLCYYIGATDDAATKIINEVSKPLAHHIPVEKICEKLKKKDSQICELKYDKQIDLSTVDLKKLRVKELKKILDDWGETCKGCAEKSDYIRKINELMPKYAPKAASARTDL

SEQ ID NO: 50537 - protein, 254 aa, Homo sapiens
  Payload ID: 10093
  Gene Symbol: MEOX1
  Gene Name: mesenchyme homeobox 1
  Uniprot ID: P50221
  ENSP ID: ENSP00000321684
MDPAASSCMRSLQPPAPVWGCLRNPHSEGNGASGLPHYPPTPFSFHQKPDFLATATAAYPDFSASCLAATPHSLPQEEHIFTEQHPAFPQSPNWHFPVSDARRRPNSGPAGGSKEMGTSSLGLVDTTGGPGDDYGVLGSTANETEKKSSRRRKESSDNQENRGKPEGSSKARKERTAFTKEQLRELEAEFAHHNYLTRLRRYEIAVNLDLSERQVKVWFQNRRMKWKRVKGGQPISPNGQDPEDGDSTASPSSE

SEQ ID NO: 50538 - protein, 184 aa, Homo sapiens
  Payload ID: 10093
  Gene Symbol: MEOX1
  Gene Name: mesenchyme homeobox 1
  Uniprot ID: P50221
  ENSP ID: ENSP00000328678
MDPAASSCMRSLQPPAPVWGCLRNPHSEGNGASGLPHYPPTPFSFHQKPDFLATATAAYPDFSASCLAATPHSLPQEEHIFTEQHPAFPQSPNWHFPVSDARRRPNSGPAGGSKEMGTSSLGLVDTTGGPGDDYGVLGSTANETEKKSSRRRKESSGQSVVPEPKDEVEACEGRSAHLPQWAGP

SEQ ID NO: 50539 - protein, 139 aa, Homo sapiens
  Payload ID: 10093
  Gene Symbol: MEOX1
  Gene Name: mesenchyme homeobox 1
  Uniprot ID: P50221
  ENSP ID: ENSP00000377271
MGTSSLGLVDTTGGPGDDYGVLGSTANETEKKSSRRRKESSDNQENRGKPEGSSKARKERTAFTKEQLRELEAEFAHHNYLTRLRRYEIAVNLDLSERQVKVWFQNRRMKWKRVKGGQPISPNGQDPEDGDSTASPSSE

SEQ ID NO: 50540 - protein, 167 aa, Homo sapiens
  Payload ID: 10093
  Gene Symbol: MEOX1
  Gene Name: mesenchyme homeobox 1
  ENSP ID: ENSP00000449049
MGPQGYPTTRPPRSPSTRNQTSWRQRRQRTLTSQPPAWQPPHTACPRRSTSSLSSTPLSHSPPTGTSLSQTPGAGPTQARQGVPRKWGPAAWAWWTPQEAQAMTTGCLGALPMRQRRNHPGGERRVQVKVWFQNRRMKWKRVKGGQPISPNGQDPEDGDSTASPSSE

SEQ ID NO: 50541 - protein, 304 aa, Homo sapiens
  Payload ID: 10094
  Gene Symbol: MEOX2
  Gene Name: mesenchyme homeobox 2
  Uniprot ID: P50222
  ENSP ID: ENSP00000262041
MEHPLFGCLRSPHATAQGLHPFSQSSLALHGRSDHMSYPELSTSSSSCIIAGYPNEEGMFASQHHRGHHHHHHHHHHHHHQQQQHQALQTNWHLPQMSSPPSAARHSLCLQPDSGGPPELGSSPPVLCSNSSSLGSSTPTGAACAPGDYGRQALSPAEAEKRSGGKRKSDSSDSQEGNYKSEVNSKPRKERTAFTKEQIRELEAEFAHHNYLTRLRRYEIAVNLDLTERQVKVWFQNRRMKWKRVKGGQQGAAAREKELVNVKKGTLLPSELSGIGAATLQQTGDSIANEDSHDSDHSSEHAHL

SEQ ID NO: 50542 - protein, 303 aa, Homo sapiens
  Payload ID: 10095
  Gene Symbol: MEDAG
  Gene Name: mesenteric estrogen-dependent adipogenesis
  Uniprot ID: Q5VYS4
  ENSP ID: ENSP00000369849
MAGAACEPVARPSLTSISSGELRSLWTCDCELALLPLAQLLRLQPGAFQLSGDQLVVARPGEPAAARGGFNVFGDGLVRLDGQLYRLSSYIKRYVELTNYCDYKDYRETILSKPMLFFINVQTKKDTSKERTYAFLVNTRHPKIRRQIEQGMDMVISSVIGESYRLQFDFQEAVKNFFPPGNEVVNGENLSFAYEFKADALFDFFYWFGLSNSVVKVNGKVLNLSSTSPEKKETIKLFLEKMSEPLIRRSSFSDRKFSVTSRGSIDDVFNCNLSPRSSLTEPLLAELPFPSVLESEETPNQFI

SEQ ID NO: 50543 - protein, 106 aa, Homo sapiens
  Payload ID: 10095
  Gene Symbol: MEDAG
  Gene Name: mesenteric estrogen-dependent adipogenesis
  ENSP ID: ENSP00000416838
  MOD_RES (1)..(1): Any amino acid
XAARGGFNVFGDGLVRLDGQLYRLSSYIKRYVELTNYCDYKDYRETILSKPMLFFINVQTKKDTSKERTYAFLVNTRHPKIRRQIEQGMDMVISSVIGESYRLQVQ

SEQ ID NO: 50544 - protein, 362 aa, Homo sapiens
  Payload ID: 10096
  Gene Symbol: MESDC1
  Gene Name: mesoderm development candidate 1
  Uniprot ID: Q9H1K6
  ENSP ID: ENSP00000267984
MASGSAGKPTGEAASPAPASAIGGASSQPRKRLVSVCDHCKGKMQLVADLLLLSSEARPVLFEGPASSGAGAESFEQCRDTIIARTKGLSILTHDVQSQLNMGRFGEAGDSLVELGDLVVSLTECSAHAAYLAAVATPGAQPAQPGLVDRYRVTRCRHEVEQGCAVLRATPLADMTPQLLLEVSQGLSRNLKFLTDACALASDKSRDRFSREQFKLGVKCMSTSASALLACVREVKVAPSELARSRCALFSGPLVQAVSALVGFATEPQFLGRAAAVSAEGKAVQTAILGGAMSVVSACVLLTQCLRDLAQHPDGGAKMSDHRERLRNSACAVSEGCTLLSQALRERSSPRTLPPVNSNSVN

SEQ ID NO: 50545 - protein, 234 aa, Homo sapiens
  Payload ID: 10097
  Gene Symbol: MESDC2
  Gene Name: mesoderm development candidate 2
  Uniprot ID: Q14696
  ENSP ID: ENSP00000261758
MAASRWARKAVVLLCASDLLLLLLLLPPPGSCAAEGSPGTPDESTPPPRKKKKDIRDYNDADMARLLEQWEKDDDIEEGDLPEHKRPSAPVDFSKIDPSKPESILKMTKKGKTLMMFVTVSGSPTEKETEEITSLWQGSLFNANYDVQRFIVGSDRAIFMLRDGSYAWEIKDFLVGQDRCADVTLEGQVYPGKGGGSKEKNKTKQDKGKKKKEGDLKSRSSKEENRAGNKREDL

SEQ ID NO: 50546 - protein, 138 aa, Homo sapiens
  Payload ID: 10097
  Gene Symbol: MESDC2
  Gene Name: mesoderm development candidate 2
  Uniprot ID: Q14696
  ENSP ID: ENSP00000403839
MAASRWARKAVVLLCASDLLLLLLLLPPPGSCAAEGSPGTPDESTPPPRKKKKDIRDYNDADMARLLEQWETPEPLPVLPEVPSTCACLSSASLIWTCFSHLSPHALVKRVWPPAKQGLGGKESPASAWLPHRGGELK

SEQ ID NO: 50547 - protein, 80 aa, Homo sapiens
  Payload ID: 10097
  Gene Symbol: MESDC2
  Gene Name: mesoderm development candidate 2
  ENSP ID: ENSP00000453220
MAASRWARKAVVLLCASDLLLLLLLLPPPGSCAAEGSPGTPDESTPPPRKKKKDIRDYNDADMARLLEQWEANTCPTSTH

SEQ ID NO: 50548 - protein, 234 aa, Homo sapiens; identical to SEQ ID NO: 50545
  Payload ID: 10097
  Gene Symbol: MESDC2
  Gene Name: mesoderm development candidate 2
  Uniprot ID: Q14696
  ENSP ID: ENSP00000453430

SEQ ID NO: 50549 - protein, 234 aa, Homo sapiens; identical to SEQ ID NO: 50545
  Payload ID: 10097
  Gene Symbol: MESDC2
  Gene Name: mesoderm development candidate 2
  Uniprot ID: Q14696
  ENSP ID: ENSP00000482455

SEQ ID NO: 50550 - protein, 545 aa, Homo sapiens
  Payload ID: 10098
  Gene Symbol: MIER2
  Gene Name: mesoderm induction early response 1, family member 2
  Uniprot ID: Q8N344
  ENSP ID: ENSP00000264819
MAEASSLGRQSPRVVSCLEHSLCPGEPGLQTTAVVSMGSGDHQFNLAEILSQNYSVRGECEEASRCPDKPKEELEKDFISQSNDMPFDELLALYGYEASDPISDRESEGGDVAPNLPDMTLDKEQIAKDLLSGEEEEETQSSADDLTPSVTSHEASDLFPNRSGSRFLADEDREPGSSASSDTEEDSLPANKCKKEIMVGPQFQADLSNLHLNRHCEKIYENEDQLLWDPSVLPEREVEEFLYRAVKRRWHEMAGPQLPEGEAVKDSEQALYELVKCNFNVEEALRRLRFNVKVIRDGLCAWSEEECRNFEHGFRVHGKNFHLIQANKVRTRSVGECVEYYYLWKKSERYDYFAQQTRLGRRKYVPSGTTDADQDLDGSDPDGPGRPRPEQDTLTGMRTDPLSVDGTAGGLDEPGVASDGLPSSEPGPCSFQQLDESPAVPLSHRPPALADPASYQPAVTAPEPDASPRLAVDFALPKELPLISSHVDLSGDPEETVAPAQVALSVTEFGLIGIGDVNPFLAAHPTCPAPGLHSEPLSHCNVMTC

SEQ ID NO: 50551 - protein, 210 aa, Homo sapiens
  Payload ID: 10098
  Gene Symbol: MIER2
  Gene Name: mesoderm induction early response 1, family member 2
  ENSP ID: ENSP00000482489
  MOD_RES (1)..(1): Any amino acid
XRTRSVGECVEYYYLWKKSERYDYFAQQTRLGRRKDADQDLDGSDPDGPGRPRPEQDTLTGMRTDPLSVDGTAGGLDEPGVASDGLPSSEPGPCSFQQLDESPAVPLSHRPPALADPASYQPAVTAPEPDASPRLAVDFALPKELPLISSHVDLSGDPEETVAPAQVALSVTEFGLIGIGDVNPFLAAHPTCPAPGLHSEPLSHCNVMTC

SEQ ID NO: 50552 - protein, 145 aa, Homo sapiens
  Payload ID: 10099
  Gene Symbol: MIER3
  Gene Name: mesoderm induction early response 1, family member 3
  ENSP ID: ENSP00000337027
MLVHDYDDERTLEEEEMMDEGKNFSSEIEDLEKEGTMPLEDLLAFYGYEPTIPAVANSSANSSPSELADELPDMTLDKEEIAKDLLSGDDEETQSSADDLTPSVTSHETSDFFPRPLRSNTACDGDKESEVEDVETDSGNSPEDL

SEQ ID NO: 50553 - protein, 550 aa, Homo sapiens
  Payload ID: 10099
  Gene Symbol: MIER3
  Gene Name: mesoderm induction early response 1, family member 3
  Uniprot ID: Q7Z3K6
  ENSP ID: ENSP00000370596
MAEASFGSSSPVGSLSSEDHDFDPTAEMLVHDYDDERTLEEEEMMDEGKNFSSEIEDLEKEGTMPLEDLLAFYGYEPTIPAVANSSANSSPSELADELPDMTLDKEEIAKDLLSGDDEETQSSADDLTPSVTSHETSDFFPRPLRSNTACDGDKESEVEDVETDSGNSPEDLRKEIMIGLQYQAEIPPYLGEYDGNEKVYENEDQLLWCPDVVLESKVKEYLVETSLRTGSEKIMDRISAGTHTRDNEQALYELLKCNHNIKEAIERYCCNGKASQEGMTAWTEEECRSFEHALMLFGKDFHLIQKNKVRTRTVAECVAFYYMWKKSERYDYFAQQTRFGKKRYNHHPGVTDYMDRLVDETEALGGTVNASALTSNRPEPIPDQQLNILNSFTASDLTALTNSVATVCDPTDVNCLDDSFPPLGNTPRGQVNHVPVVTEELLTLPSNGESDCFNLFETGFYHSELNPMNMCSEESERPAKRLKMGIAVPESFMNEVSVNNLGVDFENHTHHITSAKMAVSVADFGSLSANETNGFISAHALHQHAALHSE

SEQ ID NO: 50554 - protein, 549 aa, Homo sapiens
  Payload ID: 10099
  Gene Symbol: MIER3
  Gene Name: mesoderm induction early response 1, family member 3
  Uniprot ID: Q7Z3K6
  ENSP ID: ENSP00000370611
MAEASFGSSSPVGSLSSEDHDFDPTAEMLVHDYDDERTLEEEEMMDEGKNFSSEIEDLEKEGTMPLEDLLAFYGYEPTIPAVANSSANSSPSELADELPDMTLDKEEIAKDLLSGDDEETQSSADDLTPSVTSHETSDFFPRPLRSNTACDGDKESEVEDVETDSGNSPEDLRKEIMIGLQYQAEIPPYLGEYDGNEKVYENEDQLLWCPDVVLESKVKEYLVETSLRTGSEKIMDRISAGTHTRDNEQALYELLKCNHNIKEAIERYCCNGKASQGMTAWTEEECRSFEHALMLFGKDFHLIQKNKVRTRTVAECVAFYYMWKKSERYDYFAQQTRFGKKRYNHHPGVTDYMDRLVDETEALGGTVNASALTSNRPEPIPDQQLNILNSFTASDLTALTNSVATVCDPTDVNCLDDSFPPLGNTPRGQVNHVPVVTEELLTLPSNGESDCFNLFETGFYHSELNPMNMCSEESERPAKRLKMGIAVPESFMNEVSVNNLGVDFENHTHHITSAKMAVSVADFGSLSANETNGFISAHALHQHAALHSE

SEQ ID NO: 50555 - protein, 555 aa, Homo sapiens
  Payload ID: 10099
  Gene Symbol: MIER3
  Gene Name: mesoderm induction early response 1, family member 3
  Uniprot ID: Q7Z3K6
  ENSP ID: ENSP00000370624
MAEASFGSSSPVCFIPVGSLSSEDHDFDPTAEMLVHDYDDERTLEEEEMMDEGKNFSSEIEDLEKEGTMPLEDLLAFYGYEPTIPAVANSSANSSPSELADELPDMTLDKEEIAKDLLSGDDEETQSSADDLTPSVTSHETSDFFPRPLRSNTACDGDKESEVEDVETDSGNSPEDLRKEIMIGLQYQAEIPPYLGEYDGNEKVYENEDQLLWCPDVVLESKVKEYLVETSLRTGSEKIMDRISAGTHTRDNEQALYELLKCNHNIKEAIERYCCNGKASQEGMTAWTEEECRSFEHALMLFGKDFHLIQKNKVRTRTVAECVAFYYMWKKSERYDYFAQQTRFGKKRYNHHPGVTDYMDRLVDETEALGGTVNASALTSNRPEPIPDQQLNILNSFTASDLTALTNSVATVCDPTDVNCLDDSFPPLGNTPRGQVNHVPVVTEELLTLPSNGESDCFNLFETGFYHSELNPMNMCSEESERPAKRLKMGIAVPESFMNEVSVNNLGVDFENHTHHITSAKMAVSVADFGSLSANETNGFISAHALHQHAALHSE

SEQ ID NO: 50556 - protein, 487 aa, Homo sapiens
  Payload ID: 10099
  Gene Symbol: MIER3
  Gene Name: mesoderm induction early response 1, family member 3
  Uniprot ID: Q7Z3K6
  ENSP ID: ENSP00000386584
MPLEDLLAFYGYEPTIPAVANSSANSSPSELADELPDMTLDKEEIAKDLLSGDDEETQSSADDLTPSVTSHETSDFFPRPLRSNTACDGDKESEVEDVETDSGNSPEDLRKEIMIGLQYQAEIPPYLGEYDGNEKVYENEDQLLWCPDVVLESKVKEYLVETSLRTGSEKIMDRISAGTHTRDNEQALYELLKCNHNIKEAIERYCCNGKASQEGMTAWTEEECRSFEHALMLFGKDFHLIQKNKVRTRTVAECVAFYYMWKKSERYDYFAQQTRFGKKRYNHHPGVTDYMDRLVDETEALGGTVNASALTSNRPEPIPDQQLNILNSFTASDLTALTNSVATVCDPTDVNCLDDSFPPLGNTPRGQVNHVPVVTEELLTLPSNGESDCFNLFETGFYHSELNPMNMCSEESERPAKRLKMGIAVPESFMNEVSVNNLGVDFENHTHHITSAKMAVSVADFGSLSANETNGFISAHALHQHAALHSE

SEQ ID NO: 50557 - protein, 44 aa, Homo sapiens
  Payload ID: 10099
  Gene Symbol: MIER3
  Gene Name: mesoderm induction early response 1, family member 3
  ENSP ID: ENSP00000400693
  MOD_RES (1)..(1): Any amino acid
XPTIPAVANSSANSSPSELADELPDMTLDKISGRERNPHLGTSS

SEQ ID NO: 50558 - protein, 24 aa, Homo sapiens
  Payload ID: 10099
  Gene Symbol: MIER3
  Gene Name: mesoderm induction early response 1, family member 3
  ENSP ID: ENSP00000407169
MEWRTEALASLGSLSSEDHDFDPT

SEQ ID NO: 50559 - protein, 119 aa, Homo sapiens
  Payload ID: 10099
  Gene Symbol: MIER3
  Gene Name: mesoderm induction early response 1, family member 3
  Uniprot ID: Q7Z3K6
  ENSP ID: ENSP00000408076
MAEASFGSSSPVGSLSSEDHDFDPTAEMLVHDYDDERTLEEEEMMDEGKNFSSEIEDLEKEGTMPLEDLLAFYGYEPTIPAVANSSANSSPSELADELPDMTLDKISGRERNPHLGTSS

SEQ ID NO: 50560 - protein, 512 aa, Homo sapiens
  Payload ID: 10100
  Gene Symbol: MIER1
  Gene Name: mesoderm induction early response 1, transcriptional regulator
  Uniprot ID: Q8N108
  ENSP ID: ENSP00000347514
MAEPSVESSSPGGSATSDDHEFDPSADMLVHDFDDERTLEEEEMMEGETNFSSEIEDLAREGDMPIHELLSLYGYGSTVRLPEEDEEEEEEEEEGEDDEDADNDDNSGCSGENKEENIKDSSGQEDETQSSNDDPSQSVASQDAQEIIRPRRCKYFDTNSEVEEESEEDEDYIPSEDWKKEIMVGSMFQAEIPVGICRYKENEKVYENDDQLLWDPEYLPEDKVIIFLKDASRRTGDEKGVEAIPEGSHIKDNEQALYELVKCNFDTEEALRRLRFNVKAAREELSVWTEEECRNFEQGLKAYGKDFHLIQANKVRTRSVGECVAFYYMWKKSERYDFFAQQTRFGKKKYNLHPGVTDYMDRLLDESESAASSRAPSPPPTASNSSNSQSEKEDGTVSTANQNGVSSNGPGEILNKEEVKVEGLHINGPTGGNKKPLHADMDTNGYETDNLTTDPKLAHMTARNENDFDEKSERPAKRRRVNSNGKESPGSSEFFQEAVSHGKFEELENTDD

SEQ ID NO: 50561 - protein, 370 aa, Homo sapiens
  Payload ID: 10100
  Gene Symbol: MIER1
  Gene Name: mesoderm induction early response 1, transcriptional regulator
  Uniprot ID: Q8N108
  ENSP ID: ENSP00000348253
MPIHELLSLYGYGSTVRLPEEDEEEEEEEEEGEDDEDADNDDNSGCSGENKEENIKDSSGQEDETQSSNDDPSQSVASQDAQEIIRPRRCKYFDTNSEVEEESEEDEDYIPSEDWKKEIMVGSMFQAEIPVGICRYKENEKVYENDDQLLWDPEYLPEDKVIIFLKDASRRTGDEKGVEAIPEGSHIKDNEQALYELVKCNFDTEEALRRLRFNVKAAREELSVWTEEECRNFEQGLKAYGKDFHLIQANKVRTRSVGECVAFYYMWKKSERYDFFAQQTRFGKKKYNLHPGVTDYMDRLLDESESAASSRAPSPPPTASNSSNSQSEKEDGTVSTANQNGVSSNGPGILQMLLPVHFSAISSRANAFLK

SEQ ID NO: 50562 - protein, 529 aa, Homo sapiens
  Payload ID: 10100
  Gene Symbol: MIER1
  Gene Name: mesoderm induction early response 1, transcriptional regulator
  Uniprot ID: Q8N108
  ENSP ID: ENSP00000350321
MFMFNWFTDCLWTLFLSNYQPSVESSSPGGSATSDDHEFDPSADMLVHDFDDERTLEEEEMMEGETNFSSEIEDLAREGDMPIHELLSLYGYGSTVRLPEEDEEEEEEEEEGEDDEDADNDDNSGCSGENKEENIKDSSGQEDETQSSNDDPSQSVASQDAQEIIRPRRCKYFDTNSEVEEESEEDEDYIPSEDWKKEIMVGSMFQAEIPVGICRYKENEKVYENDDQLLWDPEYLPEDKVIIFLKDASRRTGDEKGVEAIPEGSHIKDNEQALYELVKCNFDTEEALRRLRFNVKAAREELSVWTEEECRNFEQGLKAYGKDFHLIQANKVRTRSVGECVAFYYMWKKSERYDFFAQQTRFGKKKYNLHPGVTDYMDRLLDESESAASSRAPSPPPTASNSSNSQSEKEDGTVSTANQNGVSSNGPGEILNKEEVKVEGLHINGPTGGNKKPLHADMDTNGYETDNLTTDPKLAHMTARNENDFDEKSERPAKRRRVNSNGKESPGSSEFFQEAVSHGKFEELENTDD

SEQ ID NO: 50563 - protein, 81 aa, Homo sapiens
  Payload ID: 10100
  Gene Symbol: MIER1
  Gene Name: mesoderm induction early response 1, transcriptional regulator
  Uniprot ID: Q8N108
  ENSP ID: ENSP00000360051
MFMFNWFTDCLWTLFLSNYQPSVESSSPGGSATSDDHEFDPSADMLVHDFDDERTLEEEEMMEGETNFSSEIEDLARVNNM

SEQ ID NO: 50564 - protein, 486 aa, Homo sapiens
  Payload ID: 10100
  Gene Symbol: MIER1
  Gene Name: mesoderm induction early response 1, transcriptional regulator
  Uniprot ID: Q8N108
  ENSP ID: ENSP00000360053
MDGASSGGGGSSEGGGGSSGSGYGVVARFSQCLAEFRTWLRTNWLRFNADKTDVMLPSVESSSPGGSATSDDHEFDPSADMLVHDFDDERTLEEEEMMEGETNFSSEIEDLAREGDMPIHELLSLYGYGSTVRLPEEDEEEEEEEEEGEDDEDADNDDNSGCSGENKEENIKDSSGQEDETQSSNDDPSQSVASQDAQEIIRPRRCKYFDTNSEVEEESEEDEDYIPSEDWKKEIMVGSMFQAEIPVGICRYKENEKVYENDDQLLWDPEYLPEDKVIIFLKDASRRTGDEKGVEAIPEGSHIKDNEQALYELVKCNFDTEEALRRLRFNVKAAREELSVWTEEECRNFEQGLKAYGKDFHLIQANKVRTRSVGECVAFYYMWKKSERYDFFAQQTRFGKKKYNLHPGVTDYMDRLLDESESAASSRAPSPPPTASNSSNSQSEKEDGTVSTANQNGVSSNGPGILQMLLPVHFSAISSRANAFLK

SEQ ID NO: 50565 - protein, 450 aa, Homo sapiens
  Payload ID: 10100
  Gene Symbol: MIER1
  Gene Name: mesoderm induction early response 1, transcriptional regulator
  Uniprot ID: Q8N108
  ENSP ID: ENSP00000360055
MFMFNWFTDCLWTLFLSNYQPSVESSSPGGSATSDDHEFDPSADMLVHDFDDERTLEEEEMMEGETNFSSEIEDLAREGDMPIHELLSLYGYGSTVRLPEEDEEEEEEEEEGEDDEDADNDDNSGCSGENKEENIKDSSGQEDETQSSNDDPSQSVASQDAQEIIRPRRCKYFDTNSEVEEESEEDEDYIPSEDWKKEIMVGSMFQAEIPVGICRYKENEKVYENDDQLLWDPEYLPEDKVIIFLKDASRRTGDEKGVEAIPEGSHIKDNEQALYELVKCNFDTEEALRRLRFNVKAAREELSVWTEEECRNFEQGLKAYGKDFHLIQANKVRTRSVGECVAFYYMWKKSERYDFFAQQTRFGKKKYNLHPGVTDYMDRLLDESESAASSRAPSPPPTASNSSNSQSEKEDGTVSTANQNGVSSNGPGILQMLLPVHFSAISSRANAFLK

SEQ ID NO: 50566 - protein, 470 aa, Homo sapiens
  Payload ID: 10100
  Gene Symbol: MIER1
  Gene Name: mesoderm induction early response 1, transcriptional regulator
  Uniprot ID: Q8N108
  ENSP ID: ENSP00000360057
MFMFNWFTDCLWTLFLSNYQPSVESSSPGGSATSDDHEFDPSADMLVHDFDDERTLEEEEMMEGETNFSSEIEDLAREGDMPIHELLSLYGYGSTVRLPEEDEEEEEEEEEGEDDEDADNDDNSGCSGENKEENIKDSSGQEDETQSSNDDPSQSVASQDAQEIIRPRRCKYFDTNSEVEEESEEDEDYIPSEDWKKEIMVGSMFQAEIPVGICRYKENEKVYENDDQLLWDPEYLPEDKVIIFLKDASRRTGDEKGVEAIPEGSHIKDNEQALYELVKCNFDTEEALRRLRFNVKAAREELSVWTEEECRNFEQGLKAYGKDFHLIQANKVRTRSVGECVAFYYMWKKSERYDFFAQQTRFGKKKYNLHPGVTDYMDRLLDESESAASSRAPSPPPTASNSSNSQSEKEDGTVSTANQNGVSSNGPGEILNKEEVKVEGLHINGPTGILQMLLPVHFSAISSRANAFLK

SEQ ID NO: 50567 - protein, 565 aa, Homo sapiens
  Payload ID: 10100
  Gene Symbol: MIER1
  Gene Name: mesoderm induction early response 1, transcriptional regulator
  Uniprot ID: Q8N108
  ENSP ID: ENSP00000383820
MDGASSGGGGSSEGGGGSSGSGYGVVARFSQCLAEFRTWLRTNWLRFNADKTDVMLPSVESSSPGGSATSDDHEFDPSADMLVHDFDDERTLEEEEMMEGETNFSSEIEDLAREGDMPIHELLSLYGYGSTVRLPEEDEEEEEEEEEGEDDEDADNDDNSGCSGENKEENIKDSSGQEDETQSSNDDPSQSVASQDAQEIIRPRRCKYFDTNSEVEEESEEDEDYIPSEDWKKEIMVGSMFQAEIPVGICRYKENEKVYENDDQLLWDPEYLPEDKVIIFLKDASRRTGDEKGVEAIPEGSHIKDNEQALYELVKCNFDTEEALRRLRFNVKAAREELSVWTEEECRNFEQGLKAYGKDFHLIQANKVRTRSVGECVAFYYMWKKSERYDFFAQQTRFGKKKYNLHPGVTDYMDRLLDESESAASSRAPSPPPTASNSSNSQSEKEDGTVSTANQNGVSSNGPGEILNKEEVKVEGLHINGPTGGNKKPLHADMDTNGYETDNLTTDPKLAHMTARNENDFDEKSERPAKRRRVNSNGKESPGSSEFFQEAVSHGKFEELENTDD

SEQ ID NO: 50568 - protein, 433 aa, Homo sapiens
  Payload ID: 10100
  Gene Symbol: MIER1
  Gene Name: mesoderm induction early response 1, transcriptional regulator
  Uniprot ID: Q8N108
  ENSP ID: ENSP00000383821
MAEPSVESSSPGGSATSDDHEFDPSADMLVHDFDDERTLEEEEMMEGETNFSSEIEDLAREGDMPIHELLSLYGYGSTVRLPEEDEEEEEEEEEGEDDEDADNDDNSGCSGENKEENIKDSSGQEDETQSSNDDPSQSVASQDAQEIIRPRRCKYFDTNSEVEEESEEDEDYIPSEDWKKEIMVGSMFQAEIPVGICRYKENEKVYENDDQLLWDPEYLPEDKVIIFLKDASRRTGDEKGVEAIPEGSHIKDNEQALYELVKCNFDTEEALRRLRFNVKAAREELSVWTEEECRNFEQGLKAYGKDFHLIQANKVRTRSVGECVAFYYMWKKSERYDFFAQQTRFGKKKYNLHPGVTDYMDRLLDESESAASSRAPSPPPTASNSSNSQSEKEDGTVSTANQNGVSSNGPGILQMLLPVHFSAISSRANAFLK

SEQ ID NO: 50569 - protein, 268 aa, Homo sapiens
  Payload ID: 10101
  Gene Symbol: MESP1
  Gene Name: mesoderm posterior bHLH transcription factor 1
  Uniprot ID: Q9BRJ9
  ENSP ID: ENSP00000300057
MAQPLCPPLSESWMLSAAWGPTRRPPPSDKDCGRSLVSSPDSWGSTPADSPVASPARPGTLRDPRAPSVGRRGARSSRLGSGQRQSASEREKLRMRTLARALHELRRFLPPSVAPAGQSLTKIETLRLAIRYIGHLSAVLGLSEESLQRRCRQRGDAGSPRGCPLCPDDCPAQMQTRTQAEGQGQGRGLGLVSAVRAGASWGSPPACPGARAAPEPRDPPALFAEAACPEGQAMEPSPPSPLLPGDVLALLETWMPLSPLEWLPEEPK

SEQ ID NO: 50570 - protein, 397 aa, Homo sapiens
  Payload ID: 10102
  Gene Symbol: MESP2
  Gene Name: mesoderm posterior bHLH transcription factor 2
  Uniprot ID: Q0VG99
  ENSP ID: ENSP00000342392
MAQSPPPQSLLGHDHWIFAQGWGWAGHWDSTSPASSSDSSGSCPCDGARGLPQPQPPSCSSRAAEAAATTPRRARTGPAGGQRQSASEREKLRMRTLARALHELRRFLPPSLAPAGQSLTKIETLRLAIRYIGHLSAVLGLSEESLQCRRRQRGDAGSPWGCPLCPDRGPAEAQTQAEGQGQGQGQGQGQGQGQGQGQGQGQGQGRRPGLVSAVLAEASWGSPSACPGAQAAPERLGRGVHDTDPWATPPYCPKIQSPPYSSQGTTSDASLWTPPQGCPWTQSSPEPRNPPVPWTAAPATLELAAVYQGLSVSPEPCLSLGAPSLLPHPSCQRLQPQTPGRCWSHSAEVVPNSEDQGPGAAFQLSEASPPQSSGLRFSGCPELWQEDLEGARLGIFY

SEQ ID NO: 50571 - protein, 99 aa, Homo sapiens
  Payload ID: 10102
  Gene Symbol: MESP2
  Gene Name: mesoderm posterior bHLH transcription factor 2
  ENSP ID: ENSP00000452998
MSHHARPNCMGLSVSPEPCLSLGAPSLLPHPSCQRLQPQTPGRCWSHSAEVVPNSEDQGPGAAFQLSEASPPQSSGLRFSGCPELWQEDLEGARLGIFY

SEQ ID NO: 50572 - protein, 335 aa, Homo sapiens
  Payload ID: 10103
  Gene Symbol: MEST
  Gene Name: mesoderm specific transcript
  Uniprot ID: Q5EB52
  ENSP ID: ENSP00000223215
MVRRDRLRRMREWWVQVGLLAVPLLAAYLHIPPPQLSPALHSWKSSGKFFTYKGLRIFYQDSVGVVGSPEIVVLLHGFPTSSYDWYKIWEGLTLRFHRVIALDFLGFGFSDKPRPHHYSIFEQASIVEALLRHLGLQNRRINLLSHDYGDIVAQELLYRYKQNRSGRLTIKSLCLSNGGIFPETHRPLLLQKLLKDGGVLSPILTRLMNFFVFSRGLTPVFGPYTRPSESELWDMWAGIRNNDGNLVIDSLLQYINQRKKFRRRWVGALASVTIPIHFIYGPLDPVNPYPEFLELYRKTLPRSTVSILDDHISHYPQLEDPMGFLNAYMGFINSF

SEQ ID NO: 50573 - protein, 326 aa, Homo sapiens
  Payload ID: 10103
  Gene Symbol: MEST
  Gene Name: mesoderm specific transcript
  Uniprot ID: Q5EB52
  ENSP ID: ENSP00000342749
MREWWVQVGLLAVPLLAAYLHIPPPQLSPALHSWKSSGKFFTYKGLRIFYQDSVGVVGSPEIVVLLHGFPTSSYDWYKIWEGLTLRFHRVIALDFLGFGFSDKPRPHHYSIFEQASIVEALLRHLGLQNRRINLLSHDYGDIVAQELLYRYKQNRSGRLTIKSLCLSNGGIFPETHRPLLLQKLLKDGGVLSPILTRLMNFFVFSRGLTPVFGPYTRPSESELWDMWAGIRNNDGNLVIDSLLQYINQRKKFRRRWVGALASVTIPIHFIYGPLDPVNPYPEFLELYRKTLPRSTVSILDDHISHYPQLEDPMGFLNAYMGFINSF

SEQ ID NO: 50574 - protein, 292 aa, Homo sapiens
  Payload ID: 10103
  Gene Symbol: MEST
  Gene Name: mesoderm specific transcript
  Uniprot ID: Q5EB52
  ENSP ID: ENSP00000367839
MREWWVQVGLLAVPLLAAYLHIPPPQLSPALHSWKSSGKFFTYKGLRIFYQDSVGVVGSPEIVVLLHGFPTSSYDWYKIWEGLTLRFHRVIALDFLGFGFSDKPRPHHYSIFEQASIVEALLRHLGLQNRRINLLSHDYGDIVAQELLYRYKQNRSGRLTIKSLCLSNGGIFPETHRPLLLQKLLKDGGVLSPILTRLMNFFVFSRGLLQYINQRKKFRRRWVGALASVTIPIHFIYGPLDPVNPYPEFLELYRKTLPRSTVSILDDHISHYPQLEDPMGFLNAYMGFINSF

SEQ ID NO: 50575 - protein, 326 aa, Homo sapiens; identical to SEQ ID NO: 50573
  Payload ID: 10103
  Gene Symbol: MEST
  Gene Name: mesoderm specific transcript
  Uniprot ID: Q5EB52
  ENSP ID: ENSP00000376884

SEQ ID NO: 50576 - protein, 117 aa, Homo sapiens
  Payload ID: 10103
  Gene Symbol: MEST
  Gene Name: mesoderm specific transcript
  ENSP ID: ENSP00000390589
MREWWVQVGLLAVPLLAAYLHIPPPQLSPALHSWKSSGKFFTYKGLRIFYQDSVGVVGSPEIVVLLHGFPTSSYDWYKIWEGLTLRFHRVIALDFLGFGFSDKPRPHHYSIFEQASI

SEQ ID NO: 50577 - protein, 126 aa, Homo sapiens
  Payload ID: 10103
  Gene Symbol: MEST
  Gene Name: mesoderm specific transcript
  ENSP ID: ENSP00000393709
MREWWVQVGLLAVPLLAAYLHIPPPQLSPALHSWKSSGKFFTYKGLRIFYQDSVGVVGSPEIVVLLHGFPTSSYDWYKIWEGLTLRFHRVIALDFLGFGFSDKPRPHHYSIFEQASIVEALLRHLG

SEQ ID NO: 50578 - protein, 169 aa, Homo sapiens
  Payload ID: 10103
  Gene Symbol: MEST
  Gene Name: mesoderm specific transcript
  ENSP ID: ENSP00000396504
MREWWVQVGLLAVPLLAAYLHIPPPQLSPALHSWKSSGKFFTYKGLRIFYQDSVGVVGSPEIVVLLHGFPTSSYDWYKIWEGLTLRFHRVIALDFLGFGFSDKPRPHHYSIFEQASIVEALLRHLGLQNRRINLLSHDYGDIVAQELLYRYKQNRSGRLTIKSLCLSNG

SEQ ID NO: 50579 - protein, 296 aa, Homo sapiens
  Payload ID: 10103
  Gene Symbol: MEST
  Gene Name: mesoderm specific transcript
  ENSP ID: ENSP00000401657
MVRRDRLRRMREWWVQVGLLAVPLLAAYLHIPPPQLSPALHSWKSSGKFFTYKGLRIFYQDSVGVVGSPEIVVLLHGFPTSSYDWYKIWEGLTLRFHRVIALDFLGFGFSDKPRPHHYSIFEQASIVEALLRHLGLQNRRINLLSHDYGDIVAQELLYRYKQNRSGRLTIKSLCLSNGGIFPETHRPLLLQKLLKDGGVLSPILTRLMNFFVFSRGLTPVFGPYTRPSESELWDMWAGIRNNDGNLVIDSLLQYINQRKKFRRRWVGALASVTIPRKRCRGPQCRFWMTTLATIHS

SEQ ID NO: 50580 - protein, 213 aa, Homo sapiens
  Payload ID: 10103
  Gene Symbol: MEST
  Gene Name: mesoderm specific transcript
  ENSP ID: ENSP00000407222
MREWWVQVGLLAVPLLAAYLHIPPPQLSPALHSWKSSGKFFTYKGLRIFYQDSVGVVGSPEIVVLLHGFPTSSYDWYKIWEGLTLRFHRVIALDFLGFGFSDKPRPHHYSIFEQASIVEALLRHLGLQNRRINLLSHDYGDIVAQELLYRYKQNRSGRLTIKSLCLSNGGIFPETHRPLLLQKLLKDGGVLSPILTRLMNFFVFSRGLTPVFG

SEQ ID NO: 50581 - protein, 292 aa, Homo sapiens; identical to SEQ ID NO: 50574
  Payload ID: 10103
  Gene Symbol: MEST
  Gene Name: mesoderm specific transcript
  Uniprot ID: Q5EB52
  ENSP ID: ENSP00000408933

SEQ ID NO: 50582 - protein, 232 aa, Homo sapiens
  Payload ID: 10103
  Gene Symbol: MEST
  Gene Name: mesoderm specific transcript
  ENSP ID: ENSP00000409505
MREWWVQVGLLAVPLLAAYLHIPPPQLSPALHSWKSSGKFFTYKGLRIFYQDSVGVVGSPEIVVLLHGFPTSSYDWYKIWEGLTLRFHRVIALDFLGFGFSDKPRPHHYSIFEQASIVEALLRHLGLQNRRINLLSHDYGDIVAQELLYRYKQNRSGRLTIKSLCLSNGGIFPETHRPLLLQKLLKDGGVLSPILTRLMNFFVFSRGLLQYINQRKKFRRRWVGALASVTIP

SEQ ID NO: 50583 - protein, 160 aa, Homo sapiens
  Payload ID: 10103
  Gene Symbol: MEST
  Gene Name: mesoderm specific transcript
  ENSP ID: ENSP00000409768
MREWWVQVGLLAVPLLAAYLHIPPPQLSPALHSWKSSGKFFTYKGLRIFYQDSVGVVGSPEIVVLLHGFPTSSYDWYKIWEGLTLRFHRVIALDFLGFGFSDKPRPHHYSIFEQASIVEALLRHLGLQNRRINLLSHDYGDIVAQELLYRYKQNRSGRLT

SEQ ID NO: 50584 - protein, 173 aa, Homo sapiens
  Payload ID: 10103
  Gene Symbol: MEST
  Gene Name: mesoderm specific transcript
  ENSP ID: ENSP00000473492
LLSHDYGDIVAQELLYRYKQNRSGRLTIKSLCLSNGGIFPETHRPLLLQKLLKDGGVLSPILTRLMNFFLWDMWAGIRNNDGNLVIDSLLQYINQRKKFRRRWVGALASVTIPIHFIYGPLDPVNPYPEFLELYRKTLPRSTVSILDDHISHYPQLEDPMGFLNAYMGFINSF

SEQ ID NO: 50585 - protein, 193 aa, Homo sapiens
  Payload ID: 10104
  Gene Symbol: MSGN1
  Gene Name: mesogenin 1
  Uniprot ID: A6NI15
  ENSP ID: ENSP00000281047
MDNLRETFLSLEDGLGSSDSPGLLSSWDWKDRAGPFELNQASPSQSLSPAPSLESYSSSPCPAVAGLPCEHGGASSGGSEGCSVGGASGLVEVDYNMLAFQPTHLQGGGGPKAQKGTKVRMSVQRRRKASEREKLRMRTLADALHTLRNYLPPVYSQRGQPLTKIQTLKYTIKYIGELTDLLNRGREPRAQSA

SEQ ID NO: 50586 - protein, 630 aa, Homo sapiens
  Payload ID: 10105
  Gene Symbol: MSLN
  Gene Name: mesothelin
  Uniprot ID: Q13421
  ENSP ID: ENSP00000372313
MALPTARPLLGSCGTPALGSLLFLLFSLGWVQPSRTLAGETGQEAAPLDGVLANPPNISSLSPRQLLGFPCAEVSGLSTERVRELAVALAQKNVKLSTEQLRCLAHRLSEPPEDLDALPLDLLLFLNPDAFSGPQACTRFFSRITKANVDLLPRGAPERQRLLPAALACWGVRGSLLSEADVRALGGLACDLPGRFVAESAEVLLPRLVSCPGPLDQDQQEAARAALQGGGPPYGPPSTWSVSTMDALRGLLPVLGQPIIRSIPQGIVAAWRQRSSRDPSWRQPERTILRPRFRREVEKTACPSGKKAREIDESLIFYKKWELEACVDAALLATQMDRVNAIPFTYEQLDVLKHKLDELYPQGYPESVIQHLGYLFLKMSPEDIRKWNVTSLETLKALLEVNKGHEMSPQAPRRPLPQVATLIDRFVKGRGQLDKDTLDTLTAFYPGYLCSLSPEELSSVPPSSIWAVRPQDLDTCDPRQLDVLYPKARLAFQNMNGSEYFVKIQSFLGGAPTEDLKALSQQNVSMDLATFMKLRTDAVLPLTVAEVQKLLGPHVEGLKAEERHRPVRDWILRQRQDDLDTLGLGLQGGIPNGYLVLDLSMQEALSGTPCLLGPGPVLTVLALLLASTLA

SEQ ID NO: 50587 - protein, 622 aa, Homo sapiens
  Payload ID: 10105
  Gene Symbol: MSLN
  Gene Name: mesothelin
  Uniprot ID: Q13421
  ENSP ID: ENSP00000442965
MALPTARPLLGSCGTPALGSLLFLLFSLGWVQPSRTLAGETGQEAAPLDGVLANPPNISSLSPRQLLGFPCAEVSGLSTERVRELAVALAQKNVKLSTEQLRCLAHRLSEPPEDLDALPLDLLLFLNPDAFSGPQACTRFFSRITKANVDLLPRGAPERQRLLPAALACWGVRGSLLSEADVRALGGLACDLPGRFVAESAEVLLPRLVSCPGPLDQDQQEAARAALQGGGPPYGPPSTWSVSTMDALRGLLPVLGQPIIRSIPQGIVAAWRQRSSRDPSWRQPERTILRPRFRREVEKTACPSGKKAREIDESLIFYKKWELEACVDAALLATQMDRVNAIPFTYEQLDVLKHKLDELYPQGYPESVIQHLGYLFLKMSPEDIRKWNVTSLETLKALLEVNKGHEMSPQVATLIDRFVKGRGQLDKDTLDTLTAFYPGYLCSLSPEELSSVPPSSIWAVRPQDLDTCDPRQLDVLYPKARLAFQNMNGSEYFVKIQSFLGGAPTEDLKALSQQNVSMDLATFMKLRTDAVLPLTVAEVQKLLGPHVEGLKAEERHRPVRDWILRQRQDDLDTLGLGLQGGIPNGYLVLDLSMQEALSGTPCLLGPGPVLTVLALLLASTLA

SEQ ID NO: 50588 - protein, 334 aa, Homo sapiens
  Payload ID: 10105
  Gene Symbol: MSLN
  Gene Name: mesothelin
  ENSP ID: ENSP00000454295
  MOD_RES (1)..(1): Any amino acid
XSWRQPERTILRPRFRREVEKTACPSGKKAREIDESLIFYKKWELEACVDAALLATQMDRVNAIPFTYEQLDVLKHKLDELYPQGYPESVIQHLGYLFLKMSPEDIRKWNVTSLETLKALLEVNKGHEMSPQVATLIDRFVKGRGQLDKDTLDTLTAFYPGYLCSLSPEELSSVPPSSIWAVRPQDLDTCDPRQLDVLYPKARLAFQNMNGSEYFVKIQSFLGGAPTEDLKALSQQNVSMDLATFMKLRTDAVLPLTVAEVQKLLGPHVEGLKAEERHRPVRDWILRQRQDDLDTLGLGLQGGIPNGYLVLDLSMQGPGPVLTVLALLLASTLA

SEQ ID NO: 50589 - protein, 622 aa, Homo sapiens; identical to SEQ ID NO: 50587
  Payload ID: 10105
  Gene Symbol: MSLN
  Gene Name: mesothelin
  Uniprot ID: Q13421
  ENSP ID: ENSP00000456008

SEQ ID NO: 50590 - protein, 332 aa, Homo sapiens
  Payload ID: 10105
  Gene Symbol: MSLN
  Gene Name: mesothelin
  ENSP ID: ENSP00000456132
MALPTARPLLGSCGTPALGSLLFLLFSLGWVQPSRTLAGETGQEAAPLDGVLANPPNISSLSPRQLLGFPCAEVSGLSTERVRELAVALAQKNVKLSTEQLRCLAHRLSEPPEDLDALPLDLLLFLNPDAFSGPQACTRFFSRITKANVDLLPRGAPERQRLLPAALACWGVRGSLLSEADVRALGGLACDLPGRFVAESAEVLLPRLGIVAAWRQRSSRDPSWRQPERTILRPRFRREVEKTACPSGKKAREIDESLIFYKKWELEACVDAALLATQMDRVNAIPFTYEQLDVLKHKLDELYPQGYPESVIQHLGYLFLKMSPEDIRKWNV

SEQ ID NO: 50591 - protein, 622 aa, Homo sapiens; identical to SEQ ID NO: 50587
  Payload ID: 10105
  Gene Symbol: MSLN
  Gene Name: mesothelin
  Uniprot ID: Q13421
  ENSP ID: ENSP00000456702

SEQ ID NO: 50592 - protein, 398 aa, Homo sapiens
  Payload ID: 10105
  Gene Symbol: MSLN
  Gene Name: mesothelin
  ENSP ID: ENSP00000457847
VEKTACPSGKKAREIDESLIFYKKWELEACVDAALLATQMDRVNAIPFTYEQLDVLKHKLDELYPQGYPESVIQHLGYLFLKMSPEDIRKWNVTSLETLKALLEVNKGHEMSPQVATLIDRFVKGRGQLDKDTLDTLTAFYPGYLCSLSPEELSSVPPSSIWAVRPQDLDTCDPRQLDVLYPKARLAFQNMNGSEYFVKIQSFLGGAPTEDLKALSQQNVSMDLATFMKLRTDAVLPLTVAEVQKLLGPHVEGLKAEERHRPVRDWILRQRQDDLDTLGLGLQGGIPNGYLVLDLSMQGGRGGQARAGGRAGGVEVGALSHPSLCRGPLGDALPPRTWTCSHRPGTAPSLHPGLRAPLPCWPQPCWGSPPGQEQARVVPVPPQENSRSVNGNMPPADT

SEQ ID NO: 50593 - protein, 170 aa, Homo sapiens
  Payload ID: 10105
  Gene Symbol: MSLN
  Gene Name: mesothelin
  ENSP ID: ENSP00000458003
MALPTARPLLGSCGTPALGSLLFLLFSLGWVQPSRTLAGETGQEAAPLDGVLANPPNISSLSPRQLLGFPCAEVSGLSTERVRELAVALAQKNVKLSTEQLRCLAHRLSEPPEDLDALPLDLLLFLNPDAFSGPQACTRFFSRITKANVDLLPRGAPERQRLLPAALACW

SEQ ID NO: 50594 - protein, 630 aa, Homo sapiens; identical to SEQ ID NO: 50586
  Payload ID: 10105
  Gene Symbol: MSLN
  Gene Name: mesothelin
  Uniprot ID: Q13421
  ENSP ID: ENSP00000482893

SEQ ID NO: 50595 - protein, 702 aa, Homo sapiens
  Payload ID: 10106
  Gene Symbol: MSLNL
  Gene Name: mesothelin-like
  Uniprot ID: Q96KJ4
  ENSP ID: ENSP00000415767
MAAAVTIPGPRIGALQSSGLTLLLSLAAHCSGPQAKVLSPGGLDASGANLWASANCSLLQGFWCQPASQLPRDQLSALIQRLALLQVPLQAWQLSCLANLASRCGLQDDFTLHPPNLLLFYNLSQVREADCRAFIRRAAQGDVELLSHLPDQRVALWRAAVACLVGAGLRLSASDQQLLGALVCDMDASSIGAADPHMLENLRRCPRLTAAQRIALNSLLAGGKTSLGPPGSWTLEGLQALGPLATYISPHLWAQVQEAVGLGFFRSVVASCQVGRLGQREARCFVTSFLESKTKPVSSRPRLSTGNITAATLRDDLFLVHYDCAELESCLDGCILRTNLDTLLQHLLPTECQHVVKAKLAQIYPQGLPEDQLRLITSLVYLYSRTEIGQWSITSQDTVMALLASDVALENQTEAVLQKFLEHNGTVSGALLLAIGGTRLCWMSPHQIQTIHPQELRLAGALDLSSCPQSRKDVLYTKAHETFGSSGTLAAYYRLMRPYLGGSPGGAQPPSPVPPGGAPVEELRHLAHANISMDIDTFTSLNPLELQSLDVGNVTALLGHNVGDLQKARSHPTVRAWLRSLNSSTLGQLGLDASPTSPTGPAHGTRGPPSTTHQVLHLVHTSGLPTNDAQASTSGSLWAPLGYLPLAMALPCSLLCLLHWGTCILVSVDSVASGWLGSQGSGAGKTEVLDSAGRPLGLTGQL

SEQ ID NO: 50596 - protein, 752 aa, Homo sapiens
  Payload ID: 10106
  Gene Symbol: MSLNL
  Gene Name: mesothelin-like
  ENSP ID: ENSP00000441381
SWTHCPWPQHLPALGRLSQDDQCTPPHRRGPQSGCPAELRPHPPAVPCCPLLWAPGQGSFPRRAGCQRGQPVGQCQLLPAARLLVPAGQPAAPGPALSPNPEAGLAAGPPPGLAGEREGVCLANLASRCGLQDDFTLHPPNLLLFYNLSQVREADCRAFIRRAAQGDVELLSHLPDQRVALWRAAVACLVGAGWGWARCIGGSLPLGADLLALQGVARLRLSASDQQLLGALVCDMDASSIGAADPHMLENLRRCPRLTAAQRIALNSLLAGGKTSLGPPGSWTLEGLQALGPLATYISPHLWAQVQEAVGLGFFRSVVASCQVGRLGQREARCFVTSFLESKTKPVSSRPRLSTGNITAATLRDDLFLVHYDCAELESCLDGCILRTNLDTLLQHLLPTECQHVVKAKLAQIYPQGLPEDQLRLITSLVYLYSRTEIGQWSITSQDTVMALLASDVALENQTEAVLQKFLEHNGTVSGALLLAIGGTRLCWMSPHQIQTIHPQELRLAGALDLSSCPQSRKDVLYTKAHETFGSSGTLAAYYRLMRPYLGGSPGGAQPPSPVPPGGAPVEELRHLAHANISMDIDTFTSLNPLELQSLDVGNVTALLGHNVGDLQKARSHPTVRAWLRSLNSSTLGQLGLDASPTSPTGPAHGTRGPPSTTHQVLHLVHTSGLPTNDAQASTSGSLWAPLGYLPLAMALPCSLLCLLHWGTCILVSVDSVASGWLGSQGSGAGKTEVLDSAGRPLGLTGQL

SEQ ID NO: 50597 - protein, 1408 aa, Homo sapiens
  Payload ID: 10107
  Gene Symbol: MET
  Gene Name: MET proto-oncogene, receptor tyrosine kinase
  Uniprot ID: P08581
  ENSP ID: ENSP00000317272
MKAPAVLAPGILVLLFTLVQRSNGECKEALAKSEMNVNMKYQLPNFTAETPIQNVILHEHHIFLGATNYIYVLNEEDLQKVAEYKTGPVLEHPDCFPCQDCSSKANLSGGVWKDNINMALVVDTYYDDQLISCGSVNRGTCQRHVFPHNHTADIQSEVHCIFSPQIEEPSQCPDCVVSALGAKVLSSVKDRFINFFVGNTINSSYFPDHPLHSISVRRLKETKDGFMFLTDQSYIDVLPEFRDSYPIKYVHAFESNNFIYFLTVQRETLDAQTFHTRIIRFCSINSGLHSYMEMPLECILTEKRKKRSTKKEVFNILQAAYVSKPGAQLARQIGASLNDDILFGVFAQSKPDSAEPMDRSAMCAFPIKYVNDFFNKIVNKNNVRCLQHFYGPNHEHCFNRTLLRNSSGCEARRDEYRTEFTTALQRVDLFMGQFSEVLLTSISTFIKGDLTIANLGTSEGRFMQVVVSRSGPSTPHVNFLLDSHPVSPEVIVEHTLNQNGYTLVITGKKITKIPLNGLGCRHFQSCSQCLSAPPFVQCGWCHDKCVRSEECLSGTWTQQICLPAIYKVFPNSAPLEGGTRLTICGWDFGFRRNNKFDLKKTRVLLGNESCTLTLSESTMNTLKCTVGPAMNKHFNMSIIISNGHGTTQYSTFSYVDPVITSISPKYGPMAGGTLLTLTGNYLNSGNSRHISIGGKTCTLKSVSNSILECYTPAQTISTEFAVKLKIDLANRETSIFSYREDPIVYEIHPTKSFISTWWKEPLNIVSFLFCFASGGSTITGVGKNLNSVSVPRMVINVHEAGRNFTVACQHRSNSEIICCTTPSLQQLNLQLPLKTKAFFMLDGILSKYFDLIYVHNPVFKPFEKPVMISMGNENVLEIKGNDIDPEAVKGEVLKVGNKSCENIHLHSEAVLCTVPNDLLKLNSELNIEWKQAISSTVLGKVIVQPDQNFTGLIAGVVSISTALLLLLGFFLWLKKRKQIKDLGSELVRYDARVHTPHLDRLVSARSVSPTTEMVSNESVDYRATFPEDQFPNSSQNGSCRQVQYPLTDMSPILTSGDSDISSPLLQNTVHIDLSALNPELVQAVQHVVIGPSSLIVHFNEVIGRGHFGCVYHGTLLDNDGKKIHCAVKSLNRITDIGEVSQFLTEGIIMKDFSHPNVLSLLGICLRSEGSPLVVLPYMKHGDLRNFIRNETHNPTVKDLIGFGLQVAKGMKYLASKKFVHRDLAARNCMLDEKFTVKVADFGLARDMYDKEYYSVHNKTGAKLPVKWMALESLQTQKFTTKSDVWSFGVLLWELMTRGAPPYPDVNTFDITVYLLQGRRLLQPEYCPDPLYEVMLKCWHPKAEMRPSFSELVSRISAIFSTFIGEHYVHVNATYVNVKCVAPYPSLLSSEDNADDEVDTRPASFWETS

SEQ ID NO: 50598 - protein, 1390 aa, Homo sapiens
  Payload ID: 10107
  Gene Symbol: MET
  Gene Name: MET proto-oncogene, receptor tyrosine kinase
  Uniprot ID: P08581
  ENSP ID: ENSP00000380860
MKAPAVLAPGILVLLFTLVQRSNGECKEALAKSEMNVNMKYQLPNFTAETPIQNVILHEHHIFLGATNYIYVLNEEDLQKVAEYKTGPVLEHPDCFPCQDCSSKANLSGGVWKDNINMALVVDTYYDDQLISCGSVNRGTCQRHVFPHNHTADIQSEVHCIFSPQIEEPSQCPDCVVSALGAKVLSSVKDRFINFFVGNTINSSYFPDHPLHSISVRRLKETKDGFMFLTDQSYIDVLPEFRDSYPIKYVHAFESNNFIYFLTVQRETLDAQTFHTRIIRFCSINSGLHSYMEMPLECILTEKRKKRSTKKEVFNILQAAYVSKPGAQLARQIGASLNDDILFGVFAQSKPDSAEPMDRSAMCAFPIKYVNDFFNKIVNKNNVRCLQHFYGPNHEHCFNRTLLRNSSGCEARRDEYRTEFTTALQRVDLFMGQFSEVLLTSISTFIKGDLTIANLGTSEGRFMQVVVSRSGPSTPHVNFLLDSHPVSPEVIVEHTLNQNGYTLVITGKKITKIPLNGLGCRHFQSCSQCLSAPPFVQCGWCHDKCVRSEECLSGTWTQQICLPAIYKVFPNSAPLEGGTRLTICGWDFGFRRNNKFDLKKTRVLLGNESCTLTLSESTMNTLKCTVGPAMNKHFNMSIIISNGHGTTQYSTFSYVDPVITSISPKYGPMAGGTLLTLTGNYLNSGNSRHISIGGKTCTLKSVSNSILECYTPAQTISTEFAVKLKIDLANRETSIFSYREDPIVYEIHPTKSFISGGSTITGVGKNLNSVSVPRMVINVHEAGRNFTVACQHRSNSEIICCTTPSLQQLNLQLPLKTKAFFMLDGILSKYFDLIYVHNPVFKPFEKPVMISMGNENVLEIKGNDIDPEAVKGEVLKVGNKSCENIHLHSEAVLCTVPNDLLKLNSELNIEWKQAISSTVLGKVIVQPDQNFTGLIAGVVSISTALLLLLGFFLWLKKRKQIKDLGSELVRYDARVHTPHLDRLVSARSVSPTTEMVSNESVDYRATFPEDQFPNSSQNGSCRQVQYPLTDMSPILTSGDSDISSPLLQNTVHIDLSALNPELVQAVQHVVIGPSSLIVHFNEVIGRGHFGCVYHGTLLDNDGKKIHCAVKSLNRITDIGEVSQFLTEGIIMKDFSHPNVLSLLGICLRSEGSPLVVLPYMKHGDLRNFIRNETHNPTVKDLIGFGLQVAKGMKYLASKKFVHRDLAARNCMLDEKFTVKVADFGLARDMYDKEYYSVHNKTGAKLPVKWMALESLQTQKFTTKSDVWSFGVLLWELMTRGAPPYPDVNTFDITVYLLQGRRLLQPEYCPDPLYEVMLKCWHPKAEMRPSFSELVSRISAIFSTFIGEHYVHVNATYVNVKCVAPYPSLLSSEDNADDEVDTRPASFWETS

SEQ ID NO: 50599 - protein, 158 aa, Homo sapiens
  Payload ID: 10107
  Gene Symbol: MET
  Gene Name: MET proto-oncogene, receptor tyrosine kinase
  ENSP ID: ENSP00000398140
AVKGEVLKVGNKSCENIHLHSEAVLCTVPNDLLKLNSELNIEWKQAISSTVLGKVIVQPDQNFTGLIAGVVSISTALLLLLGFFLWLKKRKQIKDQFPNSSQNGSCRQVQYPLTDMSPILTSGDSDISSPLLQNTVHIDLSALNPELVQAVQHVVIGP

SEQ ID NO: 50600 - protein, 214 aa, Homo sapiens
  Payload ID: 10107
  Gene Symbol: MET
  Gene Name: MET proto-oncogene, receptor tyrosine kinase
  ENSP ID: ENSP00000398776
AVKLKIDLANRETSIFSYREDPIVYEIHPTKSFISGGSTITGVGKNLNSVSVPRMVINVHEAGRNFTVACQHRSNSEIICCTTPSLQQLNLQLPLKTKAFFMLDGILSKYFDLIYVHNPVFKPFEKPVMISMGNENVLEIKGNDIDPEAVKGEVLKVGNKSCENIHLHSEAVLCTVPNDLLKLNSELNIEVGFLHSSHDVNKEASVIMLFSGLK

SEQ ID NO: 50601 - protein, 764 aa, Homo sapiens
  Payload ID: 10107
  Gene Symbol: MET
  Gene Name: MET proto-oncogene, receptor tyrosine kinase
  Uniprot ID: P08581
  ENSP ID: ENSP00000410980
MKAPAVLAPGILVLLFTLVQRSNGECKEALAKSEMNVNMKYQLPNFTAETPIQNVILHEHHIFLGATNYIYVLNEEDLQKVAEYKTGPVLEHPDCFPCQDCSSKANLSGGVWKDNINMALVVDTYYDDQLISCGSVNRGTCQRHVFPHNHTADIQSEVHCIFSPQIEEPSQCPDCVVSALGAKVLSSVKDRFINFFVGNTINSSYFPDHPLHSISVRRLKETKDGFMFLTDQSYIDVLPEFRDSYPIKYVHAFESNNFIYFLTVQRETLDAQTFHTRIIRFCSINSGLHSYMEMPLECILTEKRKKRSTKKEVFNILQAAYVSKPGAQLARQIGASLNDDILFGVFAQSKPDSAEPMDRSAMCAFPIKYVNDFFNKIVNKNNVRCLQHFYGPNHEHCFNRTLLRNSSGCEARRDEYRTEFTTALQRVDLFMGQFSEVLLTSISTFIKGDLTIANLGTSEGRFMQVVVSRSGPSTPHVNFLLDSHPVSPEVIVEHTLNQNGYTLVITGKKITKIPLNGLGCRHFQSCSQCLSAPPFVQCGWCHDKCVRSEECLSGTWTQQICLPAIYKVFPNSAPLEGGTRLTICGWDFGFRRNNKFDLKKTRVLLGNESCTLTLSESTMNTLKCTVGPAMNKHFNMSIIISNGHGTTQYSTFSYVDPVITSISPKYGPMAGGTLLTLTGNYLNSGNSRHISIGGKTCTLKSVSNSILECYTPAQTISTEFAVKLKIDLANRETSIFSYREDPIVYEIHPTKSFIRHVNIALIQR

SEQ ID NO: 50602 - protein, 190 aa, Homo sapiens
  Payload ID: 10107
  Gene Symbol: MET
  Gene Name: MET proto-oncogene, receptor tyrosine kinase
  ENSP ID: ENSP00000413857
MKSKSKSLAECFPYDKPLIMKAPAVLAPGILVLLFTLVQRSNGECKEALAKSEMNVNMKYQLPNFTAETPIQNVILHEHHIFLGATNYIYVLNEEDLQKVAEYKTGPVLEHPDCFPCQDCSSKANLSGGVWKDNINMALVVDTYYDDQLISCGSVNRGTCQRHVFPHNHTADIQSEVHCIFSPQIEEPSQ

SEQ ID NO: 50603 - protein, 582 aa, Homo sapiens
  Payload ID: 10108
  Gene Symbol: MTDH
  Gene Name: metadherin
  Uniprot ID: Q86UE4
  ENSP ID: ENSP00000338235
MAARSWQDELAQQAEEGSARLREMLSVGLGFLRTELGLDLGLEPKRYPGWVILVGTGALGLLLLFLLGYGWAAACAGARKKRRSPPRKREEAAAVPAAAPDDLALLKNLRSEEQKKKNRKKLSEKPKPNGRTVEVAEGEAVRTPQSVTAKQPPEIDKKNEKSKKNKKKSKSDAKAVQNSSRHDGKEVDEGAWETKISHREKRQQRKRDKVLTDSGSLDSTIPGIENTITVTTEQLTTASFPVGSKKNKGDSHLNVQVSNFKSGKGDSTLQVSSGLNENLTVNGGGWNEKSVKLSSQISAGEEKWNSVSPASAGKRKTEPSAWSQDTGDANTNGKDWGRSWSDRSIFSGIGSTAEPVSQSTTSDYQWDVSRNQPYIDDEWSGLNGLSSADPNSDWNAPAEEWGNWVDEERASLLKSQEPIPDDQKVSDDDKEKGEGALPTGKSKKKKKKKKKQGEDNSTAQDTEELEKEIREDLPVNTSKTRPKQEKAFSLKTISTSDPAEVLVKNSQPIKTLPPATSTEPSVILSKSDSDKSSSQVPPILQETDKSKSNTKQNSVPPSQTKSETSWESPKQIKKKKKARRET

SEQ ID NO: 50604 - protein, 526 aa, Homo sapiens
  Payload ID: 10108
  Gene Symbol: MTDH
  Gene Name: metadherin
  ENSP ID: ENSP00000428168
MLSVGLGFLRTELGLDLGLEPKRYPGWVILVGTGALGLLLLFLLGYGWAAACAGARKKRRSPPRKREEAAAVPAAAPDDLALLKNLRSEEQKKKNRKKLSEKPKPNGRTVEVAEGEAVRTPQSVTAKQPPEIDKKNEKSKKNKKKSKSDAKAVQNSSRHDGKEVDEGAWETKISHREKRQQRKRDKVLTDSGSLDSTIPGIENTITVTTEQLTTASFPVGSKKNKGDSHLNVQVSNFKSGKGDSTLQVSSGLNENLTVNGGGWNEKSVKLSSQISAGEEKWNSVSPASAGKRKTEPSAWSQDTGDANTNGKDWGRSWSDRSIFSGIDGLSSADPNSDWNAPAEEWGNWVDEERASLLKSQEPIPDDQKVSDDDKEKGEGALPTGKSKKKKKKKKKQGEDNSTAQDTEELEKEIREDLPVNTSKTRPKQEKAFSLKTISTSDPAEVLVKNSQPIKTLPPATSTEPSVILSKSDSDKSSSQVPPILQETDKSKSNTKQNSVPPSQTKSETSWESPKQIKKKKKARRET

SEQ ID NO: 50605 - protein, 224 aa, Homo sapiens
  Payload ID: 10108
  Gene Symbol: MTDH
  Gene Name: metadherin
  ENSP ID: ENSP00000428703
  MOD_RES (1)..(1): Any amino acid
XAAAPDDLALLKNLRSEEQKKKNRKKLSEKPKPNGRTVEVAEGEAVRTPQSVTAKQPPEIDKKNEKSKKNKKKSKSDAKAVQNSSRHDGKEVDEGAWETKISHREKRQQRKRDKVLTDSGSLDSTIPGIENTITVTTEQLTTASFPVGSKKNKVSSGLNENLTVNGGGWNEKSVKLSSQISAGEEKWNSVSPASAGKRKTEPSAWSQDTGDANTNGKDWGRSWS

SEQ ID NO: 50606 - protein, 60 aa, Homo sapiens
  Payload ID: 10108
  Gene Symbol: MTDH
  Gene Name: metadherin
  ENSP ID: ENSP00000429289
  MOD_RES (1)..(1): Any amino acid
XSSQISAGEEKWNSVSPASAGKRKTEPSAWSQDTGDANTNGKDWGRSWSDRSIFSGIGLR

SEQ ID NO: 50607 - protein, 188 aa, Homo sapiens
  Payload ID: 10108
  Gene Symbol: MTDH
  Gene Name: metadherin
  ENSP ID: ENSP00000429642
TNGKDWGRSWSDRSIFSGIGSTAEPVSQSTTSDYQWDVSRNQPYIDDEWSGLNGLSSADPNSDWNAPAEEWGNWVDEERASLLKSQEPIPDDQKVSDDDKEKGEGALPTGKSKKKKKKKKKQGEDNSTAQPIKTLPPATSTEPSVILSKSDSDKSSSQVPPILQETDKSKSNTKQNSVPPSQTKSETS

SEQ ID NO: 50608 - protein, 593 aa, Homo sapiens
  Payload ID: 10109
  Gene Symbol: MTF2
  Gene Name: metal response element binding transcription factor 2
  Uniprot ID: Q9Y483
  ENSP ID: ENSP00000359321
MRDSTGAGNSLVHKRSPLRRNQKTPTSLTKLSLQDGHKAKKPACKFEEGQDVLARWSDGLFYLGTIKKINILKQSCFIIFEDSSKSWVLWKDIQTGATGSGEMVCTICQEEYSEAPNEMVICDKCGQGYHQLCHTPHIDSSVIDSDEKWLCRQCVFATTTKRGGALKKGPNAKALQVMKQTLPYSVADLEWDAGHKTNVQQCYCYCGGPGDWYLKMLQCCKCKQWFHEACVQCLQKPMLFGDRFYTFICSVCSSGPEYLKRLPLQWVDIAHLCLYNLSVIHKKKYFDSELELMTYINENWDRLHPGELADTPKSERYEHVLEALNDYKTMFMSGKEIKKKKHLFGLRIRVPPVPPNVAFKAEKEPEGTSHEFKIKGRKASKPISDSREVSNGIEKKGKKKSVGRPPGPYTRKMIQKTAEPLLDKESISENPTLDLPCSIGRTEGTAHSSNTSDVDFTGASSAKETTSSSISRHYGLSDSRKRTRTGRSWPAAIPHLRRRRGRLPRRALQTQNSEIVKDDEGKEDYQFDELNTEILNNLADQELQLNHLKNSITSYFGAAGRIACGEKYRVLARRVTLDGKVQYLVEWEGATAS

SEQ ID NO: 50609 - protein, 536 aa, Homo sapiens
  Payload ID: 10109
  Gene Symbol: MTF2
  Gene Name: metal response element binding transcription factor 2
  ENSP ID: ENSP00000359326
MRDSTGAGNSLVHKRSPLRRNQKTPTSLTKLSLQDGHKAKKPACKFEEGQDVLARWSDGLFYLGTIKKINILKQSCFIIFEDSSKSWVLWKDIQTGATGSGEMVCTICQEEYSEAPNEMVICDKCGQGYHQLCHTPHIDSSVIDSDEKWLCRQCVFATTTKRGGALKKGPNAKALQVMKQTLPYSVADLEWDAGHKTNVQQCYCYCGGPGDWYLKMLQCCKCKQWFHEACVQCLQKPMLFGDRFYTFICSVCSSGPEYLKRLPLQWVDIAHLCLYNLSVIHKKKYFDSELELMTYINENWDRLHPGELADTPKSERYEHVLEALNDYKTMEVSNGIEKKGKKKSVGRPPGPYTRKMIQKTAEPLLDKESISENPTLDLPCSIGRTEGTAHSSNTSDVDFTGASSAKETTSSSISRHYGLSDSRKRTRTGRSWPAAIPHLRRRRGRLPRRALQTQNSEIVKDDEGKEDYQFDELNTEILNNLADQELQLNHLKNSITSYFGAAGRIACGEKYRVLARRVTLDGKVQYLVEWEGATAS

SEQ ID NO: 50610 - protein, 491 aa, Homo sapiens
  Payload ID: 10109
  Gene Symbol: MTF2
  Gene Name: metal response element binding transcription factor 2
  ENSP ID: ENSP00000443295
MVCTICQEEYSEAPNEMVICDKCGQGYHQLCHTPHIDSSVIDSDEKWLCRQCVFATTTKRGGALKKGPNAKALQVMKQTLPYSVADLEWDAGHKTNVQQCYCYCGGPGDWYLKMLQCCKCKQWFHEACVQCLQKPMLFGDRFYTFICSVCSSGPEYLKRLPLQWVDIAHLCLYNLSVIHKKKYFDSELELMTYINENWDRLHPGELADTPKSERYEHVLEALNDYKTMFMSGKEIKKKKHLFGLRIRVPPVPPNVAFKAEKEPEGTSHEFKIKGRKASKPISDSREVSNGIEKKGKKKSVGRPPGPYTRKMIQKTAEPLLDKESISENPTLDLPCSIGRTEGTAHSSNTSDVDFTGASSAKETTSSSISRHYGLSDSRKRTRTGRSWPAAIPHLRRRRGRLPRRALQTQNSEIVKDDEGKEDYQFDELNTEILNNLADQELQLNHLKNSITSYFGAAGRIACGEKYRVLARRVTLDGKVQYLVEWEGATAS

SEQ ID NO: 50611 - protein, 491 aa, Homo sapiens; identical to SEQ ID NO: 50610
  Payload ID: 10109
  Gene Symbol: MTF2
  Gene Name: metal response element binding transcription factor 2
  ENSP ID: ENSP00000444962

SEQ ID NO: 50612 - protein, 266 aa, Homo sapiens
  Payload ID: 10110
  Gene Symbol: MBLAC1
  Gene Name: metallo-beta-lactamase domain containing 1
  Uniprot ID: A4D2B0
  ENSP ID: ENSP00000381150
MRTEPLCGASPLLVPGDPYSVVVLLQGYAEPEGVGDAVRADGSVTLVLPQTRGPASSHRESPRGSGGAEAALEEAARGPILVDTGGPWAREALLGALAGQGVAPGDVTLVVGTHGHSDHIGNLGLFPGAALLVSHDFCLPGGRYLPHGLGEGQPLRLGPGLEVWATPGHGGQRDVSVVVAGTALGTVVVAGDVFERDGDEDSWQALSEDPAAQERSRKRVLVVADVVVPGHGPPFRVLREASQPETEGGGNSQQEPVVGDEEPALH

SEQ ID NO: 50613 - protein, 113 aa, Homo sapiens
  Payload ID: 10110
  Gene Symbol: MBLAC1
  Gene Name: metallo-beta-lactamase domain containing 1
  ENSP ID: ENSP00000406055
MRTEPLCGASPLLVPGDPYSVVVLLQGYAEPEGVGDAVRADGSVTLVLPQTRGPASSHRESPRGSGGAEAALEEAARGPILVDTGGPWAREALLGALAGQGVAPGDVTLVVGT

SEQ ID NO: 50614 - protein, 279 aa, Homo sapiens
  Payload ID: 10111
  Gene Symbol: MBLAC2
  Gene Name: metallo-beta-lactamase domain containing 2
  Uniprot ID: Q68D91
  ENSP ID: ENSP00000314776
MSALEWYAHKSLGDGIFWIQERFYESGNRANIWLVRGSEQDVVIDTGLGLRSLPEYLYSSGLLQDREAKEDAARRPLLAVATHVHFDHSGGLYQFDRVAVHHAEAEALARGDNFETVTWLSDSEVVRTPSPGWRARQFRVQAVQPTLILQDGDVINLGDRQLTVMHMPGHSRGSICLHDKDRKILFSGDVVYDGSLIDWLPYSRISDYVGTCERLIELVDRGLVEKVLPGHFNTFGAERLFRLASNYISKAGICHKVSTFAMRSLASLALRVTNSRTSP

SEQ ID NO: 50615 - protein, 199 aa, Homo sapiens
  Payload ID: 10111
  Gene Symbol: MBLAC2
  Gene Name: metallo-beta-lactamase domain containing 2
  Uniprot ID: Q68D91
  ENSP ID: ENSP00000425600
MSALEWYAHKSLGDGIFWIQERFYESGNRANIWLVRGSEQDVVIDTGLGLRSLPEYLYSSGLLQDREAKEDAARRPLLAVATHVHFDHSGGLYQFDRVAVHHAEAEALARGDNFETVTWLSDSEVVRTPSPGWRARQFRVQAVQPTLILQDGNGPPRARALVKGGYWEETVRVPHVADLRGHKGDYFGTSQSHFCFTLP

SEQ ID NO: 50616 - protein, 333 aa, Homo sapiens
  Payload ID: 10112
  Gene Symbol: MPPE1
  Gene Name: metallophosphoesterase 1
  Uniprot ID: Q53F39
  ENSP ID: ENSP00000311200
MAMIELGFGRQNFHPLKRKSSLLLKLIAVVFAVLLFCEFLIYYLAIFQCNWPEVKTTASDGEQTTREPVLKAMFLADTHLLGEFLGHWLDKLRREWQMERAFQTALWLLQPEVVFILGDIFDEGKWSTPEAWADDVERFQKMFRHPSHVQLKVVAGNHDIGFHYEMNTYKVERFEKVFSSERLFSWKGINFVMVNSVALNGDGCGICSETEAELIEVSHRLNCSRELLWWLQPRLVLSGHTHSACEVHHGGRVPELSVPSFSWRNRNNPSFIMGSITPTDYTLSKCYLPREDVVLIIYCGVVGFLVVLTLTHFGLLASPFLSGLNLLGKRKTR

SEQ ID NO: 50617 - protein, 243 aa, Homo sapiens
  Payload ID: 10112
  Gene Symbol: MPPE1
  Gene Name: metallophosphoesterase 1
  ENSP ID: ENSP00000312935
MERAFQTALWLLQPEVVFILGDIFDEGKWSTPEAWADDVERFQKMFRHPSHVQLKVVAGNHDIGFHYEMNTYKVERFEKVFSSERLFSWKGINFVMVNSVALNGDGCGICSETEAELIEVSHRLNCSREARGSSRCGPGPLLPTSAPVLLQHYPLYRRSDANCSGEDAAPAEERDIPFKENYDVLSREASQKLLWWLQPRLVLSGHTHSACEVHHGGRVPELSVPSFSWRNRNNPSFIMGTDA

SEQ ID NO: 50618 - protein, 333 aa, Homo sapiens; identical to SEQ ID NO: 50616
  Payload ID: 10112
  Gene Symbol: MPPE1
  Gene Name: metallophosphoesterase 1
  Uniprot ID: Q53F39
  ENSP ID: ENSP00000327257

SEQ ID NO: 50619 - protein, 374 aa, Homo sapiens
  Payload ID: 10112
  Gene Symbol: MPPE1
  Gene Name: metallophosphoesterase 1
  ENSP ID: ENSP00000339423
MAMIELGFGRQNFHPLKRKSSLLLKLIAVVFAVLLFCEFLIYYLAIFQCNWPEVKTTASDGEQTTREPVLKAMFLADTHLLGEFLGHWLDKLRREWQMERAFQTALWLLQPEVVFILGDIFDEGKWSTPEAWADDVERFQKMFRHPSHVQLKVVAGNHDIGFHYEMNTYKVERFEKVFSSERLFSWKGINFVMVNSVALNGDGCGICSETEAELIEVSHRLNCSREHYPLYRRSDANCSGEDAAPAEERDIPFKENYDVLSREASQKLLWWLQPRLVLSGHTHSACEVHHGGRVPELSVPSFSWRNRNNPSFIMGSITPTDYTLSKCYLPREDVVLIIYCGVVGFLVVLTLTHFGLLASPFLSGLNLLGKRKTR

SEQ ID NO: 50620 - protein, 340 aa, Homo sapiens
  Payload ID: 10112
  Gene Symbol: MPPE1
  Gene Name: metallophosphoesterase 1
  Uniprot ID: Q53F39
  ENSP ID: ENSP00000433950
MAMIELGFGRQNFHPLKRKSSLLLKLIAVVFAVLLFCEFLIYYLAIFQCNWPEVKTTASDGEQTTREPVLKAMFLADTHLLGEFLGHWLDKLRREWQMERAFQTALWLLQPEVVFILGDIFDEGKWSTPEAWADDVERFQKMFRHPSHVQLKVVAGNHDIGFHYEMNTYKVERFEKVFSSERLFSWKGINFVMVNSVALNGDGCGICSETEAELIEVSHRLNCSREARGSSRCGPGPLLPTSAPVLLQHYPLYRRSDANCSGEDAAPAEERDIPFKENYDVLSREASQKLLWWLQPRLVLSGHTHSACEVHHGGRVPELSVPSFSWRNRNNPSFIMGTDA

SEQ ID NO: 50621 - protein, 81 aa, Homo sapiens
  Payload ID: 10112
  Gene Symbol: MPPE1
  Gene Name: metallophosphoesterase 1
  ENSP ID: ENSP00000464842
LTCTQQARGSSRCGPGPLLPTSAPVLLQHYPLYRRSDANCSGEDAAPAEERDIPFKENYDVLSREASQKERSDGQRPSAER

SEQ ID NO: 50622 - protein, 141 aa, Homo sapiens
  Payload ID: 10112
  Gene Symbol: MPPE1
  Gene Name: metallophosphoesterase 1
  ENSP ID: ENSP00000465318
MAMIELGFGRQNFHPLKRKSSLLLKLIAVVFAVLLFCEFLIYYLAIFQCNWPEVKTTASDGEQTTREPVLKAMFLADTHLLGEFLGHWLDKLRREWQMERAFQTALWLLQPEVVFILGDIFDEGKWSTPEAWADDVERFQK

SEQ ID NO: 50623 - protein, 396 aa, Homo sapiens
  Payload ID: 10112
  Gene Symbol: MPPE1
  Gene Name: metallophosphoesterase 1
  Uniprot ID: Q53F39
  ENSP ID: ENSP00000465894
MAMIELGFGRQNFHPLKRKSSLLLKLIAVVFAVLLFCEFLIYYLAIFQCNWPEVKTTASDGEQTTREPVLKAMFLADTHLLGEFLGHWLDKLRREWQMERAFQTALWLLQPEVVFILGDIFDEGKWSTPEAWADDVERFQKMFRHPSHVQLKVVAGNHDIGFHYEMNTYKVERFEKVFSSERLFSWKGINFVMVNSVALNGDGCGICSETEAELIEVSHRLNCSREARGSSRCGPGPLLPTSAPVLLQHYPLYRRSDANCSGEDAAPAEERDIPFKENYDVLSREASQKLLWWLQPRLVLSGHTHSACEVHHGGRVPELSVPSFSWRNRNNPSFIMGSITPTDYTLSKCYLPREDVVLIIYCGVVGFLVVLTLTHFGLLASPFLSGLNLLGKRKTR

SEQ ID NO: 50624 - protein, 161 aa, Homo sapiens
  Payload ID: 10112
  Gene Symbol: MPPE1
  Gene Name: metallophosphoesterase 1
  ENSP ID: ENSP00000466291
GNHDIGFHYDFVMVNSVALNGDGCGICSETEAELIEVSHRLNCSREQARGSSRCGPGPLLPTSAPVLLQHYPLYRRSDANCSGEDAAPAEERDIPFKENYDVLSREASQKLLWWLQPRLVLSGHTHSACEVHHGGRVPELSVPSFSWRNRNNPSFIMGTDA

SEQ ID NO: 50625 - protein, 172 aa, Homo sapiens
  Payload ID: 10112
  Gene Symbol: MPPE1
  Gene Name: metallophosphoesterase 1
  ENSP ID: ENSP00000466303
MLVLNSWPQVILPPWPPKALKLQMERAFQTALWLLQPEVVFILGDIFDEGKWSTPEAWADDVERFQKMFRHPSHVQLKVVAGNHDIGFHYEMNTYKVERFEKVFSSERLFSWKGINFVMVNSVALNGDGCGICSETEAELIEVSHRLNCSREQARGSSRCGPGPLLPTSAPV

SEQ ID NO: 50626 - protein, 26 aa, Homo sapiens
  Payload ID: 10112
  Gene Symbol: MPPE1
  Gene Name: metallophosphoesterase 1
  ENSP ID: ENSP00000467599
MAMIELGFGRQNFHPLKRKSSLLLKL

SEQ ID NO: 50627 - protein, 164 aa, Homo sapiens
  Payload ID: 10112
  Gene Symbol: MPPE1
  Gene Name: metallophosphoesterase 1
  ENSP ID: ENSP00000467698
MAMIELGFGRQNFHPLKRKSSLLLKLIAVVFAVLLFCEFLIYYLAIFQCNWPEVKTTASDGEQTTREPVLKAMFLADTHLLGEFLGHWLDKLRREWQMERAFQTALWLLQPEVVFILGDIFDEGKWSTPEAWADDVERFQKMFRHPSHVQLKVVAGNHDIGFHY

SEQ ID NO: 50628 - protein, 69 aa, Homo sapiens
  Payload ID: 10112
  Gene Symbol: MPPE1
  Gene Name: metallophosphoesterase 1
  ENSP ID: ENSP00000467703
MAMIELGFGRQNFHPLKRKSSLLLKLIAVVFAVLLFCEFLIYYLAIFQCNWPEVKTTASDGEQTTREPV

SEQ ID NO: 50629 - protein, 178 aa, Homo sapiens
  Payload ID: 10112
  Gene Symbol: MPPE1
  Gene Name: metallophosphoesterase 1
  ENSP ID: ENSP00000467993
MAMIELGFGRQNFHPLKRKSSLLLKLIAVVFAVLLFCEFLIYYLAIFQCNWPEVKTTASDGEQTTREPVLKAMFLADTHLLGEFLGHWLDKLRREWQMERAFQTALWLLQPEVVFILGDIFDEGKWSTPEAWADDVERFQKMFRHPSHVQLKVVAGNHDIGFHYEMNTYKVERFEKVF

SEQ ID NO: 50630 - protein, 92 aa, Homo sapiens
  Payload ID: 10112
  Gene Symbol: MPPE1
  Gene Name: metallophosphoesterase 1
  ENSP ID: ENSP00000468065
MAMIELGFGRQNFHPLKRKSSLLLKLIAVVFAVLLFCEFLIYYLAIFQCNWPEVKTTASDGEQTTREPVLKAMFLADTHLLGEFLGHWLDKL

SEQ ID NO: 50631 - protein, 68 aa, Homo sapiens
  Payload ID: 10112
  Gene Symbol: MPPE1
  Gene Name: metallophosphoesterase 1
  ENSP ID: ENSP00000468269
MAMIELGFGRQNFHPLKRKSSLLLKLIAVVFAVLLFCEFLIYYLAIFQCNWPEVKTTASDGEQTTREP

SEQ ID NO: 50632 - protein, 308 aa, Homo sapiens
  Payload ID: 10112
  Gene Symbol: MPPE1
  Gene Name: metallophosphoesterase 1
  ENSP ID: ENSP00000468606
MAMIELGFGRQNFHPLKRKSSLLLKLIAVVFAVLLFCEFLIYYLAIFQCNWPEVKTTASDGEQTTREPVLKAMFLADTHLLGEFLGHWLDKLRREWQMERAFQTALWLLQPEVVFILGDIFDEGKWSTPEAWADDVERFQKMFRHPSHVQLKVVAGNHDIGFHYEMNTYKVERFEKVFSSERLFSWKGINFVMVNSVALNGDGCGICSETEAELIEVSHRLNCSREARGSSRCGPGPLLPTSAPVLLQHYPLYRRSDANCSGEDAAPAEERDIPFKENYDVLSREASQKLLWWLQPRLVLSGHTHSAC

SEQ ID NO: 50633 - protein, 94 aa, Homo sapiens
  Payload ID: 10112
  Gene Symbol: MPPE1
  Gene Name: metallophosphoesterase 1
  ENSP ID: ENSP00000468639
MAMIELGFGRQNFHPLKRKSSLLLKLIAVVFAVLLFCEFLIYYLAIFQCNWPEVKTTASDGEQTTREPVLKAMFLADTHLLGEFLGHWLDKLRR

SEQ ID NO: 50634 - protein, 119 aa, Homo sapiens
  Payload ID: 10113
  Gene Symbol: MPPED1
  Gene Name: metallophosphoesterase domain containing 1
  ENSP ID: ENSP00000335568
MWRSRWDASVLKAEALALLPCGLGMAFSQSHVMAARRHQHSRLIIEVDEYSSNPTQAFTFYNINQGRFQPPHVQMVDPVPHDAPKPPGYTRFVCVSDTHSRTDPIQMPYGDVLIHAGDF

SEQ ID NO: 50635 - protein, 326 aa, Homo sapiens
  Payload ID: 10113
  Gene Symbol: MPPED1
  Gene Name: metallophosphoesterase domain containing 1
  Uniprot ID: O15442
  ENSP ID: ENSP00000388137
MWRSRWDASVLKAEALALLPCGLGMAFSQSHVMAARRHQHSRLIIEVDEYSSNPTQAFTFYNINQGRFQPPHVQMVDPVPHDAPKPPGYTRFVCVSDTHSRTDPIQMPYGDVLIHAGDFTELGLPSEVKKFNEWLGSLPYEYKIVIAGNHELTFDQEFMADLIKQDFYYFPSVSKLKPENYENVQSLLTNCIYLQDSEVTVRGFRIYGSPWQPWFYGWGFNLPRGQALLEKWNLIPEGVDILITHGPPLGFLDWVPKKMQRVGCVELLNTVQRRVQPRLHVFGHIHEGYGVMADGTTTYVNASVCTVNYQPVNPPIVIDLPTPRNS

SEQ ID NO: 50636 - protein, 326 aa, Homo sapiens; identical to SEQ ID NO: 50635
  Payload ID: 10113
  Gene Symbol: MPPED1
  Gene Name: metallophosphoesterase domain containing 1
  Uniprot ID: O15442
  ENSP ID: ENSP00000400686

SEQ ID NO: 50637 - protein, 74 aa, Homo sapiens
  Payload ID: 10113
  Gene Symbol: MPPED1
  Gene Name: metallophosphoesterase domain containing 1
  ENSP ID: ENSP00000401378
MWRSRWDASVLKAEALALLPCGLGMAFSQSHVMAARRHQHSRLIIEVDEYSSNPTQAFTFYNINQGRFQPPHVQ

SEQ ID NO: 50638 - protein, 294 aa, Homo sapiens
  Payload ID: 10114
  Gene Symbol: MPPED2
  Gene Name: metallophosphoesterase domain containing 2
  Uniprot ID: Q15777
  ENSP ID: ENSP00000350833
MAHGIPSQGKVTITVDEYSSNPTQAFTHYNINQSRFQPPHVHMVDPIPYDTPKPAGHTRFVCISDTHSRTDGIQMPYGDILLHTGDFTELGLPSEVKKFNDWLGNLPYEYKIVIAGNHELTFDKEFMADLVKQDYYRFPSVSKLKPEDFDNVQSLLTNSIYLQDSEVTVKGFRIYGAPWTPWFNGWGFNLPRGQSLLDKWNLIPEGIDILMTHGPPLGFRDWVPKELQRVGCVELLNTVQRRVRPKLHVFGGIHEGYGIMTDGYTTYINASTCTVSFQPTNPPIIFDLPNPQGS

SEQ ID NO: 50639 - protein, 277 aa, Homo sapiens
  Payload ID: 10114
  Gene Symbol: MPPED2
  Gene Name: metallophosphoesterase domain containing 2
  Uniprot ID: Q15777
  ENSP ID: ENSP00000388258
MAHGIPSQGKVTITVDEYSSNPTQAFTHYNINQSRFQPPHVHMVDPIPYDTPKPAGHTRFVCISDTHSRTDGIQMPYGDILLHTGDFTELGLPSEVKKFNDWLGNLPYEYKIVIAGNHELTFDKEFMADLVKQDYYRFPSVSKLKPEDFDNVQSLLTNSIYLQDSEVTVKGFRIYGAPWTPWFNGWGFNLPRGQSLLDKWNLIPEGIDILMTHGPPLGFRDWVPKELQRVGCVELLNTVQRRVRPKLHVFGGIHEVNPVSISKALRTKICSLPSKTS

SEQ ID NO: 50640 - protein, 81 aa, Homo sapiens
  Payload ID: 10114
  Gene Symbol: MPPED2
  Gene Name: metallophosphoesterase domain containing 2
  ENSP ID: ENSP00000431805
MAHGIPSQGKVTITVDEYSSNPTQAFTHYNINQSRFQPPHVHMVDPIPYDTPKPAGHTRFVCISDTHSRTDGIQMPYGDIL

SEQ ID NO: 50641 - protein, 117 aa, Homo sapiens
  Payload ID: 10114
  Gene Symbol: MPPED2
  Gene Name: metallophosphoesterase domain containing 2
  ENSP ID: ENSP00000432469
MAHGIPSQGKVTITVDEYSSNPTQAFTHYNINQSRFQPPHVHMVDPIPYDTPKPAGHTRFVCISDTHSRTDGIQMPYGDILLHTGDFTELGLPSEVKKFNDWLDLVSHCKHGRNPNA

SEQ ID NO: 50642 - protein, 61 aa, Homo sapiens
  Payload ID: 10115
  Gene Symbol: MT1A
  Gene Name: metallothionein 1A
  Uniprot ID: P04731
  ENSP ID: ENSP00000290705
MDPNCSCATGGSCTCTGSCKCKECKCTSCKKSCCSCCPMSCAKCAQGCICKGASEKCSCCA

SEQ ID NO: 50643 - protein, 61 aa, Homo sapiens; identical to SEQ ID NO: 50642
  Payload ID: 10115
  Gene Symbol: MT1A
  Gene Name: metallothionein 1A
  Uniprot ID: P04731
  ENSP ID: ENSP00000478425

SEQ ID NO: 50644 - protein, 61 aa, Homo sapiens
  Payload ID: 10116
  Gene Symbol: MT1B
  Gene Name: metallothionein 1B
  Uniprot ID: P07438
  ENSP ID: ENSP00000334998
MDPNCSCTTGGSCACAGSCKCKECKCTSCKKCCCSCCPVGCAKCAQGCVCKGSSEKCRCCA

SEQ ID NO: 50645 - protein, 70 aa, Homo sapiens
  Payload ID: 10116
  Gene Symbol: MT1B
  Gene Name: metallothionein 1B
  ENSP ID: ENSP00000456056
MDPNCSCTTGGSCACAGSCKCKECKCTSCKKLLLLLPRGLCQVCPGLCLQRLIREVPLLCLMLGEPCSQT

SEQ ID NO: 50646 - protein, 61 aa, Homo sapiens
  Payload ID: 10117
  Gene Symbol: MT1E
  Gene Name: metallothionein 1E
  Uniprot ID: P04732
  ENSP ID: ENSP00000307706
MDPNCSCATGGSCTCAGSCKCKECKCTSCKKSCCSCCPVGCAKCAQGCVCKGASEKCSCCA

SEQ ID NO: 50647 - protein, 127 aa, Homo sapiens
  Payload ID: 10117
  Gene Symbol: MT1E
  Gene Name: metallothionein 1E
  Uniprot ID: P04732
  ENSP ID: ENSP00000328137
MDPNCSCATGGSCTCAGSCKCKECKCTSCKKSECGAISRNLGLWLRLGGNSRLALSASFWGTGLSLPSLPVSFPLQAFCPKFRWGRTAFFSWDTNPNCTPYGFRTELCQTKKSILWVWVLSSSQACY

SEQ ID NO: 50648 - protein, 39 aa, Homo sapiens
  Payload ID: 10117
  Gene Symbol: MT1E
  Gene Name: metallothionein 1E
  ENSP ID: ENSP00000457516
MDPNCSCATGCCSCCPVGCAKCAQGCVCKGASEKCSCCA

SEQ ID NO: 50649 - protein, 61 aa, Homo sapiens
  Payload ID: 10118
  Gene Symbol: MT1F
  Gene Name: metallothionein 1F
  Uniprot ID: P04733
  ENSP ID: ENSP00000334872
MDPNCSCAAGVSCTCAGSCKCKECKCTSCKKSCCSCCPVGCSKCAQGCVCKGASEKCSCCD

SEQ ID NO: 50650 - protein, 44 aa, Homo sapiens
  Payload ID: 10118
  Gene Symbol: MT1F
  Gene Name: metallothionein 1F
  ENSP ID: ENSP00000456462
MDPNCSCAAGVSCTCAGSCKCKECKCTSCKKSECEAISMVWGCG

SEQ ID NO: 50651 - protein, 62 aa, Homo sapiens
  Payload ID: 10119
  Gene Symbol: MT1G
  Gene Name: metallothionein 1G
  Uniprot ID: P13640
  ENSP ID: ENSP00000369139
MDPNCSCAAAGVSCTCASSCKCKECKCTSCKKSCCSCCPVGCAKCAQGCICKGASEKCSCCA

SEQ ID NO: 50652 - protein, 61 aa, Homo sapiens
  Payload ID: 10119
  Gene Symbol: MT1G
  Gene Name: metallothionein 1G
  Uniprot ID: P13640
  ENSP ID: ENSP00000391397
MDPNCSCAAGVSCTCASSCKCKECKCTSCKKSCCSCCPVGCAKCAQGCICKGASEKCSCCA

SEQ ID NO: 50653 - protein, 39 aa, Homo sapiens
  Payload ID: 10119
  Gene Symbol: MT1G
  Gene Name: metallothionein 1G
  ENSP ID: ENSP00000456675
MDPNCSCAAGCCSCCPVGCAKCAQGCICKGASEKCSCCA

SEQ ID NO: 50654 - protein, 68 aa, Homo sapiens
  Payload ID: 10119
  Gene Symbol: MT1G
  Gene Name: metallothionein 1G
  ENSP ID: ENSP00000456835
MDPNCSCAAGVSCTCASSCKCKECKCTSCKKSECGAISRNLGLWLRLGGNPRLSLSACFWGTGLPLSL

SEQ ID NO: 50655 - protein, 61 aa, Homo sapiens
  Payload ID: 10120
  Gene Symbol: MT1H
  Gene Name: metallothionein 1H
  Uniprot ID: P80294
  ENSP ID: ENSP00000330587
MDPNCSCEAGGSCACAGSCKCKKCKCTSCKKSCCSCCPLGCAKCAQGCICKGASEKCSCCA

SEQ ID NO: 50656 - protein, 85 aa, Homo sapiens
  Payload ID: 10120
  Gene Symbol: MT1H
  Gene Name: metallothionein 1H
  ENSP ID: ENSP00000457114
MDPNCSCEAGGSCACAGSCKCKKCKCTSCKKSECGAISRNLGLWLRLGGNPRLALSACFLCPPRPSLPFQSSALSRAPVGLGSLS

SEQ ID NO: 50657 - protein, 61 aa, Homo sapiens
  Payload ID: 10121
  Gene Symbol: MT1HL1
  Gene Name: metallothionein 1H-like 1
  Uniprot ID: P0DM35
  ENSP ID: ENSP00000476141
MDPNCSCAAGGSYACAGSCKCKKCKCTSCKKSCCSCCPLGCAKCAQGCIRKGASEKCSCCA

SEQ ID NO: 50658 - protein, 61 aa, Homo sapiens
  Payload ID: 10122
  Gene Symbol: MT1M
  Gene Name: metallothionein 1M
  Uniprot ID: Q8N339
  ENSP ID: ENSP00000369146
MDPNCSCTTGVSCACTGSCTCKECKCTSCKKSCCSCCPVGCAKCAHGCVCKGTLENCSCCA

SEQ ID NO: 50659 - protein, 69 aa, Homo sapiens
  Payload ID: 10122
  Gene Symbol: MT1M
  Gene Name: metallothionein 1M
  ENSP ID: ENSP00000457575
MDPNCSCTTGVSCACTGSCTCKECKCTSCKKSECGAISRNLGLWLRLGGNPRLALSASFWGTGLSLPSL

SEQ ID NO: 50660 - protein, 61 aa, Homo sapiens
  Payload ID: 10123
  Gene Symbol: MT1X
  Gene Name: metallothionein 1X
  Uniprot ID: P80297
  ENSP ID: ENSP00000377995
MDPNCSCSPVGSCACAGSCKCKECKCTSCKKSCCSCCPVGCAKCAQGCICKGTSDKCSCCA

SEQ ID NO: 50661 - protein, 46 aa, Homo sapiens
  Payload ID: 10123
  Gene Symbol: MT1X
  Gene Name: metallothionein 1X
  ENSP ID: ENSP00000475537
MDPNCSCSPVGSCACAGSCKCKECKCTSCKKSECRAFPANLGDGPS

SEQ ID NO: 50662 - protein, 46 aa, Homo sapiens; identical to SEQ ID NO: 50661
  Payload ID: 10123
  Gene Symbol: MT1X
  Gene Name: metallothionein 1X
  ENSP ID: ENSP00000475791

SEQ ID NO: 50663 - protein, 61 aa, Homo sapiens
  Payload ID: 10124
  Gene Symbol: MT2A
  Gene Name: metallothionein 2A
  Uniprot ID: P02795
  ENSP ID: ENSP00000245185
MDPNCSCAAGDSCTCAGSCKCKECKCTSCKKSCCSCCPVGCAKCAQGCICKGASDKCSCCA

SEQ ID NO: 50664 - protein, 73 aa, Homo sapiens
  Payload ID: 10124
  Gene Symbol: MT2A
  Gene Name: metallothionein 2A
  ENSP ID: ENSP00000456804
MDPNCSCAAGDSCTCAGSCKCKECKCTSCKKSKWDPLFPLPLPCPPACPLSTILRGIKAVWGCPIARKLLPPQ

SEQ ID NO: 50665 - protein, 68 aa, Homo sapiens
  Payload ID: 10125
  Gene Symbol: MT3
  Gene Name: metallothionein 3
  Uniprot ID: P25713
  ENSP ID: ENSP00000200691
MDPETCPCPSGGSCTCADSCKCEGCKCTSCKKSCCSCCPAECEKCAKDCVCKGGEAAEAEAEKCSCCQ

SEQ ID NO: 50666 - protein, 113 aa, Homo sapiens
  Payload ID: 10125
  Gene Symbol: MT3
  Gene Name: metallothionein 3
  ENSP ID: ENSP00000455353
MKGKRGREELGNTQSAFFSTFGDAKPRVQLLGEARSPPPAAALLDMDPETCPCPSGGSCTCADSCKCEGCKCTSCKKSCCSCCPAECEKCAKDCVCKGGEAAEAEAEKCSCCQ

SEQ ID NO: 50667 - protein, 81 aa, Homo sapiens
  Payload ID: 10125
  Gene Symbol: MT3
  Gene Name: metallothionein 3
  ENSP ID: ENSP00000455980
MKGKRGREELGNTQSAFFSTFGDGGSCTCADSCKCEGCKCTSCKKSCCSCCPAECEKCAKDCVCKGGEAAEAEAEKCSCCQ

SEQ ID NO: 50668 - protein, 92 aa, Homo sapiens
  Payload ID: 10125
  Gene Symbol: MT3
  Gene Name: metallothionein 3
  ENSP ID: ENSP00000457164
MDPETCPCPSGGSCTCADSCKCEGCKCTSCKKSECGDPSPLPPPPLLCGVGVSPRRMWRDSQAPIPWFLTLAGIEPPGQTLKYRCPCPTPRN

SEQ ID NO: 50669 - protein, 62 aa, Homo sapiens
  Payload ID: 10126
  Gene Symbol: MT4
  Gene Name: metallothionein 4
  Uniprot ID: P47944
  ENSP ID: ENSP00000219162
MDPRECVCMSGGICMCGDNCKCTTCNCKTYWKSCCPCCPPGCAKCARGCICKGGSDKCSCCP

SEQ ID NO: 50670 - protein, 508 aa, Homo sapiens
  Payload ID: 10127
  Gene Symbol: MTL5
  Gene Name: metallothionein-like 5, testis-specific (tesmin)
  Uniprot ID: Q9Y4I5
  ENSP ID: ENSP00000255087
MEEGPLPGGLPSPEDAMVTELLSPEGPFASENIGLKAPVKYEEDEFHVFKEAYLGPADPKEPVLHAFNPALGADCKGQVKAKLAGGDSDGGELLGEYPGIPELSALEDVALLQAPQPPACNVHFLSSLLPAHRSPAVLPLGAWVLEGASHPGVRMIPVEIKEAGGTTTSNNPEEATLQNLLAQESCCKFPSSQELEDASCCSLKKDSNPMVICQLKGGTQMLCIDNSRTRELKALHLVPQYQDQNNYLQSDVPKPMTALVGRFLPASTKLNLITQQLEGALPSVVNGSAFPSGSTLPGPPKITLAGYCDCFASGDFCNNCNCNNCCNNLHHDIERFKAIKACLGRNPEAFQPKIGKGQLGNVKPQHNKGCNCRRSGCLKNYCECYEAQIMCSSICKCIGCKNYEESPERKTLMSMPNYMQTGGLEGSHYLPPTKFSGLPRFSHDRRPSSCISWEVVEATCACLLAQGEEAEKEHCSKCLAEQMILEEFGRCLSQILHTEFKSKGLKME

SEQ ID NO: 50671 - protein, 251 aa, Homo sapiens
  Payload ID: 10127
  Gene Symbol: MTL5
  Gene Name: metallothionein-like 5, testis-specific (tesmin)
  Uniprot ID: Q9Y4I5
  ENSP ID: ENSP00000403086
MEEGPLPGGLPSPEDAMVTELLSPEGPFASENIGLKAPVKYEEDEFHVFKEAYLGPADPKEPVLHAFNPALGADCKGQVKAKLAGGDSDGGELLGEYPGIPELSALEDVALLQAPQPPACNVHFLSSLLPAHRSPAVLPLGAWVLEGASHPGVRMIPVEIKEAGGTTTSNNPEEATLQNLLAQESCCKFPSSQELEDASCCSLKKDSNPMVICQLKGGTQMLCIDNSRTRELKALHLVPQYQDQNNYLQSA

SEQ ID NO: 50672 - protein, 306 aa, Homo sapiens
  Payload ID: 10127
  Gene Symbol: MTL5
  Gene Name: metallothionein-like 5, testis-specific (tesmin)
  Uniprot ID: Q9Y4I5
  ENSP ID: ENSP00000440968
MEEGPLPGGLPSPEDAMVTELLSPEGPFASENIGLKAPVKYEEDEFHVFKEAYLGPADPKEPVLHAFNPALGADCKGQVKAKLAGGDSDGGELLGEYPGIPELSALEDVALLQAPQPPACNVHFLSSLLPAHRSPAVLPLGAWVLEGASHPGVRMIPVEIKEAGGTTTSNNPEEATLQNLLAQESCCKFPSSQELEDASCCSLKKDSNPMVICQLKGGTQMLCIDNSRTRELKALHLVPQYQDQNNYLQSDVPKPMTALVGRFLPASTKLNLITQQLEGALPSVVNGSAFPSGSTLPGPPKITLAG

SEQ ID NO: 50673 - protein, 204 aa, Homo sapiens
  Payload ID: 10127
  Gene Symbol: MTL5
  Gene Name: metallothionein-like 5, testis-specific (tesmin)
  ENSP ID: ENSP00000454311
  MOD_RES (1)..(1): Any amino acid
XDCFASGDFCNNCNCNNCCNNLHHDIERFKAIKACLGRNPEAFQPKIGKGQLGNVKPQHNKGCNCRRSGCLKNYCECYEAQIMCSSICKCIGCKNYEESPERKTLMSMPNYMQTGGLEGSHYLPPTKFSGLPRFSHDRRPSSCISWEVVEATCACLLAQGEEAEKEHCSKCLAEQMILEEFGRNKFSGWAVVIPLKISRELLNT

SEQ ID NO: 50674 - protein, 753 aa, Homo sapiens
  Payload ID: 10128
  Gene Symbol: MTF1
  Gene Name: metal-regulatory transcription factor 1
  Uniprot ID: Q14872
  ENSP ID: ENSP00000362127
MGEHSPDNNIIYFEAEEDELTPDDKMLRFVDKNGLVPSSSGTVYDRTTVLIEQDPGTLEDEDDDGQCGEHLPFLVGGEEGFHLIDHEAMSQGYVQHIISPDQIHLTINPGSTPMPRNIEGATLTLQSECPETKRKEVKRYQCTFEGCPRTYSTAGNLRTHQKTHRGEYTFVCNQEGCGKAFLTSYSLRIHVRVHTKEKPFECDVQGCEKAFNTLYRLKAHQRLHTGKTFNCESEGCSKYFTTLSDLRKHIRTHTGEKPFRCDHDGCGKAFAASHHLKTHVRTHTGERPFFCPSNGCEKTFSTQYSLKSHMKGHDNKGHSYNALPQHNGSEDTNHSLCLSDLSLLSTDSELRENSSTTQGQDLSTISPAIIFESMFQNSDDTAIQEDPQQTASLTESFNGDAESVSDVPPSTGNSASLSLPLVLQPGLSEPPQPLLPASAPSAPPPAPSLGPGSQQAAFGNPPALLQPPEVPVPHSTQFAANHQEFLPHPQAPQPIVPGLSVVAGASASAAAVASAVAAPAPPQSTTEPLPAMVQTLPLGANSVLTNNPTITITPTPNTAILQSSLVMGEQNLQWILNGATSSPQNQEQIQQASKVEKVFFTTAVPVASSPGSSVQQIGLSVPVIIIKQEEACQCQCACRDSAKERASSRRKGCSSPPPPEPSPQAPDGPSLQLPAQTFSSAPVPGSSSSTLPSSCEQSRQAETPSDPQTETLSAMDVSEFLSLQSLDTPSNLIPIEALLQGEEEMGLTSSFSK

SEQ ID NO: 50675 - protein, 715 aa, Homo sapiens
  Payload ID: 10129
  Gene Symbol: MTA1
  Gene Name: metastasis associated 1
  Uniprot ID: Q13330
  ENSP ID: ENSP00000333633
MAANMYRVGDYVYFENSSSNPYLIRRIEELNKTANGNVEAKVVCFYRRRDISSTLIALADKHATLSVCYKAGPGADNGEEGEIEEEMENPEMVDLPEKLKHQLRHRELFLSRQLESLPATHIRGKCSVTLLNETESLKSYLEREDFFFYSLVYDPQQKTLLADKGEIRVGNRYQADITDLLKEGEEDGRDQSRLETQVWEAHNPLTDKQIDQFLVVARSVGTFARALDCSSSVRQPSLHMSAAAASRDITLFHAMDTLHKNIYDISKAISALVPQGGPVLCRDEMEEWSASEANLFEEALEKYGKDFTDIQQDFLPWKSLTSIIEYYYMWKTTDRYVQQKRLKAAEAESKLKQVYIPNYNKPNPNQISVNNVKAGVVNGTGAPGQSPGAGRACESCYTTQSYQWYSWGPPNMQCRLCASCWTYWKKYGGLKMPTRLDGERPGPNRSNMSPHGLPARSSGSPKFAMKTRQAFYLHTTKLTRIARRLCREILRPWHAARHPYLPINSAAIKAECTARLPEASQSPLVLKQAVRKPLEAVLRYLETHPRPPKPDPVKSVSSVLSSLTPAKVAPVINNGSPTILGKRSYEQHNGVDGNMKKRLLMPSRGLANHGQARHMGPSRNLLLNGKSYPTKVRLIRGGSLPPVKRRRMNWIDAPDDVFYMATEETRKIRKLLSSSETKRAARRPYKPIALRQSQALPPRPPPPAPVNDEPIVIED

SEQ ID NO: 50676 - protein, 698 aa, Homo sapiens
  Payload ID: 10129
  Gene Symbol: MTA1
  Gene Name: metastasis associated 1
  Uniprot ID: Q13330
  ENSP ID: ENSP00000384180
MAANMYRVGDYVYFENSSSNPYLIRRIEELNKTANGNVEAKVVCFYRRRDISSTLIALADKHAREIEEEMENPEMVDLPEKLKHQLRHRELFLSRQLESLPATHIRGKCSVTLLNETESLKSYLEREDFFFYSLVYDPQQKTLLADKGEIRVGNRYQADITDLLKEGEEDGRDQSRLETQVWEAHNPLTDKQIDQFLVVARSVGTFARALDCSSSVRQPSLHMSAAAASRDITLFHAMDTLHKNIYDISKAISALVPQGGPVLCRDEMEEWSASEANLFEEALEKYGKDFTDIQQDFLPWKSLTSIIEYYYMWKTTDRYVQQKRLKAAEAESKLKQVYIPNYNKPNPNQISVNNVKAGVVNGTGAPGQSPGAGRACESCYTTQSYQWYSWGPPNMQCRLCASCWTYWKKYGGLKMPTRLDGERPGPNRSNMSPHGLPARSSGSPKFAMKTRQAFYLHTTKLTRIARRLCREILRPWHAARHPYLPINSAAIKAECTARLPEASQSPLVLKQAVRKPLEAVLRYLETHPRPPKPDPVKSVSSVLSSLTPAKVAPVINNGSPTILGKRSYEQHNGVDGNMKKRLLMPSRGLANHGQARHMGPSRNLLLNGKSYPTKVRLIRGGSLPPVKRRRMNWIDAPDDVFYMATEETRKIRKLLSSSETKRAARRPYKPIALRQSQALPPRPPPPAPVNDEPIVIED

SEQ ID NO: 50677 - protein, 703 aa, Homo sapiens
  Payload ID: 10129
  Gene Symbol: MTA1
  Gene Name: metastasis associated 1
  ENSP ID: ENSP00000385702
MAANMYRVGDYVYFENSSSNPYLIRRIEELNKTANGNVEAKVVCFYRRRDISSTLIALADKHATLSVCYKAGPGADNGEEGEIEEEMENPEMVDLPEKLKHQLRHRELFLSRQLESLPATHIRGKCSVTLLNETESLKSYLEREDFFFYSLVYDPQQKTLLADKGEIRVGNRYQADITDLLKEGEEDGRDQSRLETQVWEAHNPLTDKQIDQFLVVARSVGTFARALDCSSSVRQPSLHMSAAAASRDITLFHAMDTLHKNIYDISKAISALVPQGGPVLCRDEMEEWSASEANLFEEALEKYGKDFTDIQQDFLPWKSLTSIIEYYYMWKTTDRYVQQKRLKAAEAESKLKQVYIPNYNKPNPNQISVNNVKAGVVNGTGAPGQSPGAGRACESCYTTQSYQWYSWGPPNMQCRLCASCWTYWKKYGGLKMPTRLDGERPGPNRSNMSPHGLPARSSGSPKFAMKTRQAFYLHTTKLTRIARRLCREILRPWHAARHPYLPINSAAIKAECTARLPEASQSPLVLKQAVRKPLEAVLRYLETHPRPPKPDPVKSVSSVLSSLTPAKVAPVINNGSPTILGKRSYEQHNGVDGLANHGQARHMGPSRNLLLNGKSYPTKVRLIRGGSLPPVKRRRMNWIDAPDDVFYMATEETRKIRKLLSSSETKRAARRPYKPIALRQSQALPPRPPPPAPVNDEPIVIED

SEQ ID NO: 50678 - protein, 255 aa, Homo sapiens
  Payload ID: 10129
  Gene Symbol: MTA1
  Gene Name: metastasis associated 1
  ENSP ID: ENSP00000389425
MKTRQAFYLHTTKLTRIARRLCREILRPWHAARHPYLPINSAAIKAECTARLPEASQSPLVLKQAVRKPLEAVLRYLETHPRPPKPDPVKSVSSVLSSLTPAKVAPVINNGSPTILGKRSYEQHNGVDGNMKKRLLMPSRGTYLGLANHGQARHMGPSRNLLLNGKSYPTKVRLIRGGSLPPVKRRRMNWIDAPDDVFYMATEETRKIRKLLSSSETKRAARRPYKPIALRQSQALPPRPPPPAPVNDEPIVIED

SEQ ID NO: 50679 - protein, 430 aa, Homo sapiens
  Payload ID: 10129
  Gene Symbol: MTA1
  Gene Name: metastasis associated 1
  Uniprot ID: Q13330
  ENSP ID: ENSP00000393438
MAANMYRVGDYVYFENSSSNPYLIRRIEELNKTANGNVEAKVVCFYRRRDISSTLIALADKHATLSVCYKAGPGADNGEEGEIEEEMENPEMVDLPEKLKHQLRHRELFLSRQLESLPATHIRGKCSVTLLNETESLKSYLEREDFFFYSLVYDPQQKTLLADKGEIRVGNRYQADITDLLKEGEEDGRDQSRLETQVWEAHNPLTDKQIDQFLVVARSVGTFARALDCSSSVRQPSLHMSAAAASRDITLFHAMDTLHKNIYDISKAISALVPQGGPVLCRDEMEEWSASEANLFEEALEKYGKDFTDIQQDFLPWKSLTSIIEYYYMWKTTDRYVQQKRLKAAEAESKLKQVYIPNYNKPNPNQISVNNVKAGVVNGTGAPGQSPGAGRACESCYMSSLRILLDILEEIWWLENANPVRWREARTKPQ

SEQ ID NO: 50680 - protein, 511 aa, Homo sapiens
  Payload ID: 10129
  Gene Symbol: MTA1
  Gene Name: metastasis associated 1
  ENSP ID: ENSP00000394106
QIDQFLVVARSVGTFARALDCSSSVRQPSLHMSAAAASRDITLFHAMDTLHKNIYDISKAISALVPQGGPVLCRDEMEEWSASEANLFEEALEKYGKDFTDIQQDFLPWKSLTSIIEYYYMWKTTDRYVQQKRLKAAEAESKLKQVYIPNYNKPNPNQISVNNVKAGVVNGTGAPGQSPGAGRACESCYTTQSYQWYSWGPPNMQCRLCASCWTYWKKYGGLKMPTRLDGERPGPNRSNMSPHGLPARSSGSPKFAMKTRQAFYLHTTKLTRIARRLCREILRPWHAARHPYLPINSAAIKAECTARLPEASQSPLVLKQAVRKPLEAVLRYLETHPRPPKPDPVKSVSSVLSSLTPAKVAPVINNGSPTILGKRSYEQHNGVDGNMKKRLLMPSRGTYLGLANHGQARHMGPSRNLLLNGKSYPTKVRLIRGGSLPPVKRRRMNWIDAPDDVFYMATEETRKIRKLLSSSETKRAARRPYKPIALRQSQALPPRPPPPAPVNDEPIVIED

SEQ ID NO: 50681 - protein, 55 aa, Homo sapiens
  Payload ID: 10129
  Gene Symbol: MTA1
  Gene Name: metastasis associated 1
  ENSP ID: ENSP00000411493
  MOD_RES (1)..(1): Any amino acid
XRRIEELNKTANGNVEAKVVCFYRRRDISSTLIALADKHAMGGGVLAPFPRGLGE

SEQ ID NO: 50682 - protein, 57 aa, Homo sapiens
  Payload ID: 10129
  Gene Symbol: MTA1
  Gene Name: metastasis associated 1
  ENSP ID: ENSP00000450094
  MOD_RES (1)..(1): Any amino acid
XAAGPDMAANMYRVGDYVYFENSSSNPYLIRRIEELNKPCQSAIRPDRGRTTARKGK

SEQ ID NO: 50683 - protein, 668 aa, Homo sapiens
  Payload ID: 10130
  Gene Symbol: MTA2
  Gene Name: metastasis associated 1 family, member 2
  Uniprot ID: O94776
  ENSP ID: ENSP00000278823
MAANMYRVGDYVYFENSSSNPYLVRRIEELNKTANGNVEAKVVCLFRRRDISSSLNSLADSNAREFEEESKQPGVSEQQRHQLKHRELFLSRQFESLPATHIRGKCSVTLLNETDILSQYLEKEDCFFYSLVFDPVQKTLLADQGEIRVGCKYQAEIPDRLVEGESDNRNQQKMEMKVWDPDNPLTDRQIDQFLVVARAVGTFARALDCSSSIRQPSLHMSAAAASRDITLFHAMDTLQRNGYDLAKAMSTLVPQGGPVLCRDEMEEWSASEAMLFEEALEKYGKDFNDIRQDFLPWKSLASIVQFYYMWKTTDRYIQQKRLKAAEADSKLKQVYIPTYTKPNPNQIISVGSKPGMNGAGFQKGLTCESCHTTQSAQWYAWGPPNMQCRLCASCWIYWKKYGGLKTPTQLEGATRGTTEPHSRGHLSRPEAQSLSPYTTSANRAKLLAKNRQTFLLQTTKLTRLARRMCRDLLQPRRAARRPYAPINANAIKAECSIRLPKAAKTPLKIHPLVRLPLATIVKDLVAQAPLKPKTPRGTKTPINRNQLSQNRGLGGIMVKRAYETMAGAGVPFSANGRPLASGIRSSSQPAAKRQKLNPADAPNPVVFVATKDTRALRKALTHLEMRRAARRPNLPLKVKPTLIAVRPPVPLPAPSHPASTNEPIVLED

SEQ ID NO: 50684 - protein, 495 aa, Homo sapiens
  Payload ID: 10130
  Gene Symbol: MTA2
  Gene Name: metastasis associated 1 family, member 2
  Uniprot ID: O94776
  ENSP ID: ENSP00000431346
MEMKVWDPDNPLTDRQIDQFLVVARAVGTFARALDCSSSIRQPSLHMSAAAASRDITLFHAMDTLQRNGYDLAKAMSTLVPQGGPVLCRDEMEEWSASEAMLFEEALEKYGKDFNDIRQDFLPWKSLASIVQFYYMWKTTDRYIQQKRLKAAEADSKLKQVYIPTYTKPNPNQIISVGSKPGMNGAGFQKGLTCESCHTTQSAQWYAWGPPNMQCRLCASCWIYWKKYGGLKTPTQLEGATRGTTEPHSRGHLSRPEAQSLSPYTTSANRAKLLAKNRQTFLLQTTKLTRLARRMCRDLLQPRRAARRPYAPINANAIKAECSIRLPKAAKTPLKIHPLVRLPLATIVKDLVAQAPLKPKTPRGTKTPINRNQLSQNRGLGGIMVKRAYETMAGAGVPFSANGRPLASGIRSSSQPAAKRQKLNPADAPNPVVFVATKDTRALRKALTHLEMRRAARRPNLPLKVKPTLIAVRPPVPLPAPSHPASTNEPIVLED

SEQ ID NO: 50685 - protein, 495 aa, Homo sapiens; identical to SEQ ID NO: 50684
  Payload ID: 10130
  Gene Symbol: MTA2
  Gene Name: metastasis associated 1 family, member 2
  Uniprot ID: O94776
  ENSP ID: ENSP00000431797

SEQ ID NO: 50686 - protein, 537 aa, Homo sapiens
  Payload ID: 10131
  Gene Symbol: MTA3
  Gene Name: metastasis associated 1 family, member 3
  ENSP ID: ENSP00000383973
MLADKHAKEIEEESETTVEADLTDKQKHQLKHRELFLSRQYESLPATHIRGKCSVALLNETESVLSYLDKEDTFFYSLVYDPSLKTLLADKGEIRVGPRYQADIPEMLLEGESDEREQSKLEVKVWDPNSPLTDRQIDQFLVVARAVGTFARALDCSSSVRQPSLHMSAAAASRDITLFHAMDTLYRHSYDLSSAISVLVPLGGPVLCRDEMEEWSASEASLFEEALEKYGKDFNDIRQDFLPWKSLTSIIEYYYMWKTTDRYVQQKRLKAAEAESKLKQVYIPTYKPNPNQISTSNGKPGAVNGAVGTTFQPQNPLLGRACESCYATQSHQWYSWGPPNMQCRLCAICWLYWKKYGGLKMPTQSEEEKLSPSPTTEDPRVRSHVSRQAMQGMPVRNTGSPKSAVKTRQAFFLHTTYFTKFARQVCKNTLRLRQAARRPFVAINYAAIRAEYADRHAELSGSPLKSKSTRKPLACIIGYLEIHPAKKPNVIRSTPSLQTPTTKRMLTTPNHTSLSILGKRNYSHHNGLDELTCCVSD

SEQ ID NO: 50687 - protein, 537 aa, Homo sapiens; identical to SEQ ID NO: 50686
  Payload ID: 10131
  Gene Symbol: MTA3
  Gene Name: metastasis associated 1 family, member 3
  ENSP ID: ENSP00000384249

SEQ ID NO: 50688 - protein, 515 aa, Homo sapiens
  Payload ID: 10131
  Gene Symbol: MTA3
  Gene Name: metastasis associated 1 family, member 3
  Uniprot ID: Q9BTC8
  ENSP ID: ENSP00000385045
MAANMYRVGDYVYFENSSSNPYLIRRIEELNKTASGNVEAKVVCFYRRRDISNTLIMLADKHAKEIEEESETTVEADLTDKQKHQLKHRELFLSRQYESLPATHIRGKCSVALLNETESVLSYLDKEDTFFYSLVYDPSLKTLLADKGEIRVGPRYQADIPEMLLEGESDEREQSKLEVKVWDPNSPLTDRQIDQFLVVARAVGTFARALDCSSSVRQPSLHMSAAAASRDITLFHAMDTLYRHSYDLSSAISVLVPLGGPVLCRDEMEEWSASEASLFEEALEKYGKDFNDIRQDFLPWKSLTSIIEYYYMWKTTDRYVQQKRLKAAEAESKLKQVYIPTYSKPNPNQISTSNGKPGAVNGAVGTTFQPQNPLLGRACESCYATQSHQWYSWGPPNMQCRLCAICWLYWKKYGGLKMPTQSEEEKLSPSPTTEDPRVRSHVSRQAMQGMPVRNTGSPKSAVKTRQAFFLHTTYFTKFARQVCKNTLRLRQAARRPFVAINYAAIRAECKMLLNS

SEQ ID NO: 50689 - protein, 514 aa, Homo sapiens
  Payload ID: 10131
  Gene Symbol: MTA3
  Gene Name: metastasis associated 1 family, member 3
  ENSP ID: ENSP00000385241
MAANMYRVGDYVYFENSSSNPYLIRRIEELNKTASGNVEAKVVCFYRRRDISNTLIMLADKHAKEIEEESETTVEADLTDKQKHQLKHRELFLSRQYESLPATHIRGKCSVALLNETESVLSYLDKEDTFFYSLVYDPSLKTLLADKGEIRVGPRYQADIPEMLLEGESDEREQSKLEVKVWDPNSPLTDRQIDQFLVVARAVGTFARALDCSSSVRQPSLHMSAAAASRDITLFHAMDTLYRHSYDLSSAISVLVPLGGPVLCRDEMEEWSASEASLFEEALEKYGKDFNDIRQDFLPWKSLTSIIEYYYMWKTTDRYVQQKRLKAAEAESKLKQVYIPTYKPNPNQISTSNGKPGAVNGAVGTTFQPQNPLLGRACESCYATQSHQWYSWGPPNMQCRLCAICWLYWKKYGGLKMPTQSEEEKLSPSPTTEDPRVRSHVSRQAMQGMPVRNTGSPKSAVKTRQAFFLHTTYFTKFARQVCKNTLRLRQAARRPFVAINYAAIRAECKMLLNS

SEQ ID NO: 50690 - protein, 594 aa, Homo sapiens
  Payload ID: 10131
  Gene Symbol: MTA3
  Gene Name: metastasis associated 1 family, member 3
  Uniprot ID: Q9BTC8
  ENSP ID: ENSP00000385823
MAANMYRVGDYVYFENSSSNPYLIRRIEELNKTASGNVEAKVVCFYRRRDISNTLIMLADKHAKEIEEESETTVEADLTDKQKHQLKHRELFLSRQYESLPATHIRGKCSVALLNETESVLSYLDKEDTFFYSLVYDPSLKTLLADKGEIRVGPRYQADIPEMLLEGESDEREQSKLEVKVWDPNSPLTDRQIDQFLVVARAVGTFARALDCSSSVRQPSLHMSAAAASRDITLFHAMDTLYRHSYDLSSAISVLVPLGGPVLCRDEMEEWSASEASLFEEALEKYGKDFNDIRQDFLPWKSLTSIIEYYYMWKTTDRYVQQKRLKAAEAESKLKQVYIPTYSKPNPNQISTSNGKPGAVNGAVGTTFQPQNPLLGRACESCYATQSHQWYSWGPPNMQCRLCAICWLYWKKYGGLKMPTQSEEEKLSPSPTTEDPRVRSHVSRQAMQGMPVRNTGSPKSAVKTRQAFFLHTTYFTKFARQVCKNTLRLRQAARRPFVAINYAAIRAEYADRHAELSGSPLKSKSTRKPLACIIGYLEIHPAKKPNVIRSTPSLQTPTTKRMLTTPNHTSLSILGKRNYSHHNGLDELTCCVSD

SEQ ID NO: 50691 - protein, 590 aa, Homo sapiens
  Payload ID: 10131
  Gene Symbol: MTA3
  Gene Name: metastasis associated 1 family, member 3
  ENSP ID: ENSP00000386763
MAANMYRVGDYVYFENSSSNPYLIRRIEELNKTASGNVEAKVVCFYRRRDISNTLIMLADKHAKEIEEESETTVEADLTDKQKHQLKHRELFLSRQYESLPATHIRGKCSVALLNETESVLSYLDKEDTFFYSLVYDPSLKTLLADKGEIRVGPRYQADIPEMLLEGESDEREQSKLEVKVWDPNSPLTDRQIDQFLVVARAVGTFARALDCSSSVRQPSLHMSAAAASRDITLFHAMDTLYRHSYDLSSAISVLVPLGGPVLCRDEMEEWSASEASLFEEALEKYGKDFNDIRQDFLPWKSLTSIIEYYYMWKTTDRYVQQKRLKAAEAESKLKQVYIPTYKPNPNQISTSNGKPGAVNGAVGTTFQPQNPLLGRACESCYATQSHQWYSWGPPNMQCRLCAICWLYWKKYGGLKMPTQSEEEKLSPSPTTEDPRVRSHVSRQAMQGMPVRNTGSPKSAVKTRQAFFLHTTYFTKFARQVCKNTLRLRQAARRPFVAINYAAIRAEYADRHAELSGSPLKSKSTRKPLACIIGYLEIHPAKKPNVIRSTPSLQTPTTKRMLTTPNHTSLSILGKRNYSHHNGLDEKLMK

SEQ ID NO: 50692 - protein, 17 aa, Homo sapiens
  Payload ID: 10131
  Gene Symbol: MTA3
  Gene Name: metastasis associated 1 family, member 3
  ENSP ID: ENSP00000388722
MLADKHAKEIEEESETT

SEQ ID NO: 50693 - protein, 392 aa, Homo sapiens
  Payload ID: 10131
  Gene Symbol: MTA3
  Gene Name: metastasis associated 1 family, member 3
  ENSP ID: ENSP00000391455
MAANMYRVGDYVYFENSSSNPYLIRRIEELNKTASGNVEAKVVCFYRRRDISNTLIMLADKHAKEIEEESETTVEADLTDKQKHQLKHRELFLSRQYESLPATHIRGKCSVALLNETESVLSYLDKEDTFFYSLVYDPSLKTLLADKGEIRVGPRYQADIPEMLLEGESDEREQSKLEVKVWDPNSPLTDRQIDQFLVVARAVGTFARALDCSSSVRQPSLHMSAAAASRDITLFHAMDTLYRHSYDLSSAISVLVPLGGPVLCRDEMEEWSASEASLFEEALEKYGKDFNDIRQDFLPWKSLTSIIEYYYMWKTTDRYVQQKRLKAAEAESKLKQVYIPTYKPNPNQISTSNGKPGAVNGAVGTTFQPQNPLLGRACESCYVSPVVFLGPT

SEQ ID NO: 50694 - protein, 91 aa, Homo sapiens
  Payload ID: 10131
  Gene Symbol: MTA3
  Gene Name: metastasis associated 1 family, member 3
  ENSP ID: ENSP00000401815
MAANMYRVGDYVYFENSSSNPYLIRRIEELNKTASGNVEAKVVCFYRRRDISNTLIMLADKHAKTEFRSCCPGWSAMARSRLTATSTSQIK

SEQ ID NO: 50695 - protein, 852 aa, Homo sapiens
  Payload ID: 10132
  Gene Symbol: MACC1
  Gene Name: metastasis associated in colon cancer 1
  Uniprot ID: Q6ZN28
  ENSP ID: ENSP00000328410
MLITERKHFRSGRIAQSMSEANLIDMEAGKLSKSCNITECQDPDLLHNWPDAFTLRGNNASKVANPFWNQLSASNPFLDDITQLRNNRKRNNISILKEDPFLFCREIENGNSFDSSGDELDVHQLLRQTSSRNSGRSKSVSELLDILDDTAHAHQSIHNSDQILLHDLEWLKNDREAYKMAWLSQRQLARSCLDLNTISQSPGWAQTQLAEVTIACKVNHQGGSVQLPESDITVHVPQGHVAVGEFQEVSLRAFLDPPHMLNHDLSCTVSPLLEIMLGNLNTMEALLLEMKIGAEVRKDPFSQVMTEMVCLHSLGKEGPFKVLSNCYIYKDTIQVKLIDLSQVMYLVVAAQAKALPSPAATIWDYIHKTTSIGIYGPKYIHPSFTVVLTVCGHNYMPGQLTISDIKKGGKNISPVVFQLWGKQSFLLDKPQDLSISIFSCDPDFEVKTEGERKEIKQKQLEAGEVVHQQFLFSLVEHREMHLFDFCVQVEPPNGEPVAQFSITTPDPTPNLKRLSNLPGYLQKKEEIKSAPLSPKILVKYPTFQDKTLNFSNYGVTLKAVLRQSKIDYFLEYFKGDTIALLGEGKVKAIGQSKVKEWYVGVLRGKIGLVHCKNVKVISKEQVMFMSDSVFTTRNLLEQIVLPLKKLTYIYSVVLTLVSEKVYDWKVLADVLGYSHLSLEDFDQIQADKESEKVSYVIKKLKEDCHTERNTRKFLYELIVALLKMDCQELVARLIQEAAVLTSAVKLGKGWRELAEKLVRLTKQQMEAYEIPHRGNTGDVAVEMMWKPAYDFLYTWSAHYGNNYRDVLQDLQSALDRMKNPVTKHWRELTGVLILVNSLEVLRVTAFSTSEEV

SEQ ID NO: 50696 - protein, 852 aa, Homo sapiens; identical to SEQ ID NO: 50695
  Payload ID: 10132
  Gene Symbol: MACC1
  Gene Name: metastasis associated in colon cancer 1
  Uniprot ID: Q6ZN28
  ENSP ID: ENSP00000383185

SEQ ID NO: 50697 - protein, 852 aa, Homo sapiens; identical to SEQ ID NO: 50695
  Payload ID: 10132
  Gene Symbol: MACC1
  Gene Name: metastasis associated in colon cancer 1
  Uniprot ID: Q6ZN28
  ENSP ID: ENSP00000466864

SEQ ID NO: 50698 - protein, 759 aa, Homo sapiens
  Payload ID: 10133
  Gene Symbol: MTSS1
  Gene Name: metastasis suppressor 1
  Uniprot ID: O43312
  ENSP ID: ENSP00000322804
MEAVIEKECSALGGLFQTIISDMKGSYPVWEDFINKAGKLQSQLRTTVVAAAAFLDAFQKVADMATNTRGGTREIGSALTRMCMRHRSIEAKLRQFSSALIDCLINPLQEQMEEWKKVANQLDKDHAKEYKKARQEIKKKSSDTLKLQKKAKKVDTLGRGDIQPQLDSALQDVNDKYLLLEETEKQAVRKALIEERGRFCTFISMLRPVIEEEISMLGEITHLQTISEDLKSLTMDPHKLPSSSEQVILDLKGSDYSWSYQTPPSSPSTTMSRKSSVCSSLNSVNSSDSRSSGSHSHSPSSHYRYRSSNLAQQAPVRLSSVSSHDSGFISQDAFQSKSPSPMPPEAPNQLSNGFSHYSLSSESHVGPTGAGLFPHCLPASRLLPRVTSVHLPDYAHYYTIGPGMFPSSQIPSWKDWAKPGPYDQPLVNTLQRRKEKREPDPNGGGPTTASGPPAAAEEAQRPRSMTVSAATRPGEEMEACEELALALSRGLQLDTQRSSRDSLQCSSGYSTQTTTPCCSEDTIPSQVSDYDYFSVSGDQEADQQEFDKSSTIPRNSDISQSYRRMFQAKRPASTAGLPTTLGPAMVTPGVATIRRTPSTKPSVRRGTIGAGPIPIKTPVIPVKTPTVPDLPGVLPAPPDGPEERGEHSPESPSVGEGPQGVTSMPSSMWSGQASVNPPLPGPKPSIPEEHRQAIPESEAEDQEREPPSATVSPGQIPESDPADLSPRDTPQGEDMLNAIRRGVKLKKTTTNDRSAPRFS

SEQ ID NO: 50699 - protein, 730 aa, Homo sapiens
  Payload ID: 10133
  Gene Symbol: MTSS1
  Gene Name: metastasis suppressor 1
  Uniprot ID: O43312
  ENSP ID: ENSP00000367256
MEAVIEKECSALGGLFQTIISDMKGSYPVWEDFINKAGKLQSQLRTTVVAAAAFLDAFQKVADMATNTRGGTREIGSALTRMCMRHRSIEAKLRQFSSALIDCLINPLQEQMEEWKKVANQLDKDHAKEYKKARQEIKKKSSDTLKLQKKAKKGRGDIQPQLDSALQDVNDKYLLLEETEKQAVRKALIEERGRFCTFISMLRPVIEEEISMLGEITHLQTISEDLKSLTMDPHKLPSSSEQVILDLKGSDYSWSYQTPPSSPSTTMSRKSSVCSSLNSVNSSDSRSSGSHSHSPSSHYRYRSSNLAQQAPVRLSSVSSHDSGFISQDAFQSKSPSPMPPEAPNQNSSSSASSEASETCQSVSECSSPTSVSSGSTMGAWVSTEKDWAKPGPYDQPLVNTLQRRKEKREPDPNGGGPTTASGPPAAAEEAQRPRSMTVSAATRPGEEMEACEELALALSRGLQLDTQRSSRDSLQCSSGYSTQTTTPCCSEDTIPSQVSDYDYFSVSGDQEADQQEFDKSSTIPRNSDISQSYRRMFQAKRPASTAGLPTTLGPAMVTPGVATIRRTPSTKPSVRRGTIGAGPIPIKTPVIPVKTPTVPDLPGVLPAPPDGPEERGEHSPESPSVGEGPQGVTSMPSSMWSGQASVNPPLPGPKPSIPEEHRQAIPESEAEDQEREPPSATVSPGQIPESDPADLSPRDTPQGEDMLNAIRRGVKLKKTTTNDRSAPRFS

SEQ ID NO: 50700 - protein, 473 aa, Homo sapiens
  Payload ID: 10133
  Gene Symbol: MTSS1
  Gene Name: metastasis suppressor 1
  Uniprot ID: O43312
  ENSP ID: ENSP00000393606
MLRPVIEEEISMLGEITHLQTISEDLKSLTMDPHKLPSSSEQVILDLKGSDYSWSYQTPPSSPSTTMSRKSSVCSSLNSVNSSDSRSSGSHSHSPSSHYRYRSSNLAQQAPVRLSSVSSHDSGFISQDAFQSKSPSPMPPEAPNQRRKEKREPDPNGGGPTTASGPPAAAEEAQRPRSMTVSAATRPGEEMEACEELALALSRGLQLDTQRSSRDSLQCSSGYSTQTTTPCCSEDTIPSQVSDYDYFSVSGDQEADQQEFDKSSTIPRNSDISQSYRRMFQAKRPASTAGLPTTLGPAMVTPGVATIRRTPSTKPSVRRGTIGAGPIPIKTPVIPVKTPTVPDLPGVLPAPPDGPEERGEHSPESPSVGEGPQGVTSMPSSMWSGQASVNPPLPGPKPSIPEEHRQAIPESEAEDQEREPPSATVSPGQIPESDPADLSPRDTPQGEDMLNAIRRGVKLKKTTTNDRSAPRFS

SEQ ID NO: 50701 - protein, 207 aa, Homo sapiens
  Payload ID: 10133
  Gene Symbol: MTSS1
  Gene Name: metastasis suppressor 1
  ENSP ID: ENSP00000428145
MLRPVIEEEISMLGEITHLQTISEDLKSLTMDPHKLPSSSEQVILDLKGSDYSWSYQTPPSSPSTTMSRKSSVCSSLNSVNSSDSRSSGSHSHSPSSHYRYRSSNLAQQAPVRLSSVSSHDSGFISQDAFQSKSPSPMPPEAPNQLSNGFSHYSLSSESHVGPTGAGLFPHCLPASRLLPRVTSVHLPDYAHYYTIGPGMFPSSQIP

SEQ ID NO: 50702 - protein, 645 aa, Homo sapiens
  Payload ID: 10133
  Gene Symbol: MTSS1
  Gene Name: metastasis suppressor 1
  ENSP ID: ENSP00000428319
MNKYFFYILENCGFDSSKDPREEGHLFQKLVFQQAVLGSLFFAGRGDIQPQLDSALQDVNDKYLLLEETEKQAVRKALIEERGRFCTFISMLRPVIEEEISMLGEITHLQTISEDLKSLTMDPHKLPSSSEQVILDLKGSDYSWSYQTPPSSPSTTMSRKSSVCSSLNSVNSSDSRSSGSHSHSPSSHYRYRSSNLAQQAPVRLSSVSSHDSGFISQDAFQSKSPSPMPPEAPNQLSNGFSHYSLSSESHVGPTGAGLFPHCLPASRLLPRVTSVHLPDYAHYYTIGPGMFPSSQIPSWKDWAKPGPYDQPLVNTLQRRKEKREPDPNGGGPTTASGPPAAAEEAQRPRSMTVSAATRPGEEMEACEELALALSRGLQLDTQRSSRDSLQCSSGYSTQTTTPCCSEDTIPSQVSDYDYFSVSGDQEADQQEFDKSSTIPRNSDISQSYRRMFQAKRPASTAGLPTTLGPAMVTPGVATIRRTPSTKPSVRRGTIGAGPIPIKTPVIPVKTPTVPDLPGVLPAPPDGPEERGEHSPESPSVGEGPQGVTSMPSSMWSGQASVNPPLPGPKPSIPEEHRQAIPESEAEDQEREPPSATVSPGQIPESDPADLSPRDTPQGEDMLNAIRRGVKLKKTTTNDRSAPRFS

SEQ ID NO: 50703 - protein, 286 aa, Homo sapiens
  Payload ID: 10133
  Gene Symbol: MTSS1
  Gene Name: metastasis suppressor 1
  ENSP ID: ENSP00000428348
  MOD_RES (1)..(1): Any amino acid
XGRGDIQPQLDSALQDVNDKYLLLEETEKQAVRKALIEERGRFCTFISMLRPVIEEEISMLGEITHLQTISEDLKSLTMDPHKLPSSSEQVILDLKGSDYSWSYQTPPSSPSTTMSRKSSVCSSLNSVNSSDSRSSGSHSHSPSSHYRYRSSNLAQQAPVRLSSVSSHDSGFISQDAFQSKSPSPMPPEAPNQDWAKPGPYDQPLVNTLQRRKEKREPDPNGGGPTTASGPPAAAEEAQRPRSMTVSAATRPGEEMEACEELALALSRGLQLDTQRSSRDSLQCSS

SEQ ID NO: 50704 - protein, 543 aa, Homo sapiens
  Payload ID: 10133
  Gene Symbol: MTSS1
  Gene Name: metastasis suppressor 1
  ENSP ID: ENSP00000428685
  MOD_RES (1)..(1): Any amino acid
XWSYQTPPSSPSTTMSRKSSVCSSLNSVNSSDSRSSGSHSHSPSSHYRYRSSNLAQQAPVRLSSVSSHDSGFISQDAFQSKSPSPMPPEAPNQNSSSSASSEASETCQSVSECSSPTSVSSGSTMGAWVSTEKLSNGFSHYSLSSESHVGPTGAGLFPHCLPASRLLPRVTSVHLPDYAHYYTIGPGMFPSSQIPSWKDWAKPGPYDQPLVNTLQRRKEKREPDPNGGGPTTASGPPAAAEEAQRPRSMTVSAATRPGEEMEACEELALALSRGLQLDTQRSSRDSLQCSSGYSTQTTTPCCSEDTIPSQVSDYDYFSVSGDQEADQQEFDKSSTIPRNSDISQSYRRMFQAKRPASTAGLPTTLGPAMVTPGVATIRRTPSTKPSVRRGTIGAGPIPIKTPVIPVKTPTVPDLPGVLPAPPDGPEERGEHSPESPSVGEGPQGVTSMPSSMWSGQASVNPPLPGPKPSIPEEHRQAIPESEAEDQEREPPSATVSPGQIPESDPADLSPRDTPQGEDMLNAIRRGVKLKKTTTNDRSAPRFS

SEQ ID NO: 50705 - protein, 755 aa, Homo sapiens
  Payload ID: 10133
  Gene Symbol: MTSS1
  Gene Name: metastasis suppressor 1
  Uniprot ID: O43312
  ENSP ID: ENSP00000429064
MEAVIEKECSALGGLFQTIISDMKGSYPVWEDFINKAGKLQSQLRTTVVAAAAFLDAFQKVADMATNTRGGTREIGSALTRMCMRHRSIEAKLRQFSSALIDCLINPLQEQMEEWKKVANQLDKDHAKEYKKARQEIKKKSSDTLKLQKKAKKGRGDIQPQLDSALQDVNDKYLLLEETEKQAVRKALIEERGRFCTFISMLRPVIEEEISMLGEITHLQTISEDLKSLTMDPHKLPSSSEQVILDLKGSDYSWSYQTPPSSPSTTMSRKSSVCSSLNSVNSSDSRSSGSHSHSPSSHYRYRSSNLAQQAPVRLSSVSSHDSGFISQDAFQSKSPSPMPPEAPNQLSNGFSHYSLSSESHVGPTGAGLFPHCLPASRLLPRVTSVHLPDYAHYYTIGPGMFPSSQIPSWKDWAKPGPYDQPLVNTLQRRKEKREPDPNGGGPTTASGPPAAAEEAQRPRSMTVSAATRPGEEMEACEELALALSRGLQLDTQRSSRDSLQCSSGYSTQTTTPCCSEDTIPSQVSDYDYFSVSGDQEADQQEFDKSSTIPRNSDISQSYRRMFQAKRPASTAGLPTTLGPAMVTPGVATIRRTPSTKPSVRRGTIGAGPIPIKTPVIPVKTPTVPDLPGVLPAPPDGPEERGEHSPESPSVGEGPQGVTSMPSSMWSGQASVNPPLPGPKPSIPEEHRQAIPESEAEDQEREPPSATVSPGQIPESDPADLSPRDTPQGEDMLNAIRRGVKLKKTTTNDRSAPRFS

SEQ ID NO: 50706 - protein, 184 aa, Homo sapiens
  Payload ID: 10133
  Gene Symbol: MTSS1
  Gene Name: metastasis suppressor 1
  ENSP ID: ENSP00000429752
  MOD_RES (1)..(1): Any amino acid
XSLGGSRHWLQVFPLSVPEGSYPVWEDFINKAGKLQSQLRTTVVAAAAFLDAFQKVADMATNTRGGTREIGSALTRMCMRHRSIEAKLRQFSSALIDCLINPLQEQMEEWKKVANQLDKDHAKEYKKARQEIKKKSSDTLKLQKKAKKGRGDIQPQLDSALQDVNDKYLLLEETEKQAVRKALI

SEQ ID NO: 50707 - protein, 747 aa, Homo sapiens
  Payload ID: 10134
  Gene Symbol: MTSS1L
  Gene Name: metastasis suppressor 1-like
  Uniprot ID: Q765P7
  ENSP ID: ENSP00000341171
METAEKECGALGGLFQAIVNDMKSSYPIWEDFNSKATKLHSQLRTTVLAAVAFLDAFQKVADMATNTRGATRDIGSALTRMCMRHRSIETKLRQFTNALLESLINPLQERIEDWKKAANQLDKDHAKEYKRARHEIKKKSSDTLKLQKKARKELLGKGDLQPQLDSALQDVNDMYLLLEETEKQAVRRALIEERGRFCTFITFLQPVVNGELTMLGEITHLQGIIDDLVVLTAEPHKLPPASEQVIKDLKGSDYSWSYQTPPSSPSSSSSRKSSMCSAPSSSSSAKGGGAPWPGGAQTYSPSSTCRYRSLAQPATTTARLSSVSSHDSGFVSQDATYSKPPSPMPSDITSQKSSSSASSEASETCQSVSECSSPTSDWSKVGSHEQPSGATLQRRKDRVELLRDTEPGPASGGTLGPSGEEAPRPRMSPATIAAKHGEEVSPAASDLAMVLTRGLSLEHQKSSRDSLQYSSGYSTQTTTPSCSEDTIPSQGSDYDCYSVNGDADSEGPPEFDKSSTIPRNSNIAQNYRRLIQTKRPASTAGLPTAGLPTATGLPSGAPPGVATIRRTPSTKPTVRRALSSAGPIPIRPPIVPVKTPTVPDSPGYMGPTRAGSEECVFYTDETASPLAPDLAKASPKRLSLPNTAWGSPSPEAAGYPGAGAEDEQQQLAANRHSLVEKLGELVAGAHALGEGQFPFPTALSATPTEETPTPPPAATSDPPAEDMLVAIRRGVRLRRTVTNDRSAPRIL

SEQ ID NO: 50708 - protein, 136 aa, Homo sapiens
  Payload ID: 10134
  Gene Symbol: MTSS1L
  Gene Name: metastasis suppressor 1-like
  ENSP ID: ENSP00000455480
  MOD_RES (1)..(1): Any amino acid
XETEKQAVRRALIEERGRFCTFITFLQPVVNGELTMLGEITHLQGIIDDLVVLTAEPHKLPPASEQVIKDLKGSDYSWSYQTPPSSPSSSSSRKSSMCSLAQPATTTARLSSVSSHDSGFVSQDATYSKPPSPMPS

SEQ ID NO: 50709 - protein, 173 aa, Homo sapiens
  Payload ID: 10134
  Gene Symbol: MTSS1L
  Gene Name: metastasis suppressor 1-like
  ENSP ID: ENSP00000459654
  MOD_RES (1)..(1): Any amino acid
XRMCMRHRSIETKLRQFTNALLESLINPLQERIEDWKKAANQLDKDHAKEYKRARHEIKKKSSDTLKLQKKARKGKGDLQPQLDSALQDVNDMYLLLEETEKQAVRRALIEERGRFCTFITFLQPVVNGELTMLGEITHLQGIIDDLVVLTAEPHKLPPASEQVIKDLKGSDY

SEQ ID NO: 50710 - protein, 746 aa, Homo sapiens [sequence omitted]

SEQ ID NO: 50711 - protein, 57 aa, Homo sapiens
  Payload ID: 10135
  Gene Symbol:
  Gene Name: Metastasis-associated lung adenocarcinoma transcript 1  [Source:UniProtKB/Swiss-Prot
  Acc:Q9UHZ2]
  Uniprot ID: Q9UHZ2
  ENSP ID: ENSP00000485396
MQIMFSSVVRISGLCLFPNGGMTYNLFCLYLSIHQGAVFSASRPSYCQAGYDSEDVI

SEQ ID NO: 50712 - protein, 435 aa, Homo sapiens
  Payload ID: 10136
  Gene Symbol: MTX1
  Gene Name: metaxin 1
  ENSP ID: ENSP00000317106
MLLGGPPRSPRSGTSPKGPWSSTGHVQFGKSPQTWPRRTRPRSPEPAAPSGVRGSTWTRRRDSPRRAGPTALSRYVGHLWMGRRPPSPEARGPVPRSSAASRARRSLASPGISPGPLTATIGGAVAGGGPRQGRAEAHKEVFPGQRVGKMAAPMELFCWSGGWGLPSVDLDSLAVLTYARFTGAPLKVHKISNPWQSPSGTLPALRTSHGEVISVPHKIITHLRKEVHTFWIDTKNYVEVTRKWYAEAMPFPLNFFLPGRMQRQYMERLQLLTGEHRPEDEEELEKELYREARECLTLLSQRLGSQKFFFGDAPASLDAFVFSYLALLLQAKLPSGKLQVHLRGLHNLCAYCTHILSLYFPWDGAEVPPQRQTPAGPETEEEPYRRRNQILSVLAGLAAMVGYALLSGIVSIQRATPARAPGTRTLGMAEEDEEE

SEQ ID NO: 50713 - protein, 466 aa, Homo sapiens
  Payload ID: 10136
  Gene Symbol: MTX1
  Gene Name: metaxin 1
  ENSP ID: ENSP00000357360
MLLGGPPRSPRSGTSPKGPWSSTGHVQFGKSPQTWPRRTRPRSPEPAAPSGVRGSTWTRRRDSPRRAGPTALSRYVGHLWMGRRPPSPEARGPVPRSSAASRARRSLASPGISPGPLTATIGGAVAGGGPRQGRAEAHKEVFPGQRVGKMAAPMELFCWSGGWGLPSVDLDSLAVLTYARFTGAPLKVHKISNPWQSPSGTLPALRTSHGEVISVPHKIITHLRKEKYNADYDLSARQGADTLAFMSLLEEKLLPVLVHTFWIDTKNYVEVTRKWYAEAMPFPLNFFLPGRMQRQYMERLQLLTGEHRPEDEEELEKELYREARECLTLLSQRLGSQKFFFGDAPASLDAFVFSYLALLLQAKLPSGKLQVHLRGLHNLCAYCTHILSLYFPWDGAEVPPQRQTPAGPETEEEPYRRRNQILSVLAGLAAMVGYALLSGIVSIQRATPARAPGTRTLGMAEEDEEE

SEQ ID NO: 50714 - protein, 120 aa, Homo sapiens
  Payload ID: 10136
  Gene Symbol: MTX1
  Gene Name: metaxin 1
  ENSP ID: ENSP00000408749
MAAPMELFCWSGGWGLPSVDLDSLAVLTYARFTGAPLKVHKISNPWQSPSGTQYPLGELCLPFGPVMERSSQFHTRSSPTFEKRSTMLIMICQLGKGQTPWPSCLSWRRSCSRCWYILFG

SEQ ID NO: 50715 - protein, 317 aa, Homo sapiens
  Payload ID: 10136
  Gene Symbol: MTX1
  Gene Name: metaxin 1
  Uniprot ID: Q13505
  ENSP ID: ENSP00000476632
MAAPMELFCWSGGWGLPSVDLDSLAVLTYARFTGAPLKVHKISNPWQSPSGTLPALRTSHGEVISVPHKIITHLRKEKYNADYDLSARQGADTLAFMSLLEEKLLPVLVHTFWIDTKNYVEVTRKWYAEAMPFPLNFFLPGRMQRQYMERLQLLTGEHRPEDEEELEKELYREARECLTLLSQRLGSQKFFFGDAPASLDAFVFSYLALLLQAKLPSGKLQVHLRGLHNLCAYCTHILSLYFPWDGAEVPPQRQTPAGPETEEEPYRRRNQILSVLAGLAAMVGYALLSGIVSIQRATPARAPGTRTLGMAEEDEEE

SEQ ID NO: 50716 - protein, 263 aa, Homo sapiens
  Payload ID: 10137
  Gene Symbol: MTX2
  Gene Name: metaxin 2
  Uniprot ID: O75431
  ENSP ID: ENSP00000249442
MSLVAEAFVSQIAAAEPWPENATLYQQLKGEQILLSDNAASLAVQAFLQMCNLPIKVVCRANAEYMSPSGKVPFIHVGNQVVSELGPIVQFVKAKGHSLSDGLEEVQKAEMKAYMELVNNMLLTAELYLQWCDEATVGEITHARYGSPYPWPLNHILAYQKQWEVKRKMKAIGWGKKTLDQVLEDVDQCCQALSQRLGTQPYFFNKQPTELDALVFGHLYTILTTQLTNDELSEKVKNYSNLLAFCRRIEQHYFEDRGKGRLS

SEQ ID NO: 50717 - protein, 229 aa, Homo sapiens
  Payload ID: 10137
  Gene Symbol: MTX2
  Gene Name: metaxin 2
  ENSP ID: ENSP00000398757
MSLVAEAFVSQIAAAEPWPENATLYQQLKGEQILLSDNAASLAVQAFLQMCNLPIKVVCRANAEYMSPSGKVPFIHVGNQVVSELGPIVQFVKAKGHSLSDGLEEVQKAEMKAYMELVNNMLLTAELYLQWCDEATVGEWEVKRKMKAIGWGKKTLDQVLEDVDQCCQALSQRLGTQPYFFNKQPTELDALVFGHLYTILTTQLTNDELSEKVKNYSNLLAFCRRIEQH

SEQ ID NO: 50718 - protein, 45 aa, Homo sapiens
  Payload ID: 10137
  Gene Symbol: MTX2
  Gene Name: metaxin 2
  ENSP ID: ENSP00000402204
MSLVAEAFVSQIAAAEPWPENATLYQQLKGEQILLSDNAASLAVQ

SEQ ID NO: 50719 - protein, 37 aa, Homo sapiens
  Payload ID: 10137
  Gene Symbol: MTX2
  Gene Name: metaxin 2
  ENSP ID: ENSP00000403545
MSLVAEAFVSQIAGWSAVAQPGLTATSASRVQAILLP

SEQ ID NO: 50720 - protein, 207 aa, Homo sapiens
  Payload ID: 10137
  Gene Symbol: MTX2
  Gene Name: metaxin 2
  ENSP ID: ENSP00000414176
MSLVAEAFVSQIAGKVPFIHVGNQVVSELGPIVQFVKAKGHSLSDGLEEVQKAEMKAYMELVNNMLLTAELYLQWCDEATVGEITHARYGSPYPWPLNHILAYQKQWEVKRKMKAIGWGKKTLDQVLEDVDQCCQALSQRLGTQPYFFNKQPTELDALVFGHLYTILTTQLTNDELSEKVKNYSNLLAFCRRIEQHYFEDRGKGRLS

SEQ ID NO: 50721 - protein, 248 aa, Homo sapiens
  Payload ID: 10138
  Gene Symbol: MTX3
  Gene Name: metaxin 3
  Uniprot ID: Q5HYI7
  ENSP ID: ENSP00000423302
MAAPLELSCWGGGWGLPSVHSESLVVMAYAKFSGAPLKVNVIDNTWRGSRGDVPILTTEDDMVSQPAKILNFLRKQKYNADYELSAKQGADTLAYIALLEEKLLPAVLHTFWVESDNYFTVTKPWFASQIPFPLSLILPGRMSKGALNRILLTRGQPPLYHLREVEAQIYRDAKECLNLLSNRLGTSQFFFGDTPSTLDAYVFGFLAPLYKVRFPKVQLQEHLKQLSNLCRFCDDILSSYFRLSLGDG

SEQ ID NO: 50722 - protein, 251 aa, Homo sapiens
  Payload ID: 10138
  Gene Symbol: MTX3
  Gene Name: metaxin 3
  Uniprot ID: Q5HYI7
  ENSP ID: ENSP00000423600
MVSQPAKILNFLRKQKYNADYELSAKQGADTLAYIALLEEKLLPAVLHTFWVESDNYFTVTKPWFASQIPFPLSLILPGRMSKGALNRILLTRGQPPLYHLREVEAQIYRDAKECLNLLSNRLGTSQFFFGDTPSTLDAYVFGFLAPLYKVRFPKVQLQEHLKQLSNLCRFCDDILSSYFRLSLGGISPAGQETVDANLQKLTQLVNKESNLIEKMDDNLRQSPQLPPRKLPTLKLTPAEEENNSFQRLSP

SEQ ID NO: 50723 - protein, 312 aa, Homo sapiens
  Payload ID: 10138
  Gene Symbol: MTX3
  Gene Name: metaxin 3
  Uniprot ID: Q5HYI7
  ENSP ID: ENSP00000424798
MAAPLELSCWGGGWGLPSVHSESLVVMAYAKFSGAPLKVNVIDNTWRGSRGDVPILTTEDDMVSQPAKILNFLRKQKYNADYELSAKQGADTLAYIALLEEKLLPAVLHTFWVESDNYFTVTKPWFASQIPFPLSLILPGRMSKGALNRILLTRGQPPLYHLREVEAQIYRDAKECLNLLSNRLGTSQFFFGDTPSTLDAYVFGFLAPLYKVRFPKVQLQEHLKQLSNLCRFCDDILSSYFRLSLGGISPAGQETVDANLQKLTQLVNKESNLIEKMDDNLRQSPQLPPRKLPTLKLTPAEEENNSFQRLSP

SEQ ID NO: 50724 - protein, 158 aa, Homo sapiens
  Payload ID: 10138
  Gene Symbol: MTX3
  Gene Name: metaxin 3
  Uniprot ID: Q5HYI7
  ENSP ID: ENSP00000484157
MAAPLELSCWGGGWGLPSVHSESLVVMAYAKFSGAPLKVNVIDNTWRGSRGDVPILTTEDDMVSQPAKILNFLRKQKYNADYELSAKQGADTLAYIALLEEKLLPAVLHTFWVESDNYFTVTKPWFASQIPFPLSLILPGRMSQQILSSRAGTHMLRK

SEQ ID NO: 50725 - protein, 187 aa, Homo sapiens
  Payload ID: 10139
  Gene Symbol: METRN
  Gene Name: meteorin, glial cell differentiation regulator
  ENSP ID: ENSP00000219542
LAPAARAGYSEERCSWRGSGLTQEPGSVGQLALACAEGAVEWLYPAGALRLTLGGPDPRARPGIACLRPVRPFAGAQVFAERAGGALELLLAEGPGPAGGRCVRWGPRERRALFLQATPHQDISRRVAAFRFELREDGRPELPPQAHGLGVDGACRPCSDAELLLAACTSDFGECPRHGGSLEPAFP

SEQ ID NO: 50726 - protein, 293 aa, Homo sapiens
  Payload ID: 10139
  Gene Symbol: METRN
  Gene Name: meteorin, glial cell differentiation regulator
  Uniprot ID: Q9UJH8
  ENSP ID: ENSP00000455068
MGFPAAALLCALCCGLLAPAARAGYSEERCSWRGSGLTQEPGSVGQLALACAEGAVEWLYPAGALRLTLGGPDPRARPGIACLRPVRPFAGAQVFAERAGGALELLLAEGPGPAGGRCVRWGPRERRALFLQATPHQDISRRVAAFRFELREDGRPELPPQAHGLGVDGACRPCSDAELLLAACTSDFVIHGIIHGVTHDVELQESVITVVAARVLRQTPPLFQAGRSGDQGLTSIRTPLRCGVHPGPGTFLFMGWSRFGEARLGCAPRFQEFRRAYEAARAAHLHPCEVALH

SEQ ID NO: 50727 - protein, 69 aa, Homo sapiens
  Payload ID: 10139
  Gene Symbol: METRN
  Gene Name: meteorin, glial cell differentiation regulator
  ENSP ID: ENSP00000456647
MGFPAAALLCALCCGLLAPAARAGYSEERCSWRGRPRRTRTSAAAWPPSALSCARTGAPSCPRRPTVSA

SEQ ID NO: 50728 - protein, 160 aa, Homo sapiens
  Payload ID: 10139
  Gene Symbol: METRN
  Gene Name: meteorin, glial cell differentiation regulator
  ENSP ID: ENSP00000457702
MLGCICQMGVQEGGPGQLIARHGPQAHVCVHSCLGGACRPCSDAELLLAACTSDFVIHGIIHGVTHDVELQESVITVVAARVLRQTPPLFQAGRSGDQGLTSIRTPLRCGVHPGPGTFLFMGWSRFGEARLGCAPRFQEFRRAYEAARAAHLHPCEVALH

SEQ ID NO: 50729 - protein, 175 aa, Homo sapiens
  Payload ID: 10139
  Gene Symbol: METRN
  Gene Name: meteorin, glial cell differentiation regulator
  ENSP ID: ENSP00000459900
  MOD_RES (1)..(1): Any amino acid
XAVEWLYPAGALRLTLGGPDPRARPGIACLRPVRPFAGAQVFAERAGGALELLLAEGPGPAGGRCVRWGPRERRALFLQATPHQDISRRVAAFRFELREDGRPELPPQAHGLGVDGACRPCSDAELLLAACTSDFVIHGIIHGVTHDVELQESVITVGGPTALEVMGLSIRTLFT

SEQ ID NO: 50730 - protein, 311 aa, Homo sapiens
  Payload ID: 10140
  Gene Symbol: METRNL
  Gene Name: meteorin, glial cell differentiation regulator-like
  Uniprot ID: Q641Q3
  ENSP ID: ENSP00000315731
MRGAARAAWGRAGQPWPRPPAPGPPPPPLPLLLLLLAGLLGGAGAQYSSDRCSWKGSGLTHEAHRKEVEQVYLRCAAGAVEWMYPTGALIVNLRPNTFSPARHLTVCIRSFTDSSGANIYLEKTGELRLLVPDGDGRPGRVQCFGLEQGGLFVEATPQQDIGRRTTGFQYELVRRHRASDLHELSAPCRPCSDTEVLLAVCTSDFAVRGSIQQVTHEPERQDSAIHLRVSRLYRQKSRVFEPVPEGDGHWQGRVRTLLECGVRPGHGDFLFTGHMHFGEARLGCAPRFKDFQRMYRDAQERGLNPCEVGTD

SEQ ID NO: 50731 - protein, 90 aa, Homo sapiens
  Payload ID: 10140
  Gene Symbol: METRNL
  Gene Name: meteorin, glial cell differentiation regulator-like
  ENSP ID: ENSP00000458275
RTAVRGSIQQVTHEPERQDSAIHLRVSRLYRQKSRVFEPVPEGDGHWQGRVRTLLECGARLGCAPRFKDFQRMYRDAQERGLNPCEVGTD

SEQ ID NO: 50732 - protein, 229 aa, Homo sapiens
  Payload ID: 10140
  Gene Symbol: METRNL
  Gene Name: meteorin, glial cell differentiation regulator-like
  Uniprot ID: Q641Q3
  ENSP ID: ENSP00000458566
MYPTGALIVNLRPNTFSPARHLTVCIRSFTDSSGANIYLEKTGELRLLVPDGDGRPGRVQCFGLEQGGLFVEATPQQDIGRRTTGFQYELVRRHRASDLHELSAPCRPCSDTEVLLAVCTSDFAVRGSIQQVTHEPERQDSAIHLRVSRLYRQKSRVFEPVPEGDGHWQGRVRTLLECGVRPGHGDFLFTGHMHFGEARLGCAPRFKDFQRMYRDAQERGLNPCEVGTD

SEQ ID NO: 50733 - protein, 229 aa, Homo sapiens; identical to SEQ ID NO: 50732
  Payload ID: 10140
  Gene Symbol: METRNL
  Gene Name: meteorin, glial cell differentiation regulator-like
  Uniprot ID: Q641Q3
  ENSP ID: ENSP00000460798

SEQ ID NO: 50734 - protein, 229 aa, Homo sapiens; identical to SEQ ID NO: 50732
  Payload ID: 10140
  Gene Symbol: METRNL
  Gene Name: meteorin, glial cell differentiation regulator-like
  Uniprot ID: Q641Q3
  ENSP ID: ENSP00000481759

SEQ ID NO: 50735 - protein, 311 aa, Homo sapiens; identical to SEQ ID NO: 50730
  Payload ID: 10140
  Gene Symbol: METRNL
  Gene Name: meteorin, glial cell differentiation regulator-like
  Uniprot ID: Q641Q3
  ENSP ID: ENSP00000488860

SEQ ID NO: 50736 - protein, 229 aa, Homo sapiens; identical to SEQ ID NO: 50732
  Payload ID: 10140
  Gene Symbol: METRNL
  Gene Name: meteorin, glial cell differentiation regulator-like
  Uniprot ID: Q641Q3
  ENSP ID: ENSP00000488881

SEQ ID NO: 50737 - protein, 383 aa, Homo sapiens
  Payload ID: 10141
  Gene Symbol: MTHFSD
  Gene Name: methenyltetrahydrofolate synthetase domain containing
  Uniprot ID: Q2M296
  ENSP ID: ENSP00000354152
MEPRAVGVSKQDIREQIWGYMESQNLADFPRPVHHRIPNFKGSYLACQNIKDLDVFARTQEVKVDPDKPLEGVRLLVLQSKKTLLVPTPRLRTGLFNKITPPPGATKDILRKCATSQGVRNYSVPIGLDSRVLVDLVVVGSVAVSEKGWRIGKGEGYADLEYAMMVSMGAVSKETPVVTIVHDCQVVDIPEELVEEHDITVDYILTPTRVIATGCKRPKPMGITWFKISLEMMEKIPILRSLRAREQQAGKDVTLQGEHQHLPEPGCQQTVPLSVGRRPPDTPGPETNSMEAAPGSPPGEGAPLAADVYVGNLPGDARVSDLKRALRELGSVPLRLTWQGPRRRAFLHYPDSAAAQQAVSCLQGLRLGTDTLRVALARQQRDK

SEQ ID NO: 50738 - protein, 383 aa, Homo sapiens
  Payload ID: 10141
  Gene Symbol: MTHFSD
  Gene Name: methenyltetrahydrofolate synthetase domain containing
  Uniprot ID: Q2M296
  ENSP ID: ENSP00000370612
MEPRAVGVSKQDIREQIWGYMESQNLADFPRPVHHRIPNFKGASHAAEQLPRLQAFKTARTIKVNPDAPQKSARFFVLESKKTLLVPTPRLRTGLFNKITPPPGATKDILRKCATSQGVRNYSVPIGLDSRVLVDLVVVGSVAVSEKGWRIGKGEGYADLEYAMMVSMGAVSKETPVVTIVHDCQVVDIPEELVEEHDITVDYILTPTRVIATGCKRPKPMGITWFKISLEMMEKIPILRSLRAREQQAGKDVTLQGEHQHLPEPGCQQTVPLSVGRRPPDTPGPETNSMEAAPGSPPGEGAPLAADVYVGNLPGDARVSDLKRALRELGSVPLRLTWQGPRRRAFLHYPDSAAAQQAVSCLQGLRLGTDTLRVALARQQRDK

SEQ ID NO: 50739 - protein, 220 aa, Homo sapiens
  Payload ID: 10141
  Gene Symbol: MTHFSD
  Gene Name: methenyltetrahydrofolate synthetase domain containing
  ENSP ID: ENSP00000438761
MMVSMGAVSKETPVVTIVHDCQVVDIPEELVEEHDITVDYILTPTRVIATGCKRPKPMGITWFKISLEMMEKIPILRSLRAREQQAGKDVTLQGEHQHLPEPGCQQTVPLSVGRRPPDTPGPETNSMEAAPGSPPGEGAPLAADVYVGNLPGDARVSDLKRALRELGSVPLRLTWQGPRRRAFLHYPDSAAAQQAVSCLQGLRLGTDTLRVALARQQRDK

SEQ ID NO: 50740 - protein, 382 aa, Homo sapiens
  Payload ID: 10141
  Gene Symbol: MTHFSD
  Gene Name: methenyltetrahydrofolate synthetase domain containing
  Uniprot ID: Q2M296
  ENSP ID: ENSP00000444003
MEPRAGVSKQDIREQIWGYMESQNLADFPRPVHHRIPNFKGASHAAEQLPRLQAFKTARTIKVNPDAPQKSARFFVLESKKTLLVPTPRLRTGLFNKITPPPGATKDILRKCATSQGVRNYSVPIGLDSRVLVDLVVVGSVAVSEKGWRIGKGEGYADLEYAMMVSMGAVSKETPVVTIVHDCQVVDIPEELVEEHDITVDYILTPTRVIATGCKRPKPMGITWFKISLEMMEKIPILRSLRAREQQAGKDVTLQGEHQHLPEPGCQQTVPLSVGRRPPDTPGPETNSMEAAPGSPPGEGAPLAADVYVGNLPGDARVSDLKRALRELGSVPLRLTWQGPRRRAFLHYPDSAAAQQAVSCLQGLRLGTDTLRVALARQQRDK

SEQ ID NO: 50741 - protein, 16 aa, Homo sapiens
  Payload ID: 10141
  Gene Symbol: MTHFSD
  Gene Name: methenyltetrahydrofolate synthetase domain containing
  ENSP ID: ENSP00000454429
MMVSMGAVSKETPVVT

SEQ ID NO: 50742 - protein, 56 aa, Homo sapiens
  Payload ID: 10141
  Gene Symbol: MTHFSD
  Gene Name: methenyltetrahydrofolate synthetase domain containing
  ENSP ID: ENSP00000454593
MEPRAGVSKQDIREQIWGYMESQNLADFPRPVHHRIPNFKAGESGREKATPIWNMP

SEQ ID NO: 50743 - protein, 174 aa, Homo sapiens
  Payload ID: 10141
  Gene Symbol: MTHFSD
  Gene Name: methenyltetrahydrofolate synthetase domain containing
  ENSP ID: ENSP00000454807
MEPRAGVSKQDIREQIWGYMESQNLADFPRPVHHRIPNFKSKKTLLVPTPRLRTGLFNKITPPPGATKDILRKCATSQGVRNYSVPIGLDSRVLVDLVVVGSVAVSEKGWRIGKGEGYADLEYAMMVSMGAVSKETPVVTIVHDCQVVDIPEELVEEHDITVDYILTPTRVIAT

SEQ ID NO: 50744 - protein, 112 aa, Homo sapiens
  Payload ID: 10141
  Gene Symbol: MTHFSD
  Gene Name: methenyltetrahydrofolate synthetase domain containing
  ENSP ID: ENSP00000455208
MESQNLADFPRPVHHRIPNFKGSYLACQNIKDLDVFARTQEVKVDPDKPLEGVRLLVLQSKKTLLVPTPRLRTGLFNKITPPPGATKDILRKCATSQVPPERLGRQDRISKT

SEQ ID NO: 50745 - protein, 106 aa, Homo sapiens
  Payload ID: 10141
  Gene Symbol: MTHFSD
  Gene Name: methenyltetrahydrofolate synthetase domain containing
  ENSP ID: ENSP00000455262
MEPRAVGVSKQDIREQIWGYMESQNLADFPRPVHHRIPNFKSKKTLLVPTPRLRTGLFNKITPPPGATKDILRKCATSQVPPERLGRQDRISKTCSIGNCLTSSKV

SEQ ID NO: 50746 - protein, 233 aa, Homo sapiens
  Payload ID: 10141
  Gene Symbol: MTHFSD
  Gene Name: methenyltetrahydrofolate synthetase domain containing
  ENSP ID: ENSP00000455940
  MOD_RES (1)..(1): Any amino acid
XVSKQDIREQIWGYMESQNLADFPRPVHHRIPNFKGSYLACQNIKDLDVFARTQEVKVDPDKPLEGVRLLVLQSKKTLLVPTPRLRTGLFNKITPPPGATKDILRKCATSQGVRNYSVPIGLDSRVLVDLVVVGSVAVSEKGWRIGKGEGYADLEYAMMVSMGAVSKETPVVTIVHDCQVVDIPEELVEEHDITVDYILTPTRVIATGCKRPKPMGITWFKVGHGSGQLWPVA

SEQ ID NO: 50747 - protein, 18 aa, Homo sapiens
  Payload ID: 10141
  Gene Symbol: MTHFSD
  Gene Name: methenyltetrahydrofolate synthetase domain containing
  ENSP ID: ENSP00000456628
MMVSMGAVSKETPVVTIV

SEQ ID NO: 50748 - protein, 223 aa, Homo sapiens
  Payload ID: 10141
  Gene Symbol: MTHFSD
  Gene Name: methenyltetrahydrofolate synthetase domain containing
  ENSP ID: ENSP00000456652
GVSKQDIREQIWGYMESQNLADFPRPVHHRIPNFKGSYLACQNIKDLDVFARTQEVKVDPDKPLEGVRLLVLQSKKTLLVPTPRLRTGLFNKITPPPGATKDILRKCATSQGVRNYSVPIGLDSRVLVDLVVVGSVAVSEKGWRIGKGEGYADLEYAMMVSMGAVSKETPVVTIVHDCQVVDIPEELVEEHDITVDYILTPTRVIATGCKRPKPMGITWFKIR

SEQ ID NO: 50749 - protein, 84 aa, Homo sapiens
  Payload ID: 10141
  Gene Symbol: MTHFSD
  Gene Name: methenyltetrahydrofolate synthetase domain containing
  ENSP ID: ENSP00000456910
MEPRAVGVSKQDIREQIWGYMESQNLADFPRPVHHRIPNFKGSYLACQNIKDLDVFARTQEVKVDPDKPLEGVRLLVLQVIPLP

SEQ ID NO: 50750 - protein, 89 aa, Homo sapiens
  Payload ID: 10141
  Gene Symbol: MTHFSD
  Gene Name: methenyltetrahydrofolate synthetase domain containing
  ENSP ID: ENSP00000457794
MESQNLADFPRPVHHRIPNFKGSYLACQNIKDLDVFARTQEVKVDPDKPLEGVRLLVLQSKKTLLVPTPRLRTGLFNKITPPPGATKDI

SEQ ID NO: 50751 - protein, 112 aa, Homo sapiens
  Payload ID: 10141
  Gene Symbol: MTHFSD
  Gene Name: methenyltetrahydrofolate synthetase domain containing
  ENSP ID: ENSP00000458104
MESQNLADFPRPVHHRIPNFKGASHAAEQLPRLQAFKTARTIKVNPDAPQKSARFFVLESKKTLLVPTPRLRTGLFNKITPPPGATKDILRKCATSQGVRNYSVPIGLDSRV

SEQ ID NO: 50752 - protein, 152 aa, Homo sapiens
  Payload ID: 10141
  Gene Symbol: MTHFSD
  Gene Name: methenyltetrahydrofolate synthetase domain containing
  ENSP ID: ENSP00000480673
PRAVGVSKQDIREQIWGYMESQNLADFPRPVHHRIPNFKGASHAAEQLPRLQAFKTARTIKVNPDAPQKSARFFVLESKKTLLVPTPRLRTGLFNKITPPPGATKDILRKCATSQVPPERLGRQDRISKTCSIGNCLTSSNWSVPAPVDPAR

SEQ ID NO: 50753 - protein, 382 aa, Homo sapiens
  Payload ID: 10141
  Gene Symbol: MTHFSD
  Gene Name: methenyltetrahydrofolate synthetase domain containing
  ENSP ID: ENSP00000489295
MEPRAGVSKQDIREQIWGYMESQNLADFPRPVHHRIPNFKGSYLACQNIKDLDVFARTQEVKVDPDKPLEGVRLLVLQSKKTLLVPTPRLRTGLFNKITPPPGATKDILRKCATSQGVRNYSVPIGLDSRVLVDLVVVGSVAVSEKGWRIGKGEGYADLEYAMMVSMGAVSKETPVVTIVHDCQVVDIPEELVEEHDITVDYILTPTRVIATGCKRPKPMGITWFKISLEMMEKIPILRSLRAREQQAGKDVTLQGEHQHLPEPGCQQTVPLSVGRRPPDTPGPETNSMEAAPGSPPGEGAPLAADVYVGNLPGDARVSDLKRALRELGSVPLRLTWQGPRRRAFLHYPDSAAAQQAVSCLQGLRLGTDTLRVALARQQRDK

SEQ ID NO: 50754 - protein, 395 aa, Homo sapiens
  Payload ID: 10142
  Gene Symbol: MAT1A
  Gene Name: methionine adenosyltransferase I, alpha
  Uniprot ID: Q00266
  ENSP ID: ENSP00000361287
MNGPVDGLCDHSLSEGVFMFTSESVGEGHPDKICDQISDAVLDAHLKQDPNAKVACETVCKTGMVLLCGEITSMAMVDYQRVVRDTIKHIGYDDSAKGFDFKTCNVLVALEQQSPDIAQCVHLDRNEEDVGAGDQGLMFGYATDETEECMPLTIILAHKLNARMADLRRSGLLPWLRPDSKTQVTVQYMQDNGAVIPVRIHTIVISVQHNEDITLEEMRRALKEQVIRAVVPAKYLDEDTVYHLQPSGRFVIGGPQGDAGVTGRKIIVDTYGGWGAHGGGAFSGKDYTKVDRSAAYAARWVAKSLVKAGLCRRVLVQVSYAIGVAEPLSISIFTYGTSQKTERELLDVVHKNFDLRPGVIVRDLDLKKPIYQKTACYGHFGRSEFPWEVPRKLVF

SEQ ID NO: 50755 - protein, 145 aa, Homo sapiens
  Payload ID: 10142
  Gene Symbol: MAT1A
  Gene Name: methionine adenosyltransferase I, alpha
  ENSP ID: ENSP00000414961
ESVGEGHPDKICDQISDAVLDAHLKQDPNAKVACGFDFKTCNVLVALEQQSPDIAQCVHLDRNEEDVGAGDQGLMFGYATDETEECMPLTIILAHKLNARMADLRRSGLLPWLRPDSKTQVTVQYMQDNGAVIPVRIHTIVISVQ

SEQ ID NO: 50756 - protein, 395 aa, Homo sapiens
  Payload ID: 10143
  Gene Symbol: MAT2A
  Gene Name: methionine adenosyltransferase II, alpha
  Uniprot ID: P31153
  ENSP ID: ENSP00000303147
MNGQLNGFHEAFIEEGTFLFTSESVGEGHPDKICDQISDAVLDAHLQQDPDAKVACETVAKTGMILLAGEITSRAAVDYQKVVREAVKHIGYDDSSKGFDYKTCNVLVALEQQSPDIAQGVHLDRNEEDIGAGDQGLMFGYATDETEECMPLTIVLAHKLNAKLAELRRNGTLPWLRPDSKTQVTVQYMQDRGAVLPIRVHTIVISVQHDEEVCLDEMRDALKEKVIKAVVPAKYLDEDTIYHLQPSGRFVIGGPQGDAGLTGRKIIVDTYGGWGAHGGGAFSGKDYTKVDRSAAYAARWVAKSLVKGGLCRRVLVQVSYAIGVSHPLSISIFHYGTSQKSERELLEIVKKNFDLRPGVIVRDLDLKKPIYQRTAAYGHFGRDSFPWEVPKKLKY

SEQ ID NO: 50757 - protein, 299 aa, Homo sapiens
  Payload ID: 10143
  Gene Symbol: MAT2A
  Gene Name: methionine adenosyltransferase II, alpha
  Uniprot ID: P31153
  ENSP ID: ENSP00000386353
MILLAGEITSRAAVDYQKVVREAVKHIGYDDSSKGFDYKTCNVLVALEQQSPDIAQGVHLDRNEEDIGAGDQGLMFGYATDETEECMPLTIVLAHKLNAKLAELRRNGTLPWLRPDSKTQVTVQYMQDRGAVLPIRVHTIVISVQHDEEVCLDEMRDALKEKVIKAVVPAKYLDEDTIYHLQPSGRFVIGGPQGDAGLTGRKIIVDTYGGWGAHGGGAFSGKDYTKVDRSAAYAARWVAKSLVKGGLCRRVLVQVSYAIGVSHPLSISIFHYGTSQKSERELLEIVKKNFDLRPGVIVR

SEQ ID NO: 50758 - protein, 323 aa, Homo sapiens
  Payload ID: 10144
  Gene Symbol: MAT2B
  Gene Name: methionine adenosyltransferase II, beta
  Uniprot ID: Q9NZL9
  ENSP ID: ENSP00000280969
MPEMPEDMEQEEVNIPNRRVLVTGATGLLGRAVHKEFQQNNWHAVGCGFRRARPKFEQVNLLDSNAVHHIIHDFQPHVIVHCAAERRPDVVENQPDAASQLNVDASGNLAKEAAAVGAFLIYISSDYVFDGTNPPYREEDIPAPLNLYGKTKLDGEKAVLENNLGAAVLRIPILYGEVEKLEESAVTVMFDKVQFSNKSANMDHWQQRFPTHVKDVATVCRQLAEKRMLDPSIKGTFHWSGNEQMTKYEMACAIADAFNLPSSHLRPITDSPVLGAQRPRNAQLDCSKLETLGIGQRTPFRIGIKESLWPFLIDKRWRQTVFH

SEQ ID NO: 50759 - protein, 334 aa, Homo sapiens
  Payload ID: 10144
  Gene Symbol: MAT2B
  Gene Name: methionine adenosyltransferase II, beta
  Uniprot ID: Q9NZL9
  ENSP ID: ENSP00000325425
MVGREKELSIHFVPGSCRLVEEEVNIPNRRVLVTGATGLLGRAVHKEFQQNNWHAVGCGFRRARPKFEQVNLLDSNAVHHIIHDFQPHVIVHCAAERRPDVVENQPDAASQLNVDASGNLAKEAAAVGAFLIYISSDYVFDGTNPPYREEDIPAPLNLYGKTKLDGEKAVLENNLGAAVLRIPILYGEVEKLEESAVTVMFDKVQFSNKSANMDHWQQRFPTHVKDVATVCRQLAEKRMLDPSIKGTFHWSGNEQMTKYEMACAIADAFNLPSSHLRPITDSPVLGAQRPRNAQLDCSKLETLGIGQRTPFRIGIKESLWPFLIDKRWRQTVFH

SEQ ID NO: 50760 - protein, 198 aa, Homo sapiens
  Payload ID: 10144
  Gene Symbol: MAT2B
  Gene Name: methionine adenosyltransferase II, beta
  ENSP ID: ENSP00000397371
MVGREKELSIHFVPGSCRLVEPHVIVHCAAERRPDVVENQPDAASQLNVDASGNLAKEAAAVGAFLIYISSDYVFDGTNPPYREEDIPAPLNLYGKTKLDGEKAVLENNLGAAVLRIPILYGEVEKLEESAVTVMFDKVQFSNKSANMDHWQQRFPTHVKDVATVCRQLAEKRMLDPSIKGTFHWSGNEQMTKYEMAC

SEQ ID NO: 50761 - protein, 259 aa, Homo sapiens
  Payload ID: 10144
  Gene Symbol: MAT2B
  Gene Name: methionine adenosyltransferase II, beta
  Uniprot ID: Q9NZL9
  ENSP ID: ENSP00000428046
MVGREKELSIHFVPGSCRLVEEEVNIPNRRVLVTGATGLLGRAVHKEFQQNNWHAVGCGFRRARPKFEQVNLLDSNAVHHIIHDFQPHVIVHCAAERRPDVVENQPDAASQLNVDASGNLAKEAAAVGAFLIYISSDYVFDGTNPPYREEDIPAPLNLYGKTKLDGEKAVLENNLGAAVLRIPILYGEVEKLEESAVTVMFDKVQFSNKSANMDHWQQRFPTHVKDVATVCRQLAEKRMLVRRIPESCLSEGPLCLFHA

SEQ ID NO: 50762 - protein, 117 aa, Homo sapiens
  Payload ID: 10144
  Gene Symbol: MAT2B
  Gene Name: methionine adenosyltransferase II, beta
  ENSP ID: ENSP00000431071
MVGREKELSIHFVPGSCRLVEEEVNIPNRRVLVTGATGLLGRAVHKEFQQNNWHAVGCGFRRARPKFEQVNLLDSNAVHHIIHDFQLLLEHFSSTLAQIMYLMEQIHLTERKTYQLP

SEQ ID NO: 50763 - protein, 235 aa, Homo sapiens
  Payload ID: 10145
  Gene Symbol: MSRA
  Gene Name: methionine sulfoxide reductase A
  Uniprot ID: Q9UJ68
  ENSP ID: ENSP00000313921
MLSATRRACQLLLLHSLFPVPRMGNSASNIVSPQEALPGRKEQTPVAAKHHVNGNRTVEPFPEGTQMAVFGMGCFWGAERKFWVLKGVYSTQVGFAGGYTSNPTYKEVCSEKTGHAEVVRVVYQPEHMSFEELLKVFWENHDPTQGMRQGNDHGTQYRSAIYPTSAKQMEAALSSKENYQKVLSEHGFGPITTDIREGQTFYYAEDYHQQYLSKNPNGYCGLGGTGVSCPVGIKK

SEQ ID NO: 50764 - protein, 192 aa, Homo sapiens
  Payload ID: 10145
  Gene Symbol: MSRA
  Gene Name: methionine sulfoxide reductase A
  Uniprot ID: Q9UJ68
  ENSP ID: ENSP00000371930
MCSEPKHHVNGNRTVEPFPEGTQMAVFGMGCFWGAERKFWVLKGVYSTQVGFAGGYTSNPTYKEVCSEKTGHAEVVRVVYQPEHMSFEELLKVFWENHDPTQGMRQGNDHGTQYRSAIYPTSAKQMEAALSSKENYQKVLSEHGFGPITTDIREGQTFYYAEDYHQQYLSKNPNGYCGLGGTGVSCPVGIKK

SEQ ID NO: 50765 - protein, 195 aa, Homo sapiens
  Payload ID: 10145
  Gene Symbol: MSRA
  Gene Name: methionine sulfoxide reductase A
  Uniprot ID: Q9UJ68
  ENSP ID: ENSP00000410912
MLSATRRACQLLLLHSLFPVPRMGNSASNIVSPQEALPGRKEQTPVAAKHHVNGNRTVEPFPEGTQMAVFEKTGHAEVVRVVYQPEHMSFEELLKVFWENHDPTQGMRQGNDHGTQYRSAIYPTSAKQMEAALSSKENYQKVLSEHGFGPITTDIREGQTFYYAEDYHQQYLSKNPNGYCGLGGTGVSCPVGIKK

SEQ ID NO: 50766 - protein, 91 aa, Homo sapiens
  Payload ID: 10145
  Gene Symbol: MSRA
  Gene Name: methionine sulfoxide reductase A
  ENSP ID: ENSP00000427725
  MOD_RES (1)..(1): Any amino acid
XKTGHAEVVRVVYQPEHMSFEELLKVFWENHDPTQGMRQGNDHGTQYRSAIYPTSAKQMEAALSSKENYQKVPKHVHWKKRTQTGLQTEGR

SEQ ID NO: 50767 - protein, 82 aa, Homo sapiens
  Payload ID: 10145
  Gene Symbol: MSRA
  Gene Name: methionine sulfoxide reductase A
  ENSP ID: ENSP00000428214
MAVFGMGCFWGAERKFWVLKGVYSTQVGFAGGYTSNPTYKEVCSEKTGHAEVVRVVYQPEHMSFEELLKVFWENHDPTQGMR

SEQ ID NO: 50768 - protein, 213 aa, Homo sapiens
  Payload ID: 10145
  Gene Symbol: MSRA
  Gene Name: methionine sulfoxide reductase A
  ENSP ID: ENSP00000429461
MLSATRRACQLLLLHSLFPVPRMGNSASNIVSPQEALPGRKEQTPVAAKHHVNGNRTVEPFPEGTQMAVFGMGCFWGAERKFWVLKGVYSTQVGFAGGYTSNPTYKEVCSEKTGHAEVVRVVYQPEHMSFEELLKVFWENHDPTQGMRQGNDHGTQYRSAIYPTSAKQMEAALSSKENYQKLVLPCSSSAMLGLTAASSAQLAWVQPSSRKHY

SEQ ID NO: 50769 - protein, 59 aa, Homo sapiens
  Payload ID: 10145
  Gene Symbol: MSRA
  Gene Name: methionine sulfoxide reductase A
  ENSP ID: ENSP00000435644
MAVFGMGCFWGAERKFWVLKGVYSTQVGFAGGYTSNPTYKEVCSDVQNNSMFISLFKSF

SEQ ID NO: 50770 - protein, 169 aa, Homo sapiens
  Payload ID: 10145
  Gene Symbol: MSRA
  Gene Name: methionine sulfoxide reductase A
  Uniprot ID: Q9UJ68
  ENSP ID: ENSP00000436839
MAVFGMGCFWGAERKFWVLKGVYSTQVGFAGGYTSNPTYKEVCSEKTGHAEVVRVVYQPEHMSFEELLKVFWENHDPTQGMRQGNDHGTQYRSAIYPTSAKQMEAALSSKENYQKVLSEHGFGPITTDIREGQTFYYAEDYHQQYLSKNPNGYCGLGGTGVSCPVGIKK

SEQ ID NO: 50771 - protein, 116 aa, Homo sapiens
  Payload ID: 10146
  Gene Symbol: MSRB1
  Gene Name: methionine sulfoxide reductase B1
  Uniprot ID: Q9NZV6
  ENSP ID: ENSP00000355084
  MOD_RES (95)..(95): Selenocysteine
MSFCSFFGGEVFQNHFEPGVYVCAKCGYELFSSRSKYAHSSPWPAFTETIHADSVAKRPEHNRSEALKVSCGKCGNGLGHEFLNDGPKPGQSRFXIFSSSLKFVPKGKETSASQGH

SEQ ID NO: 50772 - protein, 226 aa, Homo sapiens
  Payload ID: 10146
  Gene Symbol: MSRB1
  Gene Name: methionine sulfoxide reductase B1
  ENSP ID: ENSP00000382657
MSFCSFFGGEVFQNHFEPGVYVCAKCGYELFSSRSKYAHSSPWPAFTETIHADSVAKRPEHNRSEALKVRGHRGGGGTGAARESREPVPPSSLCLPHSSRGLEASIPGLLPLPGSCHPRLSGEPGLLVQMWETGQVSCTGSRTKVNLLCRRSAWEIGVWEETPSASPSKGLHCGCIMARSSPSCLVIFPGVLWQVWQWVGPRVPERRPQAGAVPILNIQQLAEVCP

SEQ ID NO: 50773 - protein, 151 aa, Homo sapiens
  Payload ID: 10146
  Gene Symbol: MSRB1
  Gene Name: methionine sulfoxide reductase B1
  ENSP ID: ENSP00000456557
MSFCSFFGGEVFQNHFEPGVYVCAKCGYELFSSRSKYAHSSPWPAFTETIHADSVAKRPEHNRSEALKLQGLRGVYSRPVASARELPPQAIGRAWPSGANVGNRTGFLYGLQDKGVLWQVWQWVGPRVPERRPQAGAVPILNIQQLAEVCP

SEQ ID NO: 50774 - protein, 56 aa, Homo sapiens
  Payload ID: 10146
  Gene Symbol: MSRB1
  Gene Name: methionine sulfoxide reductase B1
  ENSP ID: ENSP00000457320
  MOD_RES (1)..(1): Any amino acid
XSRITLNLAFTCVPSVAMSCSPAARSMHTRLHGRRSPRPFTPTAWPSVRSTIDLKP

SEQ ID NO: 50775 - protein, 115 aa, Homo sapiens
  Payload ID: 10146
  Gene Symbol: MSRB1
  Gene Name: methionine sulfoxide reductase B1
  ENSP ID: ENSP00000480943
MSFCSFFGGEVFQNHFEPGVYVCAKCGYELFSSRSKYAHSSPWPAFTETIHADSVAKRPEHNRSEALKVSCGKCGNGLGHEFLNDGPKPGQSRFIFSSSLKFVPKGKETSASQGH

SEQ ID NO: 50776 - protein, 182 aa, Homo sapiens
  Payload ID: 10147
  Gene Symbol: MSRB2
  Gene Name: methionine sulfoxide reductase B2
  Uniprot ID: Q9Y3D2
  ENSP ID: ENSP00000365693
MARLLWLLRGLTLGTAPRRAVRGQAGGGGPGTGPGLGEAGSLATCELPLAKSEWQKKLTPEQFYVTREKGTEPPFSGIYLNNKEAGMYHCVCCDSPLFSSEKKYCSGTGWPSFSEAHGTSGSDESHTGILRRLDTSLGSARTEVVCKQCEAHLGHVFPDGPGPNGQRFCINSVALKFKPRKH

SEQ ID NO: 50777 - protein, 120 aa, Homo sapiens
  Payload ID: 10147
  Gene Symbol: MSRB2
  Gene Name: methionine sulfoxide reductase B2
  ENSP ID: ENSP00000434990
  MOD_RES (1)..(1): Any amino acid
XSLATCELPLAKSEWQKKLTPEQFYVTREKGTEPPFSGIYLNNKEAGMYHCVCCDSPLFRSLLDIQKEVFSIKGSRSPSTSRGNGFDSEVLRKSTALALGGLRFPRLMVRLALMKATQGS

SEQ ID NO: 50778 - protein, 185 aa, Homo sapiens
  Payload ID: 10148
  Gene Symbol: MSRB3
  Gene Name: methionine sulfoxide reductase B3
  Uniprot ID: Q8IXL7
  ENSP ID: ENSP00000312274
MSAFNLLHLVTKSQPVALRACGLPSGSCRDKKNCKVVFSQQELRKRLTPLQYHVTQEKGTESAFEGEYTHHKDPGIYKCVVCGTPLFKSETKFDSGSGWPSFHDVINSEAITFTDDFSYGMHRVETSCSQCGAHLGHIFDDGPRPTGKRYCINSAALSFTPADSSGTAEGGSGVASPAQADKAEL

SEQ ID NO: 50779 - protein, 192 aa, Homo sapiens
  Payload ID: 10148
  Gene Symbol: MSRB3
  Gene Name: methionine sulfoxide reductase B3
  Uniprot ID: Q8IXL7
  ENSP ID: ENSP00000347324
MSPRRTLPRPLSLCLSLCLCLCLAAALGSAQSGSCRDKKNCKVVFSQQELRKRLTPLQYHVTQEKGTESAFEGEYTHHKDPGIYKCVVCGTPLFKSETKFDSGSGWPSFHDVINSEAITFTDDFSYGMHRVETSCSQCGAHLGHIFDDGPRPTGKRYCINSAALSFTPADSSGTAEGGSGVASPAQADKAEL

SEQ ID NO: 50780 - protein, 117 aa, Homo sapiens
  Payload ID: 10148
  Gene Symbol: MSRB3
  Gene Name: methionine sulfoxide reductase B3
  ENSP ID: ENSP00000404903
  MOD_RES (1)..(1): Any amino acid
XLRKRLTPLQYHVTQEKGTESAFEGEYTHHKDPGIYKCVVCGTPLFKSETKFDSGSGWPSFHDVINSEAITFTDDFSYGMHRVETSCSQQEGPHQMLPLNLGFPGLQNCEPINFYSF

SEQ ID NO: 50781 - protein, 160 aa, Homo sapiens
  Payload ID: 10148
  Gene Symbol: MSRB3
  Gene Name: methionine sulfoxide reductase B3
  ENSP ID: ENSP00000437623
MSPRRTLPRPLSLCLSLCLCLCLAAALGSAQSGSCRDKKNCKVVFSQQELRKRLTPLQYHVTQEKGTESAFEGEYTHHKDPGIYKCVVCGTPLFKSETKFDSGSGWPSFHDVINSEAITFTDDFSYGMHRVETSCSQVSSSFLKTQYIAFRTPGCAKYSN

SEQ ID NO: 50782 - protein, 174 aa, Homo sapiens
  Payload ID: 10148
  Gene Symbol: MSRB3
  Gene Name: methionine sulfoxide reductase B3
  ENSP ID: ENSP00000440722
  MOD_RES (1)..(1): Any amino acid
XRRRLPGLSMSPRRTLPRPLSLCLSLCLCLCLAAALGSAQSGSCRDKKNCKVVFSQQELRKRLTPLQYHVTQEKGTESAFEGEYTHHKDPGIYKCVVCGTPLFKSETKFDSGSGWPSFHDVINSEAITFTDDFSYGMHRVETSCSQQEGPHQMLPLNLGFPGLQNCEPINFYSF

SEQ ID NO: 50783 - protein, 185 aa, Homo sapiens; identical to SEQ ID NO: 50778
  Payload ID: 10148
  Gene Symbol: MSRB3
  Gene Name: methionine sulfoxide reductase B3
  Uniprot ID: Q8IXL7
  ENSP ID: ENSP00000441650

SEQ ID NO: 50784 - protein, 117 aa, Homo sapiens
  Payload ID: 10148
  Gene Symbol: MSRB3
  Gene Name: methionine sulfoxide reductase B3
  ENSP ID: ENSP00000442620
MSAFNLLHLVTKSQPVALRACGLPSGSCRDKKNCKVVFSQQELRKRLTPLQYHVTQEKGTESAFEGEYTHHKDPGIYKCVVCGTPLFKSETKFDSGSGWPSFHDVINSEAITFTDDF

SEQ ID NO: 50785 - protein, 44 aa, Homo sapiens
  Payload ID: 10148
  Gene Symbol: MSRB3
  Gene Name: methionine sulfoxide reductase B3
  ENSP ID: ENSP00000445051
MSPRRTLPRPLSLCLSLCLCLCLAAALGSAQSALAPVLCFSFCW

SEQ ID NO: 50786 - protein, 164 aa, Homo sapiens
  Payload ID: 10148
  Gene Symbol: MSRB3
  Gene Name: methionine sulfoxide reductase B3
  ENSP ID: ENSP00000445843
MSAFNLLHLVTKSQPVALRACGLPSGSCRDKKNCKVVFSQQELRKRLTPLQYHVTQEKGTESAFEGEYTHHKDPGIYKCVVCGTPLFKSETKFDSGSGWPSFHDVINSEAITFTDDFSYGMHRVETSCSQCGAHLGHIFDDGPRPTGKRYCINSAALSFTPADS

SEQ ID NO: 50787 - protein, 185 aa, Homo sapiens; identical to SEQ ID NO: 50778
  Payload ID: 10148
  Gene Symbol: MSRB3
  Gene Name: methionine sulfoxide reductase B3
  Uniprot ID: Q8IXL7
  ENSP ID: ENSP00000481483

SEQ ID NO: 50788 - protein, 386 aa, Homo sapiens [sequence omitted]

SEQ ID NO: 50789 - protein, 116 aa, Homo sapiens
  Payload ID: 10149
  Gene Symbol: METAP1
  Gene Name: methionyl aminopeptidase 1
  ENSP ID: ENSP00000422689
LYRNGYHGDLNETFFVGEVDDGARKLVQTTYECLMQAIDAENKAVGVMKSGHVFTIEPMICEGGWQDETWPDGWTAVTRDGKRSAQFEHTLLVTDTGCEILTRRLDSARPHFMSQF

SEQ ID NO: 50790 - protein, 170 aa, Homo sapiens
  Payload ID: 10149
  Gene Symbol: METAP1
  Gene Name: methionyl aminopeptidase 1
  ENSP ID: ENSP00000423071
ACIARNCYPSPLNYYNFPKSCCTSVNEVICHGIPDRRPLQEGDIVNVKPGVRYRELGNIIQKHAQANGFSVVRSYCGHGIHKLFHTAPNVPHYAKNKAVGVMKSGHVFTIEPMICEGGWQDETWPDGWTAVTRDGKRSAQFEHTLLVTDTGCEILTRRLDSARPHFMSQF

SEQ ID NO: 50791 - protein, 44 aa, Homo sapiens
  Payload ID: 10149
  Gene Symbol: METAP1
  Gene Name: methionyl aminopeptidase 1
  ENSP ID: ENSP00000424462
ETRVCETDGCSSEAKLQCPTCIKLGIQGSYFCSQQRGRNQRLLF

SEQ ID NO: 50792 - protein, 48 aa, Homo sapiens
  Payload ID: 10149
  Gene Symbol: METAP1
  Gene Name: methionyl aminopeptidase 1
  ENSP ID: ENSP00000426702
MAAVETRVCETDGCSSEAKLQCPTCIKLGIQGSYFCSQQRGRNQRLLF

SEQ ID NO: 50793 - protein, 38 aa, Homo sapiens
  Payload ID: 10149
  Gene Symbol: METAP1
  Gene Name: methionyl aminopeptidase 1
  ENSP ID: ENSP00000427187
  MOD_RES (1)..(1): Any amino acid
XKLGIQGSYFCSQECFKGSWATHKLLHKKAKRRCYVMS

SEQ ID NO: 50794 - protein, 48 aa, Homo sapiens; identical to SEQ ID NO: 50792
  Payload ID: 10149
  Gene Symbol: METAP1
  Gene Name: methionyl aminopeptidase 1
  ENSP ID: ENSP00000427563

SEQ ID NO: 50795 - protein, 48 aa, Homo sapiens; identical to SEQ ID NO: 50792
  Payload ID: 10149
  Gene Symbol: METAP1
  Gene Name: methionyl aminopeptidase 1
  ENSP ID: ENSP00000485924

SEQ ID NO: 50796 - protein, 455 aa, Homo sapiens
  Payload ID: 10150
  Gene Symbol: METAP2
  Gene Name: methionyl aminopeptidase 2
  Uniprot ID: P50579
  ENSP ID: ENSP00000261220
MAGVEEVAASGSHLNGDLDPDDREEGAASTAEEAAKKKRRKKKKSKGPSAGEQEPDKESGASVDEVARQLERSALEDKERDEDDEAKVQTDPPSVPICDLYPNGVFPKGQECEYPPTQDGRTAAWRTTSEEKKALDQASEEIWNDFREAAEAHRQVRKYVMSWIKPGMTMIEICEKLEDCSRKLIKENGLNAGLAFPTGCSLNNCAAHYTPNAGDTTVLQYDDICKIDFGTHISGRIIDCAFTVTFNPKYDTLLKAVKDATNTGIKCAGIDVRLCDVGEAIQEVMESYEVEIDGKTYQVKPIRNLNGHSIGQYRIHAGKTVPIVKGGEATRMEEGEVYAIETFGSTGKGVVHDDMECSHYMKNFDVGHVPIRLPRTKHLLNVINENFGTLAFCRRWLDRLGESKYLMALKNLCDLGIVDPYPPLCDIKGSYTAQFEHTILLRPTCKEVVSRGDDY

SEQ ID NO: 50797 - protein, 478 aa, Homo sapiens
  Payload ID: 10150
  Gene Symbol: METAP2
  Gene Name: methionyl aminopeptidase 2
  Uniprot ID: P50579
  ENSP ID: ENSP00000325312
MAGVEEVAASGSHLNGDLDPDDREEGAASTAEEAAKKKRRKKKKSKGPSAAGEQEPDKESGASVDEVARQLERSALEDKERDEDDEDGDGDGDGATGKKKKKKKKKRGPKVQTDPPSVPICDLYPNGVFPKGQECEYPPTQDGRTAAWRTTSEEKKALDQASEEIWNDFREAAEAHRQVRKYVMSWIKPGMTMIEICEKLEDCSRKLIKENGLNAGLAFPTGCSLNNCAAHYTPNAGDTTVLQYDDICKIDFGTHISGRIIDCAFTVTFNPKYDTLLKAVKDATNTGIKCAGIDVRLCDVGEAIQEVMESYEVEIDGKTYQVKPIRNLNGHSIGQYRIHAGKTVPIVKGGEATRMEEGEVYAIETFGSTGKGVVHDDMECSHYMKNFDVGHVPIRLPRTKHLLNVINENFGTLAFCRRWLDRLGESKYLMALKNLCDLGIVDPYPPLCDIKGSYTAQFEHTILLRPTCKEVVSRGDDY

SEQ ID NO: 50798 - protein, 328 aa, Homo sapiens
  Payload ID: 10150
  Gene Symbol: METAP2
  Gene Name: methionyl aminopeptidase 2
  ENSP ID: ENSP00000446052
MAGVEEVAASGSHLNGDLDPDDREEGAASTAEEAAKKKRRKKKKSKGPSAAGEQEPDKESGASVDEVARQLERSALEDKERDEDDEDGDGDGDGATGKKKKKKKKKRGPKVQTDPPSVPICDLYPNGVFPKGQECEYPPTQDGRTAAWRTTSEEKKALDQASEEIWNDFREAAEAHRQVRKYVMSWIKPGMTMIEICEKLEDCSRKLIKENGLNAGLAFPTGCSLNNCAAHYTPNAGDTTVLQYDDICKIDFGTHISGRIIDCAFTVTFNPKYDTLLKAVKDATNTGIKCAGIDVRLCDVGEAIQEVMESYEVEIDGKTYQGRRSICN

SEQ ID NO: 50799 - protein, 163 aa, Homo sapiens
  Payload ID: 10150
  Gene Symbol: METAP2
  Gene Name: methionyl aminopeptidase 2
  ENSP ID: ENSP00000447661
MCGFCVGLISAKVQTDPPSVPICDLYPNGVFPKGQECEYPPTQDGRTAAWRTTSEEKKALDQASEEIWNDFREAAEAHRQVRKYVMSWIKPGMTMIEICEKLEDCSRKLIKENGLNAGLAFPTGCSLNNCAAHYTPNAGDTTVLQYDDICKIDFGTHISGKFL

SEQ ID NO: 50800 - protein, 455 aa, Homo sapiens
  Payload ID: 10150
  Gene Symbol: METAP2
  Gene Name: methionyl aminopeptidase 2
  Uniprot ID: P50579
  ENSP ID: ENSP00000448169
MAGVEEVAASGSHLNGDLDPDDREEGAASTAEEAAKKKRRKKKKSKGPSAAGEQEPDKESGASVDEVARQLERSALEDKERDEDDEDGDGDGDGATGKKKKKKKKKRGRQECEYPPTQDGRTAAWRTTSEEKKALDQASEEIWNDFREAAEAHRQVRKYVMSWIKPGMTMIEICEKLEDCSRKLIKENGLNAGLAFPTGCSLNNCAAHYTPNAGDTTVLQYDDICKIDFGTHISGRIIDCAFTVTFNPKYDTLLKAVKDATNTGIKCAGIDVRLCDVGEAIQEVMESYEVEIDGKTYQVKPIRNLNGHSIGQYRIHAGKTVPIVKGGEATRMEEGEVYAIETFGSTGKGVVHDDMECSHYMKNFDVGHVPIRLPRTKHLLNVINENFGTLAFCRRWLDRLGESKYLMALKNLCDLGIVDPYPPLCDIKGSYTAQFEHTILLRPTCKEVVSRGDDY

SEQ ID NO: 50801 - protein, 161 aa, Homo sapiens
  Payload ID: 10150
  Gene Symbol: METAP2
  Gene Name: methionyl aminopeptidase 2
  ENSP ID: ENSP00000448370
MAGVEEVAASGSHLNGDLDPDDREEGAASTAEEAAKKKRRKKKKSKGPSAAGEQEPDKESGASVDEVARQLERSALEDKERDEDDEGYKISLPSPRLTCCGSISAHCSLDFPGSDGDGDGDGATGKKKKKKKKKRGPKVQTDPPSVPICDLYPNGVFPKGQ

SEQ ID NO: 50802 - protein, 442 aa, Homo sapiens
  Payload ID: 10150
  Gene Symbol: METAP2
  Gene Name: methionyl aminopeptidase 2
  ENSP ID: ENSP00000448614
MAGVEEVAASGSHLNGDLDPDDREEGAASTAEEAAKKKRRKKKKSKGPSADGDGDGDGATGKKKKKKKKKRGPKVQTDPPSVPICDLYPNGVFPKGQECEYPPTQDGRTAAWRTTSEEKKALDQASEEIWNDFREAAEAHRQVRKYVMSWIKPGMTMIEICEKLEDCSRKLIKENGLNAGLAFPTGCSLNNCAAHYTPNAGDTTVLQYDDICKIDFGTHISGRIIDCAFTVTFNPKYDTLLKAVKDATNTGIKCAGIDVRLCDVGEAIQEVMESYEVEIDGKTYQVKPIRNLNGHSIGQYRIHAGKTVPIVKGGEATRMEEGEVYAIETFGSTGKGVVHDDMECSHYMKNFDVGHVPIRLPRTKHLLNVINENFGTLAFCRRWLDRLGESKYLMALKNLCDLGIVDPYPPLCDIKGSYTAQFEHTILLRPTCKEVVSRGDDY

SEQ ID NO: 50803 - protein, 178 aa, Homo sapiens
  Payload ID: 10150
  Gene Symbol: METAP2
  Gene Name: methionyl aminopeptidase 2
  ENSP ID: ENSP00000449004
MAGVEEVAASGSHLNGDLDPDDREEGAASTAEEAAKKKRRKKKKSKGPSAALEDKERDEDDEDGDGDGDGATGKKKKKKKKKRGPKVQTDPPSVPICDLYPNGVFPKGQECEYPPTQDGRTAAWRTTSEEKKALDQASEEIWNDFREAAEAHRQVRKYVMSWIKPGMTMIEICEKLED

SEQ ID NO: 50804 - protein, 477 aa, Homo sapiens
  Payload ID: 10150
  Gene Symbol: METAP2
  Gene Name: methionyl aminopeptidase 2
  ENSP ID: ENSP00000450063
MAGVEEVAASGSHLNGDLDPDDREEGAASTAEEAAKKKRRKKKKSKGPSAGEQEPDKESGASVDEVARQLERSALEDKERDEDDEDGDGDGDGATGKKKKKKKKKRGPKVQTDPPSVPICDLYPNGVFPKGQECEYPPTQDGRTAAWRTTSEEKKALDQASEEIWNDFREAAEAHRQVRKYVMSWIKPGMTMIEICEKLEDCSRKLIKENGLNAGLAFPTGCSLNNCAAHYTPNAGDTTVLQYDDICKIDFGTHISGRIIDCAFTVTFNPKYDTLLKAVKDATNTGIKCAGIDVRLCDVGEAIQEVMESYEVEIDGKTYQVKPIRNLNGHSIGQYRIHAGKTVPIVKGGEATRMEEGEVYAIETFGSTGKGVVHDDMECSHYMKNFDVGHVPIRLPRTKHLLNVINENFGTLAFCRRWLDRLGESKYLMALKNLCDLGIVDPYPPLCDIKGSYTAQFEHTILLRPTCKEVVSRGDDY

SEQ ID NO: 50805 - protein, 335 aa, Homo sapiens
  Payload ID: 10151
  Gene Symbol: METAP1D
  Gene Name: methionyl aminopeptidase type 1D (mitochondrial)
  Uniprot ID: Q6UB28
  ENSP ID: ENSP00000315152
MAAPSGVHLLVRRGSHRIFSSPLNHIYLHKQSSSQQRRNFFFRRQRDISHSIVLPAAVSSAHPVPKHIKKPDYVTTGIVPDWGDSIEVKNEDQIQGLHQACQLARHVLLLAGKSLKVDMTTEEIDALVHREIISHNAYPSPLGYGGFPKSVCTSVNNVLCHGIPDSRPLQDGDIINIDVTVYYNGYHGDTSETFLVGNVDECGKKLVEVARRCRDEAIAACRAGAPFSVIGNTISHITHQNGFQVCPHFVGHGIGSYFHGHPEIWHHANDSDLPMEEGMAFTIEPIITEGSPEFKVLEDAWTVVSLDNQRSAQFEHTVLITSRGAQILTKLPHEA

SEQ ID NO: 50806 - protein, 900 aa, Homo sapiens
  Payload ID: 10152
  Gene Symbol: MARS
  Gene Name: methionyl-tRNA synthetase
  Uniprot ID: P56192
  ENSP ID: ENSP00000262027
MRLFVSDGVPGCLPVLAAAGRARGRAEVLISTVGPEDCVVPFLTRPKVPVLQLDSGNYLFSTSAICRYFFLLSGWEQDDLTNQWLEWEATELQPALSAALYYLVVQGKKGEDVLGSVRRALTHIDHSLSRQNCPFLAGETESLADIVLWGALYPLLQDPAYLPEELSALHSWFQTLSTQEPCQRAAETVLKQQGVLALRPYLQKQPQPSPAEGRAVTNEPEEEELATLSEEEIAMAVTAWEKGLESLPPLRPQQNPVLPVAGERNVLITSALPYVNNVPHLGNIIGCVLSADVFARYSRLRQWNTLYLCGTDEYGTATETKALEEGLTPQEICDKYHIIHADIYRWFNISFDIFGRTTTPQQTKITQDIFQQLLKRGFVLQDTVEQLRCEHCARFLADRFVEGVCPFCGYEEARGDQCDKCGKLINAVELKKPQCKVCRSCPVVQSSQHLFLDLPKLEKRLEEWLGRTLPGSDWTPNAQFITRSWLRDGLKPRCITRDLKWGTPVPLEGFEDKVFYVWFDATIGYLSITANYTDQWERWWKNPEQVDLYQFMAKDNVPFHSLVFPCSALGAEDNYTLVSHLIATEYLNYEDGKFSKSRGVGVFGDMAQDTGIPADIWRFYLLYIRPEGQDSAFSWTDLLLKNNSELLNNLGNFINRAGMFVSKFFGGYVPEMVLTPDDQRLLAHVTLELQHYHQLLEKVRIRDALRSILTISRHGNQYIQVNEPWKRIKGSEADRQRAGTVTGLAVNIAALLSVMLQPYMPTVSATIQAQLQLPPPACSILLTNFLCTLPAGHQIGTVSPLFQKLENDQIESLRQRFGGGQAKTSPKPAVVETVTTAKPQQIQALMDEVTKQGNIVRELKAQKADKNEVAAEVAKLLDLKKQLAVAEGKPPEAPKGKKKK

SEQ ID NO: 50807 - protein, 140 aa, Homo sapiens
  Payload ID: 10152
  Gene Symbol: MARS
  Gene Name: methionyl-tRNA synthetase
  ENSP ID: ENSP00000439307
MRLFVSDGVPGCLPVLAAAGRARGRAEVLISTVGPEDCVVPFLTRPKVPVLQLDSGNYLFSTSAICRYFFLLSGWEQDDLTNQWLEWEATELQPALSAALYYLVVQGKKGEDVLGSVRRALTHIDHSLSRQNCPFLAGRS

SEQ ID NO: 50808 - protein, 546 aa, Homo sapiens
  Payload ID: 10152
  Gene Symbol: MARS
  Gene Name: methionyl-tRNA synthetase
  Uniprot ID: P56192
  ENSP ID: ENSP00000446168
MRLFVSDGVPGCLPVLAAAGRARGRAEVLISTVGPEDCVVPFLTRPKVPVLQLDSGNYLFSTSAICRYFFLLSGWEQDDLTNQWLEWEATELQPALSAALYYLVVQGKKGEDVLGSVRRALTHIDHSLSRQNCPFLAGETESLADIVLWGALYPLLQDPAYLPEELSALHSWFQTLSTQEPCQRAAETVLKQQGVLALRPYLQKQPQPSPAEGRAVTNEPEEEELATLSEEEIAMAVTAWEKGLESLPPLRPQQNPVLPVAGERNVLITSALPYVNNVPHLGNIIGCVLSADVFARYSRLRQWNTLYLCGTDEYGTATETKALEEGLTPQEICDKYHIIHADIYRWFNISFDIFGRTTTPQQTKITQDIFQQLLKRGFVLQDTVEQLRCEHCARFLADRFVEGVCPFCGYEEARGDQCDKCGKLINAVELKKPQCKVCRSCPVVQSSQHLFLDLPKLEKRLEEWLGRTLPGSDWTPNAQFITRSWLRDGLKPRCITRDLKWGTPVPLEGFEDKVFYVWFDATIGYLSITANYTDQWERWWKNPEQP

SEQ ID NO: 50809 - protein, 95 aa, Homo sapiens
  Payload ID: 10152
  Gene Symbol: MARS
  Gene Name: methionyl-tRNA synthetase
  ENSP ID: ENSP00000446729
MRLFVSDGVPGCLPVLAAAGRARGRAEVLISTVGPEDCVVPFLTRPKVPVLQLDSGNYLFSTSAICRYFFLLSGWEQDDLTNQWLEWEATELQRS

SEQ ID NO: 50810 - protein, 110 aa, Homo sapiens
  Payload ID: 10152
  Gene Symbol: MARS
  Gene Name: methionyl-tRNA synthetase
  ENSP ID: ENSP00000447145
MRLFVSDGVPGCLPVLAAAGRARGRAEVLISTVGPEDCVVPFLTRPKVPVLQLDSGNYLFSTSAICRYFFLLSGWEQDDLTNQWLEWEATELQWSKARRGKMFLVQCGEP

SEQ ID NO: 50811 - protein, 114 aa, Homo sapiens
  Payload ID: 10152
  Gene Symbol: MARS
  Gene Name: methionyl-tRNA synthetase
  ENSP ID: ENSP00000447258
MRLFVSDGVPGCLPVLAAAGRARGRAEVLISTVGPEDCVVPFLTRPKVPVLQLDSGNYLFSTSAICRGAECPAQLVPDTEYPGTMSASCRDCTETARCPGSPALPPKAAPAQPR

SEQ ID NO: 50812 - protein, 81 aa, Homo sapiens
  Payload ID: 10152
  Gene Symbol: MARS
  Gene Name: methionyl-tRNA synthetase
  ENSP ID: ENSP00000447335
VNIAALLSVMLQPYMPTVSATIQAQLQLPPPACSILLTNFLCTLPAGHQIGTVSPLFQKLENDQIESLRQRFGGGQKRPST

SEQ ID NO: 50813 - protein, 233 aa, Homo sapiens
  Payload ID: 10152
  Gene Symbol: MARS
  Gene Name: methionyl-tRNA synthetase
  ENSP ID: ENSP00000447914
  MOD_RES (1)..(1): Any amino acid
XRQNCPFLAGETESLADIVLWGALYPLLQDPAYLPEELSALHSWFQTLSTQEPCQRAAETVLKQQGVLALRPYLQKQPQPSPAEGRAVTNEPEEEELATLSEEEIAMAVTAWEKGLESLPPLRPQQNPVYSRLRQWNTLYLCGTDEYGTATETKALEEGLTPQEICDKYHIIHADIYRWFNISFDIFGRTTTPQQTKITQDIFQQLLKRGFVLQDTVEQLRCEHCARFLADRF

SEQ ID NO: 50814 - protein, 124 aa, Homo sapiens
  Payload ID: 10152
  Gene Symbol: MARS
  Gene Name: methionyl-tRNA synthetase
  ENSP ID: ENSP00000448378
  MOD_RES (1)..(1): Any amino acid
XNIAALLSVMLQPYMPTVSATIQAQLQLPPPACSILLTNFLCTLPAGHQIGTVSPLFQKLENDQIESLRQRFGGGQVRKLKAVPSLHNSHSITSLISLSSPHPSLFPSFGPAASSLTVFLSCLN

SEQ ID NO: 50815 - protein, 71 aa, Homo sapiens
  Payload ID: 10152
  Gene Symbol: MARS
  Gene Name: methionyl-tRNA synthetase
  ENSP ID: ENSP00000448576
MRLFVSDGVPGCLPVLAAAGRARGRAEVLISTVGPEDCVVPFLTRPKVPVLQLDSGNYLFSTSAICRRQNL

SEQ ID NO: 50816 - protein, 119 aa, Homo sapiens
  Payload ID: 10152
  Gene Symbol: MARS
  Gene Name: methionyl-tRNA synthetase
  ENSP ID: ENSP00000448910
  MOD_RES (1)..(1): Any amino acid
XQRAGTVTGLAVNIAALLSVMLQPYMPTVSATIQAQLQLPPPACSILLTNFLCTLPAGHQIGTVSPLFQKLENDQIESLRQRFGGGQAKTSPKPAVVETVTTAKPQQIQALMDEVTKQV

SEQ ID NO: 50817 - protein, 58 aa, Homo sapiens
  Payload ID: 10152
  Gene Symbol: MARS
  Gene Name: methionyl-tRNA synthetase
  ENSP ID: ENSP00000449071
GFVLQDTVEQLRCEHCARFLADRFVEGVCPFCGYEEARGDQCDKCGETLGSKETVGCS

SEQ ID NO: 50818 - protein, 219 aa, Homo sapiens
  Payload ID: 10152
  Gene Symbol: MARS
  Gene Name: methionyl-tRNA synthetase
  ENSP ID: ENSP00000449787
ELLNNLGNFINRAGMFVSKFFGGYVPEMVLTPDDQRLLAHVTLELQHYHQLLEKVRIRDALRSILTISRHGNQYIQPYMPTVSATIQAQLQLPPPACSILLTNFLCTLPAGHQIGTVSPLFQKLENDQIESLRQRFGGGQAKTSPKPAVVETVTTAKPQQIQALMDEVTKQGNIVRELKAQKADKNEVAAEVAKLLDLKKQLAVAEGKPPEAPKGKKKK

SEQ ID NO: 50819 - protein, 60 aa, Homo sapiens
  Payload ID: 10152
  Gene Symbol: MARS
  Gene Name: methionyl-tRNA synthetase
  ENSP ID: ENSP00000450018
MRLFVSDGVPGCLPVLAAAGRARGRAEVLISTVGPEDCTETARCPGSPALPPKAAPAQPR

SEQ ID NO: 50820 - protein, 71 aa, Homo sapiens; identical to SEQ ID NO: 50815
  Payload ID: 10152
  Gene Symbol: MARS
  Gene Name: methionyl-tRNA synthetase
  ENSP ID: ENSP00000485951

SEQ ID NO: 50821 - protein, 60 aa, Homo sapiens; identical to SEQ ID NO: 50819
  Payload ID: 10152
  Gene Symbol: MARS
  Gene Name: methionyl-tRNA synthetase
  ENSP ID: ENSP00000486356

SEQ ID NO: 50822 - protein, 95 aa, Homo sapiens; identical to SEQ ID NO: 50809
  Payload ID: 10152
  Gene Symbol: MARS
  Gene Name: methionyl-tRNA synthetase
  ENSP ID: ENSP00000486738

SEQ ID NO: 50823 - protein, 593 aa, Homo sapiens
  Payload ID: 10153
  Gene Symbol: MARS2
  Gene Name: methionyl-tRNA synthetase 2, mitochondrial
  Uniprot ID: Q96GW9
  ENSP ID: ENSP00000282276
MLRTSVLRLLGRTGASRLSLLEDFGPRYYSSGSLSAGDDACDVRAYFTTPIFYVNAAPHIGHLYSALLADALCRHRRLRGPSTAATRFSTGTDEHGLKIQQAAATAGLAPTELCDRVSEQFQQLFQEAGISCTDFIRTTEARHRVAVQHFWGVLKSRGLLYKGVYEGWYCASDECFLPEAKVTQQPGPSGDSFPVSLESGHPVSWTKEENYIFRLSQFRKPLQRWLRGNPQAITPEPFHHVVLQWLDEELPDLSVSRRSSHLHWGIPVPGDDSQTIYVWLDALVNYLTVIGYPNAEFKSWWPATSHIIGKDILKFHAIYWPAFLLGAGMSPPQRICVHSHWTVCGQKMSKSLGNVVDPRTCLNRYTVDGFRYFLLRQGVPNWDCDYYDEKVVKLLNSELADALGGLLNRCTAKRINPSETYPAFCTTCFPSEPGLVGPSVRAQAEDYALVSAVATLPKQVADHYDNFRIYKALEAVSSCVRQTNGFVQRHAPWKLNWESPVDAPWLGTVLHVALECLRVFGTLLQPVTPSLADKLLSRLGVSASERSLGELYFLPRFYGHPCPFEGRRLGPETGLLFPRLDQSRTWLVKAHRT

SEQ ID NO: 50824 - protein, 486 aa, Homo sapiens
  Payload ID: 10154
  Gene Symbol: MECP2
  Gene Name: methyl CpG binding protein 2
  Uniprot ID: P51608
  ENSP ID: ENSP00000301948
MVAGMLGLREEKSEDQDLQGLKDKPLKFKKVKKDKKEEKEGKHEPVQPSAHHSAEPAEAGKAETSEGSGSAPAVPEASASPKQRRSIIRDRGPMYDDPTLPEGWTRKLKQRKSGRSAGKYDVYLINPQGKAFRSKVELIAYFEKVGDTSLDPNDFDFTVTGRGSPSRREQKPPKKPKSPKAPGTGRGRGRPKGSGTTRPKAATSEGVQVKRVLEKSPGKLLVKMPFQTSPGGKAEGGGATTSTQVMVIKRPGRKRKAEADPQAIPKKRGRKPGSVVAAAAAEAKKKAVKESSIRSVQETVLPIKKRKTRETVSIEVKEVVKPLLVSTLGEKSGKGLKTCKSPGRKSKESSPKGRSSSASSPPKKEHHHHHHHSESPKAPVPLLPPLPPPPPEPESSEDPTSPPEPQDLSSSVCKEEKMPRGGSLESDGCPKEPAKTQPAVATAATAAEKYKHRGEGERKDIVSSSMPRPNREEPVDSRTPVTERVS

SEQ ID NO: 50825 - protein, 37 aa, Homo sapiens
  Payload ID: 10154
  Gene Symbol: MECP2
  Gene Name: methyl CpG binding protein 2
  ENSP ID: ENSP00000358973
MVAGMLGLSCKMGFRSVLKPVVPGPRREKQLPGEVSS

SEQ ID NO: 50826 - protein, 184 aa, Homo sapiens
  Payload ID: 10154
  Gene Symbol: MECP2
  Gene Name: methyl CpG binding protein 2
  ENSP ID: ENSP00000384865
MAAAAAAAPSGGGGGGEEERLEEKSEDQDLQGLKDKPLKFKKVKKDKKEEKEGKHEPVQPSAHHSAEPAEAGKAETSEGSGSAPAVPEASASPKQRRSIIRDRGPMYDDPTLPEGWTRKLKQRKSGRSAGKYDVYLINPQGKAFRSKVELIAYFEKLQELAEAGDAPKGAAPRDPRRPRQRVCR

SEQ ID NO: 50827 - protein, 498 aa, Homo sapiens [sequence omitted]

SEQ ID NO: 50828 - protein, 49 aa, Homo sapiens
  Payload ID: 10154
  Gene Symbol: MECP2
  Gene Name: methyl CpG binding protein 2
  ENSP ID: ENSP00000416267
MVAGMLGLREEKSEDQDLQGLKDKPLKFKKVKKDKKEEKEGKHEPVQPS

SEQ ID NO: 50829 - protein, 168 aa, Homo sapiens
  Payload ID: 10154
  Gene Symbol: MECP2
  Gene Name: methyl CpG binding protein 2
  ENSP ID: ENSP00000479736
MLGLREEKSEDQDLQGLKDKPLKFKKVKKDKKEEKEGKHEPVQPSAHHSAEPAEAGKAETSEGSGSAPAVPEASASPKQRRSIIRDRGPMYDDPTLPEGWTRKLKQRKSGRSAGKYDVYLINPQGKAFRSKVELIAYFEKVGDTSLDPNDFDFTVTGREPLPARAETT

SEQ ID NO: 50830 - protein, 509 aa, Homo sapiens
  Payload ID: 10154
  Gene Symbol: MECP2
  Gene Name: methyl CpG binding protein 2
  ENSP ID: ENSP00000480973
MVAGMLGLREEKSEDQDLQGLKDKPLKFKKVKKDKKEEKEGKHEPVQPSAHHSAEPAEAGKAETSEGSGSAPAVPEASASPKQRRSIIRDRGPMYDDPTLPEGWTRKLKQRKSGRSAGKYDVYLINPQGKAFRSKVELIAYFEKVGDTSLDPNDFDFTVTGRGSPSRREQKPPKKPKSPKAPGTGRGRGRPKGSGTTRPKAATSEGVQVKRVLEKSPGKLLVKMPFQTSPGGKAEGGGATTSTQVMVIKRPGRKRKAEADPQAIPKKRGRKPGSVVAAAAAEAKKKAVKESSIRSVQETVLPIKKRKTRETVSIEVKEVVKPLLVSTLGEKSGKGLKTCKSPGRKSKESSPKGRSSSASSPPKKEHHHHHHHSESPKAPVPLLPPLPPPPPEPESSEDPTSPPEPQDLSSSVCKEEKMPRGGSLESDGCPKEPAKTQPAVATAATAAEKYKHRGEGERKDIVSSSMPRPNREEPVDSRTPVTELADFTRSGLQSKPTRIKAAVVSSPYG

SEQ ID NO: 50831 - protein, 324 aa, Homo sapiens
  Payload ID: 10154
  Gene Symbol: MECP2
  Gene Name: methyl CpG binding protein 2
  ENSP ID: ENSP00000484470
MLGLREEKSEDQDLQGLKDKPLKFKKVKKDKKEEKEGKHEPVQPSAHHSAEPAEAGKAETSEGSGSAPAVPEASASPKQRRSIIRDRGPMYDDPTLPEGWTRKLKQRKSGRSAGKYDVYLINPQGKAFRSKVELIAYFEKVGDTSLDPNDFDFTVTGRGSPSRREQKPPKKPKSPKAPGTGRGRGRPKGSGTTRPKAATSEGVQVKRVLEKSPGKLLVKMPFQTSPGGKAEGGGATTSTQVMVIKRPGRKRKAEADPQAIPKKRGRKPGSVVAAAAAEAKKKAVKEFYPICAGDRTPHQEAQDPGDGQHRGQGSGEAPAGVHPR

SEQ ID NO: 50832 - protein, 41 aa, Homo sapiens
  Payload ID: 10154
  Gene Symbol: MECP2
  Gene Name: methyl CpG binding protein 2
  ENSP ID: ENSP00000486089
MVAGMLGLREEKSEDQDLQGLKDKPLKFKKVKKDKKEEKEG

SEQ ID NO: 50833 - protein, 172 aa, Homo sapiens
  Payload ID: 10154
  Gene Symbol: MECP2
  Gene Name: methyl CpG binding protein 2
  ENSP ID: ENSP00000486978
MVAGMLGLREEKSEDQDLQGLKDKPLKFKKVKKDKKEEKEGKHEPVQPSAHHSAEPAEAGKAETSEGSGSAPAVPEASASPKQRRSIIRDRGPMYDDPTLPEGWTRKLKQRKSGRSAGKYDVYLINPQGKAFRSKVELIAYFEKLQELAEAGDAPKGAAPRDPRRPRQRVCR

SEQ ID NO: 50834 - protein, 580 aa, Homo sapiens
  Payload ID: 10155
  Gene Symbol: MBD4
  Gene Name: methyl-CpG binding domain 4 DNA glycosylase
  Uniprot ID: O95243
  ENSP ID: ENSP00000249910
MGTTGLESLSLGDRGAAPTVTSSERLVPDPPNDLRKEDVAMELERVGEDEEQMMIKRSSECNPLLQEPIASAQFGATAGTECRKSVPCGWERVVKQRLFGKTAGRFDVYFISPQGLKFRSKSSLANYLHKNGETSLKPEDFDFTVLSKRGIKSRYKDCSMAALTSHLQNQSNNSNWNLRTRSKCKKDVFMPPSSSSELQESRGLSNFTSTHLLLKEDEGVDDVNFRKVRKPKGKVTILKGIPIKKTKKGCRKSCSGFVQSDSKRESVCNKADAESEPVAQKSQLDRTVCISDAGACGETLSVTSEENSLVKKKERSLSSGSNFCSEQKTSGIINKFCSAKDSEHNEKYEDTFLESEEIGTKVEVVERKEHLHTDILKRGSEMDNNCSPTRKDFTGEKIFQEDTIPRTQIERRKTSLYFSSKYNKEALSPPRRKAFKKWTPPRSPFNLVQETLFHDPWKLLIATIFLNRTSGKMAIPVLWKFLEKYPSAEVARTADWRDVSELLKPLGLYDLRAKTIVKFSDEYLTKQWKYPIELHGIGKYGNDSYRIFCVNEWKQVHPEDHKLNKYHDWLWENHEKLSLS

SEQ ID NO: 50835 - protein, 262 aa, Homo sapiens
  Payload ID: 10155
  Gene Symbol: MBD4
  Gene Name: methyl-CpG binding domain 4 DNA glycosylase
  Uniprot ID: O95243
  ENSP ID: ENSP00000376959
MGTTGLESLSLGDRGAAPTVTSSERLVPDPPNDLRKEDVAMELERVGEDEEQMMIKRSSECNPLLQEPIASAQFGATAGTECQDTIPRTQIERRKTSLYFSSKYNKEALSPPRRKAFKKWTPPRSPFNLVQETLFHDPWKLLIATIFLNRTSGKMAIPVLWKFLEKYPSAEVARTADWRDVSELLKPLGLYDLRAKTIVKFSDEYLTKQWKYPIELHGIGKYGNDSYRIFCVNEWKQVHPEDHKLNKYHDWLWENHEKLSLS

SEQ ID NO: 50836 - protein, 574 aa, Homo sapiens
  Payload ID: 10155
  Gene Symbol: MBD4
  Gene Name: methyl-CpG binding domain 4 DNA glycosylase
  Uniprot ID: O95243
  ENSP ID: ENSP00000394080
MGTTGLESLSLGDRGAAPTVTSSERLVPDPPNDLRKEDVAMELERVGEDEEQMMIKRSSECNPLLQEPIASAQFGATAGTECRKSVPCGWERVVKQRLFGKTAGRFDVYFISPQGLKFRSKSSLANYLHKNGETSLKPEDFDFTVLSKRGIKSRYKDCSMAALTSHLQNQSNNSNWNLRTRSKCKKDVFMPPSSSSELQESRGLSNFTSTHLLLKEDEGVDDVNFRKVRKPKGKVTILKGIPIKKTKKGCRKSCSGFVQSDSKRESVCNKADAESEPVAQKSQLDRTVCISDAGACGETLSVTSEENSLVKKKERSLSSGSNFCSEQKTSGIINKFCSAKDSEHNEKYEDTFLESEEIGTKVEVVERKEHLHTDILKRGSEMDNNCSPTRKDFTEDTIPRTQIERRKTSLYFSSKYNKEALSPPRRKAFKKWTPPRSPFNLVQETLFHDPWKLLIATIFLNRTSGKMAIPVLWKFLEKYPSAEVARTADWRDVSELLKPLGLYDLRAKTIVKFSDEYLTKQWKYPIELHGIGKYGNDSYRIFCVNEWKQVHPEDHKLNKYHDWLWENHEKLSLS

SEQ ID NO: 50837 - protein, 572 aa, Homo sapiens
  Payload ID: 10155
  Gene Symbol: MBD4
  Gene Name: methyl-CpG binding domain 4 DNA glycosylase
  Uniprot ID: O95243
  ENSP ID: ENSP00000422327
MGTTGLESLSLGDRGAAPTVTSSERLVPDPPNDLRKEDVAMELERVGEDEEQMMIKRSSECNPLLQEPIASAQFGATAGTECRKSVPCGWERVVKQRLFGKTAGRFDVYFISPQGLKFRSKSSLANYLHKNGETSLKPEDFDFTVLSKRGIKSRYKDCSMAALTSHLQNQSNNSNWNLRTRSKCKKDVFMPPSSSSELQESRGLSNFTSTHLLLKEDEGVDDVNFRKVRKPKGKVTILKGIPIKKTKKGCRKSCSGFVQSDSKRESVCNKADAESEPVAQKSQLDRTVCISDAGACGETLSVTSEENSLVKKKERSLSSGSNFCSEQKTSGIINKFCSAKDSEHNEKYEDTFLESEEIGTKVEVVERKEHLHTDILKRGSEMDNNCSPTRKDFTGEKIFQEDTIPRTQIERRKTSLYFSSKYNKEALSPPRRKAFKKWTPPRSPFNLVQETLFHDPWKLLIATIFLNRTSGKMAIPVLWKFLEKYPSAEVARTADWRDVSELLKPLGLYDLRAKTIVKFSDEYLTKQWKYPIELHGIGKYGNDSYRIFCVNEWKQVRLTPIHNSAHLVSEAK

SEQ ID NO: 50838 - protein, 52 aa, Homo sapiens
  Payload ID: 10155
  Gene Symbol: MBD4
  Gene Name: methyl-CpG binding domain 4 DNA glycosylase
  ENSP ID: ENSP00000422690
MGTTGLESLSLGDRGAAPTVTSSERLVPDPPNDLRQNGNTCALEVSGEVSFS

SEQ ID NO: 50839 - protein, 540 aa, Homo sapiens
  Payload ID: 10155
  Gene Symbol: MBD4
  Gene Name: methyl-CpG binding domain 4 DNA glycosylase
  Uniprot ID: O95243
  ENSP ID: ENSP00000424873
MGTTGLESLSLGDRGAAPTVTSSERLVPDPPNDLRKEDVAMELERVGEDEEQMMIKRSSECNPLLQEPIASAQFGATAGTECRKSVPCGWERVVKQRLFGKTAGRFDVYFISPQGLKFRSKSSLANYLHKNGETSLKPEDFDFTVLSKRGIKSRYKDCSMAALTSHLQNQSNNSNWNLRTRSKCKKDVFMPPSSSSELQESRGLSNFTSTHLLLKEDEGVDDVNFRKVRKPKGKVTILKGIPIKKTKKGCRKSCSGFVQSDSKRESVCNKADAESEPVAQKSQLDRTVCISDAGACGETLSVTSEENSLVKKKERSLSSGSNFCSEQKTSGIINKFCSAKDSEHNEKYEDTFLESEEIGTKVEVVERKEHLHTDILKRGSEMDNNCSPTRKDFTGEKIFQEDTIPRTQIERRKTSLYFSSKYNKEALSPPRRKAFKKWTPPRSPFNLVQETLFHDPWKLLIATIFLNRTSGKMAIPVLWKFLEKYPSAEVARTADWRDVSELLKPLGLYDLRAKTIVKFSDEYLTKQWKYPIELHGIGAP

SEQ ID NO: 50840 - protein, 605 aa, Homo sapiens
  Payload ID: 10156
  Gene Symbol: MBD1
  Gene Name: methyl-CpG binding domain protein 1
  Uniprot ID: Q9UIS9
  ENSP ID: ENSP00000269468
MAEDWLDCPALGPGWKRREVFRKSGATCGRSDTYYQSPTGDRIRSKVELTRYLGPACDLTLFDFKQGILCYPAPKAHPVAVASKKRKKPSRPAKTRKRQVGPQSGEVRKEAPRDETKADTDTAPASFPAPGCCENCGISFSGDGTQRQRLKTLCKDCRAQRIAFNREQRMFKRVGCGECAACQVTEDCGACSTCLLQLPHDVASGLFCKCERRRCLRIVERSRGCGVCRGCQTQEDCGHCPICLRPPRPGLRRQWKCVQRRCLRGKHARRKGGCDSKMAARRRPGAQPLPPPPPSQSPEPTEPHPRALAPSPPAEFIYYCVDEDELQPYTNRRQNRKCGACAACLRRMDCGRCDFCCDKPKFGGSNQKRQKCRWRQCLQFAMKRLLPSVWSESEDGAGSPPPYRRRKRPSSARRHHLGPTLKPTLATRTAQPDHTQAPTKQEAGGGFVLPPPGTDLVFLREGASSPVQVPGPVAASTEALLQEAQCSGLSWVVALPQVKQEKADTQDEWTPGTAVLTSPVLVPGCPSKAVDPGLPSVKQEPPDPEEDKEENKDDSASKLAPEEEAGGAGTPVITEIFSLGGTRFRDTAVWLPRSKDLKKPGARKQ

SEQ ID NO: 50841 - protein, 556 aa, Homo sapiens
  Payload ID: 10156
  Gene Symbol: MBD1
  Gene Name: methyl-CpG binding domain protein 1
  Uniprot ID: Q9UIS9
  ENSP ID: ENSP00000269469
MAEDWLDCPALGPGWKRREVFRKSGATCGRSDTYYQSPTGDRIRSKVELTRYLGPACDLTLFDFKQGILCYPAPKAHPVAVASKKRKKPSRPAKTRKRQVGPQSGEVRKEAPRDETKADTDTAPASFPAPGCCENCGISFSGDGTQRQRLKTLCKDCRAQRIAFNREQRMFKSRGCGVCRGCQTQEDCGHCPICLRPPRPGLRRQWKCVQRRCLRGKHARRKGGCDSKMAARRRPGAQPLPPPPPSQSPEPTEPHPRALAPSPPAEFIYYCVDEDELQPYTNRRQNRKCGACAACLRRMDCGRCDFCCDKPKFGGSNQKRQKCRWRQCLQFAMKRLLPSVWSESEDGAGSPPPYRRRKRPSSARRHHLGPTLKPTLATRTAQPDHTQAPTKQEAGGGFVLPPPGTDLVFLREGASSPVQVPGPVAASTEALLQEAQCSGLSWVVALPQVKQEKADTQDEWTPGTAVLTSPVLVPGCPSKAVDPGLPSVKQEPPDPEEDKEENKDDSASKLAPEEEAGGAGTPVITEIFSLGGTRFRDTAVWLPRSKDLKKPGARKQ

SEQ ID NO: 50842 - protein, 586 aa, Homo sapiens
  Payload ID: 10156
  Gene Symbol: MBD1
  Gene Name: methyl-CpG binding domain protein 1
  Uniprot ID: Q9UIS9
  ENSP ID: ENSP00000269471
MAEDWLDCPALGPGWKRREVFRKSGATCGRSDTYYQSPTGDRIRSKVELTRYLGPACDLTLFDFKQGILCYPAPKAHPVAVASKKRKKPSRPAKTRKRQVGPQSGEVRKEAPRDETKADTDTAPASFPAPGCCENCGISFSGDGTQRQRLKTLCKDCRAQRIAFNREQRMFKRVGCGECAACQVTEDCGACSTCLLQLPHDVASGLFCKCERRRCLRIVERSRGCGVCRGCQTQEDCGHCPICLRPPRPGLRRQWKCVQRRCLRGKHARRKGGCDSKMAARRRPGAQPLPPPPPSQSPEPTEPQPYTNRRQNRKCGACAACLRRMDCGRCDFCCDKPKFGGSNQKRQKCRWRQCLQFAMKRLLPSVWSESEDGAGSPPPYRRRKRPSSARRHHLGPTLKPTLATRTAQPDHTQAPTKQEAGGGFVLPPPGTDLVFLREGASSPVQVPGPVAASTEALLQAVDPGLPSVKQEPPDPEEDKEENKDDSASKLAPEEEAGGAGTPVITEIFSLGGTRFRDTAVWLPSLQGRHSGREDGCKVWETEDTVEPTSTSWNPRGWPGTHVSLSPPPASMMWVSCRRSWCPSSQS

SEQ ID NO: 50843 - protein, 549 aa, Homo sapiens
  Payload ID: 10156
  Gene Symbol: MBD1
  Gene Name: methyl-CpG binding domain protein 1
  Uniprot ID: Q9UIS9
  ENSP ID: ENSP00000285102
MAEDWLDCPALGPGWKRREVFRKSGATCGRSDTYYQSPTGDRIRSKVELTRYLGPACDLTLFDFKQGILCYPAPKAHPVAVASKKRKKPSRPAKTRKRQVGPQSGEVRKEAPRDETKADTDTAPASFPAPGCCENCGISFSGDGTQRQRLKTLCKDCRAQRIAFNREQRMFKRVGCGECAACQVTEDCGACSTCLLQLPHDVASGLFCKCERRRCLRIVERSRGCGVCRGCQTQEDCGHCPICLRPPRPGLRRQWKCVQRRCLRGKHARRKGGCDSKMAARRRPGAQPLPPPPPSQSPEPTEPHPRALAPSPPAEFIYYCVDEDELKRLLPSVWSESEDGAGSPPPYRRRKRPSSARRHHLGPTLKPTLATRTAQPDHTQAPTKQEAGGGFVLPPPGTDLVFLREGASSPVQVPGPVAASTEALLQEAQCSGLSWVVALPQVKQEKADTQDEWTPGTAVLTSPVLVPGCPSKAVDPGLPSVKQEPPDPEEDKEENKDDSASKLAPEEEAGGAGTPVITEIFSLGGTRFRDTAVWLPRSKDLKKPGARKQ

SEQ ID NO: 50844 - protein, 550 aa, Homo sapiens
  Payload ID: 10156
  Gene Symbol: MBD1
  Gene Name: methyl-CpG binding domain protein 1
  Uniprot ID: Q9UIS9
  ENSP ID: ENSP00000339546
MAEDWLDCPALGPGWKRREVFRKSGATCGRSDTYYQSPTGDRIRSKVELTRYLGPACDLTLFDFKQGILCYPAPKAHPVAVASKKRKKPSRPAKTRKRQVGPQSGEVRKEAPRDETKADTDTAPASFPAPGCCENCGISFSGDGTQRQRLKTLCKDCRAQRIAFNREQRMFKRVGCGECAACQVTEDCGACSTCLLQLPHDVASGLFCKCERRRCLRIVERSRGCGVCRGCQTQEDCGHCPICLRPPRPGLRRQWKCVQRRCLRGKHARRKGGCDSKMAARRRPGAQPLPPPPPSQSPEPTEPHPRALAPSPPAEFIYYCVDEDELQPYTNRRQNRKCGACAACLRRMDCGRCDFCCDKPKFGGSNQKRQKCRWRQCLQFAMKRLLPSVWSESEDGAGSPPPYRRRKRPSSARRHHLGPTLKPTLATRTAQPDHTQAPTKQEAGGGFVLPPPGTDLVFLREGASSPVQVPGPVAASTEALLQAVDPGLPSVKQEPPDPEEDKEENKDDSASKLAPEEEAGGAGTPVEPTTQPQYSGNFDNDLYEIYLIDI

SEQ ID NO: 50845 - protein, 605 aa, Homo sapiens; identical to SEQ ID NO: 50840
  Payload ID: 10156
  Gene Symbol: MBD1
  Gene Name: methyl-CpG binding domain protein 1
  Uniprot ID: Q9UIS9
  ENSP ID: ENSP00000372407

SEQ ID NO: 50846 - protein, 503 aa, Homo sapiens
  Payload ID: 10156
  Gene Symbol: MBD1
  Gene Name: methyl-CpG binding domain protein 1
  Uniprot ID: Q9UIS9
  ENSP ID: ENSP00000381502
MAEDWLDCPALGPGWKRREVFRKSGATCGRSDTYYQSPTGDRIRSKVELTRYLGPACDLTLFDFKQGILCYPAPKAHPVAVASKKRKKPSRPAKTRKRQVGPQSGEVRKEAPRDETKADTDTAPASFPAPGCCENCGISFSGDGTQRQRLKTLCKDCRAQRIAFNREQRMFKRVGCGECAACQVTEDCGACSTCLLQLPHDVASGLFCKCERRRCLRIVERSRGCGVCRGCQTQEDCGHCPICLRPPRPGLRRQWKCVQRRCLRGKHARRKGGCDSKMAARRRPGAQPLPPPPPSQSPEPTEPHPRALAPSPPAEFIYYCVDEDELKRLLPSVWSESEDGAGSPPPYRRRKRPSSARRHHLGPTLKPTLATRTAQPDHTQAPTKQEAGGGFVLPPPGTDLVFLREGASSPVQVPGPVAASTEALLQAVDPGLPSVKQEPPDPEEDKEENKDDSASKLAPEEEAGGAGTPVITEIFSLGGTRFRDTAVWLPRSKDLKKPGARKQ

SEQ ID NO: 50847 - protein, 549 aa, Homo sapiens; identical to SEQ ID NO: 50843
  Payload ID: 10156
  Gene Symbol: MBD1
  Gene Name: methyl-CpG binding domain protein 1
  Uniprot ID: Q9UIS9
  ENSP ID: ENSP00000381506

SEQ ID NO: 50848 - protein, 566 aa, Homo sapiens
  Payload ID: 10156
  Gene Symbol: MBD1
  Gene Name: methyl-CpG binding domain protein 1
  ENSP ID: ENSP00000381508
MAEDWLDCPALGPGWKRREVFRKSGATCGRSDTYYQSPTGDRIRSKVELTRYLGPACDLTLFDFKQGILCYPAPKAHPVAVASKKRKKPSRPAKTRKRQVGPQSGEVRKEAPRDETKADTDTAPASFPAPGCCENCGISFSGDGTQRQRLKTLCKDCRAQRIAFNREQRMFKRVGCGECAACQVTEDCGACSTCLLQLPHDVASGLFCKCERRRCLRIVERSRGCGVCRGCQTQEDCGHCPICLRPPRPGLRRQWKCVQRRCLRHLAHRLRRRHQRCQRRTPLAVAPPTGKHARRKGGCDSKMAARRRPGAQPLPPPPPSQSPEPTEPHPRALAPSPPAEFIYYCVDEDELKRLLPSVWSESEDGAGSPPPYRRRKRPSSARRHHLGPTLKPTLATRTAQPDHTQAPTKQEAGGGFVLPPPGTDLVFLREGASSPVQVPGPVAASTEALLQEAQCSGLSWVVALPQVKQEKADTQDEWTPGTAVLTSPVLVPGCPSKAVDPGLPSVKQEPPDPEEDKEENKDDSASKLAPEEEITEIFSLGGTRFRDTAVWLPRSKDLKKPGARKQ

SEQ ID NO: 50849 - protein, 630 aa, Homo sapiens
  Payload ID: 10156
  Gene Symbol: MBD1
  Gene Name: methyl-CpG binding domain protein 1
  Uniprot ID: Q9UIS9
  ENSP ID: ENSP00000405268
MAEDWLDCPALGPGWKRREVFRKSGATCGRSDTYYQSPTGDRIRSKVELTRYLGPACDLTLFDFKQGILCYPAPKAHPVAVASKKRKKPSRPAKTRKRQVGPQSGEVRKEAPRDETKADTDTAPASFPAPGCCENCGISFSGDGTQRQRLKTLCKDCRAQRIAFNREQRMFKRVGCGECAACQVTEDCGACSTCLLQLPHDVASGLFCKCERRRCLRIVERSRGCGVCRGCQTQEDCGHCPICLRPPRPGLRRQWKCVQRRCLRHLAHRLRRRHQRCQRRTPLAVAPPTGKHARRKGGCDSKMAARRRPGAQPLPPPPPSQSPEPTEPHPRALAPSPPAEFIYYCVDEDELQPYTNRRQNRKCGACAACLRRMDCGRCDFCCDKPKFGGSNQKRQKCRWRQCLQFAMKRLLPSVWSESEDGAGSPPPYRRRKRPSSARRHHLGPTLKPTLATRTAQPDHTQAPTKQEAGGGFVLPPPGTDLVFLREGASSPVQVPGPVAASTEALLQEAQCSGLSWVVALPQVKQEKADTQDEWTPGTAVLTSPVLVPGCPSKAVDPGLPSVKQEPPDPEEDKEENKDDSASKLAPEEEAGGAGTPVITEIFSLGGTRFRDTAVWLPRSKDLKKPGARKQ

SEQ ID NO: 50850 - protein, 44 aa, Homo sapiens
  Payload ID: 10156
  Gene Symbol: MBD1
  Gene Name: methyl-CpG binding domain protein 1
  ENSP ID: ENSP00000464823
MAEDWLDCPALGPGWKRREVFRKSGATCGRSDTYYQRRQDPKQS

SEQ ID NO: 50851 - protein, 536 aa, Homo sapiens
  Payload ID: 10156
  Gene Symbol: MBD1
  Gene Name: methyl-CpG binding domain protein 1
  Uniprot ID: Q9UIS9
  ENSP ID: ENSP00000465923
MAEDWLDCPALGPGWKRREVFRKSGATCGRSDTYYQSPTGDRIRSKVELTRYLGPACDLTLFDFKQGILCYPAPKAHPVAVASKKRKKPSRPAKTRKRQVGPQSGEVRKEAPRDETKADTDTAPASFPAPGCCENCGISFSGDGTQRQRLKTLCKDCRAQRIAFNREQRMFKRVGCGECAACQVTEDCGACSTCLLQLPHDVASGLFCKCERRRCLRIVERSRGCGVCRGCQTQEDCGHCPICLRPPRPGLRRQWKCVQRRCLRGKHARRKGGCDSKMAARRRPGAQPLPPPPPSQSPEPTEPQPYTNRRQNRKCGACAACLRRMDCGRCDFCCDKPKFGGSNQKRQKCRWRQCLQFAMKRLLPSVWSESEDGAGSPPPYRRRKRPSSARRHHLGPTLKPTLATRTAQPDHTQAPTKQEAGGGFVLPPPGTDLVFLREGASSPVQVPGPVAASTEALLQAVDPGLPSVKQEPPDPEEDKEENKDDSASKLAPEEEAGGAGTPVITEIFSLGGTRFRDTAVWLPRSKDLKKPGARKQ

SEQ ID NO: 50852 - protein, 567 aa, Homo sapiens
  Payload ID: 10156
  Gene Symbol: MBD1
  Gene Name: methyl-CpG binding domain protein 1
  Uniprot ID: Q9UIS9
  ENSP ID: ENSP00000466092
MAEDWLDCPALGPGWKRREVFRKSGATCGRSDTYYQSPTGDRIRSKVELTRYLGPACDLTLFDFKQGILCYPAPKAHPVAVASKKRKKPSRPAKTRKRQVGPQSGEVRKEAPRDETKADTDTAPASFPAPGCCENCGISFSGDGTQRQRLKTLCKDCRAQRIAFNREQRMFKSRGCGVCRGCQTQEDCGHCPICLRPPRPGLRRQWKCVQRRCLRGKHARRKGGCDSKMAARRRPGAQPLPPPPPSQSPEPTEPHPRALAPSPPAEFIYYCVDEDELPYTNRRQNRKCGACAACLRRMDCGRCDFCCDKPKFGGSNQKRQKCRWRQCLQFAMKRLLPSVWSESEDGAGSPPPYRRRKRPSSARRHHLGPTLKPTLATRTAQPDHTQAPTKQEAGGGFVLPPPGTDLVFLREGASSPVQVPGPVAASTEALLQEAQCSGLSWVVALPQVKQEKADTQDEWTPGTAVLTSPVLVPGCPSKAVDPGLPSVKQEPPDPEEDKEENKDDSASKLAPEEEAGGAGTPVITEIFSLGGTRFRDTAVWLPRYYHLALDWKCNCGYHLCCRSVLVP

SEQ ID NO: 50853 - protein, 256 aa, Homo sapiens
  Payload ID: 10156
  Gene Symbol: MBD1
  Gene Name: methyl-CpG binding domain protein 1
  ENSP ID: ENSP00000466429
  MOD_RES (1)..(1): Any amino acid
XENCGISFSGDGTQRQRLKTLCKDCRAQRIAFNREQRMFKRVGCGECAACQVTEDCGACSTCLLQLPHDVASGLFCKCERRRCLRIVERSRGCGVCRGCQTQEDCGHCPICLRPPRPGLRRQWKCVQRRCLRGKHARRKGGCDSKMAARRRPGAQPLPPPPPSQSPEPTEPKRLLPSVWSESEDGAGSPPPYRRRKRPSSARRHHLGPTLKPTLATRTAQPDHTQAPTKQEAGGGFVLPPPGTDLVFLREGASSPV

SEQ ID NO: 50854 - protein, 240 aa, Homo sapiens
  Payload ID: 10156
  Gene Symbol: MBD1
  Gene Name: methyl-CpG binding domain protein 1
  ENSP ID: ENSP00000466806
SQSPEPTEPHPRALAPSPPAEFIYYCVDEDELKRLLPSVWSESEDGAGSPPPYRRRKRPSSARRHHLGPTLKPTLATRTAQPDHTQAPTKQEAGGGFVLPPPGTDLVFLREGASSPVQVPGPVAASTEALLQVKQEKADTQDEWTPGTAVLTSPVLVPGCPSKAVDPGLPSVKQEPPDPEEDKEENKDDSASKLAPEEEAGGAGTPVITEIFSLGGTRFRDTAVWLPRSKDLKKPGARKQ

SEQ ID NO: 50855 - protein, 605 aa, Homo sapiens; identical to SEQ ID NO: 50840
  Payload ID: 10156
  Gene Symbol: MBD1
  Gene Name: methyl-CpG binding domain protein 1
  Uniprot ID: Q9UIS9
  ENSP ID: ENSP00000467017

SEQ ID NO: 50856 - protein, 416 aa, Homo sapiens
  Payload ID: 10156
  Gene Symbol: MBD1
  Gene Name: methyl-CpG binding domain protein 1
  ENSP ID: ENSP00000467606
  MOD_RES (1)..(1): Any amino acid
XHPVAVASKKRKKPSRPAKTRKRQVGPQSGEVRKEAPRDETKADTDTAPASFPAPGCCENCGISFSGDGTQRQRLKTLCKDCRAQRIAFNREQRMFKSRGCGVCRGCQTQEDCGHCPICLRPPRPGLRRQWKCVQRRCLRHLAHRLRRRHQRCQRRTPLAVAPPTGKHARRKGGCDSKMAARRRPGAQPLPPPPPSQSPEPTEPHPRALAPSPPAEFIYYCVDEDELKRLLPSVWSESEDGAGSPPPYRRRKRPSSARRHHLGPTLKPTLATRTAQPDHTQAPTKQEAGGGFVLPPPGTDLVFLREGASSPVQVPGPVAASTEALLQAVDPGLPSVKQEPPDPEEDKEENKDDSASKLAPEEEAGGAGTPVITEIFSLGGTRFRDTAVWLPRYYHLALDWKCNCGYHLCCRSVLVP

SEQ ID NO: 50857 - protein, 586 aa, Homo sapiens; identical to SEQ ID NO: 50842
  Payload ID: 10156
  Gene Symbol: MBD1
  Gene Name: methyl-CpG binding domain protein 1
  Uniprot ID: Q9UIS9
  ENSP ID: ENSP00000467763

SEQ ID NO: 50858 - protein, 535 aa, Homo sapiens
  Payload ID: 10156
  Gene Symbol: MBD1
  Gene Name: methyl-CpG binding domain protein 1
  Uniprot ID: Q9UIS9
  ENSP ID: ENSP00000468042
MAEDWLDCPALGPGWKRREVFRKSGATCGRSDTYYQSPTGDRIRSKVELTRYLGPACDLTLFDFKQGILCYPAPKAHPVAVASKKRKKPSRPAKTRKRQVGPQSGEVRKEAPRDETKADTDTAPASFPAPGCCENCGISFSGDGTQRQRLKTLCKDCRAQRIAFNREQRMFKRVGCGECAACQVTEDCGACSTCLLQLPHDVASGLFCKCERRRCLRIVERSRGCGVCRGCQTQEDCGHCPICLRPPRPGLRRQWKCVQRRCLRGKHARRKGGCDSKMAARRRPGAQPLPPPPPSQSPEPTEPHPRALAPSPPAEFIYYCVDEDELKRLLPSVWSESEDGAGSPPPYRRRKRPSSARRHHLGPTLKPTLATRTAQPDHTQAPTKQEAGGGFVLPPPGTDLVFLREGASSPVQVPGPVAASTEALLQAVDPGLPSVKQEPPDPEEDKEENKDDSASKLAPEEEAGGAGTPVITEIFSLGGTRFRDTAVWLPRAGTREGKMDVKCGRPRTQWSPRARAGTHEDGLEPMSVSHHLQLR

SEQ ID NO: 50859 - protein, 630 aa, Homo sapiens; identical to SEQ ID NO: 50849
  Payload ID: 10156
  Gene Symbol: MBD1
  Gene Name: methyl-CpG binding domain protein 1
  Uniprot ID: Q9UIS9
  ENSP ID: ENSP00000468430

SEQ ID NO: 50860 - protein, 655 aa, Homo sapiens
  Payload ID: 10156
  Gene Symbol: MBD1
  Gene Name: methyl-CpG binding domain protein 1
  Uniprot ID: Q9UIS9
  ENSP ID: ENSP00000468785
MAEDWLDCPALGPGWKRREVFRKSGATCGRSDTYYQSPTGDRIRSKVELTRYLGPACDLTLFDFKQGILCYPAPKAHPVAVASKKRKKPSRPAKTRKRQVGPQSGEVRKEAPRDETKADTDTAPASFPAPGCCENCGISFSGDGTQRQRLKTLCKDCRAQRIAFNREQRMFKRVGCGECAACQVTEDCGACSTCLLQLPHDVASGLFCKCERRRCLRIVERSRGCGVCRGCQTQEDCGHCPICLRPPRPGLRRQWKCVQRRCLRGKHARRKGGCDSKMAARRRPGAQPLPPPPPSQSPEPTEPHPRALAPSPPAEFIYYCVDEDELQPYTNRRQNRKCGACAACLRRMDCGRCDFCCDKPKFGGSNQKRQKCRWRQCLQFAMKRLLPSVWSESEDGAGSPPPYRRRKRPSSARRHHLGPTLKPTLATRTAQPDHTQAPTKQEAGGGFVLPPPGTDLVFLREGASSPVQVPGPVAASTEALLQEAQCSGLSWVVALPQVKQEKADTQDEWTPGTAVLTSPVLVPGCPSKAVDPGLPSVKQEPPDPEEDKEENKDDSASKLAPEEEAGGAGTPVITEIFSLGGTRFRDTAVWLPSLQGRHSGREDGCKVWETEDTVEPTSTSWNPRGWPGTHVSLSPPPASMMWVSCRRSWCPSSQS

SEQ ID NO: 50861 - protein, 411 aa, Homo sapiens
  Payload ID: 10157
  Gene Symbol: MBD2
  Gene Name: methyl-CpG binding domain protein 2
  Uniprot ID: Q9UBB5
  ENSP ID: ENSP00000256429
MRAHPGGGRCCPEQEEGESAAGGSGAGGDSAIEQGGQGSALAPSPVSGVRREGARGGGRGRGRWKQAGRGGGVCGRGRGRGRGRGRGRGRGRGRGRPPSGGSGLGGDGGGCGGGGSGGGGAPRREPVPFPSGSAGPGPRGPRATESGKRMDCPALPPGWKKEEVIRKSGLSAGKSDVYYFSPSGKKFRSKPQLARYLGNTVDLSSFDFRTGKMMPSKLQKNKQRLRNDPLNQNKGKPDLNTTLPIRQTASIFKQPVTKVTNHPSNKVKSDPQRMNEQPRQLFWEKRLQGLSASDVTEQIIKTMELPKGLQGVGPGSNDETLLSAVASALHTSSAPITGQVSAAVEKNPAVWLNTSQPLCKAFIVTDEDIRKQEERVQQVRKKLEEALMADILSRAADTEEMDIEMDSGDEA

SEQ ID NO: 50862 - protein, 241 aa, Homo sapiens
  Payload ID: 10157
  Gene Symbol: MBD2
  Gene Name: methyl-CpG binding domain protein 2
  ENSP ID: ENSP00000381435
MRAHPGGGRCCPEQEEGESAAGGSGAGGDSAIEQGGQGSALAPSPVSGVRREGARGGGRGRGRWKQAGRGGGVCGRGRGRGRGRGRGRGRGRGRGRPPSGGSGLGGDGGGCGGGGSGGGGAPRREPVPFPSGSAGPGPRGPRATESGKRMDCPALPPGWKKEEVIRKSGLSAGKSDVYYFSPSGKKFRSKPQLARYLGNTVDLSSFDFRTGKMMPSKLQKNKQRLRNDPLNQNKFVCTFLL

SEQ ID NO: 50863 - protein, 72 aa, Homo sapiens
  Payload ID: 10157
  Gene Symbol: MBD2
  Gene Name: methyl-CpG binding domain protein 2
  ENSP ID: ENSP00000462393
NDPLNQNKGKPDLNTTLPIRQTASIFKQPVTKVTNHPSNKVKSDPQRMNEQPRQVSQENRRYLEPHWISILL

SEQ ID NO: 50864 - protein, 302 aa, Homo sapiens
  Payload ID: 10157
  Gene Symbol: MBD2
  Gene Name: methyl-CpG binding domain protein 2
  Uniprot ID: Q9UBB5
  ENSP ID: ENSP00000464554
MRAHPGGGRCCPEQEEGESAAGGSGAGGDSAIEQGGQGSALAPSPVSGVRREGARGGGRGRGRWKQAGRGGGVCGRGRGRGRGRGRGRGRGRGRGRPPSGGSGLGGDGGGCGGGGSGGGGAPRREPVPFPSGSAGPGPRGPRATESGKRMDCPALPPGWKKEEVIRKSGLSAGKSDVYYFSPSGKKFRSKPQLARYLGNTVDLSSFDFRTGKMMPSKLQKNKQRLRNDPLNQNKLRWNTHRPAPWHALSRLCLLIRCLLCLECAYPLPLHLVNSYSSKTQLHCLHLWEACPAYSRQNQSFPP

SEQ ID NO: 50865 - protein, 259 aa, Homo sapiens
  Payload ID: 10158
  Gene Symbol: MBD3
  Gene Name: methyl-CpG binding domain protein 3
  Uniprot ID: O95983
  ENSP ID: ENSP00000156825
MERKSPSGKKFRSKPQLARYLGGSMDLSTFDFRTGKMLMSKMNKSRQRVRYDSSNQVKGKPDLNTALPVRQTASIFKQPVTKITNHPSNKVKSDPQKAVDQPRQLFWEKKLSGLNAFDIAEELVKTMDLPKGLQGVGPGCTDETLLSAIASALHTSTMPITGQLSAAVEKNPGVWLNTTQPLCKAFMVTDEDIRKQEELVQQVRKRLEEALMADMLAHVEELARDGEAPLDKACAEDDDEEDEEEEEEEPDPDPEMEHV

SEQ ID NO: 50866 - protein, 291 aa, Homo sapiens
  Payload ID: 10158
  Gene Symbol: MBD3
  Gene Name: methyl-CpG binding domain protein 3
  Uniprot ID: O95983
  ENSP ID: ENSP00000412302
MERKRWECPALPQGWEREEVPRRSGLSAGHRDVFYYSPSGKKFRSKPQLARYLGGSMDLSTFDFRTGKMLMSKMNKSRQRVRYDSSNQVKGKPDLNTALPVRQTASIFKQPVTKITNHPSNKVKSDPQKAVDQPRQLFWEKKLSGLNAFDIAEELVKTMDLPKGLQGVGPGCTDETLLSAIASALHTSTMPITGQLSAAVEKNPGVWLNTTQPLCKAFMVTDEDIRKQEELVQQVRKRLEEALMADMLAHVEELARDGEAPLDKACAEDDDEEDEEEEEEEPDPDPEMEHV

SEQ ID NO: 50867 - protein, 235 aa, Homo sapiens
  Payload ID: 10158
  Gene Symbol: MBD3
  Gene Name: methyl-CpG binding domain protein 3
  ENSP ID: ENSP00000464718
MDLSTFDFRTGKMLMSKMNKSRQRVRYDSSNQVKGKPDLNTALPVRQTASIFKQPVTKITNHPSNKVKSDPQKAVDQPRQLFWEKKLSGLNAFDIAEELVKTMDLPKGLQGVGPGCTDETLLSAIASALHTSTMPITGQLSAAVEKNPGVWLNTTQPLCKAFMVTDEDIRKQEELVQQVRKRLEEALMADMLAHVEELARDGEAPLDKACAEDDDEEDEEEEEEEPDPDPEMEHV

SEQ ID NO: 50868 - protein, 185 aa, Homo sapiens
  Payload ID: 10158
  Gene Symbol: MBD3
  Gene Name: methyl-CpG binding domain protein 3
  ENSP ID: ENSP00000466670
MDLSTFDFRTGKMLMSKMNKSRQRVRYDSSNQVKGKPDLNTALPVRQTASIFKQPVTKITNHPSNKVKSDPQKAVDQPRQLFWEKKLSGLNAFDIAEELVKTMDLPKGLQGVGPGCTDETLLSAIASALHTSTMPITGQLSAAVEKNPGVWLNTTQPLCKAFMVTDEDISRKSWCSRCGSGWRRR

SEQ ID NO: 50869 - protein, 130 aa, Homo sapiens
  Payload ID: 10158
  Gene Symbol: MBD3
  Gene Name: methyl-CpG binding domain protein 3
  ENSP ID: ENSP00000477547
MDLSTFDFRTGKMLMSKMNKSRQRVRYDSSNQVKGKPDLNTALPVRQTASIFKQPVTKITNHPSNKVKSDPQKAVDQPRQLFWEKKLSGLNAFDIAEELVKTMDLPKGLQGVGPGCTDETLLSAIASALH

SEQ ID NO: 50870 - protein, 41 aa, Homo sapiens
  Payload ID: 10158
  Gene Symbol: MBD3
  Gene Name: methyl-CpG binding domain protein 3
  ENSP ID: ENSP00000479427
  MOD_RES (1)..(1): Any amino acid
XDPQKAVDQPRQSLALSPRLECSGRILTHYNLCLLVSTGFK

SEQ ID NO: 50871 - protein, 34 aa, Homo sapiens
  Payload ID: 10158
  Gene Symbol: MBD3
  Gene Name: methyl-CpG binding domain protein 3
  ENSP ID: ENSP00000482276
MDLSTFDFRTGKMLMSKMNKSRQRVRYDSSNQVK

SEQ ID NO: 50872 - protein, 147 aa, Homo sapiens
  Payload ID: 10158
  Gene Symbol: MBD3
  Gene Name: methyl-CpG binding domain protein 3
  ENSP ID: ENSP00000484202
MDLSTFDFRTGKMLMSKMNKSRQRVRYDSSNQVKGKPDLNTALPVRQTASIFKQPVTKITNHPSNKVKSDPQKAVDQPRQLFWEKKLSGLNAFDIAEELVKTMDLPKGLQGVGPGCTDETLLSAIASALHTSTMPITGQLSAAVEKN

SEQ ID NO: 50873 - protein, 194 aa, Homo sapiens
  Payload ID: 10159
  Gene Symbol: MBD3L1
  Gene Name: methyl-CpG binding domain protein 3-like 1
  Uniprot ID: Q8WWY6
  ENSP ID: ENSP00000304198
MAKSSQRKQRDCVNQCKSKPGLSTSIPLRMSSYTFKRPVTRITPHPGNEVRYHQWEESLEKPQQVCWQRRLQGLQAYSSAGELSSTLDLANTLQKLVPSYTGGSLLEDLASGLEHSCPMPHLACSSDAVEIIPAEGVGISQLLCKQFLVTEEDIRKQEGKVKTVRERLAIALIADGLANEAEKVRDQEGRPEKR

SEQ ID NO: 50874 - protein, 194 aa, Homo sapiens; identical to SEQ ID NO: 50873
  Payload ID: 10159
  Gene Symbol: MBD3L1
  Gene Name: methyl-CpG binding domain protein 3-like 1
  Uniprot ID: Q8WWY6
  ENSP ID: ENSP00000471575

SEQ ID NO: 50875 - protein, 208 aa, Homo sapiens
  Payload ID: 10160
  Gene Symbol: MBD3L2
  Gene Name: methyl-CpG binding domain protein 3-like 2
  Uniprot ID: Q8NHZ7
  ENSP ID: ENSP00000370800
MGEPAFTSFPSLPVLGKLKRNMMPWALQKKREIHMAKAHRRRAARSALPMRLTSCIFRRPVTRIRSHPDNQVRRRKGDEHLEKPQQLCAYRRLQALQPCSSQGEGSSPLHLESVLSILAPGTAGESLDRAGAERVRSPLEPTPGRFPAVAGGPTPGMGCQLPPPLSGQLVTPADIRRQARRVKKARERLAKALQADRLARRAEMLTGG

SEQ ID NO: 50876 - protein, 204 aa, Homo sapiens
  Payload ID: 10160
  Gene Symbol: MBD3L2
  Gene Name: methyl-CpG binding domain protein 3-like 2
  ENSP ID: ENSP00000480390
MGEPAFTSFPSLPVLGKLKRNMMPWALQKKREIHMAKAHRRRAARSALPMRLTSCIFRRPVTRIRSHPDNQVRRRKGDEHLEKPQQLCAYRRLQALQPCSSQGEGSSPLHLESVLSILAPGTAGESLDRAGAERVRSPLEPTPGRFPAVAGGPTPGMGCQLPPPLSGQLVTPADIRRQARRVKKARERLAKALQADRLARRAEM

SEQ ID NO: 50877 - protein, 208 aa, Homo sapiens
  Payload ID: 10161
  Gene Symbol: MBD3L3
  Gene Name: methyl-CpG binding domain protein 3-like 3
  Uniprot ID: A6NE82
  ENSP ID: ENSP00000333183
MGEPAFTSFPSPPVLGKLKRNMMPWALQKKREIHMAKAHRRRAARSALPMRLTSCIFRRPVTRIRSHPDNQVRRRKGDEHLEKPQQLCAYRRLQALQPCSSQGEGSSPLHLESVLSILAPGTAGESLDRAGAERVRSPLEPTPGRFPAVAGGPTPGMGCQLPPPLSGQLVTPADIRRQARRVKKARERLAKALQADRLARQAEMLTCR

SEQ ID NO: 50878 - protein, 204 aa, Homo sapiens
  Payload ID: 10161
  Gene Symbol: MBD3L3
  Gene Name: methyl-CpG binding domain protein 3-like 3
  ENSP ID: ENSP00000478905
MGEPAFTSFPSPPVLGKLKRNMMPWALQKKREIHMAKAHRRRAARSALPMRLTSCIFRRPVTRIRSHPDNQVRRRKGDEHLEKPQQLCAYRRLQALQPCSSQGEGSSPLHLESVLSILAPGTAGESLDRAGAERVRSPLEPTPGRFPAVAGGPTPGMGCQLPPPLSGQLVTPADIRRQARRVKKARERLAKALQADRLARQAEM

SEQ ID NO: 50879 - protein, 208 aa, Homo sapiens
  Payload ID: 10162
  Gene Symbol: MBD3L4
  Gene Name: methyl-CpG binding domain protein 3-like 4
  Uniprot ID: A6NDZ8
  ENSP ID: ENSP00000370801
MGEPAFTSFPSPPVLGKLKRNMMPWALQKKREIHMAKAHRRRAARSALPMRLTSCIFRRPVTRIRSHPDNQVRRRKGDEHLEKPQQLCAYRRLQALQPCSSQGEGSSPLHLESVLSILAPGTAGESLDRAGAERVRIPLEPTPGRFPAVAGGPTPGMGCQLPPPLSGQLVTPADIRRQARRVKKARERLAKALQADRLARQAEMLTCR

SEQ ID NO: 50880 - protein, 204 aa, Homo sapiens
  Payload ID: 10162
  Gene Symbol: MBD3L4
  Gene Name: methyl-CpG binding domain protein 3-like 4
  ENSP ID: ENSP00000484740
MGEPAFTSFPSPPVLGKLKRNMMPWALQKKREIHMAKAHRRRAARSALPMRLTSCIFRRPVTRIRSHPDNQVRRRKGDEHLEKPQQLCAYRRLQALQPCSSQGEGSSPLHLESVLSILAPGTAGESLDRAGAERVRIPLEPTPGRFPAVAGGPTPGMGCQLPPPLSGQLVTPADIRRQARRVKKARERLAKALQADRLARQAEM

SEQ ID NO: 50881 - protein, 208 aa, Homo sapiens
  Payload ID: 10163
  Gene Symbol: MBD3L5
  Gene Name: methyl-CpG binding domain protein 3-like 5
  Uniprot ID: A6NJ08
  ENSP ID: ENSP00000331435
MGEPAFTSFPSPPVLGKLKRNMMPWALQKKREIHMAKAHRRRAARSALPMRLTSCIFRRPVTRIRSHPDNQVRRRKGDEHLEKPQQLCAYRRLQALQPCSSQGEGSSPLHLESVLSILAPGTAGESLDRAGAERVRIPLEPTPGRFPAVAGGPTPGMGCQLPPPLSGQLVTPADIRRQARRVKKARERLAKALQADRLARQAEMLTGG

SEQ ID NO: 50882 - protein, 204 aa, Homo sapiens; identical to SEQ ID NO: 50880
  Payload ID: 10163
  Gene Symbol: MBD3L5
  Gene Name: methyl-CpG binding domain protein 3-like 5
  ENSP ID: ENSP00000477634

SEQ ID NO: 50883 - protein, 1727 aa, Homo sapiens
  Payload ID: 10164
  Gene Symbol: MBD5
  Gene Name: methyl-CpG binding domain protein 5
  ENSP ID: ENSP00000384672
MNGGKECDGGDKEGGLPAIQVPVGWQRRVDQNGVLYVSPSGSLLSCLEQVKTYLLTDGTCKCGLECPLILPKVFNFDPGAAVKQRTAEDVKADEDVTKLCIHKRKIIAVATLHKSMEAPHPSLVLTSPGGGTNATPVVPSRAATPRSVRNKSHEGITNSVMPECKNPFKLMIGSSNAMGRLYVQELPGSQQQELHPVYPRQRLGSSEHGQKSPFRGSHGGLPSPASSGSQIYGDGSISPRTDPLGSPDVFTRSNPGFHGAPNSSPIHLNRTPLSPPSVMLHGSPVQSSCAMAGRTNIPLSPTLTTKSPVMKKPMCNFSTNMEIPRAMFHHKPPQGPPPPPPPSCALQKKPLTSEKDPLGILDPIPSKPVNQNPVIINPTSFHSNVHSQVPMMNVSMPPAVVPLPSNLPLPTVKPGHMNHGSHVQRVQHSASTSLSPSPVTSPVHMMGTGIGRIEASPQRSRSSSTSSDHGNFMMPPVGPQATSSGIKVPPRSPRSTIGSPRPSMPSSPSTKSDGHHQYKDIPNPLIAGISNVLNTPSSAAFPTASAGSSSVKSQPGLLGMPLNQILNQHNAASFPASSLLSAAAKAQLANQNKLAGNNSSSSSNSGAVAGSGNTEGHSTLNTMFPPTANMLLPTGEGQSGRAALRDKLMSQQKDALRKRKQPPTTVLSLLRQSQMDSSAVPKPGPDLLRKQGQGSFPISSMSQLLQSMSCQSSHLSSNSTPGCGASNTALPCSANQLHFTDPSMNSSVLQNIPLRGEAVHCHNANTNFVHSNSPVPNHHLAGLINQIQASGNCGMLSQSGMALGNSLHPNPPQSRISTSSTPVIPNSIVSSYNQTSSEAGGSGPSSSIAIAGTNHPAITKTTSVLQDGVIVTTAAGNPLQSQLPIGSDFPFVGQEHALHFPSNSTSNNHLPHPLNPSLLSSLPISLPVNQQHLLNQNLLNILQPSAGEGKSEINLHPLGFLNPNVNAALAFLSSDMDGQVLQPVHFQLLAALLQNQAQAAAMLPLPSFNLTISDLLQQQNTPLPSLTQMTAPPDHLPSNQSDNSRAETLLTSPLGNPLPSFAGSDTTFNPLFLPAVNGASGLMTLNPQLLGGVLNSASANTANHPEVSIATSSQATTTTTTTSSAVAALTVSTLGGTAVVSMAETLLNISNNAGNTPGPAKLNSNSVVPQLLNPLLGTGLLGDMSSINNTLSNHQLTHLQSLLNNNQMFPPNQQQQQLLQGYQNLQAFQGQSTIPCPANNNPMACLFQNFQVRMQEDAALLNKRISTQPGLTALPENPNTTLPPFQDTPCELQPRIDPSLGQQVKDGLVVGGPGDASVDAIYKAVVDAASKGMQVVITTAVNSTTQISPIPALSAMSAFTASIGDPLNLSSAVSAVIHGRNMGGVDHDGRLRNSRGARLPKNLDHGKNVNEGDGFEYFKSASCHTSKKQWDGEQSPRGERNRWKYEEFLDHPGHIHSSPCHERPNNVSTLPFLPGEQHPILLPPRNCPGDKILEENFRYNNYKRTMMSFKERLENTVERCAHINGNRPRQSRGFGELLSTAKQDLVLEEQSPSSSNSLENSLVKDYIHYNGDFNAKSVNGCVPSPSDAKSISSEDDLRNPDSPSSNELIHYRPRTFNVGDLVWGQIKGLTSWPGKLVREDDVHNSCQQSPEEGKVEPEKLKTLTEGLEAYSRVRKRNRKSGKLNNHLEAAIHEAMSELDKMSGTVHQIPQGDRQMRPPKPKRRKISR

SEQ ID NO: 50884 - protein, 1494 aa, Homo sapiens
  Payload ID: 10164
  Gene Symbol: MBD5
  Gene Name: methyl-CpG binding domain protein 5
  Uniprot ID: Q9P267
  ENSP ID: ENSP00000386049
MNGGKECDGGDKEGGLPAIQVPVGWQRRVDQNGVLYVSPSGSLLSCLEQVKTYLLTDGTCKCGLECPLILPKVFNFDPGAAVKQRTAEDVKADEDVTKLCIHKRKIIAVATLHKSMEAPHPSLVLTSPGGGTNATPVVPSRAATPRSVRNKSHEGITNSVMPECKNPFKLMIGSSNAMGRLYVQELPGSQQQELHPVYPRQRLGSSEHGQKSPFRGSHGGLPSPASSGSQIYGDGSISPRTDPLGSPDVFTRSNPGFHGAPNSSPIHLNRTPLSPPSVMLHGSPVQSSCAMAGRTNIPLSPTLTTKSPVMKKPMCNFSTNMEIPRAMFHHKPPQGPPPPPPPSCALQKKPLTSEKDPLGILDPIPSKPVNQNPVIINPTSFHSNVHSQVPMMNVSMPPAVVPLPSNLPLPTVKPGHMNHGSHVQRVQHSASTSLSPSPVTSPVHMMGTGIGRIEASPQRSRSSSTSSDHGNFMMPPVGPQATSSGIKVPPRSPRSTIGSPRPSMPSSPSTKSDGHHQYKDIPNPLIAGISNVLNTPSSAAFPTASAGSSSVKSQPGLLGMPLNQILNQHNAASFPASSLLSAAAKAQLANQNKLAGNNSSSSSNSGAVAGSGNTEGHSTLNTMFPPTANMLLPTGEGQSGRAALRDKLMSQQKDALRKRKQPPTTVLSLLRQSQMDSSAVPKPGPDLLRKQGQGSFPISSMSQLLQSMSCQSSHLSSNSTPGCGASNTALPCSANQLHFTDPSMNSSVLQNIPLRGEAVHCHNANTNFVHSNSPVPNHHLAGLINQIQASGNCGMLSQSGMALGNSLHPNPPQSRISTSSTPVIPNSIVSSYNQTSSEAGGSGPSSSIAIAGTNHPAITKTTSVLQDGVIVTTAAGNPLQSQLPIGSDFPFVGQEHALHFPSNSTSNNHLPHPLNPSLLSSLPISLPVNQQHLLNQNLLNILQPSAGEGDMSSINNTLSNHQLTHLQSLLNNNQMFPPNQQQQQLLQGYQNLQAFQGQSTIPCPANNNPMACLFQNFQVRMQEDAALLNKRISTQPGLTALPENPNTTLPPFQDTPCELQPRIDPSLGQQVKDGLVVGGPGDASVDAIYKAVVDAASKGMQVVITTAVNSTTQISPIPALSAMSAFTASIGDPLNLSSAVSAVIHGRNMGGVDHDGRLRNSRGARLPKNLDHGKNVNEGDGFEYFKSASCHTSKKQWDGEQSPRGERNRWKYEEFLDHPGHIHSSPCHERPNNVSTLPFLPGEQHPILLPPRNCPGDKILEENFRYNNYKRTMMSFKERLENTVERCAHINGNRPRQSRGFGELLSTAKQDLVLEEQSPSSSNSLENSLVKDYIHYNGDFNAKSVNGCVPSPSDAKSISSEDDLRNPDSPSSNELIHYRPRTFNVGDLVWGQIKGLTSWPGKLVREDDVHNSCQQSPEEGKVEPEKLKTLTEGLEAYSRVRKRNRKSGKLNNHLEAAIHEAMSELDKMSGTVHQIPQGDRQMRPPKPKRRKISR

SEQ ID NO: 50885 - protein, 1064 aa, Homo sapiens
  Payload ID: 10164
  Gene Symbol: MBD5
  Gene Name: methyl-CpG binding domain protein 5
  ENSP ID: ENSP00000393168
  MOD_RES (1)..(1): Any amino acid
XNSSPIHLNRTPLSPPSVMLHGSPVQSSCAMAGRTNIPLSPTLTTKSPVMKKPMCNFSTNMEIPRAMFHHKPPQGPPPPPPPSCALQKKPLTSEKDPLGILDPIPSKPVNQNPVIINPTSFHSNVHSQVPMMNVSMPPAVVPLPSNLPLPTVKPGHMNHGSHVQRVQHSASTSLSPSPVTSPVHMMGTGIGRIEASPQRSRSSSTSSDHGNFMMPPVGPQATSSGIKVPPRSPRSTIGSPRPSMPSSPSTKSDGHHQYKDIPNPLIAGISNVLNTPSSAAFPTASAGSSSVKSQPGLLGMPLNQILNQHNAASFPASSLLSAAAKAQLANQNKLAGNNSSSSSNSGAVAGSGNTEGHSTLNTMFPPTANMLLPTGEGQSGRAALRDKLMSQQKDALRKRKQPPTTVLSLLRQSQMDSSAVPKPGPDLLRKQGQGSFPISSMSQLLQSMSCQSSHLSSNSTPGCGASNTALPCSANQLHFTDPSMNSSVLQNIPLRGEAVHCHNANTNFVHSNSPVPNHHLAGLINQIQASGNCGMLSQSGMALGNSLHPNPPQSRISTSSTPVIPNSIVSSYNQTSSEAGGSGPSSSIAIAGTNHPAITKTTSVLQDGVIVTTAAGNPLQSQLPIGSDFPFVGQEHALHFPSNSTSNNHLPHPLNPSLLSSLPISLPVNQQHLLNQNLLNILQPSAGEGKSEINLHPLGFLNPNVNAALAFLSSDMDGQVLQPVHFQLLAALLQNQAQAAAMLPLPSFNLTISDLLQQQNTPLPSLTQMTAPPDHLPSNQSDNSRAETLLTSPLGNPLPSFAGSDTTFNPLFLPAVNGASGLMTLNPQLLGGVLNSASANTANHPEVSIATSSQATTTTTTTSSAVAALTVSTLGGTAVVSMAETLLNISNNAGNTPGPAKLNSNSVVPQLLNPLLGTGLLGDMSSINNTLSNHQLTHLQSLLNNNQMFPPNQQQQQLLQGYQNLQAFQGQSTIPCPANNNPMACLFQNFQVEPEKLKTLTEGLEAYSRVRKRNRKSGKLNNHLEAAIHEAMSELDKMSGTVHQIPQGDRQMRPPKPKRRKISR

SEQ ID NO: 50886 - protein, 77 aa, Homo sapiens
  Payload ID: 10164
  Gene Symbol: MBD5
  Gene Name: methyl-CpG binding domain protein 5
  ENSP ID: ENSP00000485889
  MOD_RES (1)..(1): Any amino acid
XSPSSNELIHYRPRTFNVGDLVWGQIKGLTSWPGKLVREDDVHNSCQQSPEEGKVHQIPQGDRQMRPPKPKRRKISR

SEQ ID NO: 50887 - protein, 113 aa, Homo sapiens
  Payload ID: 10164
  Gene Symbol: MBD5
  Gene Name: methyl-CpG binding domain protein 5
  ENSP ID: ENSP00000486209
PSSSNSLENSLVKDYIHYNGDFNAKSVNGCVPSPSDAKSISSEDDLRNPDSPSSNELIHYRPRTFNVGDLVWGQIKGLTSWPGKLVREDDVHNSCQQSPEEGKVYQSLSIVKY

SEQ ID NO: 50888 - protein, 851 aa, Homo sapiens
  Payload ID: 10164
  Gene Symbol: MBD5
  Gene Name: methyl-CpG binding domain protein 5
  Uniprot ID: Q9P267
  ENSP ID: ENSP00000486370
MNGGKECDGGDKEGGLPAIQVPVGWQRRVDQNGVLYVSPSGSLLSCLEQVKTYLLTDGTCKCGLECPLILPKVFNFDPGAAVKQRTAEDVKADEDVTKLCIHKRKIIAVATLHKSMEAPHPSLVLTSPGGGTNATPVVPSRAATPRSVRNKSHEGITNSVMPECKNPFKLMIGSSNAMGRLYVQELPGSQQQELHPVYPRQRLGSSEHGQKSPFRGSHGGLPSPASSGSQIYGDGSISPRTDPLGSPDVFTRSNPGFHGAPNSSPIHLNRTPLSPPSVMLHGSPVQSSCAMAGRTNIPLSPTLTTKSPVMKKPMCNFSTNMEIPRAMFHHKPPQGPPPPPPPSCALQKKPLTSEKDPLGILDPIPSKPVNQNPVIINPTSFHSNVHSQVPMMNVSMPPAVVPLPSNLPLPTVKPGHMNHGSHVQRVQHSASTSLSPSPVTSPVHMMGTGIGRIEASPQRSRSSSTSSDHGNFMMPPVGPQATSSGIKVPPRSPRSTIGSPRPSMPSSPSTKSDGHHQYKDIPNPLIAGISNVLNTPSSAAFPTASAGSSSVKSQPGLLGMPLNQILNQHNAASFPASSLLSAAAKAQLANQNKLAGNNSSSSSNSGAVAGSGNTEGHSTLNTMFPPTANMLLPTGEGQSGRAALRDKLMSQQKDALRKRKQPPTTVLSLLRQSQMDSSAVPKPGPDLLRKQGQGSFPISSMSQLLQSMSCQSSHLSSNSTPGCGASNTALPCSANQLHFTDPSMNSSVLQNIPLRGEAVHCHNANTNFVHSNSPVPNHHLAGLINQIQASGNCGMLSQSGMALGNSLHPNPPQSRISTSSTPVIPNSIVSSYNQTSSEAGMVLLEKSTQRY

SEQ ID NO: 50889 - protein, 1086 aa, Homo sapiens
  Payload ID: 10164
  Gene Symbol: MBD5
  Gene Name: methyl-CpG binding domain protein 5
  ENSP ID: ENSP00000487089
MNGGKECDGGDKEGGLPAIQVPVGWQRRVDQNGVLYVSPSGSLLSCLEQVKTYLLTDGTCKCGLECPLILPKVFNFDPGAAVKQRTAEDVKADEDVTKLCIHKRKIIAVATLHKSMEAPHPSLVLTSPGGGTNATPVVPSRAATPRSVRNKSHEGITNSVMPECKNPFKLMIGSSNAMGRLYVQELPGSQQQELHPVYPRQRLGSSEHGQKSPFRGSHGGLPSPASSGSQIYGDGSISPRTDPLGSPDVFTRSNPGFHGAPNSSPIHLNRTPLSPPSVMLHGSPVQSSCAMAGRTNIPLSPTLTTKSPVMKKPMCNFSTNMEIPRAMFHHKPPQGPPPPPPPSCALQKKPLTSEKDPLGILDPIPSKPVNQNPVIINPTSFHSNVHSQVPMMNVSMPPAVVPLPSNLPLPTVKPGHMNHGSHVQRVQHSASTSLSPSPVTSPVHMMGTGIGRIEASPQRSRSSSTSSDHGNFMMPPVGPQATSSGIKVPPRSPRSTIGSPRPSMPSSPSTKSDGHHQYKDIPNPLIAGISNVLNTPSSAAFPTASAGSSSVKSQPGLLGMPLNQILNQHNAASFPASSLLSAAAKAQLANQNKLAGNNSSSSSNSGAVAGSGNTEGHSTLNTMFPPTANMLLPTGEGQSGRAALRDKLMSQQKDALRKRKQPPTTVLSLLRQSQMDSSAVPKPGPDLLRKQGQGSFPISSMSQLLQSMSCQSSHLSSNSTPGCGASNTALPCSANQLHFTDPSMNSSVLQNIPLRGEAVHCHNANTNFVHSNSPVPNHHLAGLINQIQASGNCGMLSQSGMALGNSLHPNPPQSRISTSSTPVIPNSIVSSYNQTSSEAGGSGPSSSIAIAGTNHPAITKTTSVLQDGVIVTTAAGNPLQSQLPIGSDFPFVGQEHALHFPSNSTSNNHLPHPLNPSLLSSLPISLPVNQQHLLNQNLLNILQPSAGEGDMSSINNTLSNHQLTHLQSLLNNNQMFPPNQQQQQLLQGYQNLQAFQGQSTIPCPANNNPMACLFQNFQVRMQEDAALLNKRISTQPGLTALPENPNTTLPPFQDTPCGAREVEDTNRRFGSLQPCPEKEQKKWKAK

SEQ ID NO: 50890 - protein, 1003 aa, Homo sapiens
  Payload ID: 10165
  Gene Symbol: MBD6
  Gene Name: methyl-CpG binding domain protein 6
  Uniprot ID: Q96DN6
  ENSP ID: ENSP00000347896
MNGGNESSGADRAGGPVATSVPIGWQRCVREGAVLYISPSGTELSSLEQTRSYLLSDGTCKCGLECPLNVPKVFNFDPLAPVTPGGAGVGPASEEDMTKLCNHRRKAVAMATLYRSMETTCSHSSPGEGASPQMFHTVSPGPPSARPPCRVPPTTPLNGGPGSLPPEPPSVSQAFPTLAGPGGLFPPRLADPVPSGGSSSPRFLPRGNAPSPAPPPPPAISLNAPSYNWGAALRSSLVPSDLGSPPAPHASSSPPSDPPLFHCSDALTPPPLPPSNNLPAHPGPASQPPVSSATMHLPLVLGPLGGAPTVEGPGAPPFLASSLLSAAAKAQHPPLPPPSTLQGRRPRAQAPSASHSSSLRPSQRRPRRPPTVFRLLEGRGPQTPRRSRPRAPAPVPQPFSLPEPSQPILPSVLSLLGLPTPGPSHSDGSFNLLGSDAHLPPPPTLSSGSPPQPRHPIQPSLPGTTSGSLSSVPGAPAPPAASKAPVVPSPVLQSPSEGLGMGAGPACPLPPLAGGEAFPFPSPEQGLALSGAGFPGMLGALPLPLSLGQPPPSPLLNHSLFGVLTGGGGQPPPEPLLPPPGGPGPPLAPGEPEGPSLLVASLLPPPPSDLLPPPSAPPSNLLASFLPLLALGPTAGDGEGSAEGAGGPSGEPFSGLGDLSPLLFPPLSAPPTLIALNSALLAATLDPPSGTPPQPCVLSAPQPGPPTSSVTTATTDPGASSLGKAPSNSGRPPQLLSPLLGASLLGDLSSLTSSPGALPSLLQPPGPLLSGQLGLQLLPGGGAPPPLSEASSPLACLLQSLQIPPEQPEAPCLPPESPASALEPEPARPPLSALAPPHGSPDPPVPELLTGRGSGKRGRRGGGGLRGINGEARPARGRKPGSRREPGRLALKWGTRGGFNGQMERSPRRTHHWQHNGELAEGGAEPKDPPPPGPHSEDLKVPPGVVRKSRRGRRRKYNPTRNSNSSRQDITLEPSPTARAAVPLPPRARPGRPAKNKRRKLAP

SEQ ID NO: 50891 - protein, 66 aa, Homo sapiens
  Payload ID: 10165
  Gene Symbol: MBD6
  Gene Name: methyl-CpG binding domain protein 6
  ENSP ID: ENSP00000446481
MTKLCNHRRKAVAMATLYRSMETTCSHSSPGEGASPQMFHTVSPGPPSARPPCRVPPTTPLNGGPG

SEQ ID NO: 50892 - protein, 176 aa, Homo sapiens
  Payload ID: 10165
  Gene Symbol: MBD6
  Gene Name: methyl-CpG binding domain protein 6
  ENSP ID: ENSP00000446834
ESSGADRAGGPVATSVPIGWQRCVREGAVLYISPSGTELSSLEQTRSYLLSDGTCKCGLECPLNVPKVFNFDPLAPVTPGGAGVGPASEEDMTKLCNHRRKAVAMATLYRSMETTCSHSSPGSPPQPRHPIQPSLPGTTSGSLSSVPGAPAPPAASKAPVVPSPVLQSPSEGLGMG

SEQ ID NO: 50893 - protein, 45 aa, Homo sapiens
  Payload ID: 10165
  Gene Symbol: MBD6
  Gene Name: methyl-CpG binding domain protein 6
  ENSP ID: ENSP00000447365
MNGGNESSGADRAGGPVATSVPIGWQRCVREGAVLYISPSGTELS

SEQ ID NO: 50894 - protein, 27 aa, Homo sapiens
  Payload ID: 10165
  Gene Symbol: MBD6
  Gene Name: methyl-CpG binding domain protein 6
  ENSP ID: ENSP00000447418
  MOD_RES (1)..(1): Any amino acid
XARAAVPLPPRARPGRPAKNKRRKLAP

SEQ ID NO: 50895 - protein, 148 aa, Homo sapiens
  Payload ID: 10165
  Gene Symbol: MBD6
  Gene Name: methyl-CpG binding domain protein 6
  ENSP ID: ENSP00000448070
MNGGNESSGADRAGGPVATSVPIGWQRCVREGAVLYISPSGTELSSLEQTRSYLLSDGTCKCGLECPLNVPKVFNFDPLAPVTPGGAGVGPASEEDMTKLCNHRRKAVAMATLYRSMETTCSHSSPGEGASPQMFHTVSPGPPSARPP

SEQ ID NO: 50896 - protein, 53 aa, Homo sapiens
  Payload ID: 10165
  Gene Symbol: MBD6
  Gene Name: methyl-CpG binding domain protein 6
  ENSP ID: ENSP00000448202
MNGGNESSGADRAGGPVATSVPIGWQRCVREGAVLYISPSGTELSSLEQTRSY

SEQ ID NO: 50897 - protein, 47 aa, Homo sapiens
  Payload ID: 10165
  Gene Symbol: MBD6
  Gene Name: methyl-CpG binding domain protein 6
  ENSP ID: ENSP00000449541
MNGGNESSGADRAGGPVATSVPIGWQRCVREGAVLYIRRICNLSTVL

SEQ ID NO: 50898 - protein, 73 aa, Homo sapiens
  Payload ID: 10165
  Gene Symbol: MBD6
  Gene Name: methyl-CpG binding domain protein 6
  ENSP ID: ENSP00000449603
MNGGNESSGADRAGGPVATSVPIGWQRCVREGAVLYISPSGTELSSLEQTRSYLLSDGTCKCGLECPLNVPKV

SEQ ID NO: 50899 - protein, 504 aa, Homo sapiens
  Payload ID: 10165
  Gene Symbol: MBD6
  Gene Name: methyl-CpG binding domain protein 6
  ENSP ID: ENSP00000449749
GMGAGPACPLPPLAGGEAFPFPSPEQGLALSGAGFPGMLGALPLPLSLGQPPPSPLLNHSLFGVLTGGGGQPPPEPLLPPPGGPGPPLAPGEPEGPSLLVASLLPPPPSDLLPPPSAPPSNLLASFLPLLALGPTAGDGEGSAEGAGGPSGEPFSGLGDLSPLLFPPLSAPPTLIALNSALLAATLDPPSGTPPQPCVLSAPQPGPPTSSVTTATTDPGASSLGKAPSNSGRPPQLLSPLLGASLLGDLSSLTSSPGALPSLLQPPGPLLSGQLGLQLLPGGGAPPPLSEASSPLACLLQSLQIPPEQPEAPCLPPESPASALEPEPARPPLSALAPPHGSPDPPVPELLTGRGSGKRGRRGGGGLRGINGEARPARGRKPGSRREPGRLALKWGTRGGFNGQMERSPRRTHHWQHNGELAEGGAEPKDPPPPGPHSEDLKVPPGVVRKSRRGRRRKYNPTRNSNSSRQDITLEPSPTARAAVPLPPRARPGRPAKNKRRKLAP

SEQ ID NO: 50900 - protein, 190 aa, Homo sapiens
  Payload ID: 10165
  Gene Symbol: MBD6
  Gene Name: methyl-CpG binding domain protein 6
  ENSP ID: ENSP00000450160
  MOD_RES (1)..(1): Any amino acid
XLLSGQLGLQLLPGGGAPPPLSEASSPLACLLQSLQQIPPEQPEAPCLPPESPASALEPEPARPPLSALAPPHGSPDPPVPELLTGRGSGKRGRRGGGGLRGINGEARPARGRKPGSRREPGRLALKWGTRGGFNGQMERSPRRTHHWQHNGELAEGGAEPKDPPPPGPHSEDLKVPPGVVRKSRRGRRR

SEQ ID NO: 50901 - protein, 53 aa, Homo sapiens; identical to SEQ ID NO: 50896
  Payload ID: 10165
  Gene Symbol: MBD6
  Gene Name: methyl-CpG binding domain protein 6
  ENSP ID: ENSP00000450370

SEQ ID NO: 50902 - protein, 725 aa, Homo sapiens
  Payload ID: 10166
  Gene Symbol: MCCC1
  Gene Name: methylcrotonoyl-CoA carboxylase 1 (alpha)
  Uniprot ID: Q96RQ3
  ENSP ID: ENSP00000265594
MAAASAVSVLLVAAERNRWHRLPSLLLPPRTWVWRQRTMKYTTATGRNITKVLIANRGEIACRVMRTAKKLGVQTVAVYSEADRNSMHVDMADEAYSIGPAPSQQSYLSMEKIIQVAKTSAAQAIHPGCGFLSENMEFAELCKQEGIIFIGPPPSAIRDMGIKSTSKSIMAAAGVPVVEGYHGEDQSDQCLKEHARRIGYPVMIKAVRGGGGKGMRIVRSEQEFQEQLESARREAKKSFNDDAMLIEKFVDTPRHVEVQVFGDHHGNAVYLFERDCSVQRRHQKIIEEAPAPGIKSEVRKKLGEAAVRAAKAVNYVGAGTVEFIMDSKHNFCFMEMNTRLQVEHPVTEMITGTDLVEWQLRIAAGEKIPLSQEEITLQGHAFEARIYAEDPSNNFMPVAGPLVHLSTPRADPSTRIETGVRQGDEVSVHYDPMIAKLVVWAADRQAALTKLRYSLRQYNIVGLHTNIDFLLNLSGHPEFEAGNVHTDFIPQHHKQLLLSRKAAAKESLCQAALGLILKEKAMTDTFTLQAHDQFSPFSSSSGRRLNISYTRNMTLKDGKNNVAIAVTYNHDGSYSMQIEDKTFQVLGNLYSEGDCTYLKCSVNGVASKAKLIILENTIYLFSKEGSIEIDIPVPKYLSSVSSQETQGGPLAPMTGTIEKVFVKAGDKVKAGDSLMVMIAMKMEHTIKSPKDGTVKKVFYREGAQANRHTPLVEFEEEESDKRESE

SEQ ID NO: 50903 - protein, 47 aa, Homo sapiens
  Payload ID: 10166
  Gene Symbol: MCCC1
  Gene Name: methylcrotonoyl-CoA carboxylase 1 (alpha)
  ENSP ID: ENSP00000418979
MAAASAVSVLLVAAERNRWHRLPSLLLPPRTWVWRQRTMKYTTATGR

SEQ ID NO: 50904 - protein, 56 aa, Homo sapiens
  Payload ID: 10166
  Gene Symbol: MCCC1
  Gene Name: methylcrotonoyl-CoA carboxylase 1 (alpha)
  ENSP ID: ENSP00000419328
MAAASAVSVLLVAAERNRWHRLPSLLLPPRLSIQDAVFSQKTWNLLNFVSKKELFL

SEQ ID NO: 50905 - protein, 61 aa, Homo sapiens
  Payload ID: 10166
  Gene Symbol: MCCC1
  Gene Name: methylcrotonoyl-CoA carboxylase 1 (alpha)
  ENSP ID: ENSP00000419658
MAAASAVSVLLVAAERNRWHRLPSLLLPPRTWVWRQRTMKYTTATGYPSRMRFSLRKHGIC

SEQ ID NO: 50906 - protein, 616 aa, Homo sapiens
  Payload ID: 10166
  Gene Symbol: MCCC1
  Gene Name: methylcrotonoyl-CoA carboxylase 1 (alpha)
  ENSP ID: ENSP00000419898
MEKIIQVAKTSAAQAIHPGCGFLSENMEFAELCKQEGIIFIGPPPSAIRDMGIKSTSKSIMAAAGVPVVEGYHGEDQSDQCLKEHARRIGYPVMIKAVRGGGGKGMRIVRSEQEFQEQLESARREAKKSFNDDAMLIEKFVDTPRHVEVQVFGDHHGNAVYLFERDCSVQRRHQKIIEEAPAPGIKSEVRKKLGEAAVRAAKAVNYVGAGTVEFIMDSKHNFCFMEMNTRLQVEHPVTEMITGTDLVEWQLRIAAGEKIPLSQEEITLQGHAFEARIYAEDPSNNFMPVAGPLVHLSTPRADPSTRIETGVRQGDEVSVHYDPMIAKLVVWAADRQAALTKLRYSLRQYNIVGLHTNIDFLLNLSGHPEFEAGNVHTDFIPQHHKQLLLSRKAAAKESLCQAALGLILKEKAMTDTFTLQAHDQFSPFSSSSGRRLNISYTRNMTLKDGKNNVAIAVTYNHDGSYSMQIEDKTFQVLGNLYSEGDCTYLKCSVNGVASKAKLIILENTIYLFSKEGSIEIDIPVPKYLSSVSSQETQGGPLAPMTGTIEKVFVKAGDKVKAGDSLMVMIAMKMEHTIKSPKDGTVKKVFYREGAQANRHTPLVEFEEEESDKRESE

SEQ ID NO: 50907 - protein, 47 aa, Homo sapiens; identical to SEQ ID NO: 50903
  Payload ID: 10166
  Gene Symbol: MCCC1
  Gene Name: methylcrotonoyl-CoA carboxylase 1 (alpha)
  ENSP ID: ENSP00000420088

SEQ ID NO: 50908 - protein, 112 aa, Homo sapiens
  Payload ID: 10166
  Gene Symbol: MCCC1
  Gene Name: methylcrotonoyl-CoA carboxylase 1 (alpha)
  ENSP ID: ENSP00000420223
MAAASAVSVLLVAAERNRWHRLPSLLLPPRTWVWRQRTMKYTTATGRNITKVLIANRGEIACRVMRTAKKLGVQTVAVYSEADRNSMHVDMQDDLDFTEKIKLRFLPQNLLT

SEQ ID NO: 50909 - protein, 598 aa, Homo sapiens
  Payload ID: 10166
  Gene Symbol: MCCC1
  Gene Name: methylcrotonoyl-CoA carboxylase 1 (alpha)
  ENSP ID: ENSP00000420433
MAAASAVSVLLVAAERNRWHRLPSLLLPPRTWVWRQRTMKYTTATDEAYSIGPAPSQQSYLSMEKIIQVAKTSAAQAIHPGCGFLSENMEFAELCKQEGIIFIGPPPSAIRDMGIKSTSKSIMAAAGVPVVEGYHGEDQSDQCLKEHARRIGYPVMIKAVRGGGGKGMRIVRSEQEFQEQLESARREAKKSFNDDAMLIEKFVDTPRHVEVQVFGDHHGNAVYLFERDCSVQRRHQKIIEEAPAPGIKSEVRKKLGEAAVRAAKAVNYVGAGTVEFIMDSKHNFCFMEMNTRLQVEHPVTEMITGTDLVEWQLRIAAGEKIPLSQEEITLQGHAFEARIYAEDPSNNFMPVAGPLVHLSTPRADPSTRIETGVRQGDEVSVHYDPMIAKLVVWAADRQAALTKLRYSLRQYNIVGLHTNIDFLLNLSGHPEFEAGNVHTDFIPQHHKQLLLSRKAAAKESLCQAALGLILKEKAMTDTFTLQAHDQFSPFSSSSGRRLNISYTRNMTLKDGKNNVAIAVTYNHDGSYSMQIEDKTFQVLGNLYSEGDCTYLKCSVNGVASKAKLIILENTIYLFSKEGSIEIDIPVPKYLSSVSSQET

SEQ ID NO: 50910 - protein, 61 aa, Homo sapiens; identical to SEQ ID NO: 50905
  Payload ID: 10166
  Gene Symbol: MCCC1
  Gene Name: methylcrotonoyl-CoA carboxylase 1 (alpha)
  ENSP ID: ENSP00000420591

SEQ ID NO: 50911 - protein, 434 aa, Homo sapiens
  Payload ID: 10166
  Gene Symbol: MCCC1
  Gene Name: methylcrotonoyl-CoA carboxylase 1 (alpha)
  ENSP ID: ENSP00000420648
MKYTTATGRNITKVLIANRGEIACRVMRTAKKLGVQTVAVYSEADRNSMHVDMADEAYSIGPAPSQQSYLSMEKIIQVAKTSAAQAIHPGCGFLSENMEFAELCKQEGIIFIGPPPSAIRDMGIKSTSKSIMAAAGVPVVEGYHGEDQSDQCLKEHARRIGYPVMIKAVRGGGGKGMRIVRSEQEFQEQLESARREAKKSFNDDAMLIEKFVDTPRHVEVQVFGDHHGNAVYLFERDCSVQRRHQKIIEEAPAPGIKSEVRKKLGEAAVRAAKAVNYVGAGTVEFIMDSKHNFCFMEMNTRLQVEHPVTEMITGTDLVEWQLRIAAGEKIPLSQEEITLQGHAFEARIYAEDPSNNFMPVAGPLVHLSTPRADPSTRIETGVRQGDEVSVHYDPMIAKLVVWAADRQAALTKLRYSLRQYNINSLHFRLAVEED

SEQ ID NO: 50912 - protein, 575 aa, Homo sapiens
  Payload ID: 10166
  Gene Symbol: MCCC1
  Gene Name: methylcrotonoyl-CoA carboxylase 1 (alpha)
  ENSP ID: ENSP00000441253
MEKIIQVAKTSAAQHIQSIMAAAGVPVVEGYHGEDQSDQCLKEHARRIGYPVMIKAVRGGGGKGMRIVRSEQEFQEQLESARREAKKSFNDDAMLIEKFVDTPRHVEVQVFGDHHGNAVYLFERDCSVQRRHQKIIEEAPAPGIKSEVRKKLGEAAVRAAKAVNYVGAGTVEFIMDSKHNFCFMEMNTRLQVEHPVTEMITGTDLVEWQLRIAAGEKIPLSQEEITLQGHAFEARIYAEDPSNNFMPVAGPLVHLSTPRADPSTRIETGVRQGDEVSVHYDPMIAKLVVWAADRQAALTKLRYSLRQYNIVGLHTNIDFLLNLSGHPEFEAGNVHTDFIPQHHKQLLLSRKAAAKESLCQAALGLILKEKAMTDTFTLQAHDQFSPFSSSSGRRLNISYTRNMTLKDGKNNVAIAVTYNHDGSYSMQIEDKTFQVLGNLYSEGDCTYLKCSVNGVASKAKLIILENTIYLFSKEGSIEIDIPVPKYLSSVSSQETQGGPLAPMTGTIEKVFVKAGDKVKAGDSLMVMIAMKMEHTIKSPKDGTVKKVFYREGAQANRHTPLVEFEEEESDKRESE

SEQ ID NO: 50913 - protein, 575 aa, Homo sapiens; identical to SEQ ID NO: 50912
  Payload ID: 10166
  Gene Symbol: MCCC1
  Gene Name: methylcrotonoyl-CoA carboxylase 1 (alpha)
  ENSP ID: ENSP00000480435

SEQ ID NO: 50914 - protein, 434 aa, Homo sapiens; identical to SEQ ID NO: 50911
  Payload ID: 10166
  Gene Symbol: MCCC1
  Gene Name: methylcrotonoyl-CoA carboxylase 1 (alpha)
  ENSP ID: ENSP00000486824

SEQ ID NO: 50915 - protein, 563 aa, Homo sapiens
  Payload ID: 10167
  Gene Symbol: MCCC2
  Gene Name: methylcrotonoyl-CoA carboxylase 2 (beta)
  Uniprot ID: Q9HCC0
  ENSP ID: ENSP00000343657
MWAVLRLALRPCARASPAGPRAYHGDSVASLGTQPDLGSALYQENYKQMKALVNQLHERVEHIKLGGGEKARALHISRGKLLPRERIDNLIDPGSPFLELSQFAGYQLYDNEEVPGGGIITGIGRVSGVECMIIANDATVKGGAYYPVTVKKQLRAQEIAMQNRLPCIYLVDSGGAYLPRQADVFPDRDHFGRTFYNQAIMSSKNIAQIAVVMGSCTAGGAYVPAMADENIIVRKQGTIFLAGPPLVKAATGEEVSAEDLGGADLHCRKSGVSDHWALDDHHALHLTRKVVRNLNYQKKLDVTIEPSEEPLFPADELYGIVGANLKRSFDVREVIARIVDGSRFTEFKAFYGDTLVTGFARIFGYPVGIVGNNGVLFSESAKKGTHFVQLCCQRNIPLLFLQNITGFMVGREYEAEGIAKDGAKMVAAVACAQVPKITLIIGGSYGAGNYGMCGRAYSPRFLYIWPNARISVMGGEQAANVLATITKDQRAREGKQFSSADEAALKEPIIKKFEEEGNPYYSSARVWDDGIIDPADTRLVLGLSFSAALNAPIEKTDFGIFRM

SEQ ID NO: 50916 - protein, 363 aa, Homo sapiens
  Payload ID: 10167
  Gene Symbol: MCCC2
  Gene Name: methylcrotonoyl-CoA carboxylase 2 (beta)
  ENSP ID: ENSP00000420994
MWAVLRLALRPCARASPAGPRAYHGDSVASLGTQPDLGSALYQENYKQMKALVNQLHERVEHIKLGGGEKARALHISRGKLLPRERIDNLIDPGSPFLELSQFAGYQLYDNEEVPGGGIITGIGRVSGVECMIIANDATVKGGAYYPVTVKKQLRAQEIAMQNRLPCIYLVDSGGAYLPRQADVFPDRDHFGRTFYNQAIMSSKNIAQIAVVMGSCTAGGAYVPAMADENIIVRKQGTIFLAGPPLVKAATGEEVSAEDLGGADLHCRKSGVSDHWALDDHHALHLTRKVVRNLNYQKKLDVTIEPSEEPLFPADELYGIVGANLKRSFDVREVIARIVDGSRFTEFKAFYGDTLVTGIKVKN

SEQ ID NO: 50917 - protein, 329 aa, Homo sapiens
  Payload ID: 10167
  Gene Symbol: MCCC2
  Gene Name: methylcrotonoyl-CoA carboxylase 2 (beta)
  ENSP ID: ENSP00000423202
MWAVLRLALRPCARASPAGPRAYHGDSVASLGTQPDLGSALYQENYKQMKALVNQLHERVEHIKLGGGEKARALHISRGKLLPRERIDNLIDPGSPFLELSQFAGYQLYDNEEVPGGGIITGIGRVSGVECMIIANDATVKGGAYYPVTVKKQLRAQEIAMQNRLPCIYLVDSGGAYLPRQADVFPDRDHFGRTFYNQAIMSSKNIAQVKAATGEEVSAEDLGGADLHCRKSGVSDHWALDDHHALHLTRKVVRNLNYQKKLDVTIEPSEEPLFPADELYGIVGANLKRSFDVREVIARIVDGSRFTEFKAFYGDTLVTGIKPLEKHKT

SEQ ID NO: 50918 - protein, 286 aa, Homo sapiens
  Payload ID: 10167
  Gene Symbol: MCCC2
  Gene Name: methylcrotonoyl-CoA carboxylase 2 (beta)
  ENSP ID: ENSP00000425474
MADENIIVRKQGTIFLAGPPLVKAATGEEVSAEDLGGADLHCRKSGVSDHWALDDHHALHLTRKVVRNLNYQKKLDVTIEPSEEPLFPADELYGIVGANLKRSFDVREKFFMKYFLRLDLNSYNSTWQHGFARIFGYPVGIVGNNGVLFSESAKKGTHFVQLCCQRNIPLLFLQNITGFMVGREYEAEGIAKDGAKMVAAVACAQVPKITLIIGGSYGAGNYGMCGRAYSPRFLYIWPNARISVMGGEQAANVLATITKDQRAREGKQFSSADEAALKEPIIKKFE

SEQ ID NO: 50919 - protein, 208 aa, Homo sapiens
  Payload ID: 10167
  Gene Symbol: MCCC2
  Gene Name: methylcrotonoyl-CoA carboxylase 2 (beta)
  ENSP ID: ENSP00000478750
MWAVLRLALRPCARASPAGPRAYHGDSVASLGTQPDLGSALYQENYKQMKALVNQLHERVEHIKLGGGEKARALHISRGKLLPRERIDNLIDPGSPFLELSQFAGYQLYDNEEVPGGGIITGIGRVSGVECMIIANDATVKGGAYYPVTVKKQLRAQEIAMQNRLPCIYLVDSGGAYLPRQADVFPDRDHFGRTFYNQAIMSSKNIAQ

SEQ ID NO: 50920 - protein, 208 aa, Homo sapiens; identical to SEQ ID NO: 50919
  Payload ID: 10167
  Gene Symbol: MCCC2
  Gene Name: methylcrotonoyl-CoA carboxylase 2 (beta)
  ENSP ID: ENSP00000483794

SEQ ID NO: 50921 - protein, 208 aa, Homo sapiens; identical to SEQ ID NO: 50919
  Payload ID: 10167
  Gene Symbol: MCCC2
  Gene Name: methylcrotonoyl-CoA carboxylase 2 (beta)
  ENSP ID: ENSP00000486062

SEQ ID NO: 50922 - protein, 208 aa, Homo sapiens; identical to SEQ ID NO: 50919
  Payload ID: 10167
  Gene Symbol: MCCC2
  Gene Name: methylcrotonoyl-CoA carboxylase 2 (beta)
  ENSP ID: ENSP00000486135

SEQ ID NO: 50923 - protein, 329 aa, Homo sapiens; identical to SEQ ID NO: 50917
  Payload ID: 10167
  Gene Symbol: MCCC2
  Gene Name: methylcrotonoyl-CoA carboxylase 2 (beta)
  ENSP ID: ENSP00000486535

SEQ ID NO: 50924 - protein, 208 aa, Homo sapiens; identical to SEQ ID NO: 50919
  Payload ID: 10167
  Gene Symbol: MCCC2
  Gene Name: methylcrotonoyl-CoA carboxylase 2 (beta)
  ENSP ID: ENSP00000486592

SEQ ID NO: 50925 - protein, 935 aa, Homo sapiens [sequence omitted]

SEQ ID NO: 50926 - protein, 1020 aa, Homo sapiens
  Payload ID: 10168
  Gene Symbol: MTHFD1
  Gene Name: methylenetetrahydrofolate dehydrogenase (NADP+ dependent) 1, methenyltetrahydrofolate cyclohydrolase, formyltetrahydrofolate synthetase
  ENSP ID: ENSP00000438588
MRHRVCRGRSGQGRRRSSVIPWPVPKHVGWVVLLGCGGSGTSILVVSIVGSGLIKAMAPAEILNGKEISAQIRARLKNQVTQLKEQVPGFTPRLAILQVGNRDDSNLYINVKLKAAEEIGIKATHIKLPRTTTESEVMKYITSLNEDSTVHGFLVQLPLDSENSINTEEVINAIAPEKDVDGLTSINAGKLARGDLNDCFIPCTPKGCLELIKETGVPIAGRHAVVVGRSKIVGAPMHDLLLWNNATVTTCHSKTAHLDEEVNKGDILVVATGQPEMVKGEWIKPGAIVIDCGINYVPDDKKPNGRKVVGDVAYDEAKERASFITPVPGGVGPMTVAMLMQSTVESAKRFLEKFKPGKWMIQYNNLNLKTPVPSDIDISRSCKPKPIGKLAREIGLLSEEVELYGETKAKVLLSALERLKHRPDGKYVVVTGITPTPLGEGKSTTTIGLVQALGAHLYQNVFACVRQPSQGPTFGIKGGAAGGGYSQVIPMEEFNLHLTGDIHAITAANNLVAAAIDARIFHELTQTDKALFNRLVPSVNGVRRFSDIQIRRLKRLGIEKTDPTTLTDEEINRFARLDIDPETITWQRVLDTNDRFLRKITIGQAPTEKGHTRTAQFDISVASEIMAVLALTTSLEDMRERLGKMVVASSKKGEPVSAEDLGVSGALTVLMKDAIKPNLMQTLEGTPVFVHAGPFANIAHGNSSIIADRIALKLVGPEGFVVTEAGFGADIGMEKFFNIKCRYSGLCPHVVVLVATVRALKMHGGGPTVTAGLPLPKAYIQENLELVEKGFSNLKKQIENARMFGIPVVVAVNAFKTDTESELDLISRLSREHGAFDAVKCTHWAEGGKGALALAQAVQRAAQAPSSFQLLYDLKLPVEDKIRIIAQKIYGADDIELLPEAQHKAEVYTKQGFGNLPICMAKTHLSLSHNPEQKGVPTGFILPIRDIRASVGAGFLYPLVGTITIHLQEATLKVWPVSIQAHWELGSISKPREVSPCPEDLKLIVGVSPEVIFSLNSHHV

SEQ ID NO: 50927 - protein, 261 aa, Homo sapiens
  Payload ID: 10168
  Gene Symbol: MTHFD1
  Gene Name: methylenetetrahydrofolate dehydrogenase (NADP+ dependent) 1, methenyltetrahydrofolate cyclohydrolase, formyltetrahydrofolate synthetase
  Uniprot ID: P11586
  ENSP ID: ENSP00000450560
MRHRVCRGRSGQGRRRSSVIPWPVPKHVGWVVLLGCGGSGTSILVVSIVGSGLIKAMAPAEILNGKEISAQIRARLKNQVTQLKEQVPGFTPRLAILQVGNRDDSNLYINVKLKAAEEIGIKATHIKLPRTTTESEVMKYITSLNEDSTVHGFLVQLPLDSENSINTEEVINAIAPEKDVDGLTSINAGKLARGDLNDCFIPCTPKGCLELIKETGVPIAGRHAVVVGRSKIVGAPMHDLLLWNNATVTTCHSKTAHLDEE

SEQ ID NO: 50928 - protein, 68 aa, Homo sapiens
  Payload ID: 10168
  Gene Symbol: MTHFD1
  Gene Name: methylenetetrahydrofolate dehydrogenase (NADP+ dependent) 1, methenyltetrahydrofolate cyclohydrolase, formyltetrahydrofolate synthetase
  ENSP ID: ENSP00000476468
MKYITSLNEDSTVHGFLVQLPLDSENSINTEEVINAIAPEKDVDGLTSINAGKLARGDLNDCFIPCTP

SEQ ID NO: 50929 - protein, 107 aa, Homo sapiens
  Payload ID: 10168
  Gene Symbol: MTHFD1
  Gene Name: methylenetetrahydrofolate dehydrogenase (NADP+ dependent) 1, methenyltetrahydrofolate cyclohydrolase, formyltetrahydrofolate synthetase
  ENSP ID: ENSP00000477199
YDLKLPVEDKIRIIAQKIYGADDIELLPEAQHKAEVYTKQGFGNLPICMAKTHLSLSHNPEQKGVPTGFILPIRDIRASVGAGFLYPLVGTVSACCKGVVGASALLV

SEQ ID NO: 50930 - protein, 23 aa, Homo sapiens
  Payload ID: 10168
  Gene Symbol: MTHFD1
  Gene Name: methylenetetrahydrofolate dehydrogenase (NADP+ dependent) 1, methenyltetrahydrofolate cyclohydrolase, formyltetrahydrofolate synthetase
  ENSP ID: ENSP00000477359
MKYITSLNEDSTVHGFLVQLPLD

SEQ ID NO: 50931 - protein, 25 aa, Homo sapiens
  Payload ID: 10168
  Gene Symbol: MTHFD1
  Gene Name: methylenetetrahydrofolate dehydrogenase (NADP+ dependent) 1, methenyltetrahydrofolate cyclohydrolase, formyltetrahydrofolate synthetase
  ENSP ID: ENSP00000477501
MKYITSLNEDSTVHGFLVQLPLDSE

SEQ ID NO: 50932 - protein, 275 aa, Homo sapiens
  Payload ID: 10169
  Gene Symbol: MTHFD1L
  Gene Name: methylenetetrahydrofolate dehydrogenase (NADP+ dependent) 1-like
  Uniprot ID: Q6UB35
  ENSP ID: ENSP00000356276
MGTRLPLVLRQLRRPPQPPGPPRRLRVPCRASSGGGGGGGGGREGLLGQRRPQDGQARSSCSPGGRTPAARDSIVREVIQNSKEVLSLLQEKNPAFKPVLAIIQAGDDNLMQEINQNLAEEAGLNITHICLPPDSSEAEIIDEILKINEDTRVHGLALQISENLFSNKVLNALKPEKDVDGVTDINLGKLVRGDAHECFVSPVAKAVIELLEKSGVNLDGKKILVVGAHGSLEAALQCLFQRKGSMTMSIQWKTRQLQSKTESRSVTRLECRRVI

SEQ ID NO: 50933 - protein, 332 aa, Homo sapiens
  Payload ID: 10169
  Gene Symbol: MTHFD1L
  Gene Name: methylenetetrahydrofolate dehydrogenase (NADP+ dependent) 1-like
  ENSP ID: ENSP00000356277
  MOD_RES (1)..(1): Any amino acid
XGREGLLGQRRPQDGQARSSCSPGGRTPAARDSIVREVIQNSKEVLSLLQEKNPAFKPVLAIIQAGDDNLMQEINQNLAEEAGLNITHICLPPDSSEAEIIDEILKINEDTRVHGLALQISENLFSNKVLNALKPEKDVDGVTDINLGKLVRGDAHECFVSPVAKAVIELLEKSVGVNLDGKKILVVGAHGSLEAALQCLFQRKGSMTMSIQWKTRQLQSKLHEADIVVLGSPKPEEIPLTWIQPGTTVLNCSHDFLSGKVGCGSPRIHFGGLIEEDDVILLAAALRIQNMVSSGRRWLREQQHRRWRLHCLKLQPLSPVPSDIEISRGQTP

SEQ ID NO: 50934 - protein, 978 aa, Homo sapiens
  Payload ID: 10169
  Gene Symbol: MTHFD1L
  Gene Name: methylenetetrahydrofolate dehydrogenase (NADP+ dependent) 1-like
  Uniprot ID: Q6UB35
  ENSP ID: ENSP00000356290
MGTRLPLVLRQLRRPPQPPGPPRRLRVPCRASSGGGGGGGGGREGLLGQRRPQDGQARSSCSPGGRTPAARDSIVREVIQNSKEVLSLLQEKNPAFKPVLAIIQAGDDNLMQEINQNLAEEAGLNITHICLPPDSSEAEIIDEILKINEDTRVHGLALQISENLFSNKVLNALKPEKDVDGVTDINLGKLVRGDAHECFVSPVAKAVIELLEKSGVNLDGKKILVVGAHGSLEAALQCLFQRKGSMTMSIQWKTRQLQSKLHEADIVVLGSPKPEEIPLTWIQPGTTVLNCSHDFLSGKVGCGSPRIHFGGLIEEDDVILLAAALRIQNMVSSGRRWLREQQHRRWRLHCLKLQPLSPVPSDIEISRGQTPKAVDVLAKEIGLLADEIEIYGKSKAKVRLSVLERLKDQADGKYVLVAGITPTPLGEGKSTVTIGLVQALTAHLNVNSFACLRQPSQGPTFGVKGGAAGGGYAQVIPMEEFNLHLTGDIHAITAANNLLAAAIDTRILHENTQTDKALYNRLVPLVNGVREFSEIQLARLKKLGINKTDPSTLTEEEVSKFARLDIDPSTITWQRVLDTNDRFLRKITIGQGNTEKGHYRQAQFDIAVASEIMAVLALTDSLADMKARLGRMVVASDKSGQPVTADDLGVTGALTVLMKDAIKPNLMQTLEGTPVFVHAGPFANIAHGNSSVLADKIALKLVGEEGFVVTEAGFGADIGMEKFFNIKCRASGLVPNVVVLVATVRALKMHGGGPSVTAGVPLKKEYTEENIQLVADGCCNLQKQIQITQLFGVPVVVALNVFKTDTRAEIDLVCELAKRAGAFDAVPCYHWSVGGKGSVDLARAVREAASKRSRFQFLYDVQVPIVDKIRTIAQAVYGAKDIELSPEAQAKIDRYTQQGFGNLPICMAKTHLSLSHQPDKKGVPRDFILPISDVRASIGAGFIYPLVGTMSTMPGLPTRPCFYDIDLDTETEQVKGLF

SEQ ID NO: 50935 - protein, 92 aa, Homo sapiens
  Payload ID: 10169
  Gene Symbol: MTHFD1L
  Gene Name: methylenetetrahydrofolate dehydrogenase (NADP+ dependent) 1-like
  ENSP ID: ENSP00000391022
VYGAKDIELSPEAQAKIDRYTQQGFGNLPICMAKTHLSLSHQPDKKGVPRDFILPISDVRASIGAGFIYPLVGTRSSPLALVGESQPKQVHP

SEQ ID NO: 50936 - protein, 96 aa, Homo sapiens
  Payload ID: 10169
  Gene Symbol: MTHFD1L
  Gene Name: methylenetetrahydrofolate dehydrogenase (NADP+ dependent) 1-like
  ENSP ID: ENSP00000395158
NIQLVADGCCNLQKQIQITQLFGVPVVVALNVFKTDTRAEIDLVCELAKRAGAFDAVPCYHWSVGGKGSVDLARAVREAASKRSRFQFLYDVQPFS

SEQ ID NO: 50937 - protein, 57 aa, Homo sapiens
  Payload ID: 10169
  Gene Symbol: MTHFD1L
  Gene Name: methylenetetrahydrofolate dehydrogenase (NADP+ dependent) 1-like
  ENSP ID: ENSP00000399804
NLPICMAKTHLSLSHQPDKKGVPRDFILPISDVRASIGAGFIYPLVGTGGREAPLWL

SEQ ID NO: 50938 - protein, 114 aa, Homo sapiens
  Payload ID: 10169
  Gene Symbol: MTHFD1L
  Gene Name: methylenetetrahydrofolate dehydrogenase (NADP+ dependent) 1-like
  ENSP ID: ENSP00000400776
MQEINQNLAEEAGLNITHICLPPDSSEAEIIDEILKINEDTRVHGLALQISENLFSNKVLNALKPEKDVDGVTDINLGKLVRGDAHECFVSPVAKAVIELLEKSGVNLDGKKIL

SEQ ID NO: 50939 - protein, 108 aa, Homo sapiens
  Payload ID: 10169
  Gene Symbol: MTHFD1L
  Gene Name: methylenetetrahydrofolate dehydrogenase (NADP+ dependent) 1-like
  ENSP ID: ENSP00000407070
MQEINQNLAEEAGLNITHICLPPDSSEAEIIDEILKINEDTRVHGLALQISENLFSNKVLNALKPEKDVDGVTDINLGKLVRGDAHECFVSPVAKAVIELLEKSASRG

SEQ ID NO: 50940 - protein, 979 aa, Homo sapiens
  Payload ID: 10169
  Gene Symbol: MTHFD1L
  Gene Name: methylenetetrahydrofolate dehydrogenase (NADP+ dependent) 1-like
  ENSP ID: ENSP00000478253
MGTRLPLVLRQLRRPPQPPGPPRRLRVPCRASSGGGGGGGGGREGLLGQRRPQDGQARSSCSPGGRTPAARDSIVREVIQNSKEVLSLLQEKNPAFKPVLAIIQAGDDNLMQEINQNLAEEAGLNITHICLPPDSSEAEIIDEILKINEDTRVHGLALQISENLFSNKVLNALKPEKDVDGVTDINLGKLVRGDAHECFVSPVAKAVIELLEKSVGVNLDGKKILVVGAHGSLEAALQCLFQRKGSMTMSIQWKTRQLQSKLHEADIVVLGSPKPEEIPLTWIQPGTTVLNCSHDFLSGKVGCGSPRIHFGGLIEEDDVILLAAALRIQNMVSSGRRWLREQQHRRWRLHCLKLQPLSPVPSDIEISRGQTPKAVDVLAKEIGLLADEIEIYGKSKAKVRLSVLERLKDQADGKYVLVAGITPTPLGEGKSTVTIGLVQALTAHLNVNSFACLRQPSQGPTFGVKGGAAGGGYAQVIPMEEFNLHLTGDIHAITAANNLLAAAIDTRILHENTQTDKALYNRLVPLVNGVREFSEIQLARLKKLGINKTDPSTLTEEEVSKFARLDIDPSTITWQRVLDTNDRFLRKITIGQGNTEKGHYRQAQFDIAVASEIMAVLALTDSLADMKARLGRMVVASDKSGQPVTADDLGVTGALTVLMKDAIKPNLMQTLEGTPVFVHAGPFANIAHGNSSVLADKIALKLVGEEGFVVTEAGFGADIGMEKFFNIKCRASGLVPNVVVLVATVRALKMHGGGPSVTAGVPLKKEYTEENIQLVADGCCNLQKQIQITQLFGVPVVVALNVFKTDTRAEIDLVCELAKRAGAFDAVPCYHWSVGGKGSVDLARAVREAASKRSRFQFLYDVQVPIVDKIRTIAQAVYGAKDIELSPEAQAKIDRYTQQGFGNLPICMAKTHLSLSHQPDKKGVPRDFILPISDVRASIGAGFIYPLVGTMSTMPGLPTRPCFYDIDLDTETEQVKGLF

SEQ ID NO: 50941 - protein, 913 aa, Homo sapiens
  Payload ID: 10169
  Gene Symbol: MTHFD1L
  Gene Name: methylenetetrahydrofolate dehydrogenase (NADP+ dependent) 1-like
  ENSP ID: ENSP00000479539
MQSRRARPRREVIQNSKEVLSLLQEKNPAFKPVLAIIQAGDDNLMQEINQNLAEEAGLNITHICLPPDSSEAEIIDEILKINEDTRVHGLALQISENLFSNKVLNALKPEKDVDGVTDINLGKLVRGDAHECFVSPVAKAVIELLEKSVGVNLDGKKILVVGAHGSLEAALQCLFQRKGSMTMSIQWKTRQLQSKLHEADIVVLGSPKPEEIPLTWIQPGTTVLNCSHDFLSGKVGCGSPRIHFGGLIEEDDVILLAAALRIQNMVSSGRRWLREQQHRRWRLHCLKLQPLSPVPSDIEISRGQTPKAVDVLAKEIGLLADEIEIYGKSKAKVRLSVLERLKDQADGKYVLVAGITPTPLGEGKSTVTIGLVQALTAHLNVNSFACLRQPSQGPTFGVKGGAAGGGYAQVIPMEEFNLHLTGDIHAITAANNLLAAAIDTRILHENTQTDKALYNRLVPLVNGVREFSEIQLARLKKLGINKTDPSTLTEEEVSKFARLDIDPSTITWQRVLDTNDRFLRKITIGQGNTEKGHYRQAQFDIAVASEIMAVLALTDSLADMKARLGRMVVASDKSGQPVTADDLGVTGALTVLMKDAIKPNLMQTLEGTPVFVHAGPFANIAHGNSSVLADKIALKLVGEEGFVVTEAGFGADIGMEKFFNIKCRASGLVPNVVVLVATVRALKMHGGGPSVTAGVPLKKEYTEENIQLVADGCCNLQKQIQITQLFGVPVVVALNVFKTDTRAEIDLVCELAKRAGAFDAVPCYHWSVGGKGSVDLARAVREAASKRSRFQFLYDVQVPIVDKIRTIAQAVYGAKDIELSPEAQAKIDRYTQQGFGNLPICMAKTHLSLSHQPDKKGVPRDFILPISDVRASIGAGFIYPLVGTMSTMPGLPTRPCFYDIDLDTETEQVKGLF

SEQ ID NO: 50942 - protein, 350 aa, Homo sapiens
  Payload ID: 10170
  Gene Symbol: MTHFD2
  Gene Name: methylenetetrahydrofolate dehydrogenase (NADP+ dependent) 2, methenyltetrahydrofolate cyclohydrolase
  Uniprot ID: P13995
  ENSP ID: ENSP00000377617
MAATSLMSALAARLLQPAHSCSLRLRPFHLAAVRNEAVVISGRKLAQQIKQEVRQEVEEWVASGNKRPHLSVILVGENPASHSYVLNKTRAAAVVGINSETIMKPASISEEELLNLINKLNNDDNVDGLLVQLPLPEHIDERRICNAVSPDKDVDGFHVINVGRMCLDQYSMLPATPWGVWEIIKRTGIPTLGKNVVVAGRSKNVGMPIAMLLHTDGAHERPGGDATVTISHRYTPKEQLKKHTILADIVISAAGIPNLITADMIKEGAAVIDVGINRVHDPVTAKPKLVGDVDFEGVRQKAGYITPVPGGVGPMTVAMLMKNTIIAAKKVLRLEEREVLKSKELGVATN

SEQ ID NO: 50943 - protein, 222 aa, Homo sapiens
  Payload ID: 10170
  Gene Symbol: MTHFD2
  Gene Name: methylenetetrahydrofolate dehydrogenase (NADP+ dependent) 2, methenyltetrahydrofolate cyclohydrolase
  ENSP ID: ENSP00000386536
MAATSLMSALAARLLQPAHSCSLRLRPFHLAAVRNEAVVISGRKLAQQIKQEVRQEVEEWVASGNKRPHLSVILVGENPASHSYVLNKTRAAAVVGDATVTISHRYTPKEQLKKHTILADIVISAAGIPNLITADMIKEGAAVIDVGINRVHDPVTAKPKLVGDVDFEGVRQKAGYITPVPGGVGPMTVAMLMKNTIIAAKKVLRLEEREVLKSKELGVATN

SEQ ID NO: 50944 - protein, 267 aa, Homo sapiens
  Payload ID: 10170
  Gene Symbol: MTHFD2
  Gene Name: methylenetetrahydrofolate dehydrogenase (NADP+ dependent) 2, methenyltetrahydrofolate cyclohydrolase
  ENSP ID: ENSP00000386542
MAATSLMSALAARLLQPAHSCSLRLRPFHLAAVRNEAVVISGRKLAQQIKQEVRQEVEEWVASGNKRPHLSVILVGENPASHSYVLNKTRAAAVVEHIDERRICNAVSPDKDVDGFHVINVGRMCLDQYSMLPATPWGVWEIIKRTGIPTLGKNVVVAGRSKNVGMPIAMLLHTDGAHERPGGDATVTISHRYTPKEQLKKHTILADIVISAAGVRQKAGYITPVPGGVGPMTVAMLMKNTIIAAKKVLRLEEREVLKSKELGVATN

SEQ ID NO: 50945 - protein, 37 aa, Homo sapiens
  Payload ID: 10170
  Gene Symbol: MTHFD2
  Gene Name: methylenetetrahydrofolate dehydrogenase (NADP+ dependent) 2, methenyltetrahydrofolate cyclohydrolase
  ENSP ID: ENSP00000419067
MAATSLMSALAARLLQPAHSCSLRLRPFHLAAVRNQQ

SEQ ID NO: 50946 - protein, 36 aa, Homo sapiens
  Payload ID: 10170
  Gene Symbol: MTHFD2
  Gene Name: methylenetetrahydrofolate dehydrogenase (NADP+ dependent) 2, methenyltetrahydrofolate cyclohydrolase
  ENSP ID: ENSP00000419550
MAATSLMSALAARLLQPAHSCSLRLRPFHLAAVRAY

SEQ ID NO: 50947 - protein, 289 aa, Homo sapiens
  Payload ID: 10171
  Gene Symbol: MTHFD2L
  Gene Name: methylenetetrahydrofolate dehydrogenase (NADP+ dependent) 2-like
  Uniprot ID: Q9H903
  ENSP ID: ENSP00000321984
MAKHIQKEIQRGVESWVSLGNRRPHLSIILVGDNPASHTYVRNKIRAASAVGICSELILKPKDVSQEELLDVTDQLNMDPRVSGILVQLPLPDHVDERTICNGIAPEKDVDGFHIINIGRLCLDQHSLIPATASAVWEIIKRTGIQTFGKNVVVAGRSKNVGMPIAMLLHTDGEHERPGGDATVTIAHRYTPKEQLKIHTQLADIIIVAAGIPKLITSDMVKEGAAVIDVGINYVHDPVTGKTKLVGDVDFEAVKKKAGFITPVPGGVGPMTVAMLLKNTLLAAKKIIY

SEQ ID NO: 50948 - protein, 252 aa, Homo sapiens
  Payload ID: 10171
  Gene Symbol: MTHFD2L
  Gene Name: methylenetetrahydrofolate dehydrogenase (NADP+ dependent) 2-like
  ENSP ID: ENSP00000352012
MAKHIQKEIQRGVESWVSLGNRRPHLSIILVGDNPASHTYVRNKIRAASAVGICSELILKPKDVSQEELLDVTDQLNMDPRVSGILVQLPLPDHVDERTICNGIAPEKDVDGFHIINIGRLCLDQHSLIPATASAVWEIIKRTGIQTFGKNVVVAGRSKNVGMPIAMLLHTDGEHERPGGDATVTIAHRYTPKEQLKIHTQLADIIIVAAGIPKLITSDMVKEGAAVIDVGINYVHDPVTGKTKLVGDVDFE

SEQ ID NO: 50949 - protein, 347 aa, Homo sapiens
  Payload ID: 10171
  Gene Symbol: MTHFD2L
  Gene Name: methylenetetrahydrofolate dehydrogenase (NADP+ dependent) 2-like
  Uniprot ID: Q9H903
  ENSP ID: ENSP00000379108
MTVPVRGFSLLRGRLGRAPALGRSTAPSVRAPGEPGSAFRGFRSSGVRHEAIIISGTEMAKHIQKEIQRGVESWVSLGNRRPHLSIILVGDNPASHTYVRNKIRAASAVGICSELILKPKDVSQEELLDVTDQLNMDPRVSGILVQLPLPDHVDERTICNGIAPEKDVDGFHIINIGRLCLDQHSLIPATASAVWEIIKRTGIQTFGKNVVVAGRSKNVGMPIAMLLHTDGEHERPGGDATVTIAHRYTPKEQLKIHTQLADIIIVAAGIPKLITSDMVKEGAAVIDVGINYVHDPVTGKTKLVGDVDFEAVKKKAGFITPVPGGVGPMTVAMLLKNTLLAAKKIIY

SEQ ID NO: 50950 - protein, 106 aa, Homo sapiens
  Payload ID: 10171
  Gene Symbol: MTHFD2L
  Gene Name: methylenetetrahydrofolate dehydrogenase (NADP+ dependent) 2-like
  ENSP ID: ENSP00000387614
MAKHIQKEIQRGVESWVSLGNRRPHLSIILVGDNPASHTYVRNKIRAASAVGICSELILKPKDVSQEELLDVTDQLNMDPRVSGILVQLPLPEAVQLCSGFEMLGI

SEQ ID NO: 50951 - protein, 223 aa, Homo sapiens
  Payload ID: 10171
  Gene Symbol: MTHFD2L
  Gene Name: methylenetetrahydrofolate dehydrogenase (NADP+ dependent) 2-like
  Uniprot ID: Q9H903
  ENSP ID: ENSP00000391327
MAKHIQKEIQRGVESWVSLGNRRPHLSIILVGDNPASHTYVRNKIRAASAVGICSELILKPKDVSQEELLDVTDQLNMDPRVSGILVQLPLPDHVDERTICNGIAPEKDVDGFHIINIGRLCLDQHSLIPATASAVWEIIKRTGIQTFGKNVVVAGRSKNVGMPIAMLLHTDGEHERPGGDATVTIAHRYTPKEQLKIHTQLADIIIVAAERFHHFAQDLSNS

SEQ ID NO: 50952 - protein, 146 aa, Homo sapiens
  Payload ID: 10171
  Gene Symbol: MTHFD2L
  Gene Name: methylenetetrahydrofolate dehydrogenase (NADP+ dependent) 2-like
  ENSP ID: ENSP00000405692
MDPRVSGILVQLPLPDHVDERTICNGIAPEKDVDGFHIINIGRLCLDQHSLIPATASAVWEIIKRTGIQTFGKNVVVAGRSKNVGMPIAMLLHTDGEHERPGGDATVTIAHRYTPKEQLKIHTQLADIIIVAAERFHHFAQDLSNS

SEQ ID NO: 50953 - protein, 106 aa, Homo sapiens; identical to SEQ ID NO: 50950
  Payload ID: 10171
  Gene Symbol: MTHFD2L
  Gene Name: methylenetetrahydrofolate dehydrogenase (NADP+ dependent) 2-like
  ENSP ID: ENSP00000409391

SEQ ID NO: 50954 - protein, 29 aa, Homo sapiens
  Payload ID: 10172
  Gene Symbol: MTHFR
  Gene Name: methylenetetrahydrofolate reductase (NAD(P)H)
  ENSP ID: ENSP00000365669
MVNEARGNSSLNPCLEGSASSGSESSKDS

SEQ ID NO: 50955 - protein, 697 aa, Homo sapiens
  Payload ID: 10172
  Gene Symbol: MTHFR
  Gene Name: methylenetetrahydrofolate reductase (NAD(P)H)
  Uniprot ID: P42898
  ENSP ID: ENSP00000365767
MDHRKARVLPAGHYCPSLGIWASQVGSVRSSVPPSISRNPAMVNEARGNSSLNPCLEGSASSGSESSKDSSRCSTPGLDPERHERLREKMRRRLESGDKWFSLEFFPPRTAEGAVNLISRFDRMAAGGPLYIDVTWHPAGDPGSDKETSSMMIASTAVNYCGLETILHMTCCRQRLEEITGHLHKAKQLGLKNIMALRGDPIGDQWEEEEGGFNYAVDLVKHIRSEFGDYFDICVAGYPKGHPEAGSFEADLKHLKEKVSAGADFIITQLFFEADTFFRFVKACTDMGITCPIVPGIFPIQGYHSLRQLVKLSKLEVPQEIKDVIEPIKDNDAAIRNYGIELAVSLCQELLASGLVPGLHFYTLNREMATTEVLKRLGMWTEDPRRPLPWALSAHPKRREEDVRPIFWASRPKSYIYRTQEWDEFPNGRWGNSSSPAFGELKDYYLFYLKSKSPKEELLKMWGEELTSEESVFEVFVLYLSGEPNRNGHKVTCLPWNDEPLAAETSLLKEELLRVNRQGILTINSQPNINGKPSSDPIVGWGPSGGYVFQKAYLEFFTSRETAEALLQVLKKYELRVNYHLVNVKGENITNAPELQPNAVTWGIFPGREIIQPTVVDPVSFMFWKDEAFALWIERWGKLYEEESPSRTIIQYIHDNYFLVNLVDNDFPLDNCLWQVVEDTLELLNRPTQNARETEAP

SEQ ID NO: 50956 - protein, 697 aa, Homo sapiens; identical to SEQ ID NO: 50955
  Payload ID: 10172
  Gene Symbol: MTHFR
  Gene Name: methylenetetrahydrofolate reductase (NAD(P)H)
  Uniprot ID: P42898
  ENSP ID: ENSP00000365770

SEQ ID NO: 50957 - protein, 656 aa, Homo sapiens [sequence omitted]

SEQ ID NO: 50958 - protein, 656 aa, Homo sapiens [sequence omitted]

SEQ ID NO: 50959 - protein, 52 aa, Homo sapiens
  Payload ID: 10172
  Gene Symbol: MTHFR
  Gene Name: methylenetetrahydrofolate reductase (NAD(P)H)
  ENSP ID: ENSP00000398908
MCRGCGCLPPDAPCPTLCSRNPAMVNEARGNSSLNPCLEGSASSGSESSKDS

SEQ ID NO: 50960 - protein, 29 aa, Homo sapiens
  Payload ID: 10172
  Gene Symbol: MTHFR
  Gene Name: methylenetetrahydrofolate reductase (NAD(P)H)
  ENSP ID: ENSP00000400460
MVNEARGNSSLNPCLEGSASSGSESSKDS

SEQ ID NO: 50961 - protein, 143 aa, Homo sapiens
  Payload ID: 10172
  Gene Symbol: MTHFR
  Gene Name: methylenetetrahydrofolate reductase (NAD(P)H)
  ENSP ID: ENSP00000405082
MVNEARGNSSLNPCLEGSASSGSESSKDSSRCSTPGLDPERHERLREKMRRRLESGDKWFSLEFFPPRTAEGAVNLISRFDRMAAGGPLYIDVTWHPAGDPGSDKETSSMMIASTAVNYCGLETILHMTCCRQRLEEITGHLH

SEQ ID NO: 50962 - protein, 29 aa, Homo sapiens
  Payload ID: 10172
  Gene Symbol: MTHFR
  Gene Name: methylenetetrahydrofolate reductase (NAD(P)H)
  ENSP ID: ENSP00000408307
MVNEARGNSSLNPCLEGSASSGSESSKDS

SEQ ID NO: 50963 - protein, 418 aa, Homo sapiens
  Payload ID: 10173
  Gene Symbol: MMAA
  Gene Name: methylmalonic aciduria (cobalamin deficiency) cblA type
  Uniprot ID: Q8IVH4
  ENSP ID: ENSP00000281317
MPMLLPHPHQHFLKGLLRAPFRCYHFIFHSSTHLGSGIPCAQPFNSLGLHCTKWMLLSDGLKRKLCVQTTLKDHTEGLSDKEQRFVDKLYTGLIQGQRACLAEAITLVESTHSRKKELAQVLLQKVLLYHREQEQSNKGKPLAFRVGLSGPPGAGKSTFIEYFGKMLTERGHKLSVLAVDPSSCTSGGSLLGDKTRMTELSRDMNAYIRPSPTRGTLGGVTRTTNEAILLCEGAGYDIILIETVGVGQSEFAVADMVDMFVLLLPPAGGDELQGIKRGIIEMADLVAVTKSDGDLIVPARRIQAEYVSALKLLRKRSQVWKPKVIRISARSGEGISEMWDKMKDFQDLMLASGELTAKRRKQQKVWMWNLIQESVLEHFRTHPTVREQIPLLEQKVLIGALSPGLAADFLLKAFKSRD

SEQ ID NO: 50964 - protein, 260 aa, Homo sapiens
  Payload ID: 10173
  Gene Symbol: MMAA
  Gene Name: methylmalonic aciduria (cobalamin deficiency) cblA type
  ENSP ID: ENSP00000427422
MPMLLPHPHQHFLKGLLRAPFRCYHFIFHSSTHLGSGIPCAQPFNSLGLHCTKWMLLSDGLKRKLCVQTTLKDHTEGLSDKEQRFVDKLYTGLIQGQRACLAEAITLVESTHSRKKELAQVLLQKVLLYHREQEQSNKGKPLAFRVGLSGPPGAGKSTFIEYFGKMLTERGHKLSVLAVDPSSCTSGGSLLGDKTRMTELSRDMNAYIRPSPTRGTLGGVTRTTNEAILLCEGAGYDIILIETVGYQKGYNRDGRSGSCN

SEQ ID NO: 50965 - protein, 424 aa, Homo sapiens
  Payload ID: 10173
  Gene Symbol: MMAA
  Gene Name: methylmalonic aciduria (cobalamin deficiency) cblA type
  ENSP ID: ENSP00000442284
MPMLLPHPHQHFLKGLLRAPFRCYHFIFHSSTHLGSGIPCAQPFNSLGLHCTKWMLLSDGLKRKLCVQTTLKDHTEGLSDKEQRFVDKLYTGLIQGQRACLAEAITLVESTHSRKKELAQVLLQKVLLYHREQEQSNKGKPLAFRVGLSGPPGAGKSTFIEYFGKMLTERGHKLSVLAVDPSSCTSGGSLLGDKTRMTELSRDMNAYIRPSPTRGTLGGVTRTTNEAILLCEGAGYDIILIETVGVGQSEFAVADMVDMFVLLLPPAGGDELQGIKRGIIEMADLVAVTKSDGDLIVPARRIQAEYVSALKLLRKRSQVWKPKVIRISARSGEGISEMWDKMKDFQDLMLASGELTAKRRKQQKVWMWNLIQESVLEHFRTHPTVREQIPLLEQKVLIGALSPGLAADFLLKALKAETNKIHPV

SEQ ID NO: 50966 - protein, 97 aa, Homo sapiens
  Payload ID: 10174
  Gene Symbol: MMAB
  Gene Name: methylmalonic aciduria (cobalamin deficiency) cblB type
  ENSP ID: ENSP00000416136
MAVCGLGSRLGLGSRLGLRGCFGAARLLYPRFQSRGPQGVEDGDRPQPSSKTPRIPKIYTKTGDKETGICHVGQASLELLASSDLPTMASQSPGITV

SEQ ID NO: 50967 - protein, 47 aa, Homo sapiens
  Payload ID: 10174
  Gene Symbol: MMAB
  Gene Name: methylmalonic aciduria (cobalamin deficiency) cblB type
  ENSP ID: ENSP00000438079
MAVCGLGSRLGLGSRLGLRGCFGAARLLYPRFQSRGPQGVEDGDRVF

SEQ ID NO: 50968 - protein, 173 aa, Homo sapiens
  Payload ID: 10174
  Gene Symbol: MMAB
  Gene Name: methylmalonic aciduria (cobalamin deficiency) cblB type
  ENSP ID: ENSP00000444793
MAVCGLGSRLGLGSRLGLRGCFGAARLLYPRFQSRGPQGVEDGDRPQPSSKTPRIPKIYTKTGDKGFSSTFTGERRPKDDQVFEAVGTTDELSSAIGFALELVTEKGHTFAEELQKIQCTLQDVGSALATPCSSAREAHLKYTTFKAGPILELEQWIDKYTSQLPPLTAFILP

SEQ ID NO: 50969 - protein, 250 aa, Homo sapiens
  Payload ID: 10174
  Gene Symbol: MMAB
  Gene Name: methylmalonic aciduria (cobalamin deficiency) cblB type
  Uniprot ID: Q96EY8
  ENSP ID: ENSP00000445920
MAVCGLGSRLGLGSRLGLRGCFGAARLLYPRFQSRGPQGVEDGDRPQPSSKTPRIPKIYTKTGDKGFSSTFTGERRPKDDQVFEAVGTTDELSSAIGFALELVTEKGHTFAEELQKIQCTLQDVGSALATPCSSAREAHLKYTTFKAGPILELEQWIDKYTSQLPPLTAFILPSGGKISSALHFCRAVCRRAERRVVPLVQMGETDANVAKFLNRLSDYLFTLARYAAMKEGNQEKIYMKNDPSAESEGL

SEQ ID NO: 50970 - protein, 198 aa, Homo sapiens
  Payload ID: 10174
  Gene Symbol: MMAB
  Gene Name: methylmalonic aciduria (cobalamin deficiency) cblB type
  ENSP ID: ENSP00000474582
MAVCGLGSRLGLGSRLGLRGCFGAARLLYPRFQSRGPQGVEDGDRFALELVTEKGHTFAEELQKIQCTLQDVGSALATPCSSAREAHLKYTTFKAGPILELEQWIDKYTSQLPPLTAFILPSGGKISSALHFCRAVCRRAERRVVPLVQMGETDANVAKFLNRLSDYLFTLARYAAMKEGNQEKIYMKNDPSAESEGL

SEQ ID NO: 50971 - protein, 148 aa, Homo sapiens
  Payload ID: 10174
  Gene Symbol: MMAB
  Gene Name: methylmalonic aciduria (cobalamin deficiency) cblB type
  ENSP ID: ENSP00000474881
MAVCGLGSRLGLGSRLGLRGCFGAARLLYPRFQSRGPQGVEDGDRPQPSSKTPRIPKIYTKTGDKGFSSTFTGERRPKDDQVFEAVGTTDELSSAIGRSFALVAQTGVQWCDLGSLQPLPPGFKRVSSLLLFLTLTCSWLPFLHGGPD

SEQ ID NO: 50972 - protein, 173 aa, Homo sapiens; identical to SEQ ID NO: 50968
  Payload ID: 10174
  Gene Symbol: MMAB
  Gene Name: methylmalonic aciduria (cobalamin deficiency) cblB type
  ENSP ID: ENSP00000474981

SEQ ID NO: 50973 - protein, 97 aa, Homo sapiens
  Payload ID: 10174
  Gene Symbol: MMAB
  Gene Name: methylmalonic aciduria (cobalamin deficiency) cblB type
  ENSP ID: ENSP00000483818
MAVCGLGSRLGLGSRLGLRGCFGAARLLYPRFQSRGPQGVEDGDRPQPSSKTPRIPKIYTKTGDKGFSSTFTGERRPKDDQVFEAVGTTDELSSAIG

SEQ ID NO: 50974 - protein, 282 aa, Homo sapiens
  Payload ID: 10175
  Gene Symbol: MMACHC
  Gene Name: methylmalonic aciduria (cobalamin deficiency) cblC type, with homocystinuria
  Uniprot ID: Q9Y4U1
  ENSP ID: ENSP00000383840
MEPKVAELKQKIEDTLCPFGFEVYPFQVAWYNELLPPAFHLPLPGPTLAFLVLSTPAMFDRALKPFLQSCHLRMLTDPVDQCVAYHLGRVRESLPELQIEIIADYEVHPNRRPKILAQTAAHVAGAAYYYQRQDVEADPWGNQRISGVCIHPRFGGWFAIRGVVLLPGIEVPDLPPRKPHDCVPTRADRIALLEGFNFHWRDWTYRDAVTPQERYSEEQKAYFSTPPAQRLALLGLAQPSEKPSSPSPDLPFTTPAPKKPGNPSRARSWLSPRVSPPASPGP

SEQ ID NO: 50975 - protein, 225 aa, Homo sapiens
  Payload ID: 10175
  Gene Symbol: MMACHC
  Gene Name: methylmalonic aciduria (cobalamin deficiency) cblC type, with homocystinuria
  ENSP ID: ENSP00000478859
MFDRALKPFLQSCHLRMLTDPVDQCVAYHLGRVRESLPELQIEIIADYEVHPNRRPKILAQTAAHVAGAAYYYQRQDVEADPWGNQRISGVCIHPRFGGWFAIRGVVLLPGIEVPDLPPRKPHDCVPTRADRIALLEGFNFHWRDWTYRDAVTPQERYSEEQKAYFSTPPAQRLALLGLAQPSEKPSSPSPDLPFTTPAPKKPGNPSRARSWLSPRVSPPASPGP

SEQ ID NO: 50976 - protein, 296 aa, Homo sapiens
  Payload ID: 10176
  Gene Symbol: MMADHC
  Gene Name: methylmalonic aciduria (cobalamin deficiency) cblD type, with homocystinuria
  Uniprot ID: Q9H3L0
  ENSP ID: ENSP00000301920
MANVLCNRARLVSYLPGFCSLVKRVVNPKAFSTAGSSGSDESHVAAAPPDICSRTVWPDETMGPFGPQDQRFQLPGNIGFDCHLNGTASQKKSLVHKTLPDVLAEPLSSERHEFVMAQYVNEFQGNDAPVEQEINSAETYFESARVECAIQTCPELLRKDFESLFPEVANGKLMILTVTQKTKNDMTVWSEEVEIEREVLLEKFINGAKEICYALRAEGYWADFIDPSSGLAFFGPYTNNTLFETDERYRHLGFSVDDLGCCKVIRHSLWGTHVVVGSIFTNATPDSHIMKKLSGN

SEQ ID NO: 50977 - protein, 296 aa, Homo sapiens; identical to SEQ ID NO: 50976
  Payload ID: 10176
  Gene Symbol: MMADHC
  Gene Name: methylmalonic aciduria (cobalamin deficiency) cblD type, with homocystinuria
  Uniprot ID: Q9H3L0
  ENSP ID: ENSP00000389060

SEQ ID NO: 50978 - protein, 330 aa, Homo sapiens
  Payload ID: 10176
  Gene Symbol: MMADHC
  Gene Name: methylmalonic aciduria (cobalamin deficiency) cblD type, with homocystinuria
  ENSP ID: ENSP00000408331
MANVLCNRARLVSYLPGFCSLVKRVVNPKAFSTAGSSGSDESHVAAAPPDICSRTVWPDETMGPFGPQDQRFQLPGNIGFDCHLNGTASQKKSLVHKTLPDVLAEPLSSERHEFVMAQYVNEFQGNDAPVEQEINSAETYFESARVECAIQTCPELLRKDFESLFPEVANGKLMILTVTQKTKNDMTVWSEEVEIEREVLLEKTESLSPRPECCGMISAHCNLCLPGSSNSSASASRFINGAKEICYALRAEGYWADFIDPSSGLAFFGPYTNNTLFETDERYRHLGFSVDDLGCCKVIRHSLWGTHVVVGSIFTNATPDSHIMKKLSGN

SEQ ID NO: 50979 - protein, 176 aa, Homo sapiens
  Payload ID: 10177
  Gene Symbol: MCEE
  Gene Name: methylmalonyl CoA epimerase
  Uniprot ID: Q96PE7
  ENSP ID: ENSP00000244217
MARVLKAAAANAVGLFSRLQAPIPTVRASSTSQPLDQVTGSVWNLGRLNHVAIAVPDLEKAAAFYKNILGAQVSEAVPLPEHGVSVVFVNLGNTKMELLHPLGRDSPIAGFLQKNKAGGMHHICIEVDNINAAVMDLKKKKIRSLSEEVKIGAHGKPVIFLHPKDCGGVLVELEQA

SEQ ID NO: 50980 - protein, 78 aa, Homo sapiens
  Payload ID: 10177
  Gene Symbol: MCEE
  Gene Name: methylmalonyl CoA epimerase
  ENSP ID: ENSP00000391140
LGRLNHVAIAVPDLEKAAAFYKNILGAQVDNINAAVMDLKKKKIRSLSEEVKIGAHGKPVIFLHPKDCGGVLVELEQA

SEQ ID NO: 50981 - protein, 31 aa, Homo sapiens
  Payload ID: 10177
  Gene Symbol: MCEE
  Gene Name: methylmalonyl CoA epimerase
  ENSP ID: ENSP00000437361
MELLHPLGRDSPIAGFLQKNKAGGMHHICIE

SEQ ID NO: 50982 - protein, 31 aa, Homo sapiens; identical to SEQ ID NO: 50981
  Payload ID: 10177
  Gene Symbol: MCEE
  Gene Name: methylmalonyl CoA epimerase
  ENSP ID: ENSP00000441569

SEQ ID NO: 50983 - protein, 750 aa, Homo sapiens
  Payload ID: 10178
  Gene Symbol: MUT
  Gene Name: methylmalonyl CoA mutase
  Uniprot ID: P22033
  ENSP ID: ENSP00000274813
MLRAKNQLFLLSPHYLRQVKESSGSRLIQQRLLHQQQPLHPEWAALAKKQLKGKNPEDLIWHTPEGISIKPLYSKRDTMDLPEELPGVKPFTRGPYPTMYTFRPWTIRQYAGFSTVEESNKFYKDNIKAGQQGLSVAFDLATHRGYDSDNPRVRGDVGMAGVAIDTVEDTKILFDGIPLEKMSVSMTMNGAVIPVLANFIVTGEEQGVPKEKLTGTIQNDILKEFMVRNTYIFPPEPSMKIIADIFEYTAKHMPKFNSISISGYHMQEAGADAILELAYTLADGLEYSRTGLQAGLTIDEFAPRLSFFWGIGMNFYMEIAKMRAGRRLWAHLIEKMFQPKNSKSLLLRAHCQTSGWSLTEQDPYNNIVRTAIEAMAAVFGGTQSLHTNSFDEALGLPTVKSARIARNTQIIIQEESGIPKVADPWGGSYMMECLTNDVYDAALKLINEIEEMGGMAKAVAEGIPKLRIEECAARRQARIDSGSEVIVGVNKYQLEKEDAVEVLAIDNTSVRNRQIEKLKKIKSSRDQALAERCLAALTECAASGDGNILALAVDASRARCTVGEITDALKKVFGEHKANDRMVSGAYRQEFGESKEITSAIKRVHKFMEREGRRPRLLVAKMGQDGHDRGAKVIATGFADLGFDVDIGPLFQTPREVAQQAVDADVHAVGISTLAAGHKTLVPELIKELNSLGRPDILVMCGGVIPPQDYEFLFEVGVSNVFGPGTRIPKAAVQVLDDIEKCLEKKQQSV

SEQ ID NO: 50984 - protein, 689 aa, Homo sapiens
  Payload ID: 10179
  Gene Symbol: MEPCE
  Gene Name: methylphosphate capping enzyme
  Uniprot ID: Q7L2J0
  ENSP ID: ENSP00000308546
MIEMAAEKEPFLVPAPPPPLKDESGGGGGPTVPPHQEAASGELRGGTERGPGRCAPSAGSPAAAVGRESPGAAATSSSGPQAQQHRGGGPQAQSHGEARLSDPPGRAAPPDVGEERRGGGGTELGPPAPPRPRNGYQPHRPPGGGGGKRRNSCNVGGGGGGFKHPAFKRRRRVNSDCDSVLPSNFLLGGNIFDPLNLNSLLDEEVSRTLNAETPKSSPLPAKGRDPVEILIPKDITDPLSLNTCTDEGHVVLASPLKTGRKRHRHRGQHHQQQQAAGGSESHPVPPTAPLTPLLHGEGASQQPRHRGQNRDAPQPYELNTAINCRDEVVSPLPSALQGPSGSLSAPPAASVISAPPSSSSRHRKRRRTSSKSEAGARGGGQGSKEKGRGSWGGRHHHHHPLPAAGFKKQQRKFQYGNYCKYYGYRNPSCEDGRLRVLKPEWFRGRDVLDLGCNVGHLTLSIACKWGPSRMVGLDIDSRLIHSARQNIRHYLSEELRLPPQTLEGDPGAEGEEGTTTVRKRSCFPASLTASRGPIAAPQVPLDGADTSVFPNNVVFVTGNYVLDRDDLVEAQTPEYDVVLCLSLTKWVHLNWGDEGLKRMFRRIYRHLRPGGILVLEPQPWSSYGKRKTLTETIYKNYYRIQLKPEQFSSYLTSPDVGFSSYELVATPHNTSKGFQRPVYLFHKARSPSH

SEQ ID NO: 50985 - protein, 220 aa, Homo sapiens
  Payload ID: 10179
  Gene Symbol: MEPCE
  Gene Name: methylphosphate capping enzyme
  Uniprot ID: Q7L2J0
  ENSP ID: ENSP00000400875
MVGLDIDSRLIHSARQNIRHYLSEELRLPPQTLEGDPGAEGEEGTTTVRKRSCFPASLTASRGPIAAPQVPLDGADTSVFPNNVVFVTGNYVLDRDDLVEAQTPEYDVVLCLSLTKWVHLNWGDEGLKRMFRRIYRHLRPGGILVLEPQPWSSYGKRKTLTETIYKNYYRIQLKPEQFSSYLTSPDVGFSSYELVATPHNTSKGFQRPVYLFHKARSPSH

SEQ ID NO: 50986 - protein, 293 aa, Homo sapiens
  Payload ID: 10180
  Gene Symbol: MSMO1
  Gene Name: methylsterol monooxygenase 1
  Uniprot ID: Q15800
  ENSP ID: ENSP00000261507
MATNESVSIFSSASLAVEYVDSLLPENPLQEPFKNAWNYMLNNYTKFQIATWGSLIVHEALYFLFCLPGFLFQFIPYMKKYKIQKDKPETWENQWKCFKVLLFNHFCIQLPLICGTYYFTEYFNIPYDWERMPRWYFLLARCFGCAVIEDTWHYFLHRLLHHKRIYKYIHKVHHEFQAPFGMEAEYAHPLETLILGTGFFIGIVLLCDHVILLWAWVTIRLLETIDVHSGYDIPLNPLNLIPFYAGSRHHDFHHMNFIGNYASTFTWWDRIFGTDSQYNAYNEKRKKFEKKTE

SEQ ID NO: 50987 - protein, 162 aa, Homo sapiens
  Payload ID: 10180
  Gene Symbol: MSMO1
  Gene Name: methylsterol monooxygenase 1
  Uniprot ID: Q15800
  ENSP ID: ENSP00000377361
MPRWYFLLARCFGCAVIEDTWHYFLHRLLHHKRIYKYIHKVHHEFQAPFGMEAEYAHPLETLILGTGFFIGIVLLCDHVILLWAWVTIRLLETIDVHSGYDIPLNPLNLIPFYAGSRHHDFHHMNFIGNYASTFTWWDRIFGTDSQYNAYNEKRKKFEKKTE

SEQ ID NO: 50988 - protein, 229 aa, Homo sapiens
  Payload ID: 10180
  Gene Symbol: MSMO1
  Gene Name: methylsterol monooxygenase 1
  ENSP ID: ENSP00000423633
MATNESVSIFSSASLAVEYVDSLLPENPLQEPFKNAWNYMLNNYTKFQIATWGSLIVHEALYFLFCLPGFLFQFIPYMKKYKIQKDKPETWENQWKCFKVLLFNHFCIQLPLICGTYYFTEYFNIPYDWERMPRWYFLLARCFGCAVIEDTWHYFLHRLLHHKRIYKYIHKVHHEFQAPFGMEAEYAHPLETLILGTGFFIGIVLLCDHVILLWAWVTIRLLETIDVHR

SEQ ID NO: 50989 - protein, 85 aa, Homo sapiens
  Payload ID: 10180
  Gene Symbol: MSMO1
  Gene Name: methylsterol monooxygenase 1
  ENSP ID: ENSP00000425112
MATNESVSIFSSASLAVEYVDSLLPENPLQEPFKNAWNYMLNNYTKFQIATWGSLIVHEALYFLFCLPGFLFQFIPYMKKYKIQK

SEQ ID NO: 50990 - protein, 220 aa, Homo sapiens
  Payload ID: 10180
  Gene Symbol: MSMO1
  Gene Name: methylsterol monooxygenase 1
  ENSP ID: ENSP00000425241
MATNESVSIFSSASLAVEYVDSLLPENPLQEPFKNAWNYMLNNYTKFQIATWGSLIVHEALYFLFCLPGFLFQFIPYMKKYKIQKDKPETWENQWKCFKVLLFNHFCIQLPLICGTYYFTEYFNIPYDWERMPRWYFLLARCFGCAVIEDTWHYFLHRLLHHKRIYKYIHKVHHEFQAPFGMEAEYAHPLETLILGTGFFIGIVLLCDHVILLWAWVTIR

SEQ ID NO: 50991 - protein, 283 aa, Homo sapiens
  Payload ID: 10181
  Gene Symbol: MTAP
  Gene Name: methylthioadenosine phosphorylase
  Uniprot ID: Q13126
  ENSP ID: ENSP00000369519
MASGTTTTAVKIGIIGGTGLDDPEILEGRTEKYVDTPFGKPSDALILGKIKNVDCVLLARHGRQHTIMPSKVNYQANIWALKEEGCTHVIVTTACGSLREEIQPGDIVIIDQFIDRTTMRPQSFYDGSHSCARGVCHIPMAEPFCPKTREVLIETAKKLGLRCHSKGTMVTIEGPRFSSRAESFMFRTWGADVINMTTVPEVVLAKEAGICYASIAMATDYDCWKEHEEAVSVDRVLKTLKENANKAKSLLLTTIPQIGSTEWSETLHNLKNMAQFSVLLPRH

SEQ ID NO: 50992 - protein, 50 aa, Homo sapiens
  Payload ID: 10181
  Gene Symbol: MTAP
  Gene Name: methylthioadenosine phosphorylase
  ENSP ID: ENSP00000393507
MASGTTTTAVKIGIIGGTGLDDPEILEGRTEKYVDTPFGKVNIQLVETSI

SEQ ID NO: 50993 - protein, 300 aa, Homo sapiens
  Payload ID: 10181
  Gene Symbol: MTAP
  Gene Name: methylthioadenosine phosphorylase
  ENSP ID: ENSP00000461932
MRPARASLAAAGRDWGAALGTHLPREERIGIIGGTGLDDPEILEGRTEKYVDTPFGKPSDALILGKIKNVDCVLLARHGRQHTIMPSKVNYQANIWALKEEGCTHVIVTTACGSLREEIQPGDIVIIDQFIDRTTMRPQSFYDGSHSCARGVCHIPMAEPFCPKTREVLIETAKKLGLRCHSKGTMVTIEGPRFSSRAESFMFRTWGADVINMTTVPEVVLAKEAGICYASIAMATDYDCWKEHEEAVSVDRVLKTLKENANKAKSLLLTTIPQIGSTEWSETLHNLKNMAQFSVLLPRH

SEQ ID NO: 50994 - protein, 112 aa, Homo sapiens
  Payload ID: 10181
  Gene Symbol: MTAP
  Gene Name: methylthioadenosine phosphorylase
  ENSP ID: ENSP00000462082
ESFMFRTWGADVINMTTVPEVVLAKEAGICYASIAMATDYDCWKEHEEAMIKFQMILSEGYHPFNIQESPFYRGLLDFPSVGHGRGEILPLSPLDLAGYCFQQPMQPPCPDS

SEQ ID NO: 50995 - protein, 334 aa, Homo sapiens
  Payload ID: 10181
  Gene Symbol: MTAP
  Gene Name: methylthioadenosine phosphorylase
  Uniprot ID: Q13126
  ENSP ID: ENSP00000463424
MASGTTTTAVKIGIIGGTGLDDPEILEGRTEKYVDTPFGKPSDALILGKIKNVDCVLLARHGRQHTIMPSKVNYQANIWALKEEGCTHVIVTTACGSLREEIQPGDIVIIDQFIDRTTMRPQSFYDGSHSCARGVCHIPMAEPFCPKTREVLIETAKKLGLRCHSKGTMVTIEGPRFSSRAESFMFRTWGADVINMTTVPEVVLAKEAGICYASIAMATDYDCWKEHEEAVSVDRVLKTLKENANKAKSLLLTTIPQIGSTEWSETLHNLKMIKFQMILSEGYHPFNIQESPFYRGLLDFPSVGHGRGEILPLSPLDLAGYCFQQPMQPPCPDS

SEQ ID NO: 50996 - protein, 242 aa, Homo sapiens
  Payload ID: 10181
  Gene Symbol: MTAP
  Gene Name: methylthioadenosine phosphorylase
  ENSP ID: ENSP00000464616
MASGTTTTAVKIGIIGGTGLDDPEILEGRTEKYVDTPFGKPSDALILGKIKNVDCVLLARHGRQHTIMPSKVNYQANIWALKEEGCTHVIVTTACGSLREEIQPGDIVIIDQFIDRTTMRPQSFYDGSHSCARGVCHIPMAEPFCPKTREVLIETAKKLGLRCHSKGTMVTIEGPRFSSRAESFMFRTWGADVINMTTVPEVVLAKEAGICYASIAMATDYDCWKEHEEACYCFSRFRWTGS

SEQ ID NO: 50997 - protein, 369 aa, Homo sapiens
  Payload ID: 10182
  Gene Symbol: MRI1
  Gene Name: methylthioribose-1-phosphate isomerase 1
  Uniprot ID: Q9BV20
  ENSP ID: ENSP00000040663
MTLEAIRYSRGSLQILDQLLLPKQSRYEAVGSVHQAWEAIRAMKVRGAPAIALVGCLSLAVELQAGAGGPGLAALVAFVRDKLSFLVTARPTAVNMARAARDLADVAAREAEREGATEEAVRERVICCTEDMLEKDLRDNRSIGDLGARHLLERVAPSGGKVTVLTHCNTGALATAGYGTALGVIRSLHSLGRLEHAFCTETRPYNQGARLTAFELVYEQIPATLITDSMVAAAMAHRGVSAVVVGADRVVANGDTANKVGTYQLAIVAKHHGIPFYVAAPSSSCDLRLETGKEIIIEERPGQELTDVNGVRIAAPGIGVWNPAFDVTPHDLITGGIITELGVFAPEELRTALTTTISSRDGTLDGPQM

SEQ ID NO: 50998 - protein, 322 aa, Homo sapiens
  Payload ID: 10182
  Gene Symbol: MRI1
  Gene Name: methylthioribose-1-phosphate isomerase 1
  Uniprot ID: Q9BV20
  ENSP ID: ENSP00000314871
MTLEAIRYSRGSLQILDQLLLPKQSRYEAVGSVHQAWEAIRAMKVRGAPAIALVGCLSLAVELQAGAGGPGLAALVAFVRDKLSFLVTARPTAVNMARAARDLADVAAREAEREGATEEAVRERRETELCEHWEEHTRQRELPLRGPLGGTVLETRPYNQGARLTAFELVYEQIPATLITDSMVAAAMAHRGVSAVVVGADRVVANGDTANKVGTYQLAIVAKHHGIPFYVAAPSSSCDLRLETGKEIIIEERPGQELTDVNGVRIAAPGIGVWNPAFDVTPHDLITGGIITELGVFAPEELRTALTTTISSRDGTLDGPQM

SEQ ID NO: 50999 - protein, 155 aa, Homo sapiens
  Payload ID: 10183
  Gene Symbol: METTL1
  Gene Name: methyltransferase like 1
  Uniprot ID: Q9UBP6
  ENSP ID: ENSP00000257848
MAAETRNVAGAEAPPPQKRYYRQRAHSNPMADHTLRYPVKPEEMDWSELYPEFFAPLTQNQSHDDPKDKKEKRAQAQVEFADIGCGYGGLLADKDVLPLPRPTFQADKAQVANHQSHPASRICLRAKSWGAGVYHNRCAGATRLDVHSFRRAPTV

SEQ ID NO: 51000 - protein, 276 aa, Homo sapiens
  Payload ID: 10183
  Gene Symbol: METTL1
  Gene Name: methyltransferase like 1
  Uniprot ID: Q9UBP6
  ENSP ID: ENSP00000314441
MAAETRNVAGAEAPPPQKRYYRQRAHSNPMADHTLRYPVKPEEMDWSELYPEFFAPLTQNQSHDDPKDKKEKRAQAQVEFADIGCGYGGLLVELSPLFPDTLILGLEIRVKVSDYVQDRIRALRAAPAGGFQNIACLRSNAMKHLPNFFYKGQLTKMFFLFPDPHFKRTKHKWRIISPTLLAEYAYVLRVGGLVYTITDVLELHDWMCTHFEEHPLFERVPLEDLSEDPVVGHLGTSTEEGKKVLRNGGKNFPAIFRRIQDPVLQAVTSQTSLPGH

SEQ ID NO: 51001 - protein, 63 aa, Homo sapiens
  Payload ID: 10183
  Gene Symbol: METTL1
  Gene Name: methyltransferase like 1
  ENSP ID: ENSP00000447838
  MOD_RES (1)..(1): Any amino acid
XPDPHFKRTKHKWRIISPTLLAEYAYVLRVGGDFAYAGAGVYHNRCAGATRLDVHSFRRAPTV

SEQ ID NO: 51002 - protein, 81 aa, Homo sapiens
  Payload ID: 10183
  Gene Symbol: METTL1
  Gene Name: methyltransferase like 1
  ENSP ID: ENSP00000447988
  MOD_RES (1)..(1): Any amino acid
XETRNVAGAEAPPPQKRYYRQRAHSNPMADHTLRYGTVTAVPRHTYSGSGDPGEGLRLCTRPDSGPTRSSCRWLPEHRLSP

SEQ ID NO: 51003 - protein, 36 aa, Homo sapiens
  Payload ID: 10183
  Gene Symbol: METTL1
  Gene Name: methyltransferase like 1
  ENSP ID: ENSP00000448342
MAAETRNVAGAEAPPPQKRYYRQRAHSNPMADHTLR

SEQ ID NO: 51004 - protein, 124 aa, Homo sapiens
  Payload ID: 10183
  Gene Symbol: METTL1
  Gene Name: methyltransferase like 1
  ENSP ID: ENSP00000449397
  MOD_RES (1)..(1): Any amino acid
XLRAAPAGGFQNIACLRSNAMKHLPNFFYKGQRTKHKWRIISPTLLAEYAYVLRVGGLVYTITDVLELHDWMCTHFEEHPLFERVPLEDLSEDPVVGHLGTSTEEGKKVLRNGGKNFPAIFRRI

SEQ ID NO: 51005 - protein, 291 aa, Homo sapiens
  Payload ID: 10184
  Gene Symbol: METTL10
  Gene Name: methyltransferase like 10
  Uniprot ID: Q5JPI9
  ENSP ID: ENSP00000357829
MSSGADGGGGAAVAARSDKGSPGEDGFVPSALGTREHWDAVYERELQTFREYGDTGEIWFGEESMNRLIRWMQKHKIPLDASVLDIGTGNGVFLVELAKFGFSNITGIDYSPSAIQLSGSIIEKEGLSNIKLKVEDFLNLSTQLSGFHICIDKGTFDAISLNPDNAIEKRKQYVKSLSRVLKVKGFFLITSCNWTKEELLNEFSEGWSTVAGFWLTAALTSWAQAIFSTSASRVGGTTGTHHHAWIIFVFLAETRFCHVVQAGLELLGSSDSPTWPPKVLGLYHARPSLAF

SEQ ID NO: 51006 - protein, 104 aa, Homo sapiens
  Payload ID: 10184
  Gene Symbol: METTL10
  Gene Name: methyltransferase like 10
  ENSP ID: ENSP00000450447
MSSGADGGGGAAVAARSDKGSPGEDGFVPSALGTREHWDAVYERELQTFREYGDTGEIWFGEESMNRLIRWMQKHKIPLDASVLDIGTGNGVFLVELVGKIWFL

SEQ ID NO: 51007 - protein, 104 aa, Homo sapiens; identical to SEQ ID NO: 51006
  Payload ID: 10184
  Gene Symbol: METTL10
  Gene Name: methyltransferase like 10
  ENSP ID: ENSP00000451190

SEQ ID NO: 51008 - protein, 31 aa, Homo sapiens
  Payload ID: 10184
  Gene Symbol: METTL10
  Gene Name: methyltransferase like 10
  ENSP ID: ENSP00000470332
  MOD_RES (1)..(1): Any amino acid
XFELLEELPTPKFSFGGRSGNSVAALVFQKM

SEQ ID NO: 51009 - protein, 191 aa, Homo sapiens
  Payload ID: 10184
  Gene Symbol: METTL10
  Gene Name: methyltransferase like 10
  ENSP ID: ENSP00000479554
MSSGADGGGGAAVAARSDKGSPGEDGFVPSALGTREHWDAVYERELQTFREYGDTGEIWFGEESMNRLIRWMQKHKIPLDASVLDIGTGNGVFLVELAKFGFSNITGIDYSPSAIQLSGSIIEKEGLSNIKLKVEDFLNLSTQLSGFHICIDKGTFDAISLNPDNAIEKRKQYVKSLSRVLKVKGFSNNVM

SEQ ID NO: 51010 - protein, 283 aa, Homo sapiens
  Payload ID: 10185
  Gene Symbol: METTL11B
  Gene Name: methyltransferase like 11B
  Uniprot ID: Q5VVY1
  ENSP ID: ENSP00000408058
MAHRGAHFAFRSRWQKTDDELCRHSMSFILHKAIRNDFFQSYLYLLEKIPLVKLYALTSQVINGEMQFYARAKLFYQEVPATEEGMMGNFIELSSPDIQASQKFLRKFVGGPGRAGTDCALDCGSGIGRVSKHVLLPVFNSVELVDMMESFLLEAQNYLQVKGDKVESYHCYSLQEFTPPFRRYDVIWIQWVSGHLTDKDLLAFLSRCRDGLKENGIIILKDNVAREGCILDLSDSSVTRDMDILRSLIRKSGLVVLGQEKQDGFPEQCIPVWMFALHSDRHS

SEQ ID NO: 51011 - protein, 240 aa, Homo sapiens
  Payload ID: 10186
  Gene Symbol: METTL12
  Gene Name: methyltransferase like 12
  Uniprot ID: A8MUP2
  ENSP ID: ENSP00000431287
MAALRRMLHLPSLMMGTCRPFAGSLADSCLADRCLWDRLHAQPRLGTVPTFDWFFGYDEVQGLLLPLLQEAQAASPLRVLDVGCGTSSLCTGLYTKSPHPVDVLGVDFSPVAVAHMNSLLEGGPGQTPLCPGHPASSLHFMHADAQNLGAVASSGSFQLLLDKGTWDAVARGGLPRAYQLLSECLRVLNPQGTLIQFSDEDPDVRLPCLEQGSYGWTVTVQELGPFRGITYFAYLIQGSH

SEQ ID NO: 51012 - protein, 699 aa, Homo sapiens
  Payload ID: 10187
  Gene Symbol: METTL13
  Gene Name: methyltransferase like 13
  Uniprot ID: Q8N6R0
  ENSP ID: ENSP00000354920
MNLLPKSSREFGSVDYWEKFFQQRGKKAFEWYGTYLELCGVLHKYIKPREKVLVIGCGNSELSEQLYDVGYRDIVNIDISEVVIKQMKECNATRRPQMSFLKMDMTQMEFPDASFQVVLDKGTLDAVLTDEEEKTLQQVDRMLAEVGRVLQVGGRYLCISLAQAHILKKAVGHFSREGWMVRVHQVANSQDQVLEAEPQFSLPVFAFIMTKFRPVPGSALQIFELCAQEQRKPVRLESAERLAEAVQERQQYAWLCSQLRRKARLGSVSLDLCDGDTGEPRYTLHVVDSPTVKPSRDNHFAIFIIPQGRETEWLFGMDEGRKQLAASAGFRRLITVALHRGQQYESMDHIQAELSARVMELAPAGMPTQQQVPFLSVGGDIGVRTVQHQDCSPLSGDYVIEDVQGDDKRYFRRLIFLSNRNVVQSEARLLKDVSHKAQKKRKKDRKKQRPADAEDLPAAPGQSIDKSYLCCEHHKAMIAGLALLRNPELLLEIPLALLVVGLGGGSLPLFVHDHFPKSCIDAVEIDPSMLEVATQWFGFSQSDRMKVHIADGLDYIASLAGGGEARPCYDVIMFDVDSKDPTLGMSCPPPAFVEQSFLQKVKSILTPEGVFILNLVCRDLGLKDSVLAGLKAVFPLLYVRRIEGEVNEILFCQLHPEQKLATPELLETAQALERTLRKPGRGWDDTYVLSDMLKTVKIV

SEQ ID NO: 51013 - protein, 613 aa, Homo sapiens
  Payload ID: 10187
  Gene Symbol: METTL13
  Gene Name: methyltransferase like 13
  Uniprot ID: Q8N6R0
  ENSP ID: ENSP00000355393
MKECNATRRPQMSFLKMDMTQMEFPDASFQVVLDKGTLDAVLTDEEEKTLQQVDRMLAEVGRVLQVGGRYLCISLAQAHILKKAVGHFSREGWMVRVHQVANSQDQVLEAEPQFSLPVFAFIMTKFRPVPGSALQIFELCAQEQRKPVRLESAERLAEAVQERQQYAWLCSQLRRKARLGSVSLDLCDGDTGEPRYTLHVVDSPTVKPSRDNHFAIFIIPQGRETEWLFGMDEGRKQLAASAGFRRLITVALHRGQQYESMDHIQAELSARVMELAPAGMPTQQQVPFLSVGGDIGVRTVQHQDCSPLSGDYVIEDVQGDDKRYFRRLIFLSNRNVVQSEARLLKDVSHKAQKKRKKDRKKQRPADAEDLPAAPGQSIDKSYLCCEHHKAMIAGLALLRNPELLLEIPLALLVVGLGGGSLPLFVHDHFPKSCIDAVEIDPSMLEVATQWFGFSQSDRMKVHIADGLDYIASLAGGGEARPCYDVIMFDVDSKDPTLGMSCPPPAFVEQSFLQKVKSILTPEGVFILNLVCRDLGLKDSVLAGLKAVFPLLYVRRIEGEVNEILFCQLHPEQKLATPELLETAQALERTLRKPGRGWDDTYVLSDMLKTVKIV

SEQ ID NO: 51014 - protein, 543 aa, Homo sapiens
  Payload ID: 10187
  Gene Symbol: METTL13
  Gene Name: methyltransferase like 13
  Uniprot ID: Q8N6R0
  ENSP ID: ENSP00000356711
MNLLPKSSREFGSVDYWEKFFQQRGKKAFEWYGTYLELCGVLHKYIKPREKVLVIGCGNSELSEQLYDVGYRDIVNIDISEVVIKQMKECNATRRPQMSFLKMDMTQMEFPDASFQVVLDKGTLDAVLTDEEEKTLQQVDRMLAEVGRVLQGRETEWLFGMDEGRKQLAASAGFRRLITVALHRGQQYESMDHIQAELSARVMELAPAGMPTQQQVPFLSVGGDIGVRTVQHQDCSPLSGDYVIEDVQGDDKRYFRRLIFLSNRNVVQSEARLLKDVSHKAQKKRKKDRKKQRPADAEDLPAAPGQSIDKSYLCCEHHKAMIAGLALLRNPELLLEIPLALLVVGLGGGSLPLFVHDHFPKSCIDAVEIDPSMLEVATQWFGFSQSDRMKVHIADGLDYIASLAGGGEARPCYDVIMFDVDSKDPTLGMSCPPPAFVEQSFLQKVKSILTPEGVFILNLVCRDLGLKDSVLAGLKAVFPLLYVRRIEGEVNEILFCQLHPEQKLATPELLETAQALERTLRKPGRGWDDTYVLSDMLKTVKIV

SEQ ID NO: 51015 - protein, 456 aa, Homo sapiens
  Payload ID: 10188
  Gene Symbol: METTL14
  Gene Name: methyltransferase like 14
  Uniprot ID: Q9HCE5
  ENSP ID: ENSP00000373474
MDSRLQEIRERQKLRRQLLAQQLGAESADSIGAVLNSKDEQREIAETRETCRASYDTSAPNAKRKYLDEGETDEDKMEEYKDELEMQQDEENLPYEEEIYKDSSTFLKGTQSLNPHNDYCQHFVDTGHRPQNFIRDVGLADRFEEYPKLRELIRLKDELIAKSNTPPMYLQADIEAFDIRELTPKFDVILLEPPLEEYYRETGITANEKCWTWDDIMKLEIDEIAAPRSFIFLWCGSGEGLDLGRVCLRKWGYRRCEDICWIKTNKNNPGKTKTLDPKAVFQRTKEHCLMGIKGTVKRSTDGDFIHANVDIDLIITEEPEIGNIEKPVEIFHIIEHFCLGRRRLHLFGRDSTIRPGWLTVGPTLTNSNYNAETYASYFSAPNSYLTGCTEEIERLRPKSPPPKSKSDRGGGAPRGGGRGGTSAGRGRERNRSNFRGERGGFRGGRGGAHRGGFPPR

SEQ ID NO: 51016 - protein, 137 aa, Homo sapiens
  Payload ID: 10188
  Gene Symbol: METTL14
  Gene Name: methyltransferase like 14
  ENSP ID: ENSP00000424111
  MOD_RES (1)..(1): Any amino acid
XIRELTPKFDVILLEPPLEEYYRETGITANEKCWTWDDIMKLEIDEIAAPRSFIFLWCGSGEGLDLGRVCLRKWGYRRCEDICWIKTNKNNPGKTKTLDPKAVFQRTKAGSQLDQRLQIATTMQKHMHPISVLLIPT

SEQ ID NO: 51017 - protein, 121 aa, Homo sapiens
  Payload ID: 10188
  Gene Symbol: METTL14
  Gene Name: methyltransferase like 14
  ENSP ID: ENSP00000425460
MDSRLQEIRERQKLRRQLLAQQICGIWLKPWKLGVRFVPLFLIPLALRSWANQVSFLSLLFANFFYRIIFKNLGAESADSIGAVLNSKDEQREIAETRETCRASYDTSAPNAKRKYLDEGE

SEQ ID NO: 51018 - protein, 64 aa, Homo sapiens
  Payload ID: 10188
  Gene Symbol: METTL14
  Gene Name: methyltransferase like 14
  ENSP ID: ENSP00000486381
MDSRLQEIRERQKLRRQLLAQQLGAESADSIGAVLNSKDEQREIAETRETCRASYDTSAPNAKR

SEQ ID NO: 51019 - protein, 89 aa, Homo sapiens
  Payload ID: 10188
  Gene Symbol: METTL14
  Gene Name: methyltransferase like 14
  ENSP ID: ENSP00000486933
MDSRLQEIRERQKLRRQLLAQQLGAESADSIGAVLNSKDEQREIAETRETCRASYDTSAPNAKRKYLDEGETDEDKMEEYKASRENATG

SEQ ID NO: 51020 - protein, 273 aa, Homo sapiens
  Payload ID: 10189
  Gene Symbol: METTL15
  Gene Name: methyltransferase like 15
  Uniprot ID: A6NJ78
  ENSP ID: ENSP00000307251
MLRYPYFCRMYKECLSCWLESGIPNLGVWPNRIHTTAEKYREYEAREQTDQTQAQELHRSQDRDFETMAKLHIPVMVDEVVHCLSPQKGQIFLDMTFGSGGHTKAILQKESDIVLYALDRDPTAYALAEHLSELYPKQIRAMLGQFSQAEALLMKAGVQPGTFDGVLMDLGCSSMQLDTPERGFSLRKDGPLDMRMDGGRYPDMPTAADVVNALDQQALASILRTYGEEKHAKKIASAIVQARSIYPITRTQQLASIVAEYSETYFPVAQTLY

SEQ ID NO: 51021 - protein, 407 aa, Homo sapiens
  Payload ID: 10189
  Gene Symbol: METTL15
  Gene Name: methyltransferase like 15
  Uniprot ID: A6NJ78
  ENSP ID: ENSP00000384369
MLRYPYFCRMYKECLSCWLESGIPNLGVWPNRIHTTAEKYREYEAREQTDQTQAQELHRSQDRDFETMAKLHIPVMVDEVVHCLSPQKGQIFLDMTFGSGGHTKAILQKESDIVLYALDRDPTAYALAEHLSELYPKQIRAMLGQFSQAEALLMKAGVQPGTFDGVLMDLGCSSMQLDTPERGFSLRKDGPLDMRMDGGRYPDMPTAADVVNALDQQALASILRTYGEEKHAKKIASAIVQARSIYPITRTQQLASIVAGAFPPSAIYTRKDLLQRSTHIATKTFQALRIFVNNELNELYTGLKTAQKFLRPGGRLVALSFHSLEDRIVKRFLLGISMTERFNLSVRQQVMKTSQLGSDHENTEEVSMRRAPLMWELIHKKVLSPQDQDVQDNPRGRSAKLRAAIKL

SEQ ID NO: 51022 - protein, 279 aa, Homo sapiens
  Payload ID: 10189
  Gene Symbol: METTL15
  Gene Name: methyltransferase like 15
  Uniprot ID: A6NJ78
  ENSP ID: ENSP00000385507
MLRYPYFCRMYKECLSCWLESGIPNLGVWPNRIHTTAEKYREYEAREQTDQTQAQELHRSQDRDFETMAKLHIPVMVDEVVHCLSPQKGQIFLDMTFGSGGHTKAILQKESDIVLYALDRDPTAYALAEHLSELYPKQIRAMLGQFSQAEALLMKAGVQPGTFDGVLMDLGCSSMQLDTPERGFSLRKDGPLDMRMDGGRSTGTCIYPKNIRGGEACQENRFSNCSGTQHLPHHQNPAACQHRCRSISSLCYLYTERLTTAIYPYCHQDFPGSSHICEQ

SEQ ID NO: 51023 - protein, 93 aa, Homo sapiens
  Payload ID: 10189
  Gene Symbol: METTL15
  Gene Name: methyltransferase like 15
  ENSP ID: ENSP00000385860
MLRYPYFCRMYKECLSCWLESGIPNLGVWPNRIHTTAEKYREYEAREQTDQTQAQELHRSQDRDFETMAKLHIPVMVDEVVHCLSPQKGQQKK

SEQ ID NO: 51024 - protein, 99 aa, Homo sapiens
  Payload ID: 10189
  Gene Symbol: METTL15
  Gene Name: methyltransferase like 15
  Uniprot ID: A6NJ78
  ENSP ID: ENSP00000392806
MLRYPYFCRMYKECLSCWLESGIPNLGVWPNRIHTTAEKYREYEAREQTDQTQAQELHRSQDRDFETMAKLHIPVMVDEVVHCLSPQKGQSLGVRSVGI

SEQ ID NO: 51025 - protein, 164 aa, Homo sapiens
  Payload ID: 10189
  Gene Symbol: METTL15
  Gene Name: methyltransferase like 15
  ENSP ID: ENSP00000396550
MLRYPYFCRMYKECLSCWLESGIPNLGVWPNRIHTTAEKYREYEAREQTDQTQAQELHRSQDRDFETMAKLHIPVMVDEVVHCLSPQKGQILFMCIVLFAYPNFLVMWTRMVYLFPFTHEETEAQRNFSRYDIWFGRAHKSHSAEGVRYCSLCLGQRPNSLCIS

SEQ ID NO: 51026 - protein, 107 aa, Homo sapiens
  Payload ID: 10189
  Gene Symbol: METTL15
  Gene Name: methyltransferase like 15
  ENSP ID: ENSP00000489363
MLRYPYFCRMYKECLSCWLESGIPNLGVWPNRIHTTAEKYREYEAREQTDQTQAQELHRSQDRDFETMAKLHIPVMVDEVVHCLSPQKGQQLLLRKSGRRPLLTASC

SEQ ID NO: 51027 - protein, 274 aa, Homo sapiens
  Payload ID: 10189
  Gene Symbol: METTL15
  Gene Name: methyltransferase like 15
  ENSP ID: ENSP00000489381
MLRYPYFCRMYKECLSCWLESGIPNLGVWPNRIHTTAEKYREYEAREQTDQTQAQELHRSQDRDFETMAKLHIPVMVDEVVHCLSPQKGQIFLDMTFGSGGHTKAILQKESDIVLYALDRDPTAYALAEHLSELYPKQIRAMLGQFSQAEALLMKAGVQPGTFDGVLMDLGCSSMQLDTPERGFSLRKDGPLDMRMDGGRYPDMPTAADVVNALDQQALASILRTYGEEKHAKKIASAIVQARSIYPITRTQQLASIVAGCTGESKLFWRCPKA

SEQ ID NO: 51028 - protein, 149 aa, Homo sapiens
  Payload ID: 10189
  Gene Symbol: METTL15
  Gene Name: methyltransferase like 15
  ENSP ID: ENSP00000489468
MLRYPYFCRMYKECLSCWLESGIPNLGVWPNRIHTTAEKYREYEAREQTDQTQAQELHRSQDRDFETMAKLHIPVMVDEVVHCLSPQKGQNSVRLHGLFPMCSSFCTCYQNFILQQPCFCCHLKSVPNFSSCNSLPMLLLGYLILHRSF

SEQ ID NO: 51029 - protein, 90 aa, Homo sapiens
  Payload ID: 10189
  Gene Symbol: METTL15
  Gene Name: methyltransferase like 15
  ENSP ID: ENSP00000489497
MLRYPYFCRMYKECLSCWLESGIPNLGVWPNRIHTTAEKYREYEAREQTDQTQAQELHRSQDRDFETMAKLHIPVMVDEVVHCLSPQKGQ

SEQ ID NO: 51030 - protein, 274 aa, Homo sapiens; identical to SEQ ID NO: 51027
  Payload ID: 10189
  Gene Symbol: METTL15
  Gene Name: methyltransferase like 15
  ENSP ID: ENSP00000489505

SEQ ID NO: 51031 - protein, 562 aa, Homo sapiens
  Payload ID: 10190
  Gene Symbol: METTL16
  Gene Name: methyltransferase like 16
  Uniprot ID: Q86W50
  ENSP ID: ENSP00000263092
MALSKSMHARNRYKDKPPDFAYLASKYPDFKQHVQINLNGRVSLNFKDPEAVRALTCTLLREDFGLSIDIPLERLIPTVPLRLNYIHWVEDLIGHQDSDKSTLRRGIDIGTGASCIYPLLGATLNGWYFLATEVDDMCFNYAKKNVEQNNLSDLIKVVKVPQKTLLMDALKEESEIIYDFCMCNPPFFANQLEAKGVNSRNPRRPPPSSVNTGGITEIMAEGGELEFVKRIIHDSLQLKKRLRWYSCMLGKKCSLAPLKEELRIQGVPKVTYTEFCQGRTMRWALAWSFYDDVTVPSPPSKRRKLEKPRKPITFVVLASVMKELSLKASPLRSETAEGIVVVTTWIEKILTDLKVQHKRVPCGKEEVSLFLTAIENSWIHLRRKKRERVRQLREVPRAPEDVIQALEEKKPTPKESGNSQELARGPQERTPCGPALREGEAAAVEGPCPSQESLSQEENPEPTEDERSEEKGGVEVLESCQGSSNGAQDQEASEQFGSPVAERGKRLPGVAGQYLFKCLINVKKEVDDALVEMHWVEGQNRDLMNQLCTYIRNQIFRLVAVN

SEQ ID NO: 51032 - protein, 168 aa, Homo sapiens
  Payload ID: 10190
  Gene Symbol: METTL16
  Gene Name: methyltransferase like 16
  ENSP ID: ENSP00000460207
MALSKSMHARNRYKDKPPDFAYLASKYPDFKQHVQINLNGRVSLNFKDPEAVRALTCTLLREDFGLSIDIPLERLIPTVPLRLNYIHWVEDLIGHQDSDKSTLRRGIDIGTGASCIYPLLGATLNGWYFLATEVDDMCFNYAKKNVEQNNLSDLIKGSKLTKSSKTSA

SEQ ID NO: 51033 - protein, 121 aa, Homo sapiens
  Payload ID: 10190
  Gene Symbol: METTL16
  Gene Name: methyltransferase like 16
  ENSP ID: ENSP00000460775
MALSKSMHARNRYKDKPPDFAYLASKYPDFKQHVQINLNGRVSLNFKDPEAVRALTCTLLREDFGLSIDIPLERLIPTVPLRLNYIHWVEDLIGHQDSDKSTLRRGIDIGSKLTKSSKTSA

SEQ ID NO: 51034 - protein, 148 aa, Homo sapiens
  Payload ID: 10190
  Gene Symbol: METTL16
  Gene Name: methyltransferase like 16
  ENSP ID: ENSP00000461546
MALSKSMHARNRYKDKPPDFAYLASKYPDFKQHVQINLNGRVSLNFKDPEAVRALTCTLLREDFGLSIDIPLERLIPTVPLRLNYIHWVEDLIGHQDSDKSTLRRGIDIVVKVPQKTLLMDALKEESEIIYDFCMCNPPFFANQLEAK

SEQ ID NO: 51035 - protein, 101 aa, Homo sapiens
  Payload ID: 10190
  Gene Symbol: METTL16
  Gene Name: methyltransferase like 16
  ENSP ID: ENSP00000465733
  MOD_RES (1)..(1): Any amino acid
XLNFKDPEAVRALTCTLLREDFGLSIDIPLERLIPTVPLRLNYIHWVEDLIGHQDSDKSTLRRGIDIGIQGRACPVALGPGYPRAKMARGHLASTPYLEQP

SEQ ID NO: 51036 - protein, 456 aa, Homo sapiens
  Payload ID: 10191
  Gene Symbol: METTL17
  Gene Name: methyltransferase like 17
  Uniprot ID: Q9H7H0
  ENSP ID: ENSP00000343041
MAAALKCLLTLGRWCPGLGVAPQARALAALVPGVTQVDNKSGFLQKRPHRQHPGILKLPHVRLPQALANGAQLLLLGSAGPTMENQVQTLTSYLWSRHLPVEPEELQRRARHLEKKFLENPDLSQTEEKLRGAVLHALRKTTYHWQELSYTEGLSLVYMAARLDGGFAAVSRAFHEIRARNPAFQPQTLMDFGSGTGSVTWAAHSIWGQSLREYMCVDRSAAMLVLAEKLLKGGSESGEPYIPGVFFRQFLPVSPKVQFDVVVSAFSLSELPSKADRTEVVQTLWRKTGHFLVLVENGTKAGHSLLMDARDLVLKGKEKSPLDPRPGFVFAPCPHELPCPQLTNLACSFSQAYHPIPFSWNKKPKEEKFSMVILARGSPEEAHRWPRITQPVLKRPRHVHCHLCCPDGHMQHAVLTARRHGRDLYRCARVSSWGDLLPVLTPSAFPPSTAQDPSES

SEQ ID NO: 51037 - protein, 478 aa, Homo sapiens
  Payload ID: 10191
  Gene Symbol: METTL17
  Gene Name: methyltransferase like 17
  Uniprot ID: Q9H7H0
  ENSP ID: ENSP00000372445
MAAALKCLLTLGRWCPGLGVAPQARALAALVPGVTQVDNKSGFLQKRPHRQHPGILKLPHVRLPQALANGAQLLLLGSAGPTMENQVQTLTSYLWSRHLPVEPEELQRRARHLEKKFLENPDLSQTEEKLRGAVLHALRKTTYHWQELSYTEGLSLVYMAARLDGGFAAVSRAFHEIRARNPAFQPQTLMDFGSGTGSVTWAAHSIWGQSLREYMCVDRSAAMLVLAEKLLKGGSESGEPYIPGVFFRQFLPVSPKVQFDVVVSAFSLSELPSKADRTEVVQTLWRKTGHFLVLVENGTKAGHSLLMDARDLVLKGKEKSPLDPRPGFVFAPCPHELPCPQLTNLACSFSQAYHPIPFSWNKKPKEEKFSMVILARGSPEEAHRWPRITQPVLKRPRHVHCHLCCPDGHMQHAVLTARRHGRYGGCDQNQWDVAGSCSPRQHLFPQGFVSLCPCQLLGRSFTCAYSVCVSSIYGSGSL

SEQ ID NO: 51038 - protein, 158 aa, Homo sapiens
  Payload ID: 10191
  Gene Symbol: METTL17
  Gene Name: methyltransferase like 17
  ENSP ID: ENSP00000450782
MAAALKCLLTLGRWCPGLGVAPQARALAALVPGVTQVDNKSGFLQKRPHRQHPGILKLPHVRLPQALANGAQLLLLGSAGPTMENQVQTLTSYLWSRHLPVEPEELQRRARHLEKKFLENPGPDFQSLFSPQTYLRQRRNFVEQCYTHYVKLPTIGKN

SEQ ID NO: 51039 - protein, 447 aa, Homo sapiens
  Payload ID: 10191
  Gene Symbol: METTL17
  Gene Name: methyltransferase like 17
  Uniprot ID: Q9H7H0
  ENSP ID: ENSP00000450794
MAAALKCLLTLGRWCPGLGVAPQARALAALVPGVTQVDNKSGFLQKRPHRQHPGILKLPHVRLPQALANGAQLLLLGSAGPTMENQVQTLTSYLWSRHLPVEPEELQRRARHLEKKFLENPDLSQTEEKLRGAVLHALRKTTYHWQELSYTEGLSLVYMAARLDGGFAAVSRAFHEIRARNPAFQPQTLMDFGSGTGSVTWAAHSIWGQSLREYMCVDRSAAMLVLAEKLLKGGSESGEPYIPGVFFRQFLPVSPKVQFDVVVSAFSLSELPSKADRTEVVQTLWRKTGHFLVLVENGTKAGHSLLMDARDLVLKGKEKSPLDPRPGFVFAPCPHELPCPQLTNLACSFSQAYHPIPFSWNKKPKEEKFSMVILARGSPEEAHRWPRITQPVLKRPRHVHCHLCCPDGHMQHAVLTARRHGSSWGDLLPVLTPSAFPPSTAQDPSES

SEQ ID NO: 51040 - protein, 158 aa, Homo sapiens; identical to SEQ ID NO: 51038
  Payload ID: 10191
  Gene Symbol: METTL17
  Gene Name: methyltransferase like 17
  ENSP ID: ENSP00000450948

SEQ ID NO: 51041 - protein, 174 aa, Homo sapiens
  Payload ID: 10191
  Gene Symbol: METTL17
  Gene Name: methyltransferase like 17
  ENSP ID: ENSP00000451049
MENQVQTLTSYLWSRHLPVEPEELQRRARHLEKKFLENPDLSQTEEKLRGAVLHALRKTTYHWQELSYTEGLSLVYMAARLDGGFAAVSRAFHEIRARNPAFQPQTLMDFGSGTGSVTWAAHSIWGQSLREYMCVDRSAAMLVLAEKLLKGGSESGEPYIPGVFFRQFLPVSPK

SEQ ID NO: 51042 - protein, 140 aa, Homo sapiens
  Payload ID: 10191
  Gene Symbol: METTL17
  Gene Name: methyltransferase like 17
  ENSP ID: ENSP00000451478
MENQVQTLTSYLWSRHLPVEPEELQRRARHLEKKFLENPDLSQTEEKLRGAVLHALRKTTYHWQELSYTEGLSLVYMAARLDGGFAAVSRAFHEIRARNPAFQPQTLMDFGSGTGSVTWAAHSIWGQSLREYMCVDRSAA

SEQ ID NO: 51043 - protein, 186 aa, Homo sapiens
  Payload ID: 10191
  Gene Symbol: METTL17
  Gene Name: methyltransferase like 17
  ENSP ID: ENSP00000451804
MVPRPWSGSPGPGECLHSLLSERLWICRDISAQRRSAPGSPRPSDCQQLSFLPGNQPTFLCLQALAALVPGVTQVDNKSGFLQKRPHRQHPGILKLPHVRLPQALANGAQLLLLGSAGPTMENQVQTLTSYLWSRHLPVEPEELQRRARHLEKKFLENPDLSQTEEKLRGAVLHALRKTTYHWQEL

SEQ ID NO: 51044 - protein, 102 aa, Homo sapiens
  Payload ID: 10191
  Gene Symbol: METTL17
  Gene Name: methyltransferase like 17
  ENSP ID: ENSP00000451913
MENQVQTLTSYLWSRHLPVEPEELQRRARHLEKKFLENPDLSQTEEKLRGAVLHALRKTTYHWQELSYTEGLSLVYMAARLDGGFAAVSRAFHEIRARNPAF

SEQ ID NO: 51045 - protein, 123 aa, Homo sapiens
  Payload ID: 10191
  Gene Symbol: METTL17
  Gene Name: methyltransferase like 17
  ENSP ID: ENSP00000452238
  MOD_RES (1)..(1): Any amino acid
XPGFVFAPCPHELPCPQLTNLACSFSQAYHPIPFSWNKKPKEEKFSMVILARGSPEEAHRWPRITQPVLKRPRHVHCHLCCPDGHMQHAVLTARRHGSSWGDLLPVLTPSAFPPSTAQDPSES

SEQ ID NO: 51046 - protein, 158 aa, Homo sapiens; identical to SEQ ID NO: 51038
  Payload ID: 10191
  Gene Symbol: METTL17
  Gene Name: methyltransferase like 17
  ENSP ID: ENSP00000452392

SEQ ID NO: 51047 - protein, 372 aa, Homo sapiens
  Payload ID: 10192
  Gene Symbol: METTL18
  Gene Name: methyltransferase like 18
  Uniprot ID: O95568
  ENSP ID: ENSP00000307077
MTFQFNFTIEDHLENELTPIRDGALTLDSSKELSVSESQKGEERDRKCSAEQFDLPQDHLWEHKSMENAAPSQDTDSPLSAASSSRNLEPHGKQPSLRAAKEHAMPKDLKKMLENKVIETLPGFQHVKLSVVKTILLKENFPGENIVSKSFSSHSDLITGVYEGGLKIWECTFDLLAYFTKAKVKFAGKKVLDLGCGSGLLGITAFKGGSKEIHFQDYNSMVIDEVTLPNVVANSTLEDEENDVNEPDVKRCRKPKVTQLYKCRFFSGEWSEFCKLVLSSEKLFVKYDLILTSETIYNPDYYSNLHQTFLRLLSKNGRVLLASKAHYFGVGGGVHLFQKFVEERDVFKTRILKIIDEGLKRFIIEITFKFPG

SEQ ID NO: 51048 - protein, 372 aa, Homo sapiens; identical to SEQ ID NO: 51047
  Payload ID: 10192
  Gene Symbol: METTL18
  Gene Name: methyltransferase like 18
  Uniprot ID: O95568
  ENSP ID: ENSP00000307975

SEQ ID NO: 51049 - protein, 184 aa, Homo sapiens
  Payload ID: 10192
  Gene Symbol: METTL18
  Gene Name: methyltransferase like 18
  ENSP ID: ENSP00000402305
MTFQFNFTIEDHLENELTPIRDGALTLDSSKELSVSESQKGEERDRKCSAEQFDLPQDHLWEHKSMENAAPSQDTDSPLSAASSSRNLEPHGKQPSLRAAKEHAMPKDLKKMLENKVIETLPGFQHVKLSVVKTILLKENFPGENIVSKSFSSHSDLITGVYEGGLKIWECTFDLLAYFTKAKV

SEQ ID NO: 51050 - protein, 262 aa, Homo sapiens
  Payload ID: 10193
  Gene Symbol: METTL20
  Gene Name: methyltransferase like 20
  Uniprot ID: Q8IXQ9
  ENSP ID: ENSP00000350353
MALSLGWKAHRNHCGLLLQALRSSGLLLFPCGQCPWRGAGSFLDPEIKAFLEENTEVTSSGSLTPEIQLRLLTPRCKFWWERADLWPHSDPYWAIYWPGGQALSRYLLDNPDVVRGKSVLDLGSGCGATAIAAKMSGASRILANDIDPIAGMAITLNCELNRLNPFPILIQNILNLEQDKWDLVVLGDMFYDEDLADSLHQWLKKCFWTYRTRVLIGDPGRPQFSGHSIQHHLHKVVEYSLLESTRQENSGLTTSTVWGFQP

SEQ ID NO: 51051 - protein, 262 aa, Homo sapiens; identical to SEQ ID NO: 51050
  Payload ID: 10193
  Gene Symbol: METTL20
  Gene Name: methyltransferase like 20
  Uniprot ID: Q8IXQ9
  ENSP ID: ENSP00000379112

SEQ ID NO: 51052 - protein, 262 aa, Homo sapiens; identical to SEQ ID NO: 51050
  Payload ID: 10193
  Gene Symbol: METTL20
  Gene Name: methyltransferase like 20
  Uniprot ID: Q8IXQ9
  ENSP ID: ENSP00000396123

SEQ ID NO: 51053 - protein, 114 aa, Homo sapiens
  Payload ID: 10193
  Gene Symbol: METTL20
  Gene Name: methyltransferase like 20
  ENSP ID: ENSP00000437442
MALSLGWKAHRNHCGLLLQALRSSGLLLFPCGQCPWRGAGSFLDPEIKAFLEENTEVTSSGSLTPEIQLRLLTPRCKFWWERADLWPHSDPYWAIYWPGGQALSSCRNGYYTKL

SEQ ID NO: 51054 - protein, 262 aa, Homo sapiens; identical to SEQ ID NO: 51050
  Payload ID: 10193
  Gene Symbol: METTL20
  Gene Name: methyltransferase like 20
  Uniprot ID: Q8IXQ9
  ENSP ID: ENSP00000441421

SEQ ID NO: 51055 - protein, 72 aa, Homo sapiens
  Payload ID: 10193
  Gene Symbol: METTL20
  Gene Name: methyltransferase like 20
  ENSP ID: ENSP00000445165
MALSLGWKAHRNHCGLLLQALRSSGLLLFPCGQCPWRGAGSFLDPEIKAFLEENTEVTSSGSLTPEIQLRLL

SEQ ID NO: 51056 - protein, 236 aa, Homo sapiens
  Payload ID: 10194
  Gene Symbol: METTL21A
  Gene Name: methyltransferase like 21A
  ENSP ID: ENSP00000272839
MALVPYEETTEFGLQKFHKPLATFSFANHTIQIRQDWRHLGVAAVVWDAAIVLSTYLEMGAVELRGRSAVELGAGTGLVGIVAALLALKSSMKPLLVHCLLFFSGAHVTITDRKVALEFLKSNVQANLPPHIQTKTVVKELTWGQNLGSFSPGEFDLILGADIIYLEETFTDLLQTLEHLCSNHSVILLACRIRYERDNNFLAMLERQFTVRKVHYDPEKDVHIYEAQKRNQKEDL

SEQ ID NO: 51057 - protein, 218 aa, Homo sapiens
  Payload ID: 10194
  Gene Symbol: METTL21A
  Gene Name: methyltransferase like 21A
  Uniprot ID: Q8WXB1
  ENSP ID: ENSP00000385481
MALVPYEETTEFGLQKFHKPLATFSFANHTIQIRQDWRHLGVAAVVWDAAIVLSTYLEMGAVELRGRSAVELGAGTGLVGIVAALLGAHVTITDRKVALEFLKSNVQANLPPHIQTKTVVKELTWGQNLGSFSPGEFDLILGADIIYLEETFTDLLQTLEHLCSNHSVILLACRIRYERDNNFLAMLERQFTVRKVHYDPEKDVHIYEAQKRNQKEDL

SEQ ID NO: 51058 - protein, 90 aa, Homo sapiens
  Payload ID: 10194
  Gene Symbol: METTL21A
  Gene Name: methyltransferase like 21A
  Uniprot ID: Q8WXB1
  ENSP ID: ENSP00000389684
MALVPYEETTEFGLQKFHKPLATFSFANHTIQIRQDWRHLGVAAVVWDAAIVLSTYLEMGAVELRGRSAVELGAGTGLVGIVAALLGGGI

SEQ ID NO: 51059 - protein, 218 aa, Homo sapiens; identical to SEQ ID NO: 51057
  Payload ID: 10194
  Gene Symbol: METTL21A
  Gene Name: methyltransferase like 21A
  Uniprot ID: Q8WXB1
  ENSP ID: ENSP00000392062

SEQ ID NO: 51060 - protein, 90 aa, Homo sapiens; identical to SEQ ID NO: 51058
  Payload ID: 10194
  Gene Symbol: METTL21A
  Gene Name: methyltransferase like 21A
  Uniprot ID: Q8WXB1
  ENSP ID: ENSP00000400730

SEQ ID NO: 51061 - protein, 218 aa, Homo sapiens; identical to SEQ ID NO: 51057
  Payload ID: 10194
  Gene Symbol: METTL21A
  Gene Name: methyltransferase like 21A
  Uniprot ID: Q8WXB1
  ENSP ID: ENSP00000403317

SEQ ID NO: 51062 - protein, 218 aa, Homo sapiens; identical to SEQ ID NO: 51057
  Payload ID: 10194
  Gene Symbol: METTL21A
  Gene Name: methyltransferase like 21A
  Uniprot ID: Q8WXB1
  ENSP ID: ENSP00000407622

SEQ ID NO: 51063 - protein, 52 aa, Homo sapiens
  Payload ID: 10194
  Gene Symbol: METTL21A
  Gene Name: methyltransferase like 21A
  ENSP ID: ENSP00000409485
MALVPYEETTEFGLQKFHKPLATFSFANHTIQIRQDWRHLGVAAVVWDAVLM

SEQ ID NO: 51064 - protein, 218 aa, Homo sapiens; identical to SEQ ID NO: 51057
  Payload ID: 10194
  Gene Symbol: METTL21A
  Gene Name: methyltransferase like 21A
  Uniprot ID: Q8WXB1
  ENSP ID: ENSP00000415115

SEQ ID NO: 51065 - protein, 127 aa, Homo sapiens
  Payload ID: 10194
  Gene Symbol: METTL21A
  Gene Name: methyltransferase like 21A
  ENSP ID: ENSP00000416570
MALVPYEETTEFGLQKFHKPLATFSFANHTIQIRQDWRHLGVAAVVWDAAIVLSTYLEMGAVELRGRSAVELGAGTGLVGIVAALLENTGQMQTEGYSKRKQITTLQKLQGHQRQGNKLSQTEGDYN

SEQ ID NO: 51066 - protein, 226 aa, Homo sapiens
  Payload ID: 10195
  Gene Symbol: METTL21B
  Gene Name: methyltransferase like 21B
  Uniprot ID: Q96AZ1
  ENSP ID: ENSP00000300209
MADPGPDPESESESVFPREVGLFADSYSEKSQFCFCGHVLTITQNFGSRLGVAARVWDAALSLCNYFESQNVDFRGKKVIELGAGTGIVGILAALQGGDVTITDLPLALEQIQGNVQANVPAGGQAQVRALSWGIDHHVFPANYDLVLGADIVYLEPTFPLLLGTLQHLCRPHGTIYLASKMRKEHGTESFFQHLLPQHFQLELAQRDEDENVNIYRARHREPRPA

SEQ ID NO: 51067 - protein, 149 aa, Homo sapiens
  Payload ID: 10195
  Gene Symbol: METTL21B
  Gene Name: methyltransferase like 21B
  Uniprot ID: Q96AZ1
  ENSP ID: ENSP00000327425
MADPGPDPESESESVFPREVGLFADSYSEKSQFCFCGHVLTITQNFGSRLGVAARVWDAALSLCNYFESQNVDFRGKKVIELGAGTGIVGILAALQGAYGLVRETEDDVIEQELWRGMRGACGHALSMSTMTPWESIKGSSVRGGCYHH

SEQ ID NO: 51068 - protein, 107 aa, Homo sapiens
  Payload ID: 10195
  Gene Symbol: METTL21B
  Gene Name: methyltransferase like 21B
  ENSP ID: ENSP00000447718
MHWDPTLCLCSAGREGKALSLCNYFESQNVDFRGKKVIELGAGTGIVGILAALQGAYGLVRETEDDVIEQELWRGMRGACGHALSMSTMTPWESIKGSSVRGGCYHH

SEQ ID NO: 51069 - protein, 45 aa, Homo sapiens
  Payload ID: 10195
  Gene Symbol: METTL21B
  Gene Name: methyltransferase like 21B
  ENSP ID: ENSP00000448163
MRKEHGTESFFQHLLPQHFQLELAQRDEDENVNIYRARHREPRPA

SEQ ID NO: 51070 - protein, 10 aa, Homo sapiens
  Payload ID: 10195
  Gene Symbol: METTL21B
  Gene Name: methyltransferase like 21B
  ENSP ID: ENSP00000487543
SNPFTNHTTR

SEQ ID NO: 51071 - protein, 264 aa, Homo sapiens
  Payload ID: 10196
  Gene Symbol: METTL21C
  Gene Name: methyltransferase like 21C
  Uniprot ID: Q5VZV1
  ENSP ID: ENSP00000267273
MDVCLSSAQQPGRRGEGLSSPGGWLEAEKKGAPQKDSTGGVLEESNKIEPSLHSLQKFVPTDYASYTQEHYRFAGKEIVIQESIESYGAVVWPGAMALCQYLEEHAEELNFQDAKILEIGAGPGLVSIVASILGAQVTATDLPDVLGNLQYNLLKNTLQCTAHLPEVKELVWGEDLDKNFPKSAFYYDYVLASDVVYHHYFLDKLLTTMVYLSQPGTVLLWANKFRFSTDYEFLDKFKQVFDTTLLAEYPESSVKLFKGILKWD

SEQ ID NO: 51072 - protein, 205 aa, Homo sapiens
  Payload ID: 10197
  Gene Symbol: METTL22
  Gene Name: methyltransferase like 22
  Uniprot ID: Q9BUU2
  ENSP ID: ENSP00000163678
MVQLAPAAAMDEVTFRSDTVLSDVHLYTPNHRHLMVRLNSVGQPVFLSQFKLLWSQDSWTDSGAKGGSHRDVHTKEPPSAETGSTGSPPGSGHGNEGFSLQAGTDTTGQEVAEAQLDEDGDLDVVRRPRAASDSNPAGPLRDKVHPMILAQEEDDVLGEEAQGSPHDIIRIGVAGRPAPGRLHPVPTGPLPRMYSAGARGRHGAR

SEQ ID NO: 51073 - protein, 404 aa, Homo sapiens
  Payload ID: 10197
  Gene Symbol: METTL22
  Gene Name: methyltransferase like 22
  Uniprot ID: Q9BUU2
  ENSP ID: ENSP00000371345
MVQLAPAAAMDEVTFRSDTVLSDVHLYTPNHRHLMVRLNSVGQPVFLSQFKLLWSQDSWTDSGAKGGSHRDVHTKEPPSAETGSTGSPPGSGHGNEGFSLQAGTDTTGQEVAEAQLDEDGDLDVVRRPRAASDSNPAGPLRDKVHPMILAQEEDDVLGEEAQGSPHDIIRIEHTMATPLEDVGKQVWRGALLLADYILFRQDLFRGCTALELGAGTGLASIIAATMARTVYCTDVGADLLSMCQRNIALNSHLAATGGGIVRVKELDWLKDDLCTDPKVPFSWSQEEISDLYDHTTILFAAEVFYDDDLTDAVFKTLSRLAHRLKNACTAILSVEKRLNFTLRHLDVTCEAYDHFRSCLHALEQLADGKLRFVVEPVEASFPQLLVYERLQQLELWKIIAEPVT

SEQ ID NO: 51074 - protein, 16 aa, Homo sapiens
  Payload ID: 10197
  Gene Symbol: METTL22
  Gene Name: methyltransferase like 22
  ENSP ID: ENSP00000456618
MVQLAPAAAMDEVTFR

SEQ ID NO: 51075 - protein, 348 aa, Homo sapiens
  Payload ID: 10197
  Gene Symbol: METTL22
  Gene Name: methyltransferase like 22
  ENSP ID: ENSP00000457152
MVQLAPAAAMDEVTFRSDTVLSDVHLYTPNHRHLMVRLNSVGQPVFLSQFKLLWSQDSWTDSGAKGGSHRDVHTKEPPSAETGSTGSPPGSGHAQEEDDVLGEEAQGSPHDIIRIEHTMATPLEDVGKQVWRGALLLADYILFRQDLFRGCTALELGAGTGLASIIAATMARTVYCTDVGADLLSMCQRNIALNSHLAATGGGIVRVKELDWLKDDLCTDPKVPFSWSQEEISDLYDHTTILFAAEVFYDDDLTDAVFKTLSRLAHRLKNACTAILSVEKRLNFTLRHLDVTCEAYDHFRSCLHALEQLADGKLRFVVEPVEASFPQLLVYERLQQLELWKIIAEPVT

SEQ ID NO: 51076 - protein, 46 aa, Homo sapiens
  Payload ID: 10197
  Gene Symbol: METTL22
  Gene Name: methyltransferase like 22
  ENSP ID: ENSP00000457191
  MOD_RES (1)..(1): Any amino acid
XGIVRVKELDWLKDDLCTGVVVSLCGSMIIPELSQGPLQLVTRGNF

SEQ ID NO: 51077 - protein, 70 aa, Homo sapiens
  Payload ID: 10197
  Gene Symbol: METTL22
  Gene Name: methyltransferase like 22
  ENSP ID: ENSP00000457291
MVQLAPAAAMDEVTFRSDTVLSDVHLYTPNHRHLMVRLNSVGQPVFLSQFKLLWSQDSWTDSGAKGGSHR

SEQ ID NO: 51078 - protein, 47 aa, Homo sapiens
  Payload ID: 10197
  Gene Symbol: METTL22
  Gene Name: methyltransferase like 22
  ENSP ID: ENSP00000457913
MVQLAPAAAMDEVTFRSDTVLSDVHLYTPNHRHLMVRLNSVGQPGRD

SEQ ID NO: 51079 - protein, 154 aa, Homo sapiens
  Payload ID: 10197
  Gene Symbol: METTL22
  Gene Name: methyltransferase like 22
  ENSP ID: ENSP00000459729
RGCTALELGAGTGLASIIAATMARTVYCTDVGADLLSMCQRNIALNSHLAATGGGIVRVKELDWLKDDLCTDPKVPFSWSQEEISDLYDHTTILFAAEVFYDDDLTDAVFKTLSRLAHRLKNACTAILSVEKSLCVRLAGLQAQLHIETLGRHM

SEQ ID NO: 51080 - protein, 103 aa, Homo sapiens
  Payload ID: 10197
  Gene Symbol: METTL22
  Gene Name: methyltransferase like 22
  ENSP ID: ENSP00000460481
YDDDLTDAVFKTLSRLAHRLKNACTAILSVEKRLNFTLRHLDVTCEAYDHFRSCLHALEQLADGKLRFVVEPVEASFPQLLVYERLQQLVGPGPEAGPLVALL

SEQ ID NO: 51081 - protein, 165 aa, Homo sapiens
  Payload ID: 10197
  Gene Symbol: METTL22
  Gene Name: methyltransferase like 22
  ENSP ID: ENSP00000461054
  MOD_RES (1)..(1): Any amino acid
XVRVKELDWLKDDLCTDPKVPFSWSQEEISDLYDHTTILFAAEVFYDDDLTDAVFKTLSRLAHRLKNACTAILSVEKRLNFTLRHLDVTCEAYDHFRSCLHALEQLADGKLRFVVEPVEASFPQLLVYERLQQLPLCHSKIEQPRATKKGGSRPSAPAPARLLRG

SEQ ID NO: 51082 - protein, 190 aa, Homo sapiens
  Payload ID: 10198
  Gene Symbol: METTL23
  Gene Name: methyltransferase like 23
  Uniprot ID: Q86XA0
  ENSP ID: ENSP00000341543
MYVWPCAVVLAQYLWFHRRSLPGKAILEIGAGVSLPGILAAKCGAEVILSDSSELPHCLEVCRQSCQMNNLPHLQVVGLTWGHISWDLLALPPQDIILASDVFFEPEDFEDILATIYFLMHKNPKVQLWSTYQVRSADWSLEALLYKWDMKCVHIPLESFDADKEDIAESTLPGRHTVEMLVISFAKDSL

SEQ ID NO: 51083 - protein, 146 aa, Homo sapiens
  Payload ID: 10198
  Gene Symbol: METTL23
  Gene Name: methyltransferase like 23
  ENSP ID: ENSP00000464965
MYVWPCAVVLAQYLWFHRRSLPGKAILEIGAGVSLPGILAAKCGAEVILSDSSELPHCLEVCRQSCQMNNLPHLQVVGLTWGHISWDLLALPPQDIILASDVFFEPEDFEDILATIYFLMHKNPKVQLWSTYQVRRQVWMTLTFYM

SEQ ID NO: 51084 - protein, 123 aa, Homo sapiens
  Payload ID: 10198
  Gene Symbol: METTL23
  Gene Name: methyltransferase like 23
  Uniprot ID: Q86XA0
  ENSP ID: ENSP00000465430
MNNLPHLQVVGLTWGHISWDLLALPPQDIILASDVFFEPEDFEDILATIYFLMHKNPKVQLWSTYQVRSADWSLEALLYKWDMKCVHIPLESFDADKEDIAESTLPGRHTVEMLVISFAKDSL

SEQ ID NO: 51085 - protein, 123 aa, Homo sapiens; identical to SEQ ID NO: 51084
  Payload ID: 10198
  Gene Symbol: METTL23
  Gene Name: methyltransferase like 23
  Uniprot ID: Q86XA0
  ENSP ID: ENSP00000465890

SEQ ID NO: 51086 - protein, 71 aa, Homo sapiens
  Payload ID: 10198
  Gene Symbol: METTL23
  Gene Name: methyltransferase like 23
  ENSP ID: ENSP00000465959
MHKNPKVQLWSTYQVRSADWSLEALLYKWDMKCVHIPLESFDADKEDIAESTLPGRHTVEMLVISFAKDSL

SEQ ID NO: 51087 - protein, 123 aa, Homo sapiens; identical to SEQ ID NO: 51084
  Payload ID: 10198
  Gene Symbol: METTL23
  Gene Name: methyltransferase like 23
  Uniprot ID: Q86XA0
  ENSP ID: ENSP00000466203

SEQ ID NO: 51088 - protein, 79 aa, Homo sapiens
  Payload ID: 10198
  Gene Symbol: METTL23
  Gene Name: methyltransferase like 23
  ENSP ID: ENSP00000466614
MNNLPHLQVVGLTWGHISWDLLALPPQDIILASDVFFEPEDFEDILATIYFLMHKNPKVQLWSTYQVRRQVWMTLTFYM

SEQ ID NO: 51089 - protein, 138 aa, Homo sapiens
  Payload ID: 10198
  Gene Symbol: METTL23
  Gene Name: methyltransferase like 23
  ENSP ID: ENSP00000466938
MYVWPCAVVLAQYLWFHRRSLPGKAILEIGAGVSLPGILAAKCGAEVILSDSSELPHCLEVCRQSCQMNNLPHLQVVGLTWGHISWDLLALPPQDIILASDVFFEPEDFEDILATIYFLMHKNPKVQLWSTYQVRRQC

SEQ ID NO: 51090 - protein, 56 aa, Homo sapiens
  Payload ID: 10198
  Gene Symbol: METTL23
  Gene Name: methyltransferase like 23
  ENSP ID: ENSP00000467101
MNNLPHLQVVGLTWGHISWDLLALPPQDIILASDVFFEPEDFEDILATIYFLMHKN

SEQ ID NO: 51091 - protein, 176 aa, Homo sapiens
  Payload ID: 10198
  Gene Symbol: METTL23
  Gene Name: methyltransferase like 23
  ENSP ID: ENSP00000467503
MYVWPCAVVLAQYLWFHRRSLPGKAILEIGAGVSLPGILAAKCGAEVILSDSSELPHCLEVCRQSCQMNNLPHLQVVGLTWGHISWDLLALPPQDIILASDVFFEPEDFEDILATIYFLMHKNPKVQLWSTYQVRSADWSLEALLYKWDMKCVHIPLESFDADKEDIAESTLPGRH

SEQ ID NO: 51092 - protein, 150 aa, Homo sapiens
  Payload ID: 10198
  Gene Symbol: METTL23
  Gene Name: methyltransferase like 23
  ENSP ID: ENSP00000467527
MYVWPCAVVLAQYLWFHRRSLPGKAILEIGAGVSLPGILAAKCGAEVILSDSSELPHCLEVCRQSCQMNNLPHLQVVGLTWGHISWDLLALPPQDIILASDVFFEPEDFEDILATIYFLMHKNPKVQLWSTYQVRSADWSLEALLYKWDM

SEQ ID NO: 51093 - protein, 138 aa, Homo sapiens; identical to SEQ ID NO: 51089
  Payload ID: 10198
  Gene Symbol: METTL23
  Gene Name: methyltransferase like 23
  ENSP ID: ENSP00000468386

SEQ ID NO: 51094 - protein, 71 aa, Homo sapiens
  Payload ID: 10198
  Gene Symbol: METTL23
  Gene Name: methyltransferase like 23
  ENSP ID: ENSP00000468704
MNNLPHLQVVGLTWGHISWDLLALPPQDIILASDVFFEPEDFEDILATIYFLMHKNPKVQLWSTYQVRRQC

SEQ ID NO: 51095 - protein, 190 aa, Homo sapiens; identical to SEQ ID NO: 51082
  Payload ID: 10198
  Gene Symbol: METTL23
  Gene Name: methyltransferase like 23
  Uniprot ID: Q86XA0
  ENSP ID: ENSP00000482599

SEQ ID NO: 51096 - protein, 366 aa, Homo sapiens
  Payload ID: 10199
  Gene Symbol: METTL24
  Gene Name: methyltransferase like 24
  Uniprot ID: Q5JXM2
  ENSP ID: ENSP00000344071
MARERPPGRGCGVLRRCLLGAVLLFGLRLCAELRRAGPGSPTRSAPPGPAWRPPGPHLPPAPGQPRGASRRQVTYVRSGRRAPPGGGGSGTPEPGCCAPRGRPRRKGPRWHIDLQPWAGSAQSLDEEAWRFLRYISTTQIACNHMNTDSLATDSSPTHKPWSVCLDDRFNLAHQIRNKQCRLYSLGLGSDDTHFEVSMANNGCEVHRFDPSVKSAHILESQHLWYHRLSIDWRDPHPAVAAQKPHSNTRKLGSILNEFGHHKIDVLKADLESAEWKVLENLILEDVLEQIGQLIFEIHLHWPGFEVSGSDSSVVRFWYSLLKELEQKDFRLFHSYKDLSKPQLFLKKDIFNASSCYTLSWVNTRWK

SEQ ID NO: 51097 - protein, 603 aa, Homo sapiens
  Payload ID: 10200
  Gene Symbol: METTL25
  Gene Name: methyltransferase like 25
  Uniprot ID: Q8N6Q8
  ENSP ID: ENSP00000248306
MAASCPLPVTPDLPTLRAKLQGLLQFLRDALSISNAHTVDFYTESVWEELVDLPPETVLAALRKSASETEALPSETRPLVEAEWEAGMTDFPKIFCETSQKLVSVEAFALAAKYYSVQNLGICTPFEQLLVALRGNQNQRIGENQKAVEFMNMKKSHEVQAMSELISSIADYYGIKQVIDLGSGKGYLSSFLSLKYGLKVYGIDSSNTNTHGAEERNRKLKKHWKLCHAQSRLDVNGLALKMAKERKVQNKVKNKADTEEVFNNSPTNQEKMPTSAILPDFSGSVISNIRNQMETLHSQPHQEENLCFENSFSLINLLPINAVEPTSSQQIPNRETSEANKERRKMTSKSSESNIYSPLTSFITADSELHDIIKDLEDCLMVGLHTCGDLAPNTLRIFTSNSEIKGVCSVGCCYHLLSEEFENQHKERTQEKWGFPMCHYLKEERWCCGRNARMSACLALERVAAGQGLPTESLFYRAVLQDIIKDCYGITKCDRHVGKIYSKCSSFLDYVRRSLKKLGLDESKLPEKIIMNYYEKYKPRMNELEAFNMLKVVLAPCIETLILLDRLCYLKEQEDIAWSALVKLFDPVKSPRCYAVIALKKQQ

SEQ ID NO: 51098 - protein, 239 aa, Homo sapiens
  Payload ID: 10200
  Gene Symbol: METTL25
  Gene Name: methyltransferase like 25
  ENSP ID: ENSP00000446878
MAASCPLPVTPDLPTLRAKLQGLLQFLRDALSISNAHTVDFYTESVWEELVDLPPETVLAALRKSASETEALPSETRPLVEAEWEAGMTDFPKIFCETSQKLVSVEAFALAAKYYSVQNLGICTPFEQLLVALRGNQNQRIGENQKAVEFMNMKKSHEVQAMSELISSIADYYGIKQVIDLGSGKGYLSSFLSLKYGLKVYGIDSSNTNTHGAEERNRKLKKHWKLCHAQSRLDVNGLA

SEQ ID NO: 51099 - protein, 143 aa, Homo sapiens
  Payload ID: 10200
  Gene Symbol: METTL25
  Gene Name: methyltransferase like 25
  ENSP ID: ENSP00000449730
DSELHDIIKDLEDCLMVGLHTCGDLAPNTLRIFTSNSEIKGVCSVGCCYHLLSEEFENQHKERTQEKWGFPMCHYLKEERWCCGRNARMSACLALERVAAGQGLPTESLFYRAVLQDIIKDCYGITKWYEDFILIRITMLYCK

SEQ ID NO: 51100 - protein, 189 aa, Homo sapiens
  Payload ID: 10200
  Gene Symbol: METTL25
  Gene Name: methyltransferase like 25
  ENSP ID: ENSP00000450317
  MOD_RES (1)..(1): Any amino acid
XGGSQQNQLLKMVCPEFLPSDVSRVSSFWWVHGPADFKNEAADLHGMTDFPKIFCETSQKLVSVEAFALAAKYYSVQNLGICTPFEQLLVALRGNQNQRIGENQKAVEFMNMKKSHEVQAMSELISSIADYYGIKQVIDLGSGKGYLSSFLSLKYGLKVYGIDSSNTNTHGAEERNRKLKKHWKLCHAQ

SEQ ID NO: 51101 - protein, 378 aa, Homo sapiens
  Payload ID: 10201
  Gene Symbol: METTL2A
  Gene Name: methyltransferase like 2A
  Uniprot ID: Q96IZ6
  ENSP ID: ENSP00000309610
MAGSYPEGAPAVLADKRQQFGSRFLRDPARVFHHNAWDNVEWSEEQAAAAERKVQENSIQRVCQEKQVDYEINAHKYWNDFYKIHENGFFKDRHWLFTEFPELAPSQNQNHLKDWFLENKSEVPECRNNEDGPGLIMEEQHKCSSKSLEHKTQTLPVEENVTQKISDLEICADEFPGSSATYRILEVGCGVGNTVFPILQTNNDPGLFVYCCDFSSTAIELVQTNSEYDPSRCFAFVHDLCDEEKSYPVPKGSLDIIILIFVLSAIVPDKMQKAINRLSRLLKPGGMMLLRDYGRYDMAQLRFKKGQCLSGNFYVRGDGTRVYFFTQEELDTLFTTAGLEKVQNLVDRRLQVNRGKQLTMYRVWIQCKYCKPLLSSTS

SEQ ID NO: 51102 - protein, 313 aa, Homo sapiens
  Payload ID: 10201
  Gene Symbol: METTL2A
  Gene Name: methyltransferase like 2A
  ENSP ID: ENSP00000479905
MPVDYEINAHKYWNDFYKIHENGFFKDRHWLFTEFPELAPSQNQNHLKDWFLENKSEVPECRNNEDGPGLIMEEQHKCSSKSLEHKTQTLPVEENVTQKISDLEICADEFPGSSATYRILEVGCGVGNTVFPILQTNNDPGLFVYCCDFSSTAIELVQTNSEYDPSRCFAFVHDLCDEEKSYPVPKGSLDIIILIFVLSAIVPDKMQKAINRLSRLLKPGGMMLLRDYGRYDMAQLRFKKGQCLSGNFYVRGDGTRVYFFTQEELDTLFTTAGLEKVQNLVDRRLQVNRGKQLTMYRVWIQCKYCKPLLSSTS

SEQ ID NO: 51103 - protein, 378 aa, Homo sapiens
  Payload ID: 10202
  Gene Symbol: METTL2B
  Gene Name: methyltransferase like 2B
  Uniprot ID: Q6P1Q9
  ENSP ID: ENSP00000262432
MAGSYPEGAPAILADKRQQFGSRFLSDPARVFHHNAWDNVEWSEEQAAAAERKVQENSIQRVCQEKQVDYEINAHKYWNDFYKIHENGFFKDRHWLFTEFPELAPSQNQNHLKDWFLENKSEVCECRNNEDGPGLIMEEQHKCSSKSLEHKTQTPPVEENVTQKISDLEICADEFPGSSATYRILEVGCGVGNTVFPILQTNNDPGLFVYCCDFSSTAIELVQTNSEYDPSRCFAFVHDLCDEEKSYPVPKGSLDIIILIFVLSAVVPDKMQKAINRLSRLLKPGGMVLLRDYGRYDMAQLRFKKGQCLSGNFYVRGDGTRVYFFTQEELDTLFTTAGLEKVQNLVDRRLQVNRGKQLTMYRVWIQCKYCKPLLSSTS

SEQ ID NO: 51104 - protein, 106 aa, Homo sapiens
  Payload ID: 10202
  Gene Symbol: METTL2B
  Gene Name: methyltransferase like 2B
  ENSP ID: ENSP00000405144
  MOD_RES (1)..(1): Any amino acid
XSATYRILEVGCGVGNTVFPILQTNNDPGLFVYCCDFSSTAIELVQFTLSHCTDVISVHILKVCGNPASSKPTSAVSPPPYAHLVSVCHALVILRIFQTFLLLCML

SEQ ID NO: 51105 - protein, 76 aa, Homo sapiens
  Payload ID: 10202
  Gene Symbol: METTL2B
  Gene Name: methyltransferase like 2B
  ENSP ID: ENSP00000417616
MAGSYPEGAPAILADKRQQFGSRFLSDPARVFHHNAWDNVEWSEEQAAAAERKVQENSIQRVCQEKQVKDTWTTGH

SEQ ID NO: 51106 - protein, 313 aa, Homo sapiens
  Payload ID: 10202
  Gene Symbol: METTL2B
  Gene Name: methyltransferase like 2B
  Uniprot ID: Q6P1Q9
  ENSP ID: ENSP00000418402
MPVDYEINAHKYWNDFYKIHENGFFKDRHWLFTEFPELAPSQNQNHLKDWFLENKSEVCECRNNEDGPGLIMEEQHKCSSKSLEHKTQTPPVEENVTQKISDLEICADEFPGSSATYRILEVGCGVGNTVFPILQTNNDPGLFVYCCDFSSTAIELVQTNSEYDPSRCFAFVHDLCDEEKSYPVPKGSLDIIILIFVLSAVVPDKMQKAINRLSRLLKPGGMVLLRDYGRYDMAQLRFKKGQCLSGNFYVRGDGTRVYFFTQEELDTLFTTAGLEKVQNLVDRRLQVNRGKQLTMYRVWIQCKYCKPLLSSTS

SEQ ID NO: 51107 - protein, 150 aa, Homo sapiens
  Payload ID: 10202
  Gene Symbol: METTL2B
  Gene Name: methyltransferase like 2B
  ENSP ID: ENSP00000418989
VHDLCDEEKSYPVPKGSLDIIILIFVLSAVVPDKMQKAINRLSRLLKPGGMVLLRDYGRYDMAQLRFKKGQCLSGNFYVRGDGTRVYFFTQEELDTLFTTAGLEKVQNLVDRRLQFRQARWLTPVIPALWEAEAGRSPEVRSSRPAWPTW

SEQ ID NO: 51108 - protein, 580 aa, Homo sapiens
  Payload ID: 10203
  Gene Symbol: METTL3
  Gene Name: methyltransferase like 3
  Uniprot ID: Q86U44
  ENSP ID: ENSP00000298717
MSDTWSSIQAHKKQLDSLRERLQRRRKQDSGHLDLRNPEAALSPTFRSDSPVPTAPTSGGPKPSTASAVPELATDPELEKKLLHHLSDLALTLPTDAVSICLAISTPDAPATQDGVESLLQKFAAQELIEVKRGLLQDDAHPTLVTYADHSKLSAMMGAVAEKKGPGEVAGTVTGQKRRAEQDSTTVAAFASSLVSGLNSSASEPAKEPAKKSRKHAASDVDLEIESLLNQQSTKEQQSKKVSQEILELLNTTTAKEQSIVEKFRSRGRAQVQEFCDYGTKEECMKASDADRPCRKLHFRRIINKHTDESLGDCSFLNTCFHMDTCKYVHYEIDACMDSEAPGSKDHTPSQELALTQSVGGDSSADRLFPPQWICCDIRYLDVSILGKFAVVMADPPWDIHMELPYGTLTDDEMRRLNIPVLQDDGFLFLWVTGRAMELGRECLNLWGYERVDEIIWVKTNQLQRIIRTGRTGHWLNHGKEHCLVGVKGNPQGFNQGLDCDVIVAEVRSTSHKPDEIYGMIERLSPGTRKIELFGRPHNVQPNWITLGNQLDGIHLLDPDVVARFKQRYPDGIISKPKNL

SEQ ID NO: 51109 - protein, 9 aa, Homo sapiens
  Payload ID: 10203
  Gene Symbol: METTL3
  Gene Name: methyltransferase like 3
  ENSP ID: ENSP00000366766
MMGAVAEKK

SEQ ID NO: 51110 - protein, 245 aa, Homo sapiens
  Payload ID: 10203
  Gene Symbol: METTL3
  Gene Name: methyltransferase like 3
  ENSP ID: ENSP00000437692
MSDTWSSIQAHKKQLDSLRERLQRRRKQDSGHLDLRNPEAALSPTFRSDSPVPTAPTSGGPKPSTASAVPELATDPELEKKLLHHLSDLALTLPTDAVSICLAISTPDAPATQDGVESLLQKFAAQELIEVKRGLLQDDAHPTLVTYADHSKLSAMMGAVAEKKGPGEVAGTVTGQKRRAEQDSTTVAAFASSLVSGLNSSASEPAKEPAKKSRKHAASDVDLEIESLLNQQSTKEQQSKKTNYQ

SEQ ID NO: 51111 - protein, 336 aa, Homo sapiens
  Payload ID: 10203
  Gene Symbol: METTL3
  Gene Name: methyltransferase like 3
  ENSP ID: ENSP00000440598
  MOD_RES (1)..(1): Any amino acid
XVPTAPTSGGPKPSTASAVPELATDPELEKKLLHHLSDLALTLPTDAVSICLAISTPDAPATQDGVESLLQKFAAQELIEVKRGLLQDDAHPTLVTYADHSKLSAMMGAVAEKKGPGEVAGTVTGQKRRAEQDSTTVAAFASSLVSGLNSSASEPAKEPAKKSRKHAASDVDLEIESLLNQQSTKEQQSKKVSQEILELLNTTTAKEQSIVEKFRSRGRAQVQEFCDYGTKEECMKASDADRPCRKLHFRRIINKHTDESLGDCSFLNTCFHMDTCKYVHYEIDACMDSEAPGSKDHTPSQELALTQSVGGDSSADRLFPPQGHGVGERMSKPLGV

SEQ ID NO: 51112 - protein, 153 aa, Homo sapiens
  Payload ID: 10203
  Gene Symbol: METTL3
  Gene Name: methyltransferase like 3
  ENSP ID: ENSP00000442407
MSDTWSSIQAHKKQLDSLRERLQRRRKQDSGHLDLRNPEAALSPTFRSDSPVPTAPTSGGPKPSTASAVPELATDPELEKKLLHHLSDLALTLPTDAVSICLAISTPDAPATQDGVESLLQKFAAQELIEHRNQQRSQPRNQGNMLPQMLIWR

SEQ ID NO: 51113 - protein, 258 aa, Homo sapiens
  Payload ID: 10203
  Gene Symbol: METTL3
  Gene Name: methyltransferase like 3
  ENSP ID: ENSP00000445523
MSDTWSSIQAHKKQLDSLRERLQRRRKQDSGHLDLRNPEAALSPTFRSDSPVPTAPTSGGPKPSTASAVPELATDPELEKKLLHHLSDLALTLPTDAVSICLAISTPDAPATQDGVESLLQKFAAQELIEVKRGLLQDDAHPTLVTYADHSKLSAMMGAVAEKKGPGEVAGTVTGQKRRAEQDSTTVAAFASSLVSGLNSSASEPAKEPAKKSRKHAASDVDLEIESLLNQQSTKEQQSKKVGPKCKNSVTMEPRRSA

SEQ ID NO: 51114 - protein, 419 aa, Homo sapiens
  Payload ID: 10204
  Gene Symbol: METTL4
  Gene Name: methyltransferase like 4
  ENSP ID: ENSP00000320349
MSVVHQLSAGWLLDHLSFINKINYQLHQHHEPCCRKKEFTTSVHFESLQMDSVSSSGVCAAFIASDSSTKPENDDGGNYEMFTRKFVFRPELFDVTKPYITPAVHKECQQSNEKEDLMNGVKKEISISIIGKKRKRCVVFNQGELDAMEYHTKIRELILDGSLQLIQEGLKSGFLYPLFEKQDKGSKPITLPLDACSLSELCEMAKHLPSLNEMEHQTLQLVEEDTSVTEQDLFLRVVENNSSFTKVITLMGQKYLLPPKSSFLLSDISCMQPLLNYRKTFDVIVIDPPWQNKSVKRSNRYSYLSPLQIQQIPIPKLAAPNCLLVTWVTNRQKHLRFIKEELYPSWSVEVVAEWHWVKITNSGEFVFPLDSPHKKPYEGLILGRVQEKTALPLRGFKRLHQARWGIFGVVCSKFTARLD

SEQ ID NO: 51115 - protein, 472 aa, Homo sapiens
  Payload ID: 10204
  Gene Symbol: METTL4
  Gene Name: methyltransferase like 4
  Uniprot ID: Q8N3J2
  ENSP ID: ENSP00000458290
MSVVHQLSAGWLLDHLSFINKINYQLHQHHEPCCRKKEFTTSVHFESLQMDSVSSSGVCAAFIASDSSTKPENDDGGNYEMFTRKFVFRPELFDVTKPYITPAVHKECQQSNEKEDLMNGVKKEISISIIGKKRKRCVVFNQGELDAMEYHTKIRELILDGSLQLIQEGLKSGFLYPLFEKQDKGSKPITLPLDACSLSELCEMAKHLPSLNEMEHQTLQLVEEDTSVTEQDLFLRVVENNSSFTKVITLMGQKYLLPPKSSFLLSDISCMQPLLNYRKTFDVIVIDPPWQNKSVKRSNRYSYLSPLQIQQIPIPKLAAPNCLLVTWVTNRQKHLRFIKEELYPSWSVEVVAEWHWVKITNSGEFVFPLDSPHKKPYEGLILGRVQEKTALPLRNADVNVLPIPDHKLIVSVPCTLHSHKPPLAEVLKDYIKPDGEYLELFARNLQPGWTSWGNEVLKFQHVDYFIAVESGS

SEQ ID NO: 51116 - protein, 90 aa, Homo sapiens
  Payload ID: 10204
  Gene Symbol: METTL4
  Gene Name: methyltransferase like 4
  ENSP ID: ENSP00000458415
MEYHTKIRELILDGSLQLIQEGLKSGFLYPLFEKQDKGSKPITLPLDACSLSELCEMAKHLPSLNEMEHQTLQLVEEDTSVTEQDLFLRV

SEQ ID NO: 51117 - protein, 92 aa, Homo sapiens
  Payload ID: 10204
  Gene Symbol: METTL4
  Gene Name: methyltransferase like 4
  ENSP ID: ENSP00000460774
  MOD_RES (1)..(1): Any amino acid
XCMQPLLNYRKTFDVIVIDPPWQNKSVKRSNRYSYLSPLQIQQIPIPKLAAPNCLLVTWVTNRQKHLRFIKEELYPSWSVEVVAEWHWVKRF

SEQ ID NO: 51118 - protein, 21 aa, Homo sapiens
  Payload ID: 10204
  Gene Symbol: METTL4
  Gene Name: methyltransferase like 4
  ENSP ID: ENSP00000461097
MDSVSSSGVCAAFIASDSSTK

SEQ ID NO: 51119 - protein, 142 aa, Homo sapiens
  Payload ID: 10204
  Gene Symbol: METTL4
  Gene Name: methyltransferase like 4
  ENSP ID: ENSP00000477089
  MOD_RES (1)..(1): Any amino acid
XLSAGWLLDHLSFINKINYQLHQHHEPCCRKKEFTTSVHFESLQMDSVSSSGVCAAFIASDSSTKPENDDGGNYEMFTRKFVFRPELFDVTKPYITPAVHKECQQSNEKEDLMNGVKKEISISIIGKVESFKKYLFFSRKHN

SEQ ID NO: 51120 - protein, 209 aa, Homo sapiens
  Payload ID: 10205
  Gene Symbol: METTL5
  Gene Name: methyltransferase like 5
  Uniprot ID: Q9NRN9
  ENSP ID: ENSP00000260953
MKKVRLKELESRLQQVDGFEKPKLLLEQYPTRPHIAACMLYTIHNTYDDIENKVVADLGCGCGVLSIGTAMLGAGLCVGFDIDEDALEIFNRNAEEFELTNIDMVQCDVCLLSNRMSKSFDTVIMNPPFGTKNNKGTDMAFLKTALEMARTAVYSLHKSSTREHVQKKAAEWKIKIDIIAELRYDLPASYKFHKKKSVDIEVDLIRFSF

SEQ ID NO: 51121 - protein, 164 aa, Homo sapiens
  Payload ID: 10205
  Gene Symbol: METTL5
  Gene Name: methyltransferase like 5
  ENSP ID: ENSP00000307903
MKKVRLKELESRLQQVDGFEKPKLLLEQYPTRPHIAACMLYTIHNTYDDIENKVVADLGCGCGVLSIGTAMLGAGLCVGFDIDEDALEIFNRNAEEFELTNIDMVQCDVCLLSNRMSKSFDTVIMNPPFGTKNNKELRYDLPASYKFHKKKSVDIEVDLIRFSF

SEQ ID NO: 51122 - protein, 209 aa, Homo sapiens; identical to SEQ ID NO: 51120
  Payload ID: 10205
  Gene Symbol: METTL5
  Gene Name: methyltransferase like 5
  Uniprot ID: Q9NRN9
  ENSP ID: ENSP00000376415

SEQ ID NO: 51123 - protein, 209 aa, Homo sapiens; identical to SEQ ID NO: 51120
  Payload ID: 10205
  Gene Symbol: METTL5
  Gene Name: methyltransferase like 5
  Uniprot ID: Q9NRN9
  ENSP ID: ENSP00000386582

SEQ ID NO: 51124 - protein, 198 aa, Homo sapiens
  Payload ID: 10205
  Gene Symbol: METTL5
  Gene Name: methyltransferase like 5
  ENSP ID: ENSP00000386703
MKKVRLKELESRLQQVDGFEKPKLLLEQYPTRPHIAACMLYTIHNTYDDIENKVVADLGCGCGVLSIGTAMLGAGLCVGFDIDEDALEIFNRNAEEFELTNIDMVQCDVCLLSNRMSKSFDTVIMNPPFGTKNNKGTDMAFLKTALEMARTAVYSLHKSSTREHVQKKAAEWKIKIDIIAELRYDLPASYKFHKKKSV

SEQ ID NO: 51125 - protein, 244 aa, Homo sapiens
  Payload ID: 10205
  Gene Symbol: METTL5
  Gene Name: methyltransferase like 5
  ENSP ID: ENSP00000387056
MKKVRLKELESRLQQVDGFEKPKLLLEQYPTRPHIAACMLYTIHNTYDDIENKVVADLGCGCGVLSIGTAMLGAGLCVGFDIDEDALEIFNRNAEEFELTNIDMVQCDVCLLSNRMSKSFDTVIMNPPFGTKNNKGTDMAFLKTALEMARTAVYSLHKSSTREHVQKKAAEWKIKIDIIAELRYDLPASYKFHKKKSVSLLILAGLHSVLKSFLGRMWWFMPVIPATREAEARESLELRRQRLQ

SEQ ID NO: 51126 - protein, 110 aa, Homo sapiens
  Payload ID: 10205
  Gene Symbol: METTL5
  Gene Name: methyltransferase like 5
  ENSP ID: ENSP00000387106
MKKVRLKELESRLQQVDGFEKPKLLLEQYPTRPHIAGTDMAFLKTALEMARTAVYSLHKSSTREHVQKKAAEWKIKIDIIAELRYDLPASYKFHKKKSVDIEVDLIRFSF

SEQ ID NO: 51127 - protein, 126 aa, Homo sapiens
  Payload ID: 10205
  Gene Symbol: METTL5
  Gene Name: methyltransferase like 5
  ENSP ID: ENSP00000395792
  MOD_RES (1)..(1): Any amino acid
XNRNAEEFELTNIDMVQCDVCLLSNRMSKSFDTVIMNPPFGTKNNKGTDMAFLKTALEMARTAVYSLHKSSTREHVQKKAAEWKIKIDIIAGGFCFTELRYDLPASYKFHKKKSVDIEVDLIRFSF

SEQ ID NO: 51128 - protein, 87 aa, Homo sapiens
  Payload ID: 10205
  Gene Symbol: METTL5
  Gene Name: methyltransferase like 5
  ENSP ID: ENSP00000440589
QQVDGFEKPKLLLEQYPTRPHIAACMLYTIHNTYDDIENKVVADLGCGCGVLSIGTAMLGAGDRYGFSKDCFGNGKNSSIFLTQILN

SEQ ID NO: 51129 - protein, 48 aa, Homo sapiens
  Payload ID: 10205
  Gene Symbol: METTL5
  Gene Name: methyltransferase like 5
  ENSP ID: ENSP00000444989
MKKVRLKELESRLQQVDGFEKPKLLLEQYPTRPHIAELRYDLPASYKF

SEQ ID NO: 51130 - protein, 132 aa, Homo sapiens
  Payload ID: 10205
  Gene Symbol: METTL5
  Gene Name: methyltransferase like 5
  ENSP ID: ENSP00000479765
MKKVRLKELESRLQQVDGFEKPKLLLEQYPTRPHIAACMLYTIHNTYDDIENKVVADLGCGCGVLSIGTAMLGAGLCVGFDIDEDALEIFNRNAEEFELQILTWFNVMCAYYLTECPSHSIQNYESSLWDQK

SEQ ID NO: 51131 - protein, 240 aa, Homo sapiens
  Payload ID: 10206
  Gene Symbol: METTL6
  Gene Name: methyltransferase like 6
  Uniprot ID: Q8TCB7
  ENSP ID: ENSP00000373299
MASLQRKGLQARILTSEEEEKLKRDQTLVSDFKQQKLEQEAQKNWDLFYKRNSTNFFKDRHWTTREFEELRSCREFEDQKLTMLEAGCGVGNCLFPLLEEDPNIFAYACDFSPRAIEYVKQNPLYDTERCKVFQCDLTKDDLLDHVPPESVDVVMLIFVLSAVHPDKMHLVLQNIYKCHGCSSELRQPWDKDDFAVTWDPWSPAIRVLLCHSGWSAVAWTWLTAASTSWAQAVLPPQPLK

SEQ ID NO: 51132 - protein, 284 aa, Homo sapiens
  Payload ID: 10206
  Gene Symbol: METTL6
  Gene Name: methyltransferase like 6
  Uniprot ID: Q8TCB7
  ENSP ID: ENSP00000373300
MASLQRKGLQARILTSEEEEKLKRDQTLVSDFKQQKLEQEAQKNWDLFYKRNSTNFFKDRHWTTREFEELRSCREFEDQKLTMLEAGCGVGNCLFPLLEEDPNIFAYACDFSPRAIEYVKQNPLYDTERCKVFQCDLTKDDLLDHVPPESVDVVMLIFVLSAVHPDKMHLVLQNIYKVLKPGKSVLFRDYGLYDHAMLRFKASSKLGENFYVRQDGTRSYFFTDDFLAQLFMDTGYEEVVNEYVFRETVNKKEGLCVPRVFLQSKFLKPPKNPSPVVLGLDPKS

SEQ ID NO: 51133 - protein, 105 aa, Homo sapiens
  Payload ID: 10206
  Gene Symbol: METTL6
  Gene Name: methyltransferase like 6
  ENSP ID: ENSP00000400885
  MOD_RES (1)..(1): Any amino acid
XFQCDLTKDDLLDHVPPESVDVVMLIFVLSAVHPDKMHLVLQNIYKVLKPGKSVLFRDYGLYDHAMLRFKASSKLGENFYVRQDGTRSYFFTDGLKQKSGTWDSL

SEQ ID NO: 51134 - protein, 284 aa, Homo sapiens; identical to SEQ ID NO: 51132
  Payload ID: 10206
  Gene Symbol: METTL6
  Gene Name: methyltransferase like 6
  Uniprot ID: Q8TCB7
  ENSP ID: ENSP00000407613

SEQ ID NO: 51135 - protein, 239 aa, Homo sapiens
  Payload ID: 10206
  Gene Symbol: METTL6
  Gene Name: methyltransferase like 6
  ENSP ID: ENSP00000410726
MASLQRKGLQARILTSEEEEKLKRDQTLVSDFKQQKLEQEAQKNWDLFYKRNSTNFFKDRHWTTREFEELRSCREQNPLYDTERCKVFQCDLTKDDLLDHVPPESVDVVMLIFVLSAVHPDKMHLVLQNIYKVLKPGKSVLFRDYGLYDHAMLRFKASSKLGENFYVRQDGTRSYFFTDDFLAQLFMDTGYEEVVNEYVFRETVNKKEGLCVPRVFLQSKFLKPPKNPSPVVLGLDPKS

SEQ ID NO: 51136 - protein, 158 aa, Homo sapiens
  Payload ID: 10206
  Gene Symbol: METTL6
  Gene Name: methyltransferase like 6
  ENSP ID: ENSP00000412006
LFPLLEEDPNIFAYACDFSPRAIEYVKQNPLYDTERCKVFQCDLTKDDLLDHVPPESVDVVMLIFVLSAVHPDKMHLVLQNIYKCHGCSSELRQPWDKDDFAVTWDPWSPAIRLLGEGLRHVHETLKQALYCTIFTQHLEGTDLAPALEELTSLLWCQ

SEQ ID NO: 51137 - protein, 137 aa, Homo sapiens
  Payload ID: 10206
  Gene Symbol: METTL6
  Gene Name: methyltransferase like 6
  ENSP ID: ENSP00000471485
MASLQRKGLQARILTSEEEEKLKRDQTLVSDFKQQKLEQEAQKNWDLFYKRNSTNFFKDRHWTTREFEELRSCREQNPLYDTERCKVFQCDLTKDDLLDHVPPESVDVVMLIFVLSAVHPDKMHLVLQNIYKCHGCS

SEQ ID NO: 51138 - protein, 244 aa, Homo sapiens
  Payload ID: 10207
  Gene Symbol: METTL7A
  Gene Name: methyltransferase like 7A
  Uniprot ID: Q9H8H3
  ENSP ID: ENSP00000331787
MELTIFILRLAIYILTFPLYLLNFLGLWSWICKKWFPYFLVRFTVIYNEQMASKKRELFSNLQEFAGPSGKLSLLEVGCGTGANFKFYPPGCRVTCIDPNPNFEKFLIKSIAENRHLQFERFVVAAGENMHQVADGSVDVVVCTLVLCSVKNQERILREVCRVLRPGGAFYFMEHVAAECSTWNYFWQQVLDPAWHLLFDGCNLTRESWKALERASFSKLKLQHIQAPLSWELVRPHIYGYAVK

SEQ ID NO: 51139 - protein, 244 aa, Homo sapiens; identical to SEQ ID NO: 51138
  Payload ID: 10207
  Gene Symbol: METTL7A
  Gene Name: methyltransferase like 7A
  Uniprot ID: Q9H8H3
  ENSP ID: ENSP00000447542

SEQ ID NO: 51140 - protein, 244 aa, Homo sapiens
  Payload ID: 10207
  Gene Symbol: METTL7A
  Gene Name: methyltransferase like 7A
  ENSP ID: ENSP00000448286
  MOD_RES (1)..(1): Any amino acid
XELTIFILRLAIYILTFPLYLLNFLGLWSWICKKWFPYFLVRFTVIYNEQMASKKRELFSNLQEFAGPSGKLSLLEVGCGTGANFKFYPPGCRVTCIDPNPNFEKFLIKSIAENRHLQFERFVVAAGENMHQVADGSVDVVVCTLVLCSVKNQERILREVCRVLRPGGAFYFMEHVAAECSTWNYFWQQVLDPAWHLLFDGCNLTRESWKALERASFSKLKLQHIQAPLSWELVRPHIYGYAVK

SEQ ID NO: 51141 - protein, 244 aa, Homo sapiens; identical to SEQ ID NO: 51138
  Payload ID: 10207
  Gene Symbol: METTL7A
  Gene Name: methyltransferase like 7A
  Uniprot ID: Q9H8H3
  ENSP ID: ENSP00000448785

SEQ ID NO: 51142 - protein, 180 aa, Homo sapiens
  Payload ID: 10207
  Gene Symbol: METTL7A
  Gene Name: methyltransferase like 7A
  ENSP ID: ENSP00000450239
MELTIFILRLAIYILTFPLYLLNFLGLWSWICKKWFPYFLVRFTVIYNEQMASKKRELFSNLQEFAGPSGKLSLLEVGCGTGANFKFYPPGCRVTCIDPNPNFEKFLIKSIAENRHLQFERFVVAAGENMHQVADGSVDVVVCTLVLCSVKNQERILREVCRVLRPGGAFYFMEHVAAEC

SEQ ID NO: 51143 - protein, 244 aa, Homo sapiens
  Payload ID: 10208
  Gene Symbol: METTL7B
  Gene Name: methyltransferase like 7B
  Uniprot ID: Q6UX53
  ENSP ID: ENSP00000377796
MDILVPLLQLLVLLLTLPLHLMALLGCWQPLCKSYFPYLMAVLTPKSNRKMESKKRELFSQIKGLTGASGKVALLELGCGTGANFQFYPPGCRVTCLDPNPHFEKFLTKSMAENRHLQYERFVVAPGEDMRQLADGSMDVVVCTLVLCSVQSPRKVLQEVRRVLRPGGVLFFWEHVAEPYGSWAFMWQQVFEPTWKHIGDGCCLTRETWKDLENAQFSEIQMERQPPPLKWLPVGPHIMGKAVK

SEQ ID NO: 51144 - protein, 276 aa, Homo sapiens
  Payload ID: 10208
  Gene Symbol: METTL7B
  Gene Name: methyltransferase like 7B
  ENSP ID: ENSP00000482867
MDILVPLLQLLVLLLTLPLHLMALLGCWQPLCKSYFPYLMAVLTPKSNRKMESKKRELFSQIKGLTGASGKVALLELGCGTGANFQFYPPGCRVTCLDPNPHFEKFLTKSMAENRHLQYERFVVAPGEDMRQLADGSMDVVVCTLVLCSVQSPRKVLQEVRRVLRPGGVLFFWEHVAEPYGSWAFMWQQVFEPTWKHIGDGCCLTRETWKDLENAQFSEIQMERQPPPLKWLPVGPHIMGKAVKSFPSSKALICSFPSLQLEQATHQPIYLPLRGT

SEQ ID NO: 51145 - protein, 379 aa, Homo sapiens
  Payload ID: 10209
  Gene Symbol: METTL8
  Gene Name: methyltransferase like 8
  ENSP ID: ENSP00000364407
MNMIWRNSISCLRLGKVPHRYQSGYHPVAPLGSRILTDPAKVFEHNMWDHMQWSKEEEAAARKKVKENSAVRVLLEEQVKYEREASKYWDTFYKIHKNKFFKDRNWLLREFPEILPVDQKPEEKARESSWDHVKTSATNRFSRMHCPTVPDEKNHYEKSSGSSEGQSKTESDFSNLDSEKHKKGPMETGLFPGSNATFRILEVGCGAGNSVFPILNTLENSPESFLYCCDFASGAVELVKSHSSYRATQCFAFVHDVCDDGLPYPFPDGILDVILLVFVLSSIHPDRMQGVVNRLSKLLKPGGMLLFRDYGRYDKTQLRFKKGHCLSENFYVRGDGTRAYFFTKGEVHSMFCKASLDEKQNLVDRRLQVNRKKQVKMHR

SEQ ID NO: 51146 - protein, 226 aa, Homo sapiens
  Payload ID: 10209
  Gene Symbol: METTL8
  Gene Name: methyltransferase like 8
  ENSP ID: ENSP00000376377
MNMIWRNSISCLRLGKVPHRYQSGYHPVAPLGSRILTDPAKVFEHNMWDHMQWSKEEEAAARKKVKENSAVRVLLEEQVKYEREASKYWDTFYKIHKNKFFKDRNWLLREFPEILPVDQKPEEKARESSWDHVKTSATNRFSRMHCPTVPDEKNHYEKSSGSSEGQSKTESDFSNLDSEKHKKGPMETGLFPGSNATFRILESHSSYRATQCFAFVHDVCDDGLPY

SEQ ID NO: 51147 - protein, 291 aa, Homo sapiens
  Payload ID: 10209
  Gene Symbol: METTL8
  Gene Name: methyltransferase like 8
  Uniprot ID: Q9H825
  ENSP ID: ENSP00000376382
MNMIWRNSISCLRLGKVPHRYQSGYHPVAPLGSRILTDPAKVFEHNMWDHMQWSKEEEAAARKKVKENSAVRVLLEEQVKYEREASKYWDTFYKIHKNKFFKDRNWLLREFPEILPVDQKPEEKARESSWDHVKTSATNRFSRMHCPTVPDEKNHYEKSSGSSEGQSKTESDFSNLDSEKHKKGPMETGLFPGSNATFRILEVGCGAGNSVFPILNTLENSPESFLYCCDFASGAVELVKSHSSYRATQCFAFVHDVCDDGLPYPFPDGILDVILLVFVLSSIHPDRTLFI

SEQ ID NO: 51148 - protein, 153 aa, Homo sapiens
  Payload ID: 10209
  Gene Symbol: METTL8
  Gene Name: methyltransferase like 8
  ENSP ID: ENSP00000404646
MNMIWRNSISCLRLGKVPHRYQSGYHPVAPLGSRILTDPAKVFEHNMWDHMQWSKEEEAAARKKVKENSAVRVLLEEQVKYEREASKYWDTFYKIHKNKFFKDRNWLLREFPEILPVDQKPEEKARESSWDHVKTSATNRFSRMHCPTVPDEK

SEQ ID NO: 51149 - protein, 215 aa, Homo sapiens
  Payload ID: 10209
  Gene Symbol: METTL8
  Gene Name: methyltransferase like 8
  ENSP ID: ENSP00000407180
  MOD_RES (1)..(1): Any amino acid
XEKHKKGPMETGLFPGSNATFRILEVGCGAGNSVFPILNTLENSPESFLYCCDFASGAVELVKVCYSWESYQLMPKSHSSYRATQCFAFVHDVCDDGLPYPFPDGILDVILLVFVLSSIHPDRMQGVVNRLSKLLKPGGMLLFRDYGRYDKTQLRFKKGHCLSENFYVRGDGTRAYFFTKGEVHSMFCKASLDEKQNLVDRRLQVNRKKQVKMHR

SEQ ID NO: 51150 - protein, 241 aa, Homo sapiens
  Payload ID: 10209
  Gene Symbol: METTL8
  Gene Name: methyltransferase like 8
  Uniprot ID: Q9H825
  ENSP ID: ENSP00000409025
MQWSKEEEAAARKKVKENSAVRVLLEEQVKYEREASKYWDTFYKIHKNKFFKDRNWLLREFPEILPVDQKPEEKARESSWDHVKTSATNRFSRMHCPTVPDEKNHYEKSSGSSEGQSKTESDFSNLDSEKHKKGPMETGLFPGSNATFRILEVGCGAGNSVFPILNTLENSPESFLYCCDFASGAVELVKSHSSYRATQCFAFVHDVCDDGLPYPFPDGILDVILLVFVLSSIHPDRTLFI

SEQ ID NO: 51151 - protein, 105 aa, Homo sapiens
  Payload ID: 10209
  Gene Symbol: METTL8
  Gene Name: methyltransferase like 8
  ENSP ID: ENSP00000411589
MNMIWRNSISCLRLGKVPHRYQSGYHPVAPLGSRILTDPAKVFEHNMWDHMQWSKEEEAAARKKVKENSAVRVLLEEQVKYEREASKYWDTFYKIHKNKFFKDRN

SEQ ID NO: 51152 - protein, 83 aa, Homo sapiens
  Payload ID: 10209
  Gene Symbol: METTL8
  Gene Name: methyltransferase like 8
  ENSP ID: ENSP00000411942
MNMIWRNSISCLRLGKVPHRYQSGYHPVAPLGSRILTDPAKVFEHNMWDHMQWSKEEEAAARKKVKENSAVRVLLEEQVKYER

SEQ ID NO: 51153 - protein, 407 aa, Homo sapiens
  Payload ID: 10209
  Gene Symbol: METTL8
  Gene Name: methyltransferase like 8
  ENSP ID: ENSP00000480056
MNMIWRNSISCLRLGKVPHRYQSGYHPVAPLGSRILTDPAKVFEHNMWDHMQWSKEEEAAARKKVKENSAVRVLLEEQVKYEREASKYWDTFYKIHKNKFFKDRNWLLREFPEILPVDQKPEEKARESSWDHVKTSATNRFSRMHCPTVPDEKNHYEKSSGSSEGQSKTESDFSNLDSEKHKKGPMETGLFPGSNATFRILEVGCGAGNSVFPILNTLENSPESFLYCCDFASGAVELVKSHSSYRATQCFAFVHDVCDDGLPYPFPDGILDVILLVFVLSSIHPDRMQGVVNRLSKLLKPGGMLLFRDYGRYDKTQLRFKKGHCLSENFYVRGDGTRAYFFTKGEVHSMFCKASLDEKQNLVDRRLQVNRKKQVKMHRVWIQGKFQKPLHQTQNSSNMVSTLLSQD

SEQ ID NO: 51154 - protein, 318 aa, Homo sapiens
  Payload ID: 10210
  Gene Symbol: METTL9
  Gene Name: methyltransferase like 9
  Uniprot ID: Q9H1A3
  ENSP ID: ENSP00000350874
MRLLAGWLCLSLASVWLARRMWTLRSPLTRSLYVNMTSGPGGPAAAAGGRKENHQWYVCNREKLCESLQAVFVQSYLDQGTQIFLNNSIEKSGWLFIQLYHSFVSSVFSLFMSRTSINGLLGRGSMFVFSPDQFQRLLKINPDWKTHRLLDLGAGDGEVTKIMSPHFEEIYATELSETMIWQLQKKKYRVLGINEWQNTGFQYDVISCLNLLDRCDQPLTLLKDIRSVLEPTRGRVILALVLPFHPYVENVGGKWEKPSEILEIKGQNWEEQVNSLPEVFRKAGFVIEAFTRLPYLCEGDMYNDYYVLDDAVFVLKPV

SEQ ID NO: 51155 - protein, 317 aa, Homo sapiens
  Payload ID: 10210
  Gene Symbol: METTL9
  Gene Name: methyltransferase like 9
  Uniprot ID: Q9H1A3
  ENSP ID: ENSP00000379335
MRLLAGWLCLSLASVWLARRMWTLRSPLTRSLYVNMTSGPGGPAAAAGGRKENHQWYVCNREKLCESLQAVFVQSYLDQGTQIFLNNSIEKSGWLFIQLYHSFVSSVFSLFMSRTSINGLLGRGSMFVFSPDQFQRLLKINPDWKTHRLLDLGAGDGEVTKIMSPHFEEIYATELSETMIWQLQKKKYRVLGINEWQNTGFQYDVISCLNLLDRCDQPLTLLKDIRSVLEPTRGRVILALVLPFHPYVENGGKWEKPSEILEIKGQNWEEQVNSLPEVFRKAGFVIEAFTRLPYLCEGDMYNDYYVLDDAVFVLKPV

SEQ ID NO: 51156 - protein, 139 aa, Homo sapiens
  Payload ID: 10210
  Gene Symbol: METTL9
  Gene Name: methyltransferase like 9
  ENSP ID: ENSP00000454239
MSRTSINGLLGRGSMFVFSPDQFQRLLKINPDWKTHRLLDLGAGDGEVTKIMSPHFEEIYATELSETMIWQLQKKKYRVLGINEWQNTGFQYDVISCLNLLDRCDQPLTLLKDIRSVLEPTRGRVILALVLPFHPYVEN

SEQ ID NO: 51157 - protein, 243 aa, Homo sapiens
  Payload ID: 10210
  Gene Symbol: METTL9
  Gene Name: methyltransferase like 9
  ENSP ID: ENSP00000454733
MDRKTTSWDTKFYEKWYVCNREKLCESLQAVFVQSYLDQGTQIFLNNSIEKSGWLFIQLYHSFVSSVFSLFMSRTSINGLLGRGSMFVFSPDQFQRLLKINPDWKTHRLLDLGAGDGEVTKIMSPHFEEIYATELSETMIWQLQKKKYRVLGINEWQNTGFQYDVISCLNLLDRCDQPLTLLKDIRSVLEPTRGRVILALVLPFHPYVENVGGKWEKPSEILEIKGQNWEEQVNSLPEVFRKA

SEQ ID NO: 51158 - protein, 125 aa, Homo sapiens
  Payload ID: 10210
  Gene Symbol: METTL9
  Gene Name: methyltransferase like 9
  ENSP ID: ENSP00000455285
  MOD_RES (1)..(1): Any amino acid
XSYLDQGTQIFLNNSIEKSGWLFIQLYHSFVSSVFSLFMSRTSINGVLGINEWQNTGFQYDVISCLNLLDRCDQPLTLLKDIRSVLEPTRGRVILALVLPFHPYVENVGGKWEKPSEILEIKGQN

SEQ ID NO: 51159 - protein, 128 aa, Homo sapiens
  Payload ID: 10210
  Gene Symbol: METTL9
  Gene Name: methyltransferase like 9
  ENSP ID: ENSP00000455720
  MOD_RES (1)..(1): Any amino acid
XPDQFQRLLKINPDWKTHRLLDLGAGDGEVTKIMSPHFEEIYATELSETMIWQLQKKKYRVLGINEWQNTGFQYDVISCLNLLDRCDQPLTLLKDIRSVLEPTRGRVILALVLPFHPYVENGKCGQSG

SEQ ID NO: 51160 - protein, 61 aa, Homo sapiens
  Payload ID: 10210
  Gene Symbol: METTL9
  Gene Name: methyltransferase like 9
  ENSP ID: ENSP00000456345
MRLLAGWLCLSLASVWLARRMWTLRSPLTRSLGMCATERNYANHSRLSLFRVTLIKEHRSS

SEQ ID NO: 51161 - protein, 74 aa, Homo sapiens
  Payload ID: 10210
  Gene Symbol: METTL9
  Gene Name: methyltransferase like 9
  ENSP ID: ENSP00000457311
MRLLAGWLCLSLASVWLARRMWTLRSPLTRSLYVNMTSGPGGPAAAAGGRKENHQVARKRLNVCVFTRSVSETA

SEQ ID NO: 51162 - protein, 282 aa, Homo sapiens
  Payload ID: 10210
  Gene Symbol: METTL9
  Gene Name: methyltransferase like 9
  ENSP ID: ENSP00000480710
MWTLRSPLTRSLYVKENHQWYVCNREKLCESLQAVFVQSYLDQGTQIFLNNSIEKSGWLFIQLYHSFVSSVFSLFMSRTSINGLLGRGSMFVFSPDQFQRLLKINPDWKTHRLLDLGAGDGEVTKIMSPHFEEIYATELSETMIWQLQKKKYRVLGINEWQNTGFQYDVISCLNLLDRCDQPLTLLKDIRSVLEPTRGRVILALVLPFHPYVENVGGKWEKPSEILEIKGQNWEEQVNSLPEVFRKAGFVIEAFTRLPYLCEGDMYNDYYVLDDAVFVLKPV

SEQ ID NO: 51163 - protein, 400 aa, Homo sapiens
  Payload ID: 10211
  Gene Symbol: MVD
  Gene Name: mevalonate (diphospho) decarboxylase
  Uniprot ID: P53602
  ENSP ID: ENSP00000301012
MASEKPLAAVTCTAPVNIAVIKYWGKRDEELVLPINSSLSVTLHQDQLKTTTTAVISKDFTEDRIWLNGREEDVGQPRLQACLREIRCLARKRRNSRDGDPLPSSLSCKVHVASVNNFPTAAGLASSAAGYACLAYTLARVYGVESDLSEVARRGSGSACRSLYGGFVEWQMGEQADGKDSIARQVAPESHWPELRVLILVVSAEKKLTGSTVGMRASVETSPLLRFRAESVVPARMAEMARCIRERDFPSFAQLTMKDSNQFHATCLDTFPPISYLNAISWRIIHLVHRFNAHHGDTKVAYTFDAGPNAVIFTLDDTVAEFVAAVWHGFPPGSNGDTFLKGLQVRPAPLSAELQAALAMEPTPGGVKYIIVTQVGPGPQILDDPCAHLLGPDGLPKPAA

SEQ ID NO: 51164 - protein, 271 aa, Homo sapiens
  Payload ID: 10211
  Gene Symbol: MVD
  Gene Name: mevalonate (diphospho) decarboxylase
  ENSP ID: ENSP00000455131
MASEKPLAAVTCTAPVNIAVIKYWGKRDEELVLPINSSLSVTLHQDQLKTTTTAVISKDFTEDRIWLNGREEDVGQPRLQACLREIRCLARKRRNSRDGDPLPSSLSCKVHVASVNNFPTAAGLASSAAGYACLVAAGVGLSPVIPVLKRLMGEKHCRPGVQDQPGQHTYTLARVYGVESDLSEVARRGSGSACRSLYGGFVEWQMGEQADGKDSIARQVAPESHWPELRVLILVVSAEKKLTGSTVGMRASVETSPLLRFRAESVVPARM

SEQ ID NO: 51165 - protein, 91 aa, Homo sapiens
  Payload ID: 10211
  Gene Symbol: MVD
  Gene Name: mevalonate (diphospho) decarboxylase
  ENSP ID: ENSP00000455602
MASEKPLAAVTCTAPVNIAVIKYWGKRDEELVLPINSSLSVTLHQDQLKTTTTAVISKDFTEDRIWLNGREEDVGQPRLQACLRESELGSP

SEQ ID NO: 51166 - protein, 41 aa, Homo sapiens
  Payload ID: 10211
  Gene Symbol: MVD
  Gene Name: mevalonate (diphospho) decarboxylase
  ENSP ID: ENSP00000456465
MASEKPLAAVTCTAPVNIAVIKYLEMGFHRVSQAGLKLLTS

SEQ ID NO: 51167 - protein, 51 aa, Homo sapiens
  Payload ID: 10211
  Gene Symbol: MVD
  Gene Name: mevalonate (diphospho) decarboxylase
  ENSP ID: ENSP00000458049
MASEKPLAAVTCTAPVNIAVIKYWSPGACPLAITELSKSSIIDSHESGQAR

SEQ ID NO: 51168 - protein, 138 aa, Homo sapiens
  Payload ID: 10211
  Gene Symbol: MVD
  Gene Name: mevalonate (diphospho) decarboxylase
  ENSP ID: ENSP00000479264
MGEQADGKDSIARQVAPESHWPELRVLILVVSAEKKLTGSTVGMRASVETSPLLRFRAESVVPAHGGDGPLHPGARLPQLRPADHEGQQPVPRHLPRHLPPSLTSMPSPGASSTWCTASTPTTGTPRWRTPLTRAPMP

SEQ ID NO: 51169 - protein, 396 aa, Homo sapiens
  Payload ID: 10212
  Gene Symbol: MVK
  Gene Name: mevalonate kinase
  Uniprot ID: Q03426
  ENSP ID: ENSP00000228510
MLSEVLLVSAPGKVILHGEHAVVHGKVALAVSLNLRTFLRLQPHSNGKVDLSLPNIGIKRAWDVARLQSLDTSFLEQGDVTTPTSEQVEKLKEVAGLPDDCAVTERLAVLAFLYLYLSICRKQRALPSLDIVVWSELPPGAGLGSSAAYSVCLAAALLTVCEEIPNPLKDGDCVNRWTKEDLELINKWAFQGERMIHGNPSGVDNAVSTWGGALRYHQGKISSLKRSPALQILLTNTKVPRNTRALVAGVRNRLLKFPEIVAPLLTSIDAISLECERVLGEMGEAPAPEQYLVLEELIDMNQHHLNALGVGHASLDQLCQVTRARGLHSKLTGAGGGGCGITLLKPGLEQPEVEATKQALTSCGFDCLETSIGAPGVSIHSATSLDSRVQQALDGL

SEQ ID NO: 51170 - protein, 344 aa, Homo sapiens
  Payload ID: 10212
  Gene Symbol: MVK
  Gene Name: mevalonate kinase
  ENSP ID: ENSP00000376487
MLSEVLLVSAPGKVILHGEHAVVHGKVALAVSLNLRTFLRLQPHSNGKVDLSLPNIGIKRAWDVARLQSLDTSFLEQGDVTTPTSEQVEKLKEVAGLPDDCAVTERLAVLAFLYLYLSICRKQRWTKEDLELINKWAFQGERMIHGNPSGVDNAVSTWGGALRYHQGKISSLKRSPALQILLTNTKVPRNTRALVAGVRNRLLKFPEIVAPLLTSIDAISLECERVLGEMGEAPAPEQYLVLEELIDMNQHHLNALGVGHASLDQLCQVTRARGLHSKLTGAGGGGCGITLLKPGLEQPEVEATKQALTSCGFDCLETSIGAPGVSIHSATSLDSRVQQALDGL

SEQ ID NO: 51171 - protein, 83 aa, Homo sapiens
  Payload ID: 10212
  Gene Symbol: MVK
  Gene Name: mevalonate kinase
  ENSP ID: ENSP00000415555
MLSEVLLVSAPGKVILHGEHAVVHGKVALAVSLNLRTFLRLQPHSNGKVDLSLPNIGIKRAWDVARLQSLDTSFLGGPRRIWS

SEQ ID NO: 51172 - protein, 200 aa, Homo sapiens
  Payload ID: 10212
  Gene Symbol: MVK
  Gene Name: mevalonate kinase
  ENSP ID: ENSP00000438153
MLSEVLLVSAPGKVILHGEHAVVHGKVALAVSLNLRTFLRLQPHSNGKVDLSLPNIGIKRAWDVARLQSLDTSFLEQGDVTTPTSEQVEKLKEVAGLPDDCAVTERLAVLAFLYLYLSICRKQRALPSLDIVVWSELPPGAGLGSSAAYSVCLAAALLTVCEEIPNPLKDGDCVNRWTKEDLELINKWAFQGERMIHGNP

SEQ ID NO: 51173 - protein, 115 aa, Homo sapiens
  Payload ID: 10212
  Gene Symbol: MVK
  Gene Name: mevalonate kinase
  ENSP ID: ENSP00000439134
MGEAPAPEQYLVLEELIDMNQHHLNALGVGHASLDQLCQVTRARGLHSKLTGAGGGGCGITLLKPGLEQPEVEATKQALTSCGFDCLETSIGAPGVSIHSATSLDSRVQQALDGL

SEQ ID NO: 51174 - protein, 170 aa, Homo sapiens
  Payload ID: 10212
  Gene Symbol: MVK
  Gene Name: mevalonate kinase
  ENSP ID: ENSP00000440379
MLSEVLLVSAPGKVILHGEHAVVHGKVALAVSLNLRTFLRLQPHSNGKVDLSLPNIGIKRAWDVARLQSLDTSFLEQGDVTTPTSEQVEKLKEVAGLPDDCAVTERLAVLAFLYLYLSICRKQRALPSLDIVVWSELPPGAGLGSSAAYSVCLAAALLTVCEEIPNPLKD

SEQ ID NO: 51175 - protein, 396 aa, Homo sapiens; identical to SEQ ID NO: 51169
  Payload ID: 10212
  Gene Symbol: MVK
  Gene Name: mevalonate kinase
  Uniprot ID: Q03426
  ENSP ID: ENSP00000443551

SEQ ID NO: 51176 - protein, 83 aa, Homo sapiens; identical to SEQ ID NO: 51171
  Payload ID: 10212
  Gene Symbol: MVK
  Gene Name: mevalonate kinase
  ENSP ID: ENSP00000443978

SEQ ID NO: 51177 - protein, 117 aa, Homo sapiens
  Payload ID: 10212
  Gene Symbol: MVK
  Gene Name: mevalonate kinase
  ENSP ID: ENSP00000445382
MLSEVLLVSAPGKVILHGEHAVVHGKVALAVSLNLRTFLRLQPHSNGKVDLSLPNIGIKRAWDVARLQSLDTSFLGSHSVMQPGVQWCDHSSLFLQPPGLKRSSCLSLLSSWDHRAR

SEQ ID NO: 51178 - protein, 83 aa, Homo sapiens; identical to SEQ ID NO: 51171
  Payload ID: 10212
  Gene Symbol: MVK
  Gene Name: mevalonate kinase
  ENSP ID: ENSP00000486804

SEQ ID NO: 51179 - protein, 344 aa, Homo sapiens; identical to SEQ ID NO: 51170
  Payload ID: 10212
  Gene Symbol: MVK
  Gene Name: mevalonate kinase
  ENSP ID: ENSP00000486846

SEQ ID NO: 51180 - protein, 520 aa, Homo sapiens
  Payload ID: 10213
  Gene Symbol: MEX3A
  Gene Name: mex-3 RNA binding family member A
  Uniprot ID: A1L020
  ENSP ID: ENSP00000432845
MPSLVVSGIMERNGGFGELGCFGGSAKDRGLLEDERALQLALDQLCLLGLGEPPAPTAGEDGGGGGGGAPAQPAAPPQPAPPPPPAAPPAAPTAAPAAQTPQPPTAPKGASDAKLCALYKEAELRLKGSSNTTECVPVPTSEHVAEIVGRQGCKIKALRAKTNTYIKTPVRGEEPVFMVTGRREDVATARREIISAAEHFSMIRASRNKSGAAFGVAPALPGQVTIRVRVPYRVVGLVVGPKGATIKRIQQQTNTYIITPSRDRDPVFEITGAPGNVERAREEIETHIAVRTGKILEYNNENDFLAGSPDAAIDSRYSDAWRVHQPGCKPLSTFRQNSLGCIGECGVDSGFEAPRLGEQGGDFGYGGYLFPGYGVGKQDVYYGVAETSPPLWAGQENATPTSVLFSSASSSSSSSAKARAGPPGAHRSPATSAGPELAGLPRRPPGEPLQGFSKLGGGGLRSPGGGRDCMVCFESEVTAALVPCGHNLFCMECAVRICERTDPECPVCHITATQAIRIFS

SEQ ID NO: 51181 - protein, 569 aa, Homo sapiens
  Payload ID: 10214
  Gene Symbol: MEX3B
  Gene Name: mex-3 RNA binding family member B
  Uniprot ID: Q6ZN04
  ENSP ID: ENSP00000329918
MPSSLFADLERNGSGGGGGGSSGGGETLDDQRALQLALDQLSLLGLDSDEGASLYDSEPRKKSVNMTECVPVPSSEHVAEIVGRQGCKIKALRAKTNTYIKTPVRGEEPVFVVTGRKEDVAMARREIISAAEHFSMIRASRNKNTALNGAVPGPPNLPGQTTIQVRVPYRVVGLVVGPKGATIKRIQQQTHTYIVTPSRDKEPVFEVTGMPENVDRAREEIEAHIALRTGGIIELTDENDFHANGTDVGFDLHHGSGGSGPGSLWSKPTPSITPTPGRKPFSSYRNDSSSSLGSASTDSYFGGGTSSSAAATQRLADYSPPSPALSFAHNGNNNNNGNGYTYTAGGEASVPSPDGCPELQPTFDPAPAPPPGAPLIWAQFERSPGGGPAAPVSSSCSSSASSSASSSSVVFPGGGASAPSNANLGLLVHRRLHPGTSCPRLSPPLHMAPGAGEHHLARRVRSDPGGGGLAYAAYANGLGAQLPGLQPSDTSGSSSSSSSSSSSSSSSSGLRRKGSRDCSVCFESEVIAALVPCGHNLFCMECANRICEKSEPECPVCHTAVTQAIRIFS

SEQ ID NO: 51182 - protein, 158 aa, Homo sapiens
  Payload ID: 10214
  Gene Symbol: MEX3B
  Gene Name: mex-3 RNA binding family member B
  Uniprot ID: Q6ZN04
  ENSP ID: ENSP00000456938
MPSSLFADLERNGSGGGGGGSSGGGETLDDQRALQLALDQLSLLGLDSDEGASLYDSEPRKKSVNMTECVPVPSSEHVAEIVGRQGRSRRDGEVGGGGVGSQATASRGRRVQYRDPRRGVPWGERKSRAMGRRPRQRKCRQAVSRSRAAALAGCTFFC

SEQ ID NO: 51183 - protein, 659 aa, Homo sapiens
  Payload ID: 10215
  Gene Symbol: MEX3C
  Gene Name: mex-3 RNA binding family member C
  Uniprot ID: Q5U5Q3
  ENSP ID: ENSP00000385610
MPSGSSAALALAAAPAPLPQPPPPPPPPPPPLPPPSGGPELEGDGLLLRERLAALGLDDPSPAEPGAPALRAPAAAAQGQARRAAELSPEERAPPGRPGAPEAAELELEEDEEEGEEAELDGDLLEEEELEEAEEEDRSSLLLLSPPAATASQTQQIPGGSLGSVLLPAARFDAREAAAAAAAAGVLYGGDDAQGMMAAMLSHAYGPGGCGAAAAALNGEQAALLRRKSVNTTECVPVPSSEHVAEIVGRQGCKIKALRAKTNTYIKTPVRGEEPIFVVTGRKEDVAMAKREILSAAEHFSMIRASRNKNGPALGGLSCSPNLPGQTTVQVRVPYRVVGLVVGPKGATIKRIQQQTHTYIVTPSRDKEPVFEVTGMPENVDRAREEIEMHIAMRTGNYIELNEENDFHYNGTDVSFEGGTLGSAWLSSNPVPPSRARMISNYRNDSSSSLGSGSTDSYFGSNRLADFSPTSPFSTGNFWFGDTLPSVGSEDLAVDSPAFDSLPTSAQTIWTPFEPVNPLSGFGSDPSGNMKTQRRGSQPSTPRLSPTFPESIEHPLARRVRSDPPSTGNHVGLPIYIPAFSNGTNSYSSSNGGSTSSSPPESRRKHDCVICFENEVIAALVPCGHNLFCMECANKICEKRTPSCPVCQTAVTQAIQIHS

SEQ ID NO: 51184 - protein, 115 aa, Homo sapiens
  Payload ID: 10215
  Gene Symbol: MEX3C
  Gene Name: mex-3 RNA binding family member C
  ENSP ID: ENSP00000468078
YGGDDAQGMMAAMLSHAYGPGGCGAAAAALNGEQAALLRRKSVNTTECVPVPSSEHVAEIVGRQGECRGGEVQLGMAPGVGGETRERSVGRKRRTRRGPQVHREGVWEEPRVDQM

SEQ ID NO: 51185 - protein, 489 aa, Homo sapiens
  Payload ID: 10215
  Gene Symbol: MEX3C
  Gene Name: mex-3 RNA binding family member C
  ENSP ID: ENSP00000482566
MPSGSSAALALAAAGVLYGGDDAQGMMAAMLSHAYGPGGCGAAAAALNGEQAALLRRKSVNTTECVPVPSSEHVAEIVGRQGCKIKALRAKTNTYIKTPVRGEEPIFVVTGRKEDVAMAKREILSAAEHFSMIRASRNKNGPALGGLSCSPNLPGQTTVQVRVPYRVVGLVVGPKGATIKRIQQQTHTYIVTPSRDKEPVFEVTGMPENVDRAREEIEMHIAMRTGNYIELNEENDFHYNGTDVSFEGGTLGSAWLSSNPVPPSRARMISNYRNDSSSSLGSGSTDSYFGSNRLADFSPTSPFSTGNFWFGDTLPSVGSEDLAVDSPAFDSLPTSAQTIWTPFEPVNPLSGFGSDPSGNMKTQRRGSQPSTPRLSPTFPESIEHPLARRVRSDPPSTGNHVGLPIYIPAFSNGTNSYSSSNGGSTSSSPPESRRKHDCVICFENEVIAALVPCGHNLFCMECANKICEKRTPSCPVCQTAVTQAIQIHS

SEQ ID NO: 51186 - protein, 651 aa, Homo sapiens
  Payload ID: 10216
  Gene Symbol: MEX3D
  Gene Name: mex-3 RNA binding family member D
  Uniprot ID: Q86XN8
  ENSP ID: ENSP00000384398
MPSSLGQPDGGGGGGGGGGGVGAAGEDPGPGPAPPPEGAQEAAPAPRPPPEPDDAAAALRLALDQLSALGLGGAGDTDEEGAAGDGAAAAGGADGGAAPEPVPPDGPEAGAPPTLAPAVAPGSLPLLDPNASPPPPPPPRPSPPDVFAGFAPHPAALGPPTLLADQMSVIGSRKKSVNMTECVPVPSSEHVAEIVGRQGCKIKALRAKTNTYIKTPVRGEEPVFIVTGRKEDVEMAKREILSAAEHFSIIRATRSKAGGLPGAAQGPPNLPGQTTIQVRVPYRVVGLVVGPKGATIKRIQQRTHTYIVTPGRDKEPVFAVTGMPENVDRAREEIEAHITLRTGAFTDAGPDSDFHANGTDVCLDLLGAAASLWAKTPNQGRRPPTATAGLRGDTALGAPSAPEAFYAGSRGGPSVPDPGPASPYSGSGNGGFAFGAEGPGAPVGTAAPDDCDFGFDFDFLALDLTVPAAATIWAPFERAAPLPAFSGCSTVNGAPGPPAAGARRSSGAGTPRHSPTLPEPGGLRLELPLSRRGAPDPVGALSWRPPQGPVSFPGGAAFSTATSLPSSPAAAACAPLDSGASENSRKPPSASSAPALARECVVCAEGEVMAALVPCGHNLFCMDCAVRICGKSEPECPACRTPATQAIHIFS

SEQ ID NO: 51187 - protein, 490 aa, Homo sapiens
  Payload ID: 10216
  Gene Symbol: MEX3D
  Gene Name: mex-3 RNA binding family member D
  ENSP ID: ENSP00000475059
VNMTECVPVPSSEHVAEIVGRQGCKIKALRAKTNTYIKTPVRGEEPVFIVTGRKEDVEMAKREILSAAEHFSIIRATRSKAGGLPGAAQGPPNLPGQTTIQVRVPYRVVGLVVGPKGATIKRIQQRTHTYIVTPGRDKEPVFAVTGMPENVDRAREEIEAHITLRTGAFTDAGPDSDFHANGTDVCLDLLGAAASLWAKTPNQGRRPPTATAGLRGDTALGAPSAPEAFYAGSRGGPSVPDPGPASPYSGSGNGGFAFGAEGPGAPVGTAAPDDCDFGFDFDFLALDLTVPAAATIWAPFERAAPLPAFSGCSTVNGAPGPPAAGARRSSGAGTPRHSPTLPEPGGLRLELPLSRRGAPDPVGALSWRPPQGPVSFPGGAAFSTATSLPSSPAAAACAPLDSGASENSRKPPSASSAPALARECVVCAEGEVMAALVPCGHNLFCMDCAVRICGKSEPECPACRTPATQAIRVETETPQPGGASALQRQY

SEQ ID NO: 51188 - protein, 321 aa, Homo sapiens
  Payload ID: 10217
  Gene Symbol: MFNG
  Gene Name: MFNG O-fucosylpeptide 3-beta-N-acetylglucosaminyltransferase
  Uniprot ID: O00587
  ENSP ID: ENSP00000349490
MQCRLPRGLAGALLTLLCMGLLCLRYHLNLSPQRVQGTPELSQPNPGPPKLQLHDVFIAVKTTRAFHRLRLELLLDTWVSRTREQTFVFTDSPDKGLQERLGSHLVVTNCSAEHSHPALSCKMAAEFDTFLASGLRWFCHVDDDNYVNPRALLQLLRAFPLARDVYVGRPSLNRPIHASEPQPHNRTRLVQFWFATGGAGFCINRKLALKMAPWASGSRFMDTSALIRLPDDCTMGYIIECKLGGRLQPSPLFHSHLETLQLLRTAQLPEQVTLSYGVFEGKLNVIKLQGPFSPEEDPSRFRSLHCLLYPDTPWCPQLGAR

SEQ ID NO: 51189 - protein, 42 aa, Homo sapiens
  Payload ID: 10217
  Gene Symbol: MFNG
  Gene Name: MFNG O-fucosylpeptide 3-beta-N-acetylglucosaminyltransferase
  ENSP ID: ENSP00000389274
MAAEFDTFLASGLRWFCHVDDDNYVNPRALLQLLRAFPLARD

SEQ ID NO: 51190 - protein, 132 aa, Homo sapiens
  Payload ID: 10217
  Gene Symbol: MFNG
  Gene Name: MFNG O-fucosylpeptide 3-beta-N-acetylglucosaminyltransferase
  ENSP ID: ENSP00000394081
MAAEFDTFLASGLRWFCHVDDDNYVNPRALLQLLRAFPLARDVYVGRPSLNRPIHASEPQPHNRTRLVQFWFATGGAGFCINRKLALKMAPWASGSRFMDTSALIRLPDDCTMGYIIECKLGGRLQPSPLFH

SEQ ID NO: 51191 - protein, 87 aa, Homo sapiens
  Payload ID: 10217
  Gene Symbol: MFNG
  Gene Name: MFNG O-fucosylpeptide 3-beta-N-acetylglucosaminyltransferase
  ENSP ID: ENSP00000407094
  MOD_RES (1)..(1): Any amino acid
XSHLETLQLLRTAQLPEQISLPPLSALSRYTLVSPAGCPMNPELLGKGWAETSGCALAPKVALWVPGKCLVIGSPWQGLRVVGKPRI

SEQ ID NO: 51192 - protein, 118 aa, Homo sapiens
  Payload ID: 10217
  Gene Symbol: MFNG
  Gene Name: MFNG O-fucosylpeptide 3-beta-N-acetylglucosaminyltransferase
  ENSP ID: ENSP00000407110
MQCRLPRGLAGALLTLLCMGLLCLRYHLNLSPQRVQGTPELSQPNPGPPKLQLHDVFIAVKTTRAFHRLRLELLLDTWVSRTREQTFVFTDSPDKGLQERLGSPDSSSLLQGPTLWSP

SEQ ID NO: 51193 - protein, 307 aa, Homo sapiens
  Payload ID: 10217
  Gene Symbol: MFNG
  Gene Name: MFNG O-fucosylpeptide 3-beta-N-acetylglucosaminyltransferase
  Uniprot ID: O00587
  ENSP ID: ENSP00000413855
MQCRLPRGLAGALLTLLCMGLLCLRYHLNLSPQRVQGTPELSQPNPGPPKLQLHDVFIAVKTTRAFHRLRLELLLDTWVSRTREQVTRSHLVVTNCSAEHSHPALSCKMAAEFDTFLASGLRWFCHVDDDNYVNPRALLQLLRAFPLARDVYVGRPSLNRPIHASEPQPHNRTRLVQFWFATGGAGFCINRKLALKMAPWASGSRFMDTSALIRLPDDCTMGYIIECKLGGRLQPSPLFHSHLETLQLLRTAQLPEQVTLSYGVFEGKLNVIKLQGPFSPEEDPSRFRSLHCLLYPDTPWCPQLGAR

SEQ ID NO: 51194 - protein, 130 aa, Homo sapiens
  Payload ID: 10217
  Gene Symbol: MFNG
  Gene Name: MFNG O-fucosylpeptide 3-beta-N-acetylglucosaminyltransferase
  ENSP ID: ENSP00000414222
MQCRLPRGLAGALLTLLCMGLLCLRYHLNLSPQRVQGTPELSQPNPGPPKLQLHDVFIAVKTTRAFHRLRLELLLDTWVSRTREQGPTLWSPTAPRNTATQLCPARWLLSSTPSWPVGLGGSAMWTMTTM

SEQ ID NO: 51195 - protein, 127 aa, Homo sapiens
  Payload ID: 10217
  Gene Symbol: MFNG
  Gene Name: MFNG O-fucosylpeptide 3-beta-N-acetylglucosaminyltransferase
  ENSP ID: ENSP00000414342
MQCRLPRGLAGALLTLLCMGLLCLRYHLNLSPQRVQGTPELSQPNPGPPKLQLHDVFIAVKTTRAFHRLRLELLLDTWVSRTREQVTNICLHRQPRQRPPGETGVPPCGHQLLRGTQPPSSVLQDGC

SEQ ID NO: 51196 - protein, 3065 aa, Homo sapiens
  Payload ID: 10218
  Gene Symbol: MGA
  Gene Name: MGA, MAX dimerization protein
  Uniprot ID: Q8IWI9
  ENSP ID: ENSP00000219905
MEEKQQIILANQDGGTVAGAAPTFFVILKQPGNGKTDQGILVTNQDACALASSVSSPVKSKGKICLPADCTVGGITVTLDNNSMWNEFYHRSTEMILTKQGRRMFPYCRYWITGLDSNLKYILVMDISPVDNHRYKWNGRWWEPSGKAEPHVLGRVFIHPESPSTGHYWMHQPVSFYKLKLTNNTLDQEGHIILHSMHRYLPRLHLVPAEKAVEVIQLNGPGVHTFTFPQTEFFAVTAYQNIQITQLKIDYNPFAKGFRDDGLNNKPQRDGKQKNSSDQEGNNISSSSGHRVRLTEGQGSEIQPGDLDPLSRGHETSGKGLEKTSLNIKRDFLGFMDTDSALSEVPQLKQEISECLIASSFEDDSRVASPLDQNGSFNVVIKEEPLDDYDYELGECPEGVTVKQEETDEETDVYSNSDDDPILEKQLKRHNKVDNPEADHLSSKWLPSSPSGVAKAKMFKLDTGKMPVVYLEPCAVTRSTVKISELPDNMLSTSRKDKSSMLAELEYLPTYIENSNETAFCLGKESENGLRKHSPDLRVVQKYPLLKEPQWKYPDISDSISTERILDDSKDSVGDSLSGKEDLGRKRTTMLKIATAAKVVNANQNASPNVPGKRGRPRKLKLCKAGRPPKNTGKSLISTKNTPVSPGSTFPDVKPDLEDVDGVLFVSFESKEALDIHAVDGTTEESSSLQASTTNDSGYRARISQLEKELIEDLKTLRHKQVIHPGLQEVGLKLNSVDPTMSIDLKYLGVQLPLAPATSFPFWNLTGTNPASPDAGFPFVSRTGKTNDFTKIKGWRGKFHSASASRNEGGNSESSLKNRSAFCSDKLDEYLENEGKLMETSMGFSSNAPTSPVVYQLPTKSTSYVRTLDSVLKKQSTISPSTSYSLKPHSVPPVSRKAKSQNRQATFSGRTKSSYKSILPYPVSPKQKYSHVILGDKVTKNSSGIISENQANNFVVPTLDENIFPKQISLRQAQQQQQQQQGSRPPGLSKSQVKLMDLEDCALWEGKPRTYITEERADVSLTTLLTAQASLKTKPIHTIIRKRAPPCNNDFCRLGCVCSSLALEKRQPAHCRRPDCMFGCTCLKRKVVLVKGGSKTKHFQRKAAHRDPVFYDTLGEEAREEEEGIREEEEQLKEKKKRKKLEYTICETEPEQPVRHYPLWVKVEGEVDPEPVYIPTPSVIEPMKPLLLPQPEVLSPTVKGKLLTGIKSPRSYTPKPNPVIREEDKDPVYLYFESMMTCARVRVYERKKEDQRQPSSSSSPSPSFQQQTSCHSSPENHNNAKEPDSEQQPLKQLTCDLEDDSDKLQEKSWKSSCNEGESSSTSYMHQRSPGGPTKLIEIISDCNWEEDRNKILSILSQHINSNMPQSLKVGSFIIELASQRKSRGEKNPPVYSSRVKISMPSCQDQDDMAEKSGSETPDGPLSPGKMEDISPVQTDALDSVRERLHGGKGLPFYAGLSPAGKLVAYKRKPSSSTSGLIQVASNAKVAASRKPRTLLPSTSNSKMASSSGTATNRPGKNLKAFVPAKRPIAARPSPGGVFTQFVMSKVGALQQKIPGVSTPQTLAGTQKFSIRPSPVMVVTPVVSSEPVQVCSPVTAAVTTTTPQVFLENTTAVTPMTAISDVETKETTYSSGATTTGVVEVSETNTSTSVTSTQSTATVNLTKTTGITTPVASVAFPKSLVASPSTITLPVASTASTSLVVVTAAASSSMVTTPTSSLGSVPIILSGINGSPPVSQRPENAAQIPVATPQVSPNTVKRAGPRLLLIPVQQGSPTLRPVSNTQLQGHRMVLQPVRSPSGMNLFRHPNGQIVQLLPLHQLRGSNTQPNLQPVMFRNPGSVMGIRLPAPSKPSETPPSSTSSSAFSVMNPVIQAVGSSSAVNVITQAPSLLSSGASFVSQAGTLTLRISPPEPQSFASKTGSETKITYSSGGQPVGTASLIPLQSGSFALLQLPGQKPVPSSILQHVASLQMKRESQNPDQKDETNSIKREQETKKVLQSEGEAVDPEANVIKQNSGAATSEETLNDSLEDRGDHLDEECLPEEGCATVKPSEHSCITGSHTDQDYKDVNEEYGARNRKSSKEKVAVLEVRTISEKASNKTVQNLSKVQHQKLGDVKVEQQKGFDNPEENSSEFPVTFKEESKFELSGSKVMEQQSNLQPEAKEKECGDSLEKDRERWRKHLKGPLTRKCVGASQECKKEADEQLIKETKTCQENSDVFQQEQGISDLLGKSGITEDARVLKTECDSWSRISNPSAFSIVPRRAAKSSRGNGHFQGHLLLPGEQIQPKQEKKGGRSSADFTVLDLEEDDEDDNEKTDDSIDEIVDVVSDYQSEEVDDVEKNNCVEYIEDDEEHVDIETVEELSEEINVAHLKTTAAHTQSFKQPSCTHISADEKAAERSRKAPPIPLKLKPDYWSDKLQKEAEAFAYYRRTHTANERRRRGEMRDLFEKLKITLGLLHSSKVSKSLILTRAFSEIQGLTDQADKLIGQKNLLTRKRNILIRKVSSLSGKTEEVVLKKLEYIYAKQQALEAQKRKKKMGSDEFDISPRISKQQEGSSASSVDLGQMFINNRRGKPLILSRKKDQATENTSPLNTPHTSANLVMTPQGQLLTLKGPLFSGPVVAVSPDLLESDLKPQVAGSAVALPENDDLFMMPRIVNVTSLATEGGLVDMGGSKYPHEVPDSKPSDHLKDTVRNEDNSLEDKGRISSRGNRDGRVTLGPTQVFLANKDSGYPQIVDVSNMQKAQEFLPKKISGDMRGIQYKWKESESRGERVKSKDSSFHKLKMKDLKDSSIEMELRKVTSAIEEAALDSSELLTNMEDEDDTDETLTSLLNEIAFLNQQLNDDSVGLAELPSSMDTEFPGDARRAFISKVPPGSRATFQVEHLGTGLKELPDVQGESDSISPLLLHLEDDDFSENEKQLAEPASEPDVLKIVIDSEIKDSLLSNKKAIDGGKNTSGLPAEPESVSSPPTLHMKTGLENSNSTDTLWRPMPKLAPLGLKVANPSSDADGQSLKVMPCLAPIAAKVGSVGHKMNLTGNDQEGRESKVMPTLAPVVAKLGNSGASPSSAGK

SEQ ID NO: 51197 - protein, 2856 aa, Homo sapiens
  Payload ID: 10218
  Gene Symbol: MGA
  Gene Name: MGA, MAX dimerization protein
  Uniprot ID: Q8IWI9
  ENSP ID: ENSP00000442467
MEEKQQIILANQDGGTVAGAAPTFFVILKQPGNGKTDQGILVTNQDACALASSVSSPVKSKGKICLPADCTVGGITVTLDNNSMWNEFYHRSTEMILTKQGRRMFPYCRYWITGLDSNLKYILVMDISPVDNHRYKWNGRWWEPSGKAEPHVLGRVFIHPESPSTGHYWMHQPVSFYKLKLTNNTLDQEGHIILHSMHRYLPRLHLVPAEKAVEVIQLNGPGVHTFTFPQTEFFAVTAYQNIQITQLKIDYNPFAKGFRDDGLNNKPQRDGKQKNSSDQEGNNISSSSGHRVRLTEGQGSEIQPGDLDPLSRGHETSGKGLEKTSLNIKRDFLGFMDTDSALSEVPQLKQEISECLIASSFEDDSRVASPLDQNGSFNVVIKEEPLDDYDYELGECPEGVTVKQEETDEETDVYSNSDDDPILEKQLKRHNKVDNPEADHLSSKWLPSSPSGVAKAKMFKLDTGKMPVVYLEPCAVTRSTVKISELPDNMLSTSRKDKSSMLAELEYLPTYIENSNETAFCLGKESENGLRKHSPDLRVVQKYPLLKEPQWKYPDISDSISTERILDDSKDSVGDSLSGKEDLGRKRTTMLKIATAAKVVNANQNASPNVPGKRGRPRKLKLCKAGRPPKNTGKSLISTKNTPVSPGSTFPDVKPDLEDVDGVLFVSFESKEALDIHAVDGTTEESSSLQASTTNDSGYRARISQLEKELIEDLKTLRHKQVIHPGLQEVGLKLNSVDPTMSIDLKYLGVQLPLAPATSFPFWNLTGTNPASPDAGFPFVSRTGKTNDFTKIKGWRGKFHSASASRNEGGNSESSLKNRSAFCSDKLDEYLENEGKLMETSMGFSSNAPTSPVVYQLPTKSTSYVRTLDSVLKKQSTISPSTSYSLKPHSVPPVSRKAKSQNRQATFSGRTKSSYKSILPYPVSPKQKYSHVILGDKVTKNSSGIISENQANNFVVPTLDENIFPKQISLRQAQQQQQQQQGSRPPGLSKSQVKLMDLEDCALWEGKPRTYITEERADVSLTTLLTAQASLKTKPIHTIIRKRAPPCNNDFCRLGCVCSSLALEKRQPAHCRRPDCMFGCTCLKRKVVLVKGGSKTKHFQRKAAHRDPVFYDTLGEEAREEEEGIREEEEQLKEKKKRKKLEYTICETEPEQPVRHYPLWVKVEGEVDPEPVYIPTPSVIEPMKPLLLPQPEVLSPTVKGKLLTGIKSPRSYTPKPNPVIREEDKDPVYLYFESMMTCARVRVYERKKEDQRQPSSSSSPSPSFQQQTSCHSSPENHNNAKEPDSEQQPLKQLTCDLEDDSDKLQEKSWKSSCNEGESSSTSYMHQRSPGGPTKLIEIISDCNWEEDRNKILSILSQHINSNMPQSLKVGSFIIELASQRKSRGEKNPPVYSSRVKISMPSCQDQDDMAEKSGSETPDGPLSPGKMEDISPVQTDALDSVRERLHGGKGLPFYAGLSPAGKLVAYKRKPSSSTSGLIQVASNAKVAASRKPRTLLPSTSNSKMASSSGTATNRPGKNLKAFVPAKRPIENAAQIPVATPQVSPNTVKRAGPRLLLIPVQQGSPTLRPVSNTQLQGHRMVLQPVRSPSGMNLFRHPNGQIVQLLPLHQLRGSNTQPNLQPVMFRNPGSVMGIRLPAPSKPSETPPSSTSSSAFSVMNPVIQAVGSSSAVNVITQAPSLLSSGASFVSQAGTLTLRISPPEPQSFASKTGSETKITYSSGGQPVGTASLIPLQSGSFALLQLPGQKPVPSSILQHVASLQMKRESQNPDQKDETNSIKREQETKKVLQSEGEAVDPEANVIKQNSGAATSEETLNDSLEDRGDHLDEECLPEEGCATVKPSEHSCITGSHTDQDYKDVNEEYGARNRKSSKEKVAVLEVRTISEKASNKTVQNLSKVQHQKLGDVKVEQQKGFDNPEENSSEFPVTFKEESKFELSGSKVMEQQSNLQPEAKEKECGDSLEKDRERWRKHLKGPLTRKCVGASQECKKEADEQLIKETKTCQENSDVFQQEQGISDLLGKSGITEDARVLKTECDSWSRISNPSAFSIVPRRAAKSSRGNGHFQGHLLLPGEQIQPKQEKKGGRSSADFTVLDLEEDDEDDNEKTDDSIDEIVDVVSDYQSEEVDDVEKNNCVEYIEDDEEHVDIETVEELSEEINVAHLKTTAAHTQSFKQPSCTHISADEKAAERSRKAPPIPLKLKPDYWSDKLQKEAEAFAYYRRTHTANERRRRGEMRDLFEKLKITLGLLHSSKVSKSLILTRAFSEIQGLTDQADKLIGQKNLLTRKRNILIRKVSSLSGKTEEVVLKKLEYIYAKQQALEAQKRKKKMGSDEFDISPRISKQQEGSSASSVDLGQMFINNRRGKPLILSRKKDQATENTSPLNTPHTSANLVMTPQGQLLTLKGPLFSGPVVAVSPDLLESDLKPQVAGSAVALPENDDLFMMPRIVNVTSLATEGGLVDMGGSKYPHEVPDSKPSDHLKDTVRNEDNSLEDKGRISSRGNRDGRVTLGPTQVFLANKDSGYPQIVDVSNMQKAQEFLPKKISGDMRGIQYKWKESESRGERVKSKDSSFHKLKMKDLKDSSIEMELRKVTSAIEEAALDSSELLTNMEDEDDTDETLTSLLNEIAFLNQQLNDDSVGLAELPSSMDTEFPGDARRAFISKVPPGSRATFQVEHLGTGLKELPDVQGESDSISPLLLHLEDDDFSENEKQLAEPASEPDVLKIVIDSEIKDSLLSNKKAIDGGKNTSGLPAEPESVSSPPTLHMKTGLENSNSTDTLWRPMPKLAPLGLKVANPSSDADGQSLKVMPCLAPIAAKVGSVGHKMNLTGNDQEGRESKVMPTLAPVVAKLGNSGASPSSAGK

SEQ ID NO: 51198 - protein, 1086 aa, Homo sapiens
  Payload ID: 10218
  Gene Symbol: MGA
  Gene Name: MGA, MAX dimerization protein
  ENSP ID: ENSP00000455155
MEEKQQIILANQDGGTVAGAAPTFFVILKQPGNGKTDQGILVTNQDACALASSVSSPVKSKGKICLPADCTVGGITVTLDNNSMWNEFYHRSTEMILTKQGRRMFPYCRYWITGLDSNLKYILVMDISPVDNHRYKWNGRWWEPSGKAEPHVLGRVFIHPESPSTGHYWMHQPVSFYKLKLTNNTLDQEGHIILHSMHRYLPRLHLVPAEKAVEVIQLNGPGVHTFTFPQTEFFAVTAYQNIQITQLKIDYNPFAKGFRDDGLNNKPQRDGKQKNSSDQEGNNISSSSGHRVRLTEGQGSEIQPGDLDPLSRGHETSGKGLEKTSLNIKRDFLGFMDTDSALSEVPQLKQEISECLIASSFEDDSRVASPLDQNGSFNVVIKEEPLDDYDYELGECPEGVTVKQEETDEETDVYSNSDDDPILEKQLKRHNKVDNPEADHLSSKWLPSSPSGVAKAKMFKLDTGKMPVVYLEPCAVTRSTVKISELPDNMLSTSRKDKSSMLAELEYLPTYIENSNETAFCLGKESENGLRKHSPDLRVVQKYPLLKEPQWKYPDISDSISTERILDDSKDSVGDSLSGKEDLGRKRTTMLKIATAAKVVNANQNASPNVPGKRGRPRKLKLCKAGRPPKNTGKSLISTKNTPVSPGSTFPDVKPDLEDVDGVLFVSFESKEALDIHAVDGTTEESSSLQASTTNDSGYRARISQLEKELIEDLKTLRHKQVIHPGLQEVGLKLNSVDPTMSIDLKYLGVQLPLAPATSFPFWNLTGTNPASPDAGFPFVSRTGKTNDFTKIKGWRGKFHSASASRNEGGNSESSLKNRSAFCSDKLDEYLENEGKLMETSMGFSSNAPTSPVVYQLPTKSTSYVRTLDSVLKKQSTISPSTSYSLKPHSVPPVSRKAKSQNRQATFSGRTKSSYKSILPYPVSPKQKYSHVILGDKVTKNSSGIISENQANNFVVPTLDENIFPKQISLRQAQQQQQQQQGSRPPGLSKSQVKLMDLEDCALWEGKPRTYITEERADVSLTTLLTAQASLKTKPIHTIIRKRAPPCNNDFCRLGCVCSSLALEKRQPAHCRRPDCMFGCTCLKRK

SEQ ID NO: 51199 - protein, 2856 aa, Homo sapiens; identical to SEQ ID NO: 51197
  Payload ID: 10218
  Gene Symbol: MGA
  Gene Name: MGA, MAX dimerization protein
  Uniprot ID: Q8IWI9
  ENSP ID: ENSP00000456141

SEQ ID NO: 51200 - protein, 3065 aa, Homo sapiens; identical to SEQ ID NO: 51196
  Payload ID: 10218
  Gene Symbol: MGA
  Gene Name: MGA, MAX dimerization protein
  Uniprot ID: Q8IWI9
  ENSP ID: ENSP00000457035

SEQ ID NO: 51201 - protein, 1138 aa, Homo sapiens
  Payload ID: 10218
  Gene Symbol: MGA
  Gene Name: MGA, MAX dimerization protein
  ENSP ID: ENSP00000457151
MEEKQQIILANQDGGTVAGAAPTFFVILKQPGNGKTDQGILVTNQDACALASSVSSPVKSKGKICLPADCTVGGITVTLDNNSMWNEFYHRSTEMILTKQGRRMFPYCRYWITGLDSNLKYILVMDISPVDNHRYKWNGRWWEPSGKAEPHVLGRVFIHPESPSTGHYWMHQPVSFYKLKLTNNTLDQEGHIILHSMHRYLPRLHLVPAEKAVEVIQLNGPGVHTFTFPQTEFFAVTAYQNIQITQLKIDYNPFAKGFRDDGLNNKPQRDGKQKNSSDQEGNNISSSSGHRVRLTEGQGSEIQPGDLDPLSRGHETSGKGLEKTSLNIKRDFLGFMDTDSALSEVPQLKQEISECLIASSFEDDSRVASPLDQNGSFNVVIKEEPLDDYDYELGECPEGVTVKQEETDEETDVYSNSDDDPILEKQLKRHNKVDNPEADHLSSKWLPSSPSGVAKAKMFKLDTGKMPVVYLEPCAVTRSTVKISELPDNMLSTSRKDKSSMLAELEYLPTYIENSNETAFCLGKESENGLRKHSPDLRVVQKYPLLKEPQWKYPDISDSISTERILDDSKDSVGDSLSGKEDLGRKRTTMLKIATAAKVVNANQNASPNVPGKRGRPRKLKLCKAGRPPKNTGKSLISTKNTPVSPGSTFPDVKPDLEDVDGVLFVSFESKEALDIHAVDGTTEESSSLQASTTNDSGYRARISQLEKELIEDLKTLRHKQVIHPGLQEVGLKLNSVDPTMSIDLKYLGVQLPLAPATSFPFWNLTGTNPASPDAGFPFVSRTGKTNDFTKIKGWRGKFHSASASRNEGGNSESSLKNRSAFCSDKLDEYLENEGKLMETSMGFSSNAPTSPVVYQLPTKSTSYVRTLDSVLKKQSTISPSTSYSLKPHSVPPVSRKAKSQNRQATFSGRTKSSYKSILPYPVSPKQKYSHVILGDKVTKNSSGIISENQANNFVVPTLDENIFPKQISLRQAQQQQQQQQGSRPPGLSKSQVKLMDLEDCALWEGKPRTYITEERADVSLTTLLTAQASLKTKPIHTIIRKRAPPCNNDFCRLGCVCSSLALEKRQPAHCRRPDCMFGCTCLKRKVVLVKGGSKTKHFQRKAAHRDPVFYDTLGEEAREEEEGIREEEEQLKEKKKR

SEQ ID NO: 51202 - protein, 83 aa, Homo sapiens
  Payload ID: 10218
  Gene Symbol: MGA
  Gene Name: MGA, MAX dimerization protein
  ENSP ID: ENSP00000457250
  MOD_RES (1)..(1): Any amino acid
XDQEGNNISSSSGHRVRLTEGQGSEIQPGDLDPLSRGHETSGKGLEKTSLNIKRDFLGFMDTDSALSEVPQLKQEISEWYSFA

SEQ ID NO: 51203 - protein, 1174 aa, Homo sapiens
  Payload ID: 10218
  Gene Symbol: MGA
  Gene Name: MGA, MAX dimerization protein
  ENSP ID: ENSP00000457474
  MOD_RES (1)..(1): Any amino acid
XLTCDLEDDSDKLQEKSWKSSCNEGESSSTSYMHQRSPGGPTKLIEIISDCNWEEDRNKILSILSQHINSNMPQSLKVNGKSYPQAKLLLGQMGALHPANRLAAYITGRLRPSVLDLSTLSTVISKVASNAKVAASRKPRTLLPSTSNSKMASSSGTATNRPGKNLKAFVPAKRPIAARPSPGGVFTQFVMSKVGALQQKIPGVSTPQTLAGTQKFSIRPSPVMVVTPVVSSEPVQVCSPVTAAVTTTTPQVFLENTTAVTPMTAISDVETKETTYSSGATTTGVVEVSETNTSTSVTSTQSTATVNLTKTTGITTPVASVAFPKSLVASPSTITLPVASTASTSLVVVTAAASSSMVTTPTSSLGSVPIILSGINGSPPVSQRPENAAQIPVATPQVSPNTVKRAGPRLLLIPVQQGSPTLRPVSNTQLQGHRMVLQPVRSPSGMNLFRHPNGQIVQLLPLHQLRGSNTQPNLQPVMFRNPGSVMGIRLPAPSKPSETPPSSTSSSAFSVMNPVIQAVGSSSAVNVITQAPSLLSSGASFVSQAGTLTLRISPPEPQSFASKTGSETKITYSSGGQPVGTASLIPLQSGSFALLQLPGQKPVPSSILQHVASLQMKRESQNPDQKDETNSIKREQETKKVLQSEGEAVDPEANVIKQNSGAATSEETLNDSLEDRGDHLDEECLPEEGCATVKPSEHSCITGSHTDQDYKDVNEEYGARNRKSSKEKVAVLEVRTISEKASNKTVQNLSKVQHQKLGDVKVEQQKGFDNPEENSSEFPVTFKEESKFELSGSKVMEQQSNLQPEAKEKECGDSLEKDRERWRKHLKGPLTRKCVGASQECKKEADEQLIKETKTCQENSDVFQQEQGISDLLGKSGITEDARVLKTECDSWSRISNPSAFSIVPRRAAKSSRGNGHFQGHLLLPGEQIQPKQEKKGGRSSADFTVLDLEEDDEDDNEKTDDSIDEIVDVVSDYQSEEVDDVEKNNCVEYIEDDEEHVDIETVEELSEEINVAHLKTTAAHTQSFKQPSCTHISADEKAAERSRKAPPIPLKLKPDYWSDKLQKEAEAFAYYRRTHTANERRRRGEMRDLFEKLKITLGLLHSSKVSKSLILTRAFSEIQGLTDQADKLIGQKNLLTRKRNILIRKVSSLSGKTEEVVLKKLEYIYAKQQALEA

SEQ ID NO: 51204 - protein, 61 aa, Homo sapiens [sequence omitted]

SEQ ID NO: 51205 - protein, 478 aa, Homo sapiens
  Payload ID: 10219
  Gene Symbol: MGAT4C
  Gene Name: MGAT4 family, member C
  Uniprot ID: Q9UBM8
  ENSP ID: ENSP00000446647
MFKFHQMKHIFEILDKMRCLRKRSTVSFLGVLVIFLLFMNLYIEDSYVLEGDKQLIRETSTHQLNSERYVHTFKDLSNFSGAINVTYRYLAATPLQRKRYLTIGLSSVKRKKGNYLLETIKSIFEQSSYEELKEISVVVHLADFNSSWRDAMVQDITQKFAHHIIAGRLMVIHAPEEYYPILDGLKRNYNDPEDRVKFRSKQNVDYAFLLNFCANTSDYYVMLEDDVRCSKNFLTAIKKVIASLEGTYWVTLEFSKLGYIGKLYHSHDLPRLAHFLLMFYQEMPCDWLLTHFRGLLAQKNVIRFKPSLFQHMGYYSSYKGTENKLKDDDFEEESFDIPDNPPASLYTNMNVFENYEASKAYSSVDEYFWGKPPSTGDVFVIVFENPIIIKKIKVNTGTEDRQNDILHHGALDVGENVMPSKQRRQCSTYLRLGEFKNGNFEMSGVNQKIPFDIHCMRIYVTKTQKEWLIIRSISIWTS

SEQ ID NO: 51206 - protein, 478 aa, Homo sapiens; identical to SEQ ID NO: 51205
  Payload ID: 10219
  Gene Symbol: MGAT4C
  Gene Name: MGAT4 family, member C
  Uniprot ID: Q9UBM8
  ENSP ID: ENSP00000447253

SEQ ID NO: 51207 - protein, 111 aa, Homo sapiens
  Payload ID: 10219
  Gene Symbol: MGAT4C
  Gene Name: MGAT4 family, member C
  ENSP ID: ENSP00000448093
MFKFHQMKHIFEILDKMRCLRKRSTVSFLGVLVIFLLFMNLYIEDSYVLEGDKQLIRETSTHQLNSERYVHTFKDLSNFSGAINVTYRYLAATPLQRKPHGLLFIIQRDGE

SEQ ID NO: 51208 - protein, 397 aa, Homo sapiens
  Payload ID: 10219
  Gene Symbol: MGAT4C
  Gene Name: MGAT4 family, member C
  ENSP ID: ENSP00000449172
MFKFHQMKHIFEILDKMRCLRKRSTVSFLGVLVIFLLFMNLYIEDSYVLEGDKQLIRETSTHQLNSERYVHTFKDLSNFSGAINVTYRYLAATPLQRKRYLTIGLSSVKRKKGNYLLETIKSIFEQSSYEELKEISVVVHLADFNSSWRDAMVQDITQKFAHHIIAGRLMVIHAPEEYYPILDGLKRNYNDPEDRVKFRSKQNVDYAFLLNFCANTSDYYVMLEDDVRCSKNFLTAIKKVIASLEGTYWVTLEFSKLGYIGKLYHSHDLPRLAHFLLMFYQEMPCDWLLTHFRGLLAQKNVIRFKPSLFQHMGYYSSYKGTENKLKDDDFEEESFDIPDNPPASLYTNMNVFENYEASKAYSSVDEYFWGKPPSTGDVFVIVFENPIIIKKIKVNTG

SEQ ID NO: 51209 - protein, 478 aa, Homo sapiens; identical to SEQ ID NO: 51205
  Payload ID: 10219
  Gene Symbol: MGAT4C
  Gene Name: MGAT4 family, member C
  Uniprot ID: Q9UBM8
  ENSP ID: ENSP00000477650

SEQ ID NO: 51210 - protein, 478 aa, Homo sapiens; identical to SEQ ID NO: 51205
  Payload ID: 10219
  Gene Symbol: MGAT4C
  Gene Name: MGAT4 family, member C
  Uniprot ID: Q9UBM8
  ENSP ID: ENSP00000478300

SEQ ID NO: 51211 - protein, 478 aa, Homo sapiens; identical to SEQ ID NO: 51205
  Payload ID: 10219
  Gene Symbol: MGAT4C
  Gene Name: MGAT4 family, member C
  Uniprot ID: Q9UBM8
  ENSP ID: ENSP00000481096

SEQ ID NO: 51212 - protein, 374 aa, Homo sapiens
  Payload ID: 10220
  Gene Symbol: MGAT4D
  Gene Name: MGAT4 family, member D
  Uniprot ID: A6NG13
  ENSP ID: ENSP00000421185
MRTKQVNLLITLVAVALFSFSCFSIYRITQTNNQLINCRNHILEFKENMLHLRNKTEKNTQEMMKVLNRMKYEITKREILSGNLVAQKADILNKNETVSNTFEDLKFFFPHLRKEGRIYPDVIIGKGKTGVSFALGISTVNRGNYSYLKQTLTSVVSRMTLSQEKDSVVIVLVADSNEDYLHSVVKMITKKFKRQVRSGSLEVISIPAFLYSSMLNAKHLAEASQKLASWRIKQVLDFCILLLYAQPKAKYYLQLEDDIIAKEMYFTKITDFVGNISSNNWFFIEFSMLGFIGKLFRSEDLTHFVRFFLMFYKEKPIDWLLNDIFQVKVCDAGEDLRNCMKRKKQIRIQYKPSLFQHVGIHSSFPRKEQYEKKI

SEQ ID NO: 51213 - protein, 91 aa, Homo sapiens
  Payload ID: 10220
  Gene Symbol: MGAT4D
  Gene Name: MGAT4 family, member D
  ENSP ID: ENSP00000422714
  MOD_RES (1)..(1): Any amino acid
XNISSNNWFFIEFSMLGFIGKLFRSEDLTHFVRFFLMFYKEKPIDWLLNDIFQRNCMKRKKQIRIQYKPSLFQHVGIHSSFPRKEQYEKKI

SEQ ID NO: 51214 - protein, 166 aa, Homo sapiens
  Payload ID: 10220
  Gene Symbol: MGAT4D
  Gene Name: MGAT4 family, member D
  ENSP ID: ENSP00000423767
MRTKQVNLLITLVAVALFSFSCFSIYRITQTNNQLINCRNHILEFKENMLHLRNKTEKNTQEMMKVLNRMKYEITKREILSGNLGKLFRSEDLTHFVRFFLMFYKEKPIDWLLNDIFQVKVCDAGEDLRNCMKRKKQIRIQYKPSLFQHVGIHSSFPRKEQYEKKI

SEQ ID NO: 51215 - protein, 113 aa, Homo sapiens
  Payload ID: 10220
  Gene Symbol: MGAT4D
  Gene Name: MGAT4 family, member D
  ENSP ID: ENSP00000423768
MRTKQVNLLITLVAVALFSFSCFSIYRITQTISFALGISTVNRGNYSYLKQTLTSVVSRMTLSQEKDSVVIVLVADSNEDYLHSVVKMITKKFKRQVRSGSLEVISIPAFLYS

SEQ ID NO: 51216 - protein, 36 aa, Homo sapiens
  Payload ID: 10220
  Gene Symbol: MGAT4D
  Gene Name: MGAT4 family, member D
  ENSP ID: ENSP00000425945
MRTKQVNLLITLVAVALFSFSCFSIYRITQTNSKGK

SEQ ID NO: 51217 - protein, 375 aa, Homo sapiens
  Payload ID: 10220
  Gene Symbol: MGAT4D
  Gene Name: MGAT4 family, member D
  ENSP ID: ENSP00000426225
MRTKQVNLLITLVAVALFSFSCFSIYRITQTNNQLINCRNHILEFKENMLHLRNKTEKNTQEMMKVLNRMKYEITKREILSGNLVAQKADILNKNETVSNTFEDLKFFFPHLRKEGRIYPDVIIGKGKTGVSFALGISTVNRGNYSYLKQTLTSVVSRMTLSQEKDSVVIVLVADSNEDYLHSVVKMITKKFKRQVRSGSLEVISIPAFLYSSMLNAKHLAEASQKLASWRIKQVLDFCILLLYAQPKAKYYLQLEDDIIAKEMYFTKITDFVGNISSNNWFFIEFSMLGFIGKLFRSEDLTHFVRFFLMFYKEKPIDWLLNDIFQVKVCDAGEDLRNCMKRKKQIRIQYKPSLFQHVGIHSSFPRKEQYEKDVY

SEQ ID NO: 51218 - protein, 245 aa, Homo sapiens
  Payload ID: 10221
  Gene Symbol: MICA
  Gene Name: MHC class I polypeptide-related sequence A
  ENSP ID: ENSP00000383176
MGQRDQRLDRERKGPQDDPGSYQGPERRNFLKEDAMKTKTHYHAMHADCLQELRRYLKSGVVLRRTVPPMVNVTRSEASEGNITVTCRASGFYPWNITLSWRQDGVSLSHDTQQWGDVLPDGNGTYQTWVATRICQGEEQRFTCYMEHSGNHSTHPVPSGKVLVLQSHWQTFHVSAVAAAAIFVIIIFYVRCCKKKTSAAEGPELVSLQVLDQHPVGTSDHRDATQLGFQPLMSDLGSTGSTEGA

SEQ ID NO: 51219 - protein, 383 aa, Homo sapiens
  Payload ID: 10221
  Gene Symbol: MICA
  Gene Name: MHC class I polypeptide-related sequence A
  Uniprot ID: Q29983
  ENSP ID: ENSP00000383179
MGLGPVFLLLAGIFPFAPPGAAAEPHSLRYNLTVLSWDGSVQSGFLTEVHLDGQPFLRCDRQKCRAKPQGQWAEDVLGNKTWDRETRDLTGNGKDLRMTLAHIKDQKEGLHSLQEIRVCEIHEDNSTRSSQHFYYDGELFLSQNLETKEWTMPQSSRAQTLAMNVRNFLKEDAMKTKTHYHAMHADCLQELRRYLKSGVVLRRTVPPMVNVTRSEASEGNITVTCRASGFYPWNITLSWRQDGVSLSHDTQQWGDVLPDGNGTYQTWVATRICQGEEQRFTCYMEHSGNHSTHPVPSGKVLVLQSHWQTFHVSAVAAAAIFVIIIFYVRCCKKKTSAAEGPELVSLQVLDQHPVGTSDHRDATQLGFQPLMSDLGSTGSTEGA

SEQ ID NO: 51220 - protein, 332 aa, Homo sapiens
  Payload ID: 10221
  Gene Symbol: MICA
  Gene Name: MHC class I polypeptide-related sequence A
  ENSP ID: ENSP00000394553
MGLGPVFLLLAGIFPFAPPGAAAEPHSLRYNLTVLSWDGSVQSGFLAEVHLDGQPFLRYDRQKCRAKPQGQWAEDVLGNKTWDRETRDLTGNGKDLRMTLAHIKDQKEGLHSLQEIRVCEIHEDNSTRSSQHFYYDGELFLSQNLETEEWTVPQSSRAQTLAMNVRNFLKEDAMKTKTHYHAMHADCLQELRRYLESGVVLRRTVPPMVNVTRSEASEGNITVTCRASSFYPRNIILTWRQDGVSLSHDTQQWGDVLPDGNGTYQTWVATRICRGEEQRFTCYMEHSGNHSTHPVPSGKVLVLQSHWQTFHVSAVAAGCCYFCYYYFLCPLL

SEQ ID NO: 51221 - protein, 342 aa, Homo sapiens
  Payload ID: 10221
  Gene Symbol: MICA
  Gene Name: MHC class I polypeptide-related sequence A
  ENSP ID: ENSP00000395645
MGLGPVFLLLAGIFPFAPPGAAAEPHSLRYNLTVLSWDGSVQSGFLAEVHLDGQPFLRYDRQKCRAKPQGQWAEDVLGNKTWDRETRDLTGNGKDLRMTLAHIKDQKEVPQSSRAQTLAMNVRNFLKEDAMKTKTHYHAMHADCLQELRRYLESSVVLRRRVPPMVNVTRSEASEGNITVTCRASSFYPRNITLTWRQDGVSLSHDTQQWGDVLPDGNGTYQTWVATRICQGEEQRFTCYMEHSGNHSTHPVPSGKVLVLQSHWQTFHVSAVAAAAAAIFVIIIFYVRCCKKKTSAAEGPELVSLQVLDQHPVGTSDHRDATQLGFQPLMSALGSTGSTEGA

SEQ ID NO: 51222 - protein, 289 aa, Homo sapiens
  Payload ID: 10221
  Gene Symbol: MICA
  Gene Name: MHC class I polypeptide-related sequence A
  ENSP ID: ENSP00000395954
MGLGPVFLLLAGIFPFAPPGAAAEPHSLRYNLTVLSWDGSVQSGFLAEVHLDGQPFLRYDRQKCRAKPQGQWAEDVLGNKTWDRETRDLTGNGKDLRMTLAHIKDQKEVPQSSRAQTLAMNVRNFLKEDAMKTKTHYHAMHADCLQELRRYLESGVVLRRTVPPMVNVTRSEASEGNITVTCRASSFYPRNIILTWRQDGVSLSHDTQQWGDVLPDGNGTYQTWVATRICRGEEQRFTCYMEHSGNHSTHPVPSGKVLVLQSHWQTFHVSAVAAGCCYFCYYYFLCPLL

SEQ ID NO: 51223 - protein, 276 aa, Homo sapiens
  Payload ID: 10221
  Gene Symbol: MICA
  Gene Name: MHC class I polypeptide-related sequence A
  ENSP ID: ENSP00000398552
FPFAPPGAAAEPHSLRYNLTVLSWDGSVQSGFLAEVHLDGQPFLRYDRQKCRAKPQGQWAEDVLGNKTWDRETRDLTGNGKDLRMTLAHIKDQKEVPPMVNVTRSEASEGNITVTCRASSFYPRNITLTWRQDGVSLSHDTQQWGDVLPDGNGTYQTWVATRICQGEEQRFTCYMEHSGNHSTHPVPSGKVLVLQSHWQTFHVSAVAAAAAAIFVIIIFYVRCCKKKTSAAEGPELVSLQVLDQHPVGTSDHRDATQLGFQPLMSALGSTGSTEGA

SEQ ID NO: 51224 - protein, 385 aa, Homo sapiens
  Payload ID: 10221
  Gene Symbol: MICA
  Gene Name: MHC class I polypeptide-related sequence A
  Uniprot ID: Q29983
  ENSP ID: ENSP00000402134
MGLGPVFLLLAGIFPFAPPGAAAEPHSLRYNLTVLSWDGSVQSGFLAEVHLDGQPFLRYDRQKCRAKPQGQWAEDVLGNKTWDRETRDLTGNGKDLRMTLAHIKDQKEGLHSLQEIRVCEIHEDNSTRSSQHFYYDGELFLSQNVETEEWTVPQSSRAQTLAMNVRNFLKEDAMKTKTHYHAMHADCLQELRRYLESSVVLRRRVPPMVNVTRSEASEGNITVTCRASSFYPRNITLTWRQDGVSLSHDTQQWGDVLPDGNGTYQTWVATRICQGEEQRFTCYMEHSGNHSTHPVPSGKVLVLQSHWQTFHVSAVAAAAAAIFVIIIFYVRCCKKKTSAAEGPELVSLQVLDQHPVGTSDHRDATQLGFQPLMSALGSTGSTEGA

SEQ ID NO: 51225 - protein, 223 aa, Homo sapiens
  Payload ID: 10221
  Gene Symbol: MICA
  Gene Name: MHC class I polypeptide-related sequence A
  ENSP ID: ENSP00000402410
FPFAPPGAAAEPHSLRYNLTVLSWDGSVQSGFLAEVHLDGQPFLRYDRQKCRAKPQGQWAEDVLGNKTWDRETRDLTGNGKDLRMTLAHIKDQKEVPPMVNVTRSEASEGNITVTCRASSFYPRNIILTWRQDGVSLSHDTQQWGDVLPDGNGTYQTWVATRICRGEEQRFTCYMEHSGNHSTHPVPSGKVLVLQSHWQTFHVSAVAAGCCYFCYYYFLCPLL

SEQ ID NO: 51226 - protein, 274 aa, Homo sapiens
  Payload ID: 10221
  Gene Symbol: MICA
  Gene Name: MHC class I polypeptide-related sequence A
  ENSP ID: ENSP00000404397
FPFAPPGAAAEPHSLRYNLTVLSWDGSVQSGFLTEVHLDGQPFLRCDRQKCRAKPQGQWAEDVLGNKTWDRETRDLTGNGKDLRMTLAHIKDQKEVPPMVNVTRSEASEGNITVTCRASGFYPWNITLSWRQDGVSLSHDTQQWGDVLPDGNGTYQTWVATRICQGEEQRFTCYMEHSGNHSTHPVPSGKVLVLQSHWQTFHVSAVAAAAIFVIIIFYVRCCKKKTSAAEGPELVSLQVLDQHPVGTSDHRDATQLGFQPLMSDLGSTGSTEGA

SEQ ID NO: 51227 - protein, 194 aa, Homo sapiens
  Payload ID: 10221
  Gene Symbol: MICA
  Gene Name: MHC class I polypeptide-related sequence A
  ENSP ID: ENSP00000405177
MGQRDQGLDRERKGPQDDPGSYQGPERRNFLKEDAMKTKTHYHAMHADCLQELRRYLESGVVLRRTVPPMVNVTRSEASEGNITVTCRASSFYPRNIILTWRQDGVSLSHDTQQWGDVLPDGNGTYQTWVATRICRGEEQRFTCYMEHSGNHSTHPVPSGKVLVLQSHWQTFHVSAVAAGCCYFCYYYFLCPLL

SEQ ID NO: 51228 - protein, 194 aa, Homo sapiens; identical to SEQ ID NO: 51227
  Payload ID: 10221
  Gene Symbol: MICA
  Gene Name: MHC class I polypeptide-related sequence A
  ENSP ID: ENSP00000405741

SEQ ID NO: 51229 - protein, 247 aa, Homo sapiens
  Payload ID: 10221
  Gene Symbol: MICA
  Gene Name: MHC class I polypeptide-related sequence A
  ENSP ID: ENSP00000407264
MGQRDQGLDRERKGPQDDPGSYQGPERRNFLKEDAMKTKTHYHAMHADCLQELRRYLESSVVLRRRVPPMVNVTRSEASEGNITVTCRASSFYPRNITLTWRQDGVSLSHDTQQWGDVLPDGNGTYQTWVATRICQGEEQRFTCYMEHSGNHSTHPVPSGKVLVLQSHWQTFHVSAVAAAAAAIFVIIIFYVRCCKKKTSAAEGPELVSLQVLDQHPVGTSDHRDATQLGFQPLMSALGSTGSTEGA

SEQ ID NO: 51230 - protein, 223 aa, Homo sapiens; identical to SEQ ID NO: 51225
  Payload ID: 10221
  Gene Symbol: MICA
  Gene Name: MHC class I polypeptide-related sequence A
  ENSP ID: ENSP00000409422

SEQ ID NO: 51231 - protein, 223 aa, Homo sapiens; identical to SEQ ID NO: 51225
  Payload ID: 10221
  Gene Symbol: MICA
  Gene Name: MHC class I polypeptide-related sequence A
  ENSP ID: ENSP00000412989

SEQ ID NO: 51232 - protein, 289 aa, Homo sapiens; identical to SEQ ID NO: 51222
  Payload ID: 10221
  Gene Symbol: MICA
  Gene Name: MHC class I polypeptide-related sequence A
  ENSP ID: ENSP00000412992

SEQ ID NO: 51233 - protein, 332 aa, Homo sapiens; identical to SEQ ID NO: 51220
  Payload ID: 10221
  Gene Symbol: MICA
  Gene Name: MHC class I polypeptide-related sequence A
  ENSP ID: ENSP00000413079

SEQ ID NO: 51234 - protein, 332 aa, Homo sapiens; identical to SEQ ID NO: 51220
  Payload ID: 10221
  Gene Symbol: MICA
  Gene Name: MHC class I polypeptide-related sequence A
  ENSP ID: ENSP00000416941

SEQ ID NO: 51235 - protein, 212 aa, Homo sapiens
  Payload ID: 10221
  Gene Symbol: MICA
  Gene Name: MHC class I polypeptide-related sequence A
  ENSP ID: ENSP00000433021
MGLGPVFLLLAGIFPFAPPGAAAEPHSLRYNLTVLSWDGSVQSGFLTEVHLDGQPFLRCDRQKCRAKPQGQWAEDVLGNKTWDRETRDLTGNGKDLRMTLAHIKDQKEVLQSSDLGHERQEFLEGRCHEDQDTLSRYACRLPAGTTAISKIRRSPEENSAPHGECHPQRGLRGQHYRDMQGFWLLSLEYHTELASGWGIFEPRHPAVGGCPA

SEQ ID NO: 51236 - protein, 332 aa, Homo sapiens; identical to SEQ ID NO: 51220
  Payload ID: 10221
  Gene Symbol: MICA
  Gene Name: MHC class I polypeptide-related sequence A
  ENSP ID: ENSP00000446655

SEQ ID NO: 51237 - protein, 383 aa, Homo sapiens; identical to SEQ ID NO: 51219
  Payload ID: 10221
  Gene Symbol: MICA
  Gene Name: MHC class I polypeptide-related sequence A
  Uniprot ID: Q29983
  ENSP ID: ENSP00000446963

SEQ ID NO: 51238 - protein, 332 aa, Homo sapiens; identical to SEQ ID NO: 51220
  Payload ID: 10221
  Gene Symbol: MICA
  Gene Name: MHC class I polypeptide-related sequence A
  ENSP ID: ENSP00000447026

SEQ ID NO: 51239 - protein, 235 aa, Homo sapiens
  Payload ID: 10221
  Gene Symbol: MICA
  Gene Name: MHC class I polypeptide-related sequence A
  ENSP ID: ENSP00000480992
MTLAHIKDQKEGLHSLQEIRVCEIHEDNSTRSSQHFYYDGELFLSQNLETEEWTVPQSSRAQTLAMNVRNFLKEDAMKTKTHYHAMHADCLQELRRYLESGVVLRRTVPPMVNVTRSEASEGNITVTCRASSFYPRNIILTWRQDGVSLSHDTQQWGDVLPDGNGTYQTWVATRICRGEEQRFTCYMEHSGNHSTHPVPSGKVLVLQSHWQTFHVSAVAAGCCYFCYYYFLCPLL

SEQ ID NO: 51240 - protein, 235 aa, Homo sapiens; identical to SEQ ID NO: 51239
  Payload ID: 10221
  Gene Symbol: MICA
  Gene Name: MHC class I polypeptide-related sequence A
  ENSP ID: ENSP00000482382

SEQ ID NO: 51241 - protein, 235 aa, Homo sapiens; identical to SEQ ID NO: 51239
  Payload ID: 10221
  Gene Symbol: MICA
  Gene Name: MHC class I polypeptide-related sequence A
  ENSP ID: ENSP00000482763

SEQ ID NO: 51242 - protein, 383 aa, Homo sapiens
  Payload ID: 10222
  Gene Symbol: MICB
  Gene Name: MHC class I polypeptide-related sequence B
  ENSP ID: ENSP00000252229
MGLGRVLLFLAVAFPFAPPAAAAEPHSLRYNLMVLSQDGSVQSGFLAEGHLDGQPFLRYDRQKRRAKPQGQWAENVLGAKTWDTETEDLTENGQDLRRTLTHIKDQKGGLHSLQEIRVCEIHEDSSTRGSRHFYYDGELFLSQNLETQESTVPQSSRAQTLAMNVTNFWKEDAMKTKTHYRAMQADCLQKLQRYLKSGVAIRRTVPPMVNVTCSEVSEGNITVTCRASSFYPRNITLTWRQDGVSLSHNTQQWGDVLPDGNGTYQTWVATRIRQGEEQRFTCYMEHSGNHGTHPVPSGKALVLQSQRTDFPYVSAAMPCFVIIIILCVPCCKKKTSAAEGPELVSLQVLDQHPVGTGDHRDAAQLGFQPLMSATGSTGSTEGT

SEQ ID NO: 51243 - protein, 383 aa, Homo sapiens
  Payload ID: 10222
  Gene Symbol: MICB
  Gene Name: MHC class I polypeptide-related sequence B
  ENSP ID: ENSP00000373006
MGLGRVLLFLAVAFPFAPPAAAAEPHSLRYNLMVLSQDGSVQSGFLAEGHLDGQPFLRYDRQKRRAKPQGQWAEDVLGAKTWDTETEDLTENGQDLRRTLTHIKDQKGGLHSLQEIRVCEIHEDSSTRGSRHFYYDGELFLSQNLETQESTVPQSSRAQTLAMNVTNFWKEDAMKTKTHYRAMQADCLQKLQRYLKSGVAIRRTVPPMVNVICSEVSEGNITVTCRASSFYPRNITLTWRQDGVSLSHNTQQWGDVLPDGNGTYQTWVATRIRQGEEQRFTCYMEHSGNHGTHPVPSGKALVLQSQRTDFPYVSAAMPCFVIIIILCVPCCKKKTSAAEGPELVSLQVLDQHPVGTGDHRDAAQLGFQPLMSATGSTGSTEGT

SEQ ID NO: 51244 - protein, 340 aa, Homo sapiens
  Payload ID: 10222
  Gene Symbol: MICB
  Gene Name: MHC class I polypeptide-related sequence B
  Uniprot ID: Q29980
  ENSP ID: ENSP00000382103
MGLGRVLLFLAVAFPFAPPAAAAEPHSLRYNLMVLSQDGSVQSGFLAEGHLDGQPFLRYDRQKRRAKPQGQWAENVLGAKTWDTETEDLTENGQDLRRTLTHIKDQKGVPQSSRAQTLAMNVTNFWKEDAMKTKTHYRAMQADCLQKLQRYLKSGVAIRRTVPPMVNVTCSEVSEGNITVTCRASSFYPRNITLTWRQDGVSLSHNTQQWGDVLPDGNGTYQTWVATRIRQGEEQRFTCYMEHSGNHGTHPVPSGKALVLQSQRTDFPYVSAAMPCFVIIIILCVPCCKKKTSAAEGPELVSLQVLDQHPVGTGDHRDAAQLGFQPLMSATGSTGSTEGT

SEQ ID NO: 51245 - protein, 340 aa, Homo sapiens
  Payload ID: 10222
  Gene Symbol: MICB
  Gene Name: MHC class I polypeptide-related sequence B
  ENSP ID: ENSP00000383167
MGLGRVLLFLAVAFPFAPPAAAAEPHSLRYNLMVLSQDGSVQSGFLAEGHLDGQPFLRYDRQKRRAKPQGQWAEDVLGAKTWDTETEDLTENGQDLRRTLTHIKDQKGVPQSSRAQTLAMNVTNFWKEDAMKTKTHYRAMQADCLQKLQRYLKSGVAIRRTVPPMVNVTCSEVSEGNITVTCRASSFYPRNITLTWRQDGVSLSHNTQQWGDVLPDGNGTYQTWVATRIRQGEEQRFTCYMEHSGNHGTHPVPSGKALVLQSQRTDFPYVSAAMPCFVIIIILCVPCCKKKTSAAEGPELVSLQVLDQHPVGTGDHRDAAQLGFQPLMSATGSTGSTEGA

SEQ ID NO: 51246 - protein, 340 aa, Homo sapiens; identical to SEQ ID NO: 51244
  Payload ID: 10222
  Gene Symbol: MICB
  Gene Name: MHC class I polypeptide-related sequence B
  ENSP ID: ENSP00000387401

SEQ ID NO: 51247 - protein, 383 aa, Homo sapiens [sequence omitted]

SEQ ID NO: 51248 - protein, 360 aa, Homo sapiens
  Payload ID: 10222
  Gene Symbol: MICB
  Gene Name: MHC class I polypeptide-related sequence B
  ENSP ID: ENSP00000394437
  MOD_RES (1)..(1): Any amino acid
XPHSLRYNLMVLSQDGSVQSGFLAEGHLDGQPFLRYDRQKRRAKPQGQWAEDVLGAKTWDTETEDLTENGQDLRRTLTHIKDQKGGLHSLQEIRVCEIHEDSSTRGSRHFYYDGELFLSQNLETQESTVPQSSRAQTLAMNVTNFWKEDAMKTKTHYRAMQADCLQKLQRYLKSGVAIRRTVPPMVNVTCSEVSEGNITVTCRASSFYPRNITLTWRQDGVSLSHNTQQWGDVLPDGNGTYQTWVATRIRQGEEQRFTCYMEHSGNHGTHPVPSGKALVLQSQRTDFPYVSAAMPCFVIIIILCVPCCKKKTSAAEGPELVSLQVLDQHPVGTGDHRDAAQLGFQPLMSATGSTGSTEGA

SEQ ID NO: 51249 - protein, 340 aa, Homo sapiens
  Payload ID: 10222
  Gene Symbol: MICB
  Gene Name: MHC class I polypeptide-related sequence B
  Uniprot ID: Q29980
  ENSP ID: ENSP00000398212
MGLGRVLLFLAVAFPFAPPAAAAEPHSLRYNLMVLSQDGSVQSGFLAEGHLDGQPFLRYDRQKRRAKPQGQWAEDVLGAETWDTETEDLTENGQDLRRTLTHIKDQKGVPQSSRAQTLAMNVTNFWKEDAMKTKTHYRAMQADCLQKLQRYLKSGVAIRRTVPPMVNVTCSEVSEGNITVTCRASSFYPRNITLTWRQDGVSLSHNTQQWGDVLPDGNGTYQTWVATRIRQGEEQRFTCYMEHSGNHGTHPVPSGKALVLQSQRTDFPYVSAAMPCFVIIIILCVPCCKKKTSAAEGPELVSLQVLDQHPVGTGDHRDAAQLGFQPLMSATGSTGSTEGA

SEQ ID NO: 51250 - protein, 383 aa, Homo sapiens [sequence omitted]

SEQ ID NO: 51251 - protein, 340 aa, Homo sapiens
  Payload ID: 10222
  Gene Symbol: MICB
  Gene Name: MHC class I polypeptide-related sequence B
  ENSP ID: ENSP00000400122
MGLGRVLLFLAVAFPFAPPAAAAEPHSLRYNLMVLSQDGSVQSGFLAEGHLDGQPFLRYDRQKRRAKPQGQWAEDVLGAKTWDTETEDLTENGQDLRRTLTHIKDQKGVPQSSRAQTLAMNVTNFWKEDAMKTKTHYRAMQADCLQKLQRYLKSGVAIRRTVPPMVNVICSEVSEGNITVTCRASSFYPRNITLTWRQDGVSLSHNTQQWGDVLPDGNGTYQTWVATRIRQGEEQRFTCYMEHSGNHGTHPVPSGKALVLQSQRTDFPYVSAAMPCFVIIIILCVPCCKKKTSAAEGPELVSLQVLDQHPVGTGDHRDAAQLGFQPLMSATGSTGSTEGT

SEQ ID NO: 51252 - protein, 383 aa, Homo sapiens
  Payload ID: 10222
  Gene Symbol: MICB
  Gene Name: MHC class I polypeptide-related sequence B
  Uniprot ID: Q29980
  ENSP ID: ENSP00000402484
MGLGRVLLFLAVAFPFAPPAAAAEPHSLRYNLMVLSQDGSVQSGFLAEGHLDGQPFLRYDRQKRRAKPQGQWAEDVLGAETWDTETEDLTENGQDLRRTLTHIKDQKGGLHSLQEIRVCEIHEDSSTRGSRHFYYNGELFLSQNLETQESTVPQSSRAQTLAMNVTNFWKEDAMKTKTHYRAMQADCLQKLQRYLKSGVAIRRTVPPMVNVTCSEVSEGNITVTCRASSFYPRNITLTWRQDGVSLSHNTQQWGDVLPDGNGTYQTWVATRIRQGEEQRFTCYMEHSGNHGTHPVPSGKALVLQSQRTDFPYVSAAMPCFVIIIILCVPCCKKKTSAAEGPELVSLQVLDQHPVGTGDHRDAAQLGFQPLMSATGSTGSTEGA

SEQ ID NO: 51253 - protein, 317 aa, Homo sapiens
  Payload ID: 10222
  Gene Symbol: MICB
  Gene Name: MHC class I polypeptide-related sequence B
  ENSP ID: ENSP00000403513
  MOD_RES (1)..(1): Any amino acid
XPHSLRYNLMVLSQDGSVQSGFLAEGHLDGQPFLRYDRQKRRAKPQGQWAEDVLGAKTWDTETEDLTENGQDLRRTLTHIKDQKGVPQSSRAQTLAMNVTNFWKEDAMKTKTHYRAMQADCLQKLQRYLKSGVAIRRTVPPMVNVTCSEVSEGNITVTCRASSFYPRNITLTWRQDGVSLSHNTQQWGDVLPDGNGTYQTWVATRIRQGEEQRFTCYMEHSGNHGTHPVPSGKALVLQSQRTDFPYVSAAMPCFVIIIILCVPCCKKKTSAAEGPELVSLQVLDQHPVGTGDHRDAAQLGFQPLMSATGSTGSTEGA

SEQ ID NO: 51254 - protein, 383 aa, Homo sapiens
  Payload ID: 10222
  Gene Symbol: MICB
  Gene Name: MHC class I polypeptide-related sequence B
  ENSP ID: ENSP00000407092
MGLGRVLLFLAVAFPFAPPAAAAEPHSLRYNLMVLSQDGSVQSGFLAEGHLDGQPFLRYDRQKRRAKPQGQWAEDVLGAETWDTETEDLTENGQDLRRTLTHIKDQKGGLHSLQEIRVCEMHEDSSTRGSRHFYYNGELFLSQNLETQESTVPQSSRAQTLAMNVTNFWKEDAMKTKTHYRAMQADCLQKLQRYLKSGVAIRRTVPPMVNVTCSEVSEGNITVTCRASSFYPRNITLTWRQDGVSLSHNTQQWGDVLPDGNGTYQTWVATRIRQGEEQRFTCYMEHSGNHGTHPVPSGKALVLQSQRTDFPYVSAAMPCFVIIIILCVPCCKKKTSAAEGPELVSLQVLDQHPVGTGDHRDAAQLGFQPLMSATGSTGSTEGA

SEQ ID NO: 51255 - protein, 383 aa, Homo sapiens; identical to SEQ ID NO: 51242
  Payload ID: 10222
  Gene Symbol: MICB
  Gene Name: MHC class I polypeptide-related sequence B
  ENSP ID: ENSP00000407561

SEQ ID NO: 51256 - protein, 340 aa, Homo sapiens; identical to SEQ ID NO: 51245
  Payload ID: 10222
  Gene Symbol: MICB
  Gene Name: MHC class I polypeptide-related sequence B
  ENSP ID: ENSP00000409347

SEQ ID NO: 51257 - protein, 340 aa, Homo sapiens; identical to SEQ ID NO: 51249
  Payload ID: 10222
  Gene Symbol: MICB
  Gene Name: MHC class I polypeptide-related sequence B
  Uniprot ID: Q29980
  ENSP ID: ENSP00000409414

SEQ ID NO: 51258 - protein, 351 aa, Homo sapiens
  Payload ID: 10222
  Gene Symbol: MICB
  Gene Name: MHC class I polypeptide-related sequence B
  ENSP ID: ENSP00000442345
MVLSQDGSVQSGFLAEGHLDGQPFLRYDRQKRRAKPQGQWAENVLGAKTWDTETEDLTENGQDLRRTLTHIKDQKGGLHSLQEIRVCEIHEDSSTRGSRHFYYDGELFLSQNLETQESTVPQSSRAQTLAMNVTNFWKEDAMKTKTHYRAMQADCLQKLQRYLKSGVAIRRTVPPMVNVTCSEVSEGNITVTCRASSFYPRNITLTWRQDGVSLSHNTQQWGDVLPDGNGTYQTWVATRIRQGEEQRFTCYMEHSGNHGTHPVPSGKALVLQSQRTDFPYVSAAMPCFVIIIILCVPCCKKKTSAAEGPELVSLQVLDQHPVGTGDHRDAAQLGFQPLMSATGSTGSTEGT

SEQ ID NO: 51259 - protein, 351 aa, Homo sapiens; identical to SEQ ID NO: 51258
  Payload ID: 10222
  Gene Symbol: MICB
  Gene Name: MHC class I polypeptide-related sequence B
  ENSP ID: ENSP00000477804

SEQ ID NO: 51260 - protein, 383 aa, Homo sapiens
  Payload ID: 10222
  Gene Symbol: MICB
  Gene Name: MHC class I polypeptide-related sequence B
  ENSP ID: ENSP00000482246
MGLGPVFLLLAGIFPFAPPGAAAEPHSLRYNLMVLSQDGSVQSGFLAEGHLDGQPFLRYDRQKRRAKPQGQWAEDVLGAKTWDTETEDLTENGQDLRRTLTHIKDQKGGLHSLQEIRVCEIHEDSSTRGSRHFYYDGELFLSQNLETQESTVPQSSRAQTLAMNVTNFWKEDAMKTKTHYRAMQADCLQKLQRYLKSGVAIRRTVPPMVNVTCSEVSEGNITVTCRASSFYPRNITLTWRQDGVSLSHNTQQWGDVLPDGNGTYQTWVATRIRQGEEQRFTCYMEHSGNHGTHPVPSGKALVLQSQRTDFPYVSAAMPCFVIIIILCVPCCKKKTSAAEGPELVSLQVLDQHPVGTGDHRDAAQLGFQPLMSATGSTGSTEGA

SEQ ID NO: 51261 - protein, 131 aa, Homo sapiens
  Payload ID: 10223
  Gene Symbol: MIA-RAB4B
  Gene Name: MIA-RAB4B readthrough (NMD candidate)
  ENSP ID: ENSP00000472384
MARSLVCLGVIILLSAFSGPGVRGGPMPKLADRKLCADQECSHPISMAVALQDYMAPDCRFLTIHRGQVVYVFSKLKGRGRLFWGGSVQGDYYGDLAARLGYFPSSIVREDQTLKPGKVDVKTDTSSSNSW

SEQ ID NO: 51262 - protein, 695 aa, Homo sapiens
  Payload ID: 10224
  Gene Symbol: MICALCL
  Gene Name: MICAL C-terminal like
  Uniprot ID: Q6ZW33
  ENSP ID: ENSP00000256186
MSPPKDPSPSLPLPSSSSHSSSPPSSSSTSVSGNAPDGSSPPQMTASEPLSQVSRGHPSPPTPNFRRRAVAQGAPREIPLYLPHHPKPEWAEYCLVSPGEDGLSDPAEMTSDECQPAEAPLGDIGSNHRDPHPIWGKDRSWTGQELSPLAGEDREKGSTGARKEEEGGPVLVKEKLGLKKLVLTQEQKTMLLDWNDSIPESVHLKAGERISQKSAENGRGGRVLKPVRPLLLPRAAGEPLPTQRGAQEKMGTPAEQAQGERNVPPPKSPLRLIANAIRRSLEPLLSNSEGGKKAWAKQESKTLPAQACTRSFSLRKTNSNKDGDQHSPGRNQSSAFSPPDPALRTHSLPNRPSKVFPALRSPPCSKIEDVPTLLEKVSLQENFPDASKPPKKRISLFSSLRLKDKSFESFLQESRQRKDIRDLFGSPKRKVLPEDSAQALEKLLQPFKSTSLRQAAPPPPPPPPPPPPPPTAGGADSKNFPLRAQVTEASSSASSTSSSSADEEFDPQLSLQLKEKKTLRRRKKLEKAMKQLVKQEELKRLYKAQAIQRQLEEVEERQRASEIQGVRLEKALRGEADSGTQDEAQLLQEWFKLVLEKNKLMRYESELLIMAQELELEDHQSRLEQKLREKMLKEESQKDEKDLNEEQEVFTELMQVIEQRDKLVDSLEEQRIREKAEDQHFESFVFSRGCQLSRT

SEQ ID NO: 51263 - protein, 29 aa, Homo sapiens
  Payload ID: 10224
  Gene Symbol: MICALCL
  Gene Name: MICAL C-terminal like
  ENSP ID: ENSP00000432324
MSPPKDPSPSLPLPSSSSHSSSPPSSSST

SEQ ID NO: 51264 - protein, 863 aa, Homo sapiens
  Payload ID: 10225
  Gene Symbol: MICALL1
  Gene Name: MICAL-like 1
  Uniprot ID: Q8N3F8
  ENSP ID: ENSP00000215957
MAGPRGALLAWCRRQCEGYRGVEIRDLSSSFRDGLAFCAILHRHRPDLLDFDSLSKDNVFENNRLAFEVAEKELGIPALLDPNDMVSMSVPDCLSIMTYVSQYYNHFCSPGQAGVSPPRKGLAPCSPPSVAPTPVEPEDVAQGEELSSGSLSEQGTGQTPSSTCAACQQHVHLVQRYLADGRLYHRHCFRCRRCSSTLLPGAYENGPEEGTFVCAEHCARLGPGTRSGTRPGPFSQPKQQHQQQLAEDAKDVPGGGPSSSAPAGAEADGPKASPEARPQIPTKPRVPGKLQELASPPAGRPTPAPRKASESTTPAPPTPRPRSSLQQENLVEQAGSSSLVNGRLHELPVPKPRGTPKPSEGTPAPRKDPPWITLVQAEPKKKPAPLPPSSSPGPPSQDSRQVENGGTEEVAQPSPTASLESKPYNPFEEEEEDKEEEAPAAPSLATSPALGHPESTPKSLHPWYGITPTSSPKTKKRPAPRAPSASPLALHASRLSHSEPPSATPSPALSVESLSSESASQTAGAELLEPPAVPKSSSEPAVHAPGTPGNPVSLSTNSSLASSGELVEPRVEQMPQASPGLAPRTRGSSGPQPAKPCSGATPTPLLLVGDRSPVPSPGSSSPQLQVKSSCKENPFNRKPSPAASPATKKATKGSKPVRPPAPGHGFPLIKRKVQADQYIPEEDIHGEMDTIERRLDALEHRGVLLEEKLRGGLNEGREDDMLVDWFKLIHEKHLLVRRESELIYVFKQQNLEQRQADVEYELRCLLNKPEKDWTEEDRAREKVLMQELVTLIEQRNAIINCLDEDRQREEEEDKMLEAMIKKKEFQREAEPEGKKKGKFKTMKMLKLLGNKRDAKSKSPRDKS

SEQ ID NO: 51265 - protein, 210 aa, Homo sapiens
  Payload ID: 10225
  Gene Symbol: MICALL1
  Gene Name: MICAL-like 1
  ENSP ID: ENSP00000404543
MVSMSVPDCLSIMTYVSQYYNHFCSPGQAGVSPPRKGLAPCSPPSVAPTPVEPEDVAQGEELSSGSLSEQGTGQTPSSTCAACQQHVHLVQRYLADGRLYHRHCFRCRRCSSTLLPGAYENGPEEGTFVCAEHCARLGPGTRSGTRPGPFSQPKQQHQQQLAEDAKDVPGGGPSSSAPAGAEADGPKASPEARPQIPTKPRVPGKLQELA

SEQ ID NO: 51266 - protein, 370 aa, Homo sapiens
  Payload ID: 10225
  Gene Symbol: MICALL1
  Gene Name: MICAL-like 1
  ENSP ID: ENSP00000406053
  MOD_RES (1)..(1): Any amino acid
XYNPFEEEEEDKEEEAPAAPSLATSPALGHPESTPKSLHPWYGITPTSSPKTKKRPAPRAPSASPLALHASRLSHSEPPSATPSPALSVESLSSESASQTAGAELLEPPAVPKSSSEPAVHAPGTPGNPVSLSTNSSLASSGELVEPRVEQMPQASPGLAPRTRGSSGPQPAKPCSGATPTPLLLVGDRSPVPSPGSSSPQLQSSCKENPFNRKPSPAASPATKKATKGSKPVRPPAPGHGFPLIKRKVQADQYIPEEDIHGEMDTIERRLDALEHRGVLLEEKLRGGLNEGREDDMLVDWFKLIHEKHLLVRRESELIYVFKQQNLEQRQADVEYELRCLLNKPEKDWTEEDRAREKVLMQELVTLIEQ

SEQ ID NO: 51267 - protein, 186 aa, Homo sapiens
  Payload ID: 10225
  Gene Symbol: MICALL1
  Gene Name: MICAL-like 1
  ENSP ID: ENSP00000416766
EMDTIERRLDALEHRGVLLEEKLRGGLNEGREDDMLVDWFKLIHEKHLLVRRESELIYVFKQQNLEQRQADVEYELRCLLNKPEKDWTEEDRAREKVLMQELVTLIEQRNAIINCLDEDRQREEEEDKMLEAMIKKKGEALAGDEAEFQREAEPEGKKKGKFKTMKMLKLLGNKRDAKSKSPRDKS

SEQ ID NO: 51268 - protein, 904 aa, Homo sapiens
  Payload ID: 10226
  Gene Symbol: MICALL2
  Gene Name: MICAL-like 2
  Uniprot ID: Q8IY33
  ENSP ID: ENSP00000297508
MAAIRALQQWCRQQCEGYRDVNICNMTTSFRDGLAFCAILHRHRPDLINFSALKKENIYENNKLAFRVAEEHLGIPALLDAEDMVALKVPDRLSILTYVSQYYNYFHGRSPIGGMAGVKRASEDSEEEPSGKKAPVQAAKLPSPAPARKPPLSPAQTNPVVQRRNEGAGGPPPKTDQALAGSLVSSTCGVCGKHVHLVQRHLADGRLYHRSCFRCKQCSCTLHSGAYKATGEPGTFVCTSHLPAAASASPKLTGLVPRQPGAMGVDSRTSCSPQKAQEANKARPSAWEPAAGNSPARASVPAAPNPAATSATSVHVRSPARPSESRLAPTPTEGKVRPRVTNSSPMGWSSAAPCTAAAASHPAVPPSAPDPRPATPQGGGAPRVAAPQTTLSSSSTSAATVDPPAWTPSASRTQQARNKFFQTSAVPPGTSLSGRGPTPSLVLSKDSSKEQARNFLKQALSALEEAGAPAPGRPSPATAAVPSSQPKTEAPQASPLAKPLQSSSPRVLGLPSRMEPPAPLSTSSTSQASALPPAGRRNLAESSGVGRVGAGSRPKPEAPMAKGKSTTLTQDMSTSLQEGQEDGPAGWRANLKPVDRRSPAERTLKPKEPRALAEPRAGEAPRKVSGSFAGSVHITLTPVRPDRTPRPASPGPSLPARSPSPPRRRRLAVPASLDVCDNWLRPEPPGQEARVQSWKEEEKKPHLQGKPGRPLSPANVPALPGETVTSPVRLHPDYLSPEEIQRQLQDIERRLDALELRGVELEKRLRAAEGDDAEDSLMVDWFWLIHEKQLLLRQESELMYKSKAQRLEEQQLDIEGELRRLMAKPEALKSLQERRREQELLEQYVSTVNDRSDIVDSLDEDRLREQEEDQMLRDMIEKLGLQRKKSKFRLSKIWSPKSKSSPSQ

SEQ ID NO: 51269 - protein, 680 aa, Homo sapiens
  Payload ID: 10226
  Gene Symbol: MICALL2
  Gene Name: MICAL-like 2
  Uniprot ID: Q8IY33
  ENSP ID: ENSP00000405415
MFLSSRNFSALKKENIYENNKLAFRVAEEHLGIPALLDAEDMVALKVPDRLSILTYVSQYYNYFHGRSPIGGMAGVKRASEDSEEEPSGKKAPVQAAKLPSPAPARKPPLSPAQTNPVVQRRNEGAGGPPPKTDQALAGSLVSSTCGVCGKHVHLVQRHLADGRLYHRSCFRCKQCSCTLHSGAYKATGEPGTFVCTSHLPAAASASPKLTGLVPRQPGAMGVDSRTSCSPQKAQEANKARPSAWEPAAGNSPARASVPAAPNPAATSATSVHVRSPARPSESRLAPTPTEGKVRPRVTNSSPMGWSSAAPCTAAAASHPAVPPSAPDPRPATPQGGGAPRVAAPQTTLSSSSTSAATVDPPAWTPSASRTQQARNKFFQTSAVPPGTSLSGRGPTPSLVLSKDSSKEQARNFLKQALSALEEAGAPAPGRPSPATAAVPSSQPKTEAPQASPLAKPLQSSSPRVLGLPSRMEPPAPLSTSSTSQASALPPAGRRNLAESSGVGRVGAGSRPKPEAPMAKGKSTTLTQDMSTSLQEGQEDGPAGWRANLKPVDRRSPAERTLKPKEPRALAEPRAGEAPRKVSGSFAGSVHITLTPVRPDRTPRPASPGPSLPGPPPHPAAGDWPSLPASTFVTTGFGRSPLARKPECRAGRRRRRNLTFRANQGDPCPRPMSLLCLARR

SEQ ID NO: 51270 - protein, 835 aa, Homo sapiens
  Payload ID: 10227
  Gene Symbol: MCPH1
  Gene Name: microcephalin 1
  ENSP ID: ENSP00000342924
MAAPILKDVVAYVEVWSSNGTENYSKTFTTQLVDMGAKVSKTFNKQVTHVIFKDGYQSTWDKAQKRGVKLVSVLWVEKCRTAGAHIDESLFPAANMNEHLSSLIKKKRKCMQPKDFNFKTPENDKRFQKKFEKMAKELQRQKTNLDDDVPILLFESNGSLIYTPTIEINSRHHSAMEKRLQEMKEKRENLSPTSSQMIQQSHDNPSNSLCEAPLNISRDTLCSDEYFAGGLHSSFDDLCGNSGCGNQERKLEGSINDIKSDVCISSLVLKANNIHSSPSFTHLDKSSPQKFLSNLSKEEINLQRNIAGKVVTPDQKQAAGMSQETFEEKYRLSPTLSSTKGHLLIHSRPRSSSVKRKRVSHGSHSPPKEKCKRKRSTRRSIMPRLQLCRSEDRLQHVAGPALEALSCGESSYDDYFSPDNLKERYSENLPPESQLPSSPAQLSCRSLSKKERTSIFEMSDFSCVGKKTRTVDITNFTAKTISSPRKTGNGEGRATSSCVTSAPEEALRCCRQAGKEDACPEGNGFSYTIEDPALPKGHDDDLTPLEGSLEEMKEAVGLKSTQNKGTTSKISNSSEGEAQSEHEPCFIVDCNMETSTEEKENLPGGYSGSVKNRPTRHDVLDDSCDGFKDLIKPHEELKKSGRGKKPTRTLVMTSMPSEKQNVVIQVVDKLKGFSIAPDVCETTTHVLSGKPLRTLNVLLGIARGCWVLSYDWVLWSLELGHWISEEPFELSHHFPAAPLCRSECHLSAGPYRGTLFADQPAMFVSPASSPPVAKLCELVHLCGGRVSQVPRQASIVIGPYSGKKKATVKYLSEKWVLDSITQHKVCAPENYLLSQ

SEQ ID NO: 51271 - protein, 562 aa, Homo sapiens
  Payload ID: 10227
  Gene Symbol: MCPH1
  Gene Name: microcephalin 1
  Uniprot ID: Q8NEM0
  ENSP ID: ENSP00000430768
MAAPILKDVVAYVEVWSSNGTENYSKTFTTQLVDMGAKVSKTFNKQVTHVIFKDGYQSTWDKAQKRGVKLVSVLWVEKCRTAGAHIDESLFPAANMNEHLSSLIKKKRKCMQPKDFNFKTPENDKRFQKKFEKMAKELQRQKTNLASQMIQQSHDNPSNSLCEAPLNISRDTLCSDEYFAGGLHSSFDDLCGNSGCGNQERKLEGSINDIKSDVCISSLVLKANNIHSSPSFTHLDKSSPQKFLSNLSKEEINLQRNIAGKVVTPDQKQAAGMSQETFEEKYRLSPTLSSTKGHLLIHSRPRSSSVKRKRVSHGSHSPPKEKCKRKRSTRRSIMPRLQLCRSEDRLQHVAGPALEALSCGESSYDDYFSPDNLKERYSENLPPESQLPSSPAQLSCRSLSKKERTSIFEMSDFSCVGKKTRTVDITNFTAKTISSPRKTGNGEGRATSSCVTSAPEEALRCCRQAGKEDACPEGNGFSYTIEDPALPKGHDDDLTPLEGSLEEMKEAVGLKSTQNKGTTSKISNSSEGEAQSEHEPCFIVDCNMETSTEEKENLPGGYSGSM

SEQ ID NO: 51272 - protein, 610 aa, Homo sapiens
  Payload ID: 10227
  Gene Symbol: MCPH1
  Gene Name: microcephalin 1
  Uniprot ID: Q8NEM0
  ENSP ID: ENSP00000430962
MAAPILKDVVAYVEVWSSNGTENYSKTFTTQLVDMGAKVSKTFNKQVTHVIFKDGYQSTWDKAQKRGVKLVSVLWVEKCRTAGAHIDESLFPAANMNEHLSSLIKKKRKCMQPKDFNFKTPENDKRFQKKFEKMAKELQRQKTNLDDDVPILLFESNGSLIYTPTIEINSRHHSAMEKRLQEMKEKRENLSPTSSQMIQQSHDNPSNSLCEAPLNISRDTLCSDEYFAGGLHSSFDDLCGNSGCGNQERKLEGSINDIKSDVCISSLVLKANNIHSSPSFTHLDKSSPQKFLSNLSKEEINLQRNIAGKVVTPDQKQAAGMSQETFEEKYRLSPTLSSTKGHLLIHSRPRSSSVKRKRVSHGSHSPPKEKCKRKRSTRRSIMPRLQLCRSEDRLQHVAGPALEALSCGESSYDDYFSPDNLKERYSENLPPESQLPSSPAQLSCRSLSKKERTSIFEMSDFSCVGKKTRTVDITNFTAKTISSPRKTGNGEGRATSSCVTSAPEEALRCCRQAGKEDACPEGNGFSYTIEDPALPKGHDDDLTPLEGSLEEMKEAVGLKSTQNKGTTSKISNSSEGEAQSEHEPCFIVDCNMETSTEEKENLPGGYSGSM

SEQ ID NO: 51273 - protein, 173 aa, Homo sapiens
  Payload ID: 10228
  Gene Symbol: MFAP5
  Gene Name: microfibrillar associated protein 5
  Uniprot ID: Q13361
  ENSP ID: ENSP00000352455
MSLLGPKVLLFLAAFIITSDWIPLGVNSQRGDDVTQATPETFTEDPNLVNDPATDETVLAVLADIAPSTDDLASLSEKNTTAECWDEKFTCTRLYSVHRPVKQCIHQLCFTSLRRMYIVNKEICSRLVCKEHEAMKDELCRQMAGLPPRRLRRSNYFRLPPCENVDLQRPNGL

SEQ ID NO: 51274 - protein, 163 aa, Homo sapiens
  Payload ID: 10228
  Gene Symbol: MFAP5
  Gene Name: microfibrillar associated protein 5
  Uniprot ID: Q13361
  ENSP ID: ENSP00000379798
MSLLGPKVLLFLAAFIITSDWIPLGVNSQRGDDVTQATPETFTEDPNLVNDPATDETVLAVLADIAPSTDDLECWDEKFTCTRLYSVHRPVKQCIHQLCFTSLRRMYIVNKEICSRLVCKEHEAMKDELCRQMAGLPPRRLRRSNYFRLPPCENVDLQRPNGL

SEQ ID NO: 51275 - protein, 148 aa, Homo sapiens
  Payload ID: 10228
  Gene Symbol: MFAP5
  Gene Name: microfibrillar associated protein 5
  ENSP ID: ENSP00000411997
MSLLGPKVLLFLAAFIITSDWIPLGVNSQRGDDVTQATPETFTEDPNLVNDPATDETECWDEKFTCTRLYSVHRPVKQCIHQLCFTSLRRMYIVNKEICSRLVCKEHEAMKDELCRQMAGLPPRRLRRSNYFRLPPCENVDLQRPNGL

SEQ ID NO: 51276 - protein, 109 aa, Homo sapiens
  Payload ID: 10228
  Gene Symbol: MFAP5
  Gene Name: microfibrillar associated protein 5
  ENSP ID: ENSP00000438525
MSLLGPKVLLFLAAFIITSDWIPLGVNSQRGDDVTQATPETFTEDPNLVNDPATDETVLAVLADIAPSTDDLDELCRQMAGLPPRRLRRSNYFRLPPCENVDLQRPNGL

SEQ ID NO: 51277 - protein, 138 aa, Homo sapiens
  Payload ID: 10228
  Gene Symbol: MFAP5
  Gene Name: microfibrillar associated protein 5
  ENSP ID: ENSP00000439289
MSLLGPKVLLFLAAFIITSDWIPLGVNSQRGDDVTQATPETFTEDPNLVNDPATDETVLAVLADIAPSTDDLASLSEKNTTAECWDEKFTCTRLYSVHRPVKQCIHQLCFTSLRRMYIVNKEICSRLVCKEHEAMKDP

SEQ ID NO: 51278 - protein, 163 aa, Homo sapiens; identical to SEQ ID NO: 51274
  Payload ID: 10228
  Gene Symbol: MFAP5
  Gene Name: microfibrillar associated protein 5
  Uniprot ID: Q13361
  ENSP ID: ENSP00000440496

SEQ ID NO: 51279 - protein, 163 aa, Homo sapiens
  Payload ID: 10228
  Gene Symbol: MFAP5
  Gene Name: microfibrillar associated protein 5
  ENSP ID: ENSP00000441185
  MOD_RES (1)..(1): Any amino acid
XLAAFIITSDWIPLGVNSQRGDDVTQATPETFTEDPNLVNDPATDETVLAVLADIAPSTDDLASLSEKNTTAECWDEKFTCTRLYSVHRPVKQCIHQLCFTSLRRMYIVNKEICSRLVCKEHEAMKDELCRQMAGLPPRRLRRSNYFRLPPCENVDLQRPNGL

SEQ ID NO: 51280 - protein, 151 aa, Homo sapiens
  Payload ID: 10228
  Gene Symbol: MFAP5
  Gene Name: microfibrillar associated protein 5
  ENSP ID: ENSP00000441492
MSLLGPKVLLFLAAFIITSDDVTQATPETFTEDPNLVNDPATDETVLAVLADIAPSTDDLECWDEKFTCTRLYSVHRPVKQCIHQLCFTSLRRMYIVNKEICSRLVCKEHEAMKDELCRQMAGLPPRRLRRSNYFRLPPCENVDLQRPNGL

SEQ ID NO: 51281 - protein, 128 aa, Homo sapiens
  Payload ID: 10228
  Gene Symbol: MFAP5
  Gene Name: microfibrillar associated protein 5
  ENSP ID: ENSP00000443839
MSLLGPKVLLFLAAFIITSDWIPLGVNSQRGDDVTQATPETFTEDPNLVNDPATDETVLAVLADIAPSTDDLECWDEKFTCTRLYSVHRPVKQCIHQLCFTSLRRMYIVNKEICSRLVCKEHEAMKDP

SEQ ID NO: 51282 - protein, 79 aa, Homo sapiens
  Payload ID: 10228
  Gene Symbol: MFAP5
  Gene Name: microfibrillar associated protein 5
  ENSP ID: ENSP00000444531
YSVHRPVKQCIHQLCFTSLRRMYIVNKEICSRLVCKEHEAMKDELCRQMAGLPPRRLRRSNYFRLPPCENVDLQRPNGL

SEQ ID NO: 51283 - protein, 91 aa, Homo sapiens
  Payload ID: 10228
  Gene Symbol: MFAP5
  Gene Name: microfibrillar associated protein 5
  ENSP ID: ENSP00000445799
MSLLGPKVLLFLAAFIITSDWIPLGVNSQRGDDVTQATPETFTEDPNLVNDPATDETVLAVLADIAPSTDDLASLSEKNTTAECWDEKFTC

SEQ ID NO: 51284 - protein, 439 aa, Homo sapiens
  Payload ID: 10229
  Gene Symbol: MFAP1
  Gene Name: microfibrillar-associated protein 1
  Uniprot ID: P55081
  ENSP ID: ENSP00000267812
MSVPSALMKQPPIQSTAGAVPVRNEKGEISMEKVKVKRYVSGKRPDYAPMESSDEEDEEFQFIKKAKEQEAEPEEQEEDSSSDPRLRRLQNRISEDVEERLARHRKIVEPEVVGESDSEVEGDAWRMEREDSSEEEEEEIDDEEIERRRGMMRQRAQERKNEEMEVMEVEDEGRSGEESESESEYEEYTDSEDEMEPRLKPVFIRKKDRVTVQEREAEALKQKELEQEAKRMAEERRKYTLKIVEEETKKELEENKRSLAALDALNTDDENDEEEYEAWKVRELKRIKRDREDREALEKEKAEIERMRNLTEEERRAELRANGKVITNKAVKGKYKFLQKYYHRGAFFMDEDEEVYKRDFSAPTLEDHFNKTILPKVMQVKNFGRSGRTKYTHLVDQDTTSFDSAWGQESAQNTKFFKQKAAGVRDVFERPSAKKRKTT

SEQ ID NO: 51285 - protein, 182 aa, Homo sapiens
  Payload ID: 10230
  Gene Symbol: MFAP2
  Gene Name: microfibrillar-associated protein 2
  Uniprot ID: P55001
  ENSP ID: ENSP00000364684
MRAAYLFLLFLPGLLAQGQYDLDPLPPFPDHVQYTHYSDQIDNPDYYDYQEVTPRPSEEQFQFQSQQQVQQEVIPAPTPEPGNAELEPTEPGPLDCREEQYPCTRLYSIHRPCKQCLNEVCFYSLRRVYVINKEICVRTVCAHEELLRADLCRDKFSKCGVMASSGLCQSVAASCARSCGSC

SEQ ID NO: 51286 - protein, 183 aa, Homo sapiens
  Payload ID: 10230
  Gene Symbol: MFAP2
  Gene Name: microfibrillar-associated protein 2
  Uniprot ID: P55001
  ENSP ID: ENSP00000364685
MRAAYLFLLFLPAGLLAQGQYDLDPLPPFPDHVQYTHYSDQIDNPDYYDYQEVTPRPSEEQFQFQSQQQVQQEVIPAPTPEPGNAELEPTEPGPLDCREEQYPCTRLYSIHRPCKQCLNEVCFYSLRRVYVINKEICVRTVCAHEELLRADLCRDKFSKCGVMASSGLCQSVAASCARSCGSC

SEQ ID NO: 51287 - protein, 362 aa, Homo sapiens
  Payload ID: 10231
  Gene Symbol: MFAP3
  Gene Name: microfibrillar-associated protein 3
  Uniprot ID: P55082
  ENSP ID: ENSP00000322956
MKLHCCLFTLVASIIVPAAFVLEDVDFDQMVSLEANRSSYNASFPSSFELSASSHSDDDVIIAKEGTSVSIECLLTASHYEDVHWHNSKGQQLDGRSRGGKWLVSDNFLNITNVAFDDRGLYTCFVTSPIRASYSVTLRVIFTSGDMSVYYMIVCLIAFTITLILNVTRLCMMSSHLRKTEKAINEFFRTEGAEKLQKAFEIAKRIPIITSAKTLELAKVTQFKTMEFARYIEELARSVPLPPLILNCRAFVEEMFEAVRVDDPDDLGERIKERPALNAQGGIYVINPEMGRSNSPGGDSDDGSLNEQGQEIAVQVSVHLQSETKSIDTESQGSSHFSPPDDIGSAESNCNYKDGAYENCQL

SEQ ID NO: 51288 - protein, 216 aa, Homo sapiens
  Payload ID: 10231
  Gene Symbol: MFAP3
  Gene Name: microfibrillar-associated protein 3
  Uniprot ID: P55082
  ENSP ID: ENSP00000414219
MSVYYMIVCLIAFTITLILNVTRLCMMSSHLRKTEKAINEFFRTEGAEKLQKAFEIAKRIPIITSAKTLELAKVTQFKTMEFARYIEELARSVPLPPLILNCRAFVEEMFEAVRVDDPDDLGERIKERPALNAQGGIYVINPEMGRSNSPGGDSDDGSLNEQGQEIAVQVSVHLQSETKSIDTESQGSSHFSPPDDIGSAESNCNYKDGAYENCQL

SEQ ID NO: 51289 - protein, 16 aa, Homo sapiens
  Payload ID: 10231
  Gene Symbol: MFAP3
  Gene Name: microfibrillar-associated protein 3
  ENSP ID: ENSP00000430007
MKLHCCLFTLVASIIV

SEQ ID NO: 51290 - protein, 109 aa, Homo sapiens
  Payload ID: 10231
  Gene Symbol: MFAP3
  Gene Name: microfibrillar-associated protein 3
  ENSP ID: ENSP00000430602
MKLHCCLFTLVASIIVPAAFVLEDVDFDQMVSLEANRSSYNASFPSSFELSASSHSDDDVIIAKEGTSVSIECLLTASHYEDVHWHNSKGQQLDGRSRGGKWLVSDNFL

SEQ ID NO: 51291 - protein, 123 aa, Homo sapiens
  Payload ID: 10231
  Gene Symbol: MFAP3
  Gene Name: microfibrillar-associated protein 3
  ENSP ID: ENSP00000430852
MKLHCCLFTLVASIIVPAAFVLEDVDFDQMVSLEANRSSYNASFPSSFELSASSHSDDDVIIAKEGTSVSIECLLTASHYEDVHWHNSKGQQLDGRSRGGKWLVSDNFLNITNVAFDDRGLYT

SEQ ID NO: 51292 - protein, 409 aa, Homo sapiens
  Payload ID: 10232
  Gene Symbol: MFAP3L
  Gene Name: microfibrillar-associated protein 3-like
  Uniprot ID: O75121
  ENSP ID: ENSP00000354583
MDRLKSHLTVCFLPSVPFLILVSTLATAKSVTNSTLNGTNVVLGSVPVIIARTDHIIVKEGNSALINCSVYGIPDPQFKWYNSIGKLLKEEEDEKERGGGKWQMHDSGLLNITKVSFSDRGKYTCVASNIYGTVNNTVTLRVIFTSGDMGVYYMVVCLVAFTIVMVLNITRLCMMSSHLKKTEKAINEFFRTEGAEKLQKAFEIAKRIPIITSAKTLELAKVTQFKTMEFARYIEELARSVPLPPLIMNCRTIMEEIMEVVGLEEQGQNFVRHTPEGQEAADRDEVYTIPNSLKRSDSPAADSDASSLHEQPQQIAIKVSVHPQSKKEHADDQEGGQFEVKDVEETELSAEHSPETAEPSTDVTSTELTSEEPTPVEVPDKVLPPAYLEATEPAVTHDKNTCIIYESHV

SEQ ID NO: 51293 - protein, 102 aa, Homo sapiens
  Payload ID: 10232
  Gene Symbol: MFAP3L
  Gene Name: microfibrillar-associated protein 3-like
  Uniprot ID: O75121
  ENSP ID: ENSP00000377305
MDRLKSHLTVCFLPSVPFLILVSTLATAKSVTNSTLNGTNVVLGSVPVIIARTDHIIVKEGNSALINCSVYGIPDPQFKWYNSIGKLLKEEEDEKERGGGRL

SEQ ID NO: 51294 - protein, 306 aa, Homo sapiens
  Payload ID: 10232
  Gene Symbol: MFAP3L
  Gene Name: microfibrillar-associated protein 3-like
  Uniprot ID: O75121
  ENSP ID: ENSP00000377307
MHDSGLLNITKVSFSDRGKYTCVASNIYGTVNNTVTLRVIFTSGDMGVYYMVVCLVAFTIVMVLNITRLCMMSSHLKKTEKAINEFFRTEGAEKLQKAFEIAKRIPIITSAKTLELAKVTQFKTMEFARYIEELARSVPLPPLIMNCRTIMEEIMEVVGLEEQGQNFVRHTPEGQEAADRDEVYTIPNSLKRSDSPAADSDASSLHEQPQQIAIKVSVHPQSKKEHADDQEGGQFEVKDVEETELSAEHSPETAEPSTDVTSTELTSEEPTPVEVPDKVLPPAYLEATEPAVTHDKNTCIIYESHV

SEQ ID NO: 51295 - protein, 102 aa, Homo sapiens; identical to SEQ ID NO: 51293
  Payload ID: 10232
  Gene Symbol: MFAP3L
  Gene Name: microfibrillar-associated protein 3-like
  Uniprot ID: O75121
  ENSP ID: ENSP00000422571

SEQ ID NO: 51296 - protein, 156 aa, Homo sapiens
  Payload ID: 10232
  Gene Symbol: MFAP3L
  Gene Name: microfibrillar-associated protein 3-like
  ENSP ID: ENSP00000422791
MHDSGLLNITKVSFSDRGKYTCVASNIYGTVNNTVTLRVIFTSGDMGVYYMVVCLVAFTIVMVLNITRLCMMSSHLKKTEKAINEFFRTEGAEKLQKAFEIAKRIPIITSAKTLELAKVTQFKTMEFARYIEELARSVPLPPLIMNCRTIMEEIME

SEQ ID NO: 51297 - protein, 73 aa, Homo sapiens
  Payload ID: 10232
  Gene Symbol: MFAP3L
  Gene Name: microfibrillar-associated protein 3-like
  ENSP ID: ENSP00000423549
MDRLKSHLTVCFLPSVPFLILVSTLATAKSVTNSTLNGTNVVLGSVPVIIARTDHIIVKEGNSALINCSVYGI

SEQ ID NO: 51298 - protein, 63 aa, Homo sapiens
  Payload ID: 10232
  Gene Symbol: MFAP3L
  Gene Name: microfibrillar-associated protein 3-like
  ENSP ID: ENSP00000423722
MHDSGLLNITKVSFSDRGKYTCVASNIYGTVNNTVTLRVIFTSGDMGVYYMVVCLVAFTIVMV

SEQ ID NO: 51299 - protein, 44 aa, Homo sapiens
  Payload ID: 10232
  Gene Symbol: MFAP3L
  Gene Name: microfibrillar-associated protein 3-like
  ENSP ID: ENSP00000423802
MHDSGLLNITKVSFSDRGKYTCVASNIYGTVNNTVTLRVIFTSG

SEQ ID NO: 51300 - protein, 98 aa, Homo sapiens
  Payload ID: 10232
  Gene Symbol: MFAP3L
  Gene Name: microfibrillar-associated protein 3-like
  ENSP ID: ENSP00000425303
MDRLKSHLTVCFLPSVPFLILVSTLATAKSVTNSTLNGTNVVLGSVPVIIARTDHIIVKEGNSALINCSVYGIPDPQFKWYNSIGKLLKEEEDEKERG

SEQ ID NO: 51301 - protein, 90 aa, Homo sapiens
  Payload ID: 10232
  Gene Symbol: MFAP3L
  Gene Name: microfibrillar-associated protein 3-like
  ENSP ID: ENSP00000426247
MDRLKSHLTVCFLPSVPFLILVSTLATAKSVTNSTLNGTNVVLGSVPVIIARTDHIIVKEGNSALINCSVYGIPDPQFKWYNSIGKLLKE

SEQ ID NO: 51302 - protein, 255 aa, Homo sapiens
  Payload ID: 10233
  Gene Symbol: MFAP4
  Gene Name: microfibrillar-associated protein 4
  Uniprot ID: P55083
  ENSP ID: ENSP00000299610
MKALLALPLLLLLSTPPCAPQVSGIRGDALERFCLQQPLDCDDIYAQGYQSDGVYLIYPSGPSVPVPVFCDMTTEGGKWTVFQKRFNGSVSFFRGWNDYKLGFGRADGEYWLGLQNMHLLTLKQKYELRVDLEDFENNTAYAKYADFSISPNAVSAEEDGYTLFVAGFEDGGAGDSLSYHSGQKFSTFDRDQDLFVQNCAALSSGAFWFRSCHFANLNGFYLGGSHLSYANGINWAQWKGFYYSLKRTEMKIRRA

SEQ ID NO: 51303 - protein, 279 aa, Homo sapiens
  Payload ID: 10233
  Gene Symbol: MFAP4
  Gene Name: microfibrillar-associated protein 4
  Uniprot ID: P55083
  ENSP ID: ENSP00000378957
MGELSPLQRPLATEGTMKAQGVLLKLALLALPLLLLLSTPPCAPQVSGIRGDALERFCLQQPLDCDDIYAQGYQSDGVYLIYPSGPSVPVPVFCDMTTEGGKWTVFQKRFNGSVSFFRGWNDYKLGFGRADGEYWLGLQNMHLLTLKQKYELRVDLEDFENNTAYAKYADFSISPNAVSAEEDGYTLFVAGFEDGGAGDSLSYHSGQKFSTFDRDQDLFVQNCAALSSGAFWFRSCHFANLNGFYLGGSHLSYANGINWAQWKGFYYSLKRTEMKIRRA

SEQ ID NO: 51304 - protein, 280 aa, Homo sapiens
  Payload ID: 10233
  Gene Symbol: MFAP4
  Gene Name: microfibrillar-associated protein 4
  ENSP ID: ENSP00000468578
MVGANAKRTGDLWSWEGAVLTLSAHRQALLALPLLLLLSTPPCAPQVSGIRGDALERFCLQQPLDCDDIYAQGYQSDGVYLIYPSGPSVPVPVFCDMTTEGGKWTVFQKRFNGSVSFFRGWNDYKLGFGRADGEYWLGLQNMHLLTLKQKYELRVDLEDFENNTAYAKYADFSISPNAVSAEEDGYTLFVAGFEDGGAGDSLSYHSGQKFSTFDRDQDLFVQNCAALSSGAFWFRSCHFANLNGFYLGGSHLSYANGINWAQWKGFYYSLKRTEMKIRRA

SEQ ID NO: 51305 - protein, 520 aa, Homo sapiens
  Payload ID: 10234
  Gene Symbol: MITF
  Gene Name: microphthalmia-associated transcription factor
  Uniprot ID: O75030
  ENSP ID: ENSP00000295600
MQSESGIVPDFEVGEEFHEEPKTYYELKSQPLKSSSSAEHPGASKPPISSSSMTSRILLRQQLMREQMQEQERREQQQKLQAAQFMQQRVPVSQTPAINVSVPTTLPSATQVPMEVLKVQTHLENPTKYHIQQAQRQQVKQYLSTTLANKHANQVLSLPCPNQPGDHVMPPVPGSSAPNSPMAMLTLNSNCEKEGFYKFEEQNRAESECPGMNTHSRASCMQMDDVIDDIISLESSYNEEILGLMDPALQMANTLPVSGNLIDLYGNQGLPPPGLTISNSCPANLPNIKRELTESEARALAKERQKKDNHNLIERRRRFNINDRIKELGTLIPKSNDPDMRWNKGTILKASVDYIRKLQREQQRAKELENRQKKLEHANRHLLLRIQELEMQARAHGLSLIPSTGLCSPDLVNRIIKQEPVLENCSQDLLQHHADLTCTTTLDLTDGTITFNNNLGTGTEANQAYSVPTKMGSKLEDILMDDTLSPVGVTDPLLSSVSPGASKTSSRRSSMSMEETEHTC

SEQ ID NO: 51306 - protein, 413 aa, Homo sapiens
  Payload ID: 10234
  Gene Symbol: MITF
  Gene Name: microphthalmia-associated transcription factor
  Uniprot ID: O75030
  ENSP ID: ENSP00000324246
MLEMLEYNHYQVQTHLENPTKYHIQQAQRQQVKQYLSTTLANKHANQVLSLPCPNQPGDHVMPPVPGSSAPNSPMAMLTLNSNCEKEGFYKFEEQNRAESECPGMNTHSRASCMQMDDVIDDIISLESSYNEEILGLMDPALQMANTLPVSGNLIDLYGNQGLPPPGLTISNSCPANLPNIKRELTESEARALAKERQKKDNHNLIERRRRFNINDRIKELGTLIPKSNDPDMRWNKGTILKASVDYIRKLQREQQRAKELENRQKKLEHANRHLLLRIQELEMQARAHGLSLIPSTGLCSPDLVNRIIKQEPVLENCSQDLLQHHADLTCTTTLDLTDGTITFNNNLGTGTEANQAYSVPTKMGSKLEDILMDDTLSPVGVTDPLLSSVSPGASKTSSRRSSMSMEETEHTC

SEQ ID NO: 51307 - protein, 504 aa, Homo sapiens
  Payload ID: 10234
  Gene Symbol: MITF
  Gene Name: microphthalmia-associated transcription factor
  Uniprot ID: O75030
  ENSP ID: ENSP00000324443
MEALRVQMFMPCSFESLYLSSAEHPGASKPPISSSSMTSRILLRQQLMREQMQEQERREQQQKLQAAQFMQQRVPVSQTPAINVSVPTTLPSATQVPMEVLKVQTHLENPTKYHIQQAQRQQVKQYLSTTLANKHANQVLSLPCPNQPGDHVMPPVPGSSAPNSPMAMLTLNSNCEKEGFYKFEEQNRAESECPGMNTHSRASCMQMDDVIDDIISLESSYNEEILGLMDPALQMANTLPVSGNLIDLYGNQGLPPPGLTISNSCPANLPNIKRELTESEARALAKERQKKDNHNLIERRRRFNINDRIKELGTLIPKSNDPDMRWNKGTILKASVDYIRKLQREQQRAKELENRQKKLEHANRHLLLRIQELEMQARAHGLSLIPSTGLCSPDLVNRIIKQEPVLENCSQDLLQHHADLTCTTTLDLTDGTITFNNNLGTGTEANQAYSVPTKMGSKLEDILMDDTLSPVGVTDPLLSSVSPGASKTSSRRSSMSMEETEHTC

SEQ ID NO: 51308 - protein, 519 aa, Homo sapiens
  Payload ID: 10234
  Gene Symbol: MITF
  Gene Name: microphthalmia-associated transcription factor
  Uniprot ID: O75030
  ENSP ID: ENSP00000327867
MGHLENTSVVFPRAIFSLCEKETRKLTLCLFSRSSSAEHPGASKPPISSSSMTSRILLRQQLMREQMQEQERREQQQKLQAAQFMQQRVPVSQTPAINVSVPTTLPSATQVPMEVLKVQTHLENPTKYHIQQAQRQQVKQYLSTTLANKHANQVLSLPCPNQPGDHVMPPVPGSSAPNSPMAMLTLNSNCEKEGFYKFEEQNRAESECPGMNTHSRASCMQMDDVIDDIISLESSYNEEILGLMDPALQMANTLPVSGNLIDLYGNQGLPPPGLTISNSCPANLPNIKRELTESEARALAKERQKKDNHNLIERRRRFNINDRIKELGTLIPKSNDPDMRWNKGTILKASVDYIRKLQREQQRAKELENRQKKLEHANRHLLLRIQELEMQARAHGLSLIPSTGLCSPDLVNRIIKQEPVLENCSQDLLQHHADLTCTTTLDLTDGTITFNNNLGTGTEANQAYSVPTKMGSKLEDILMDDTLSPVGVTDPLLSSVSPGASKTSSRRSSMSMEETEHTC

SEQ ID NO: 51309 - protein, 419 aa, Homo sapiens
  Payload ID: 10234
  Gene Symbol: MITF
  Gene Name: microphthalmia-associated transcription factor
  Uniprot ID: O75030
  ENSP ID: ENSP00000377880
MLEMLEYNHYQVQTHLENPTKYHIQQAQRQQVKQYLSTTLANKHANQVLSLPCPNQPGDHVMPPVPGSSAPNSPMAMLTLNSNCEKEGFYKFEEQNRAESECPGMNTHSRASCMQMDDVIDDIISLESSYNEEILGLMDPALQMANTLPVSGNLIDLYGNQGLPPPGLTISNSCPANLPNIKRELTACIFPTESEARALAKERQKKDNHNLIERRRRFNINDRIKELGTLIPKSNDPDMRWNKGTILKASVDYIRKLQREQQRAKELENRQKKLEHANRHLLLRIQELEMQARAHGLSLIPSTGLCSPDLVNRIIKQEPVLENCSQDLLQHHADLTCTTTLDLTDGTITFNNNLGTGTEANQAYSVPTKMGSKLEDILMDDTLSPVGVTDPLLSSVSPGASKTSSRRSSMSMEETEHTC

SEQ ID NO: 51310 - protein, 117 aa, Homo sapiens
  Payload ID: 10234
  Gene Symbol: MITF
  Gene Name: microphthalmia-associated transcription factor
  ENSP ID: ENSP00000391276
MGHLENTSVVFPRAIFSLCEKETRKLTLCLFSRSSSAEHPGASKPPISSSSMTSRILLRQQLMREQMQEQERREQQQKLQAAQFMQQRVPVSQTPAINVSVPTTLPSATQVPMEVLK

SEQ ID NO: 51311 - protein, 526 aa, Homo sapiens
  Payload ID: 10234
  Gene Symbol: MITF
  Gene Name: microphthalmia-associated transcription factor
  Uniprot ID: O75030
  ENSP ID: ENSP00000391803
MQSESGIVPDFEVGEEFHEEPKTYYELKSQPLKSSSSAEHPGASKPPISSSSMTSRILLRQQLMREQMQEQERREQQQKLQAAQFMQQRVPVSQTPAINVSVPTTLPSATQVPMEVLKVQTHLENPTKYHIQQAQRQQVKQYLSTTLANKHANQVLSLPCPNQPGDHVMPPVPGSSAPNSPMAMLTLNSNCEKEGFYKFEEQNRAESECPGMNTHSRASCMQMDDVIDDIISLESSYNEEILGLMDPALQMANTLPVSGNLIDLYGNQGLPPPGLTISNSCPANLPNIKRELTACIFPTESEARALAKERQKKDNHNLIERRRRFNINDRIKELGTLIPKSNDPDMRWNKGTILKASVDYIRKLQREQQRAKELENRQKKLEHANRHLLLRIQELEMQARAHGLSLIPSTGLCSPDLVNRIIKQEPVLENCSQDLLQHHADLTCTTTLDLTDGTITFNNNLGTGTEANQAYSVPTKMGSKLEDILMDDTLSPVGVTDPLLSSVSPGASKTSSRRSSMSMEETEHTC

SEQ ID NO: 51312 - protein, 361 aa, Homo sapiens
  Payload ID: 10234
  Gene Symbol: MITF
  Gene Name: microphthalmia-associated transcription factor
  ENSP ID: ENSP00000398639
MEALRVQMFMPCSFESLYLSSAEHPGASKPPISSSSMTSRILLRQQLMREQMQEQERREQQQKLQAAQFMQQRVPVSQTPAINVSVPTTLPSATQVPMEVLKVQTHLENPTKYHIQQAQRQQVKQYLSTTLANKHANQVLSLPCPNQPGDHVMPPVPGSSAPNSPMAMLTLNSNCEKEGFYKFEEQNRAESECPGMNTHSRASCMQMDDVIDDIISLESSYNEEILGLMDPALQMANTLPVSGNLIDLYGNQGLPPPGLTISNSCPANLPNIKRELTACIFPTESEARALAKERQKKDNHNLIERRRRFNINDRIKELGTLIPKSNDPDMRWNKGTILKASVDYIRKLQREQQRAKELENR

SEQ ID NO: 51313 - protein, 70 aa, Homo sapiens
  Payload ID: 10234
  Gene Symbol: MITF
  Gene Name: microphthalmia-associated transcription factor
  ENSP ID: ENSP00000407620
MTSRILLRQQLMREQMQEQERREQQQKLQAAQFMQQRVPVSQTPAINVSVPTTLPSATQVPMEVLKVQTH

SEQ ID NO: 51314 - protein, 157 aa, Homo sapiens
  Payload ID: 10234
  Gene Symbol: MITF
  Gene Name: microphthalmia-associated transcription factor
  ENSP ID: ENSP00000411389
MTSRILLRQQLMREQMQEQERREQQQKLQAAQFMQQRVPVSQTPAINVSVPTTLPSATQVPMEVLKVQTHLENPTKYHIQQAQRQQGFYKFEEQNRAESECPGMNTHSRASCMQMDDVIDDIISLESSYNEEILGLMDPALQMANTLPVSGNLIDLY

SEQ ID NO: 51315 - protein, 468 aa, Homo sapiens
  Payload ID: 10234
  Gene Symbol: MITF
  Gene Name: microphthalmia-associated transcription factor
  Uniprot ID: O75030
  ENSP ID: ENSP00000418845
MTSRILLRQQLMREQMQEQERREQQQKLQAAQFMQQRVPVSQTPAINVSVPTTLPSATQVPMEVLKVQTHLENPTKYHIQQAQRQQVKQYLSTTLANKHANQVLSLPCPNQPGDHVMPPVPGSSAPNSPMAMLTLNSNCEKEGFYKFEEQNRAESECPGMNTHSRASCMQMDDVIDDIISLESSYNEEILGLMDPALQMANTLPVSGNLIDLYGNQGLPPPGLTISNSCPANLPNIKRELTESEARALAKERQKKDNHNLIERRRRFNINDRIKELGTLIPKSNDPDMRWNKGTILKASVDYIRKLQREQQRAKELENRQKKLEHANRHLLLRIQELEMQARAHGLSLIPSTGLCSPDLVNRIIKQEPVLENCSQDLLQHHADLTCTTTLDLTDGTITFNNNLGTGTEANQAYSVPTKMGSKLEDILMDDTLSPVGVTDPLLSSVSPGASKTSSRRSSMSMEETEHTC

SEQ ID NO: 51316 - protein, 105 aa, Homo sapiens
  Payload ID: 10234
  Gene Symbol: MITF
  Gene Name: microphthalmia-associated transcription factor
  ENSP ID: ENSP00000433487
MLEMLEYNHYQVQTHLENPTKYHIQQAQRQQVKQYLSTTLANKHANQVLSLPCPNQPGDHVMPPVPGSSAPNSPMAMLTLNSNCEKEGFYKFEEQNRAESECPDG

SEQ ID NO: 51317 - protein, 357 aa, Homo sapiens
  Payload ID: 10234
  Gene Symbol: MITF
  Gene Name: microphthalmia-associated transcription factor
  Uniprot ID: O75030
  ENSP ID: ENSP00000435909
MLEMLEYNHYQVQTHLENPTKYHIQQAQRQQGFYKFEEQNRAESECPGMNTHSRASCMQMDDVIDDIISLESSYNEEILGLMDPALQMANTLPVSGNLIDLYGNQGLPPPGLTISNSCPANLPNIKRELTESEARALAKERQKKDNHNLIERRRRFNINDRIKELGTLIPKSNDPDMRWNKGTILKASVDYIRKLQREQQRAKELENRQKKLEHANRHLLLRIQELEMQARAHGLSLIPSTGLCSPDLVNRIIKQEPVLENCSQDLLQHHADLTCTTTLDLTDGTITFNNNLGTGTEANQAYSVPTKMGSKLEDILMDDTLSPVGVTDPLLSSVSPGASKTSSRRSSMSMEETEHTC

SEQ ID NO: 51318 - protein, 91 aa, Homo sapiens
  Payload ID: 10234
  Gene Symbol: MITF
  Gene Name: microphthalmia-associated transcription factor
  ENSP ID: ENSP00000481286
MLEMLEYNHYQVQTHLENPTKYHIQQAQRQQVKQYLSTTLANKHANQVLSLPCPNQPGDHVMPPVPGSSAPNSPMAMLTLNSNCEKEFMKQ

SEQ ID NO: 51319 - protein, 77 aa, Homo sapiens
  Payload ID: 10235
  Gene Symbol: MSMB
  Gene Name: microseminoprotein, beta-
  Uniprot ID: P08118
  ENSP ID: ENSP00000462641
MNVLLGSVVIFATFVTLCNASCYFIPNEGVPGDSTRMFLHLWVMTKTTAKESSRRRTASISWWRRRTQKRPVLSVNG

SEQ ID NO: 51320 - protein, 114 aa, Homo sapiens
  Payload ID: 10235
  Gene Symbol: MSMB
  Gene Name: microseminoprotein, beta-
  Uniprot ID: P08118
  ENSP ID: ENSP00000463092
MNVLLGSVVIFATFVTLCNASCYFIPNEGVPGDSTRKCMDLKGNKHPINSEWQTDNCETCTCYETEISCCTLVSTPVGYDKDNCQRIFKKEDCKYIVVEKKDPKKTCSVSEWII

SEQ ID NO: 51321 - protein, 139 aa, Homo sapiens
  Payload ID: 10236
  Gene Symbol: MSMP
  Gene Name: microseminoprotein, prostate associated
  Uniprot ID: Q1L6U9
  ENSP ID: ENSP00000419194
MALRMLWAGQAKGILGGWGIICLVMSLLLQHPGVYSKCYFQAQAPCHYEGKYFTLGESWLRKDCFHCTCLHPVGVGCCDTSQHPIDFPAGCEVRQEAGTCQFSLVQKSDPRLPCKGGGPDPEWGSANTPVPGAPAPHSS

SEQ ID NO: 51322 - protein, 155 aa, Homo sapiens
  Payload ID: 10237
  Gene Symbol: MGST1
  Gene Name: microsomal glutathione S-transferase 1
  Uniprot ID: P10620
  ENSP ID: ENSP00000010404
MVDLTQVMDDEVFMAFASYATIILSKMMLMSTATAFYRLTRKVFANPEDCVAFGKGENAKKYLRTDDRVERVRRAHLNDLENIIPFLGIGLLYSLSGPDPSTAILHFRLFVGARIYHTIAYLTPLPQPNRALSFFVGYGVTLSMAYRLLKSKLYL

SEQ ID NO: 51323 - protein, 155 aa, Homo sapiens; identical to SEQ ID NO: 51322
  Payload ID: 10237
  Gene Symbol: MGST1
  Gene Name: microsomal glutathione S-transferase 1
  Uniprot ID: P10620
  ENSP ID: ENSP00000379510

SEQ ID NO: 51324 - protein, 155 aa, Homo sapiens; identical to SEQ ID NO: 51322
  Payload ID: 10237
  Gene Symbol: MGST1
  Gene Name: microsomal glutathione S-transferase 1
  Uniprot ID: P10620
  ENSP ID: ENSP00000379512

SEQ ID NO: 51325 - protein, 155 aa, Homo sapiens; identical to SEQ ID NO: 51322
  Payload ID: 10237
  Gene Symbol: MGST1
  Gene Name: microsomal glutathione S-transferase 1
  Uniprot ID: P10620
  ENSP ID: ENSP00000379513

SEQ ID NO: 51326 - protein, 46 aa, Homo sapiens
  Payload ID: 10237
  Gene Symbol: MGST1
  Gene Name: microsomal glutathione S-transferase 1
  ENSP ID: ENSP00000437988
MVDLTQVMDDEVFMAFASYATIILSKMMLMSTATAFYRLTRKSPPE

SEQ ID NO: 51327 - protein, 87 aa, Homo sapiens
  Payload ID: 10237
  Gene Symbol: MGST1
  Gene Name: microsomal glutathione S-transferase 1
  Uniprot ID: P10620
  ENSP ID: ENSP00000438308
MVDLTQVMDDEVFMAFASYATIILSKMMLMSTATAFYRLTRKVFANPEDCVAFGKGENAKKYLRTDDRVERVRRIKQTLSIYLASSI

SEQ ID NO: 51328 - protein, 42 aa, Homo sapiens
  Payload ID: 10237
  Gene Symbol: MGST1
  Gene Name: microsomal glutathione S-transferase 1
  ENSP ID: ENSP00000440443
MVDLTQVMDDEVFMAFASYATIILSKMMLMSTATAFYRLTRK

SEQ ID NO: 51329 - protein, 77 aa, Homo sapiens
  Payload ID: 10237
  Gene Symbol: MGST1
  Gene Name: microsomal glutathione S-transferase 1
  ENSP ID: ENSP00000442557
MVDLTQVMDDEVFMAFASYATIILSKMMLMSTATAFYRLTRKVFANPEDCVAFGKGENAKKYLRTDDRVERVRRAHL

SEQ ID NO: 51330 - protein, 106 aa, Homo sapiens
  Payload ID: 10237
  Gene Symbol: MGST1
  Gene Name: microsomal glutathione S-transferase 1
  ENSP ID: ENSP00000442767
MVDLTQVFANPEDCVAFGKGENAKKYLRTDDRVERVRRAHLNDLENIIPFLGIGLLYSLSGPDPSTAILHFRLFVGARIYHTIAYLTPLPQPNRALSFFVGYGVTL

SEQ ID NO: 51331 - protein, 80 aa, Homo sapiens
  Payload ID: 10237
  Gene Symbol: MGST1
  Gene Name: microsomal glutathione S-transferase 1
  ENSP ID: ENSP00000442970
MVDLTQVMDDEVFMAFASYATIILSKMMLMSTATAFYRLTRKVFANPEDCVAFGKGENAKKYLRTDDRVERVRRAHLNDL

SEQ ID NO: 51332 - protein, 147 aa, Homo sapiens
  Payload ID: 10238
  Gene Symbol: MGST2
  Gene Name: microsomal glutathione S-transferase 2
  Uniprot ID: Q99735
  ENSP ID: ENSP00000265498
MAGNSILLAAVSILSACQQSYFALQVGKARLKYKVTPPAVTGSPEFERVFRAQQNCVEFYPIFIITLWMAGWYFNQVFATCLGLVYIYGRHLYFWGYSEAAKKRITGFRLSLGILALLTLLGALGIANSFLDEYLDLNIAKKLRRQF

SEQ ID NO: 51333 - protein, 147 aa, Homo sapiens; identical to SEQ ID NO: 51332
  Payload ID: 10238
  Gene Symbol: MGST2
  Gene Name: microsomal glutathione S-transferase 2
  Uniprot ID: Q99735
  ENSP ID: ENSP00000423008

SEQ ID NO: 51334 - protein, 77 aa, Homo sapiens
  Payload ID: 10238
  Gene Symbol: MGST2
  Gene Name: microsomal glutathione S-transferase 2
  Uniprot ID: Q99735
  ENSP ID: ENSP00000424278
MAGNSILLAAVSILSACQQSYFALQVGKARLKYKVTPPAVTGSPEFERVFRAHFCYLSGSGVHIWPSPILLGIFRSC

SEQ ID NO: 51335 - protein, 147 aa, Homo sapiens; identical to SEQ ID NO: 51332
  Payload ID: 10238
  Gene Symbol: MGST2
  Gene Name: microsomal glutathione S-transferase 2
  Uniprot ID: Q99735
  ENSP ID: ENSP00000482639

SEQ ID NO: 51336 - protein, 166 aa, Homo sapiens
  Payload ID: 10239
  Gene Symbol: MGST3
  Gene Name: microsomal glutathione S-transferase 3
  ENSP ID: ENSP00000356858
MPWRGRRFRLCRRKMAVLSKEYGFVLLTGAASFIMVAHLAINVSKARKKYKVEYPIMYSTDPENGHIFNCIQRAHQNTLEVYPPFLFFLAVGGVYHPRIASGLGLAWIVGRVLYAYGYYTGEPSKRSRGALGSIALLGLVGTTVCSAFQHLGWVKSGLGSGPKCCH

SEQ ID NO: 51337 - protein, 152 aa, Homo sapiens
  Payload ID: 10239
  Gene Symbol: MGST3
  Gene Name: microsomal glutathione S-transferase 3
  Uniprot ID: O14880
  ENSP ID: ENSP00000356859
MAVLSKEYGFVLLTGAASFIMVAHLAINVSKARKKYKVEYPIMYSTDPENGHIFNCIQRAHQNTLEVYPPFLFFLAVGGVYHPRIASGLGLAWIVGRVLYAYGYYTGEPSKRSRGALGSIALLGLVGTTVCSAFQHLGWVKSGLGSGPKCCH

SEQ ID NO: 51338 - protein, 166 aa, Homo sapiens; identical to SEQ ID NO: 51336
  Payload ID: 10239
  Gene Symbol: MGST3
  Gene Name: microsomal glutathione S-transferase 3
  ENSP ID: ENSP00000356860

SEQ ID NO: 51339 - protein, 129 aa, Homo sapiens
  Payload ID: 10239
  Gene Symbol: MGST3
  Gene Name: microsomal glutathione S-transferase 3
  ENSP ID: ENSP00000356863
MAVLSKEYGFVLLTGAASFIMVAHLAINVSKARKKYKVEYPIMYSTDPENGHIFNCIQRAHQNTLEVYPPFLFFLAVGGVYHPRIASGLGLAWIVGRVLYAYGYYTGEVSNRLASLGHTGRRRIVLGHT

SEQ ID NO: 51340 - protein, 152 aa, Homo sapiens; identical to SEQ ID NO: 51337
  Payload ID: 10239
  Gene Symbol: MGST3
  Gene Name: microsomal glutathione S-transferase 3
  Uniprot ID: O14880
  ENSP ID: ENSP00000356864

SEQ ID NO: 51341 - protein, 166 aa, Homo sapiens; identical to SEQ ID NO: 51336
  Payload ID: 10239
  Gene Symbol: MGST3
  Gene Name: microsomal glutathione S-transferase 3
  ENSP ID: ENSP00000487151

SEQ ID NO: 51342 - protein, 894 aa, Homo sapiens
  Payload ID: 10240
  Gene Symbol: MTTP
  Gene Name: microsomal triglyceride transfer protein
  Uniprot ID: P55157
  ENSP ID: ENSP00000265517
MILLAVLFLCFISSYSASVKGHTTGLSLNNDRLYKLTYSTEVLLDRGKGKLQDSVGYRISSNVDVALLWRNPDGDDDQLIQITMKDVNVENVNQQRGEKSIFKGKSPSKIMGKENLEALQRPTLLHLIHGKVKEFYSYQNEAVAIENIKRGLASLFQTQLSSGTTNEVDISGNCKVTYQAHQDKVIKIKALDSCKIARSGFTTPNQVLGVSSKATSVTTYKIEDSFVIAVLAEETHNFGLNFLQTIKGKIVSKQKLELKTTEAGPRLMSGKQAAAIIKAVDSKYTAIPIVGQVFQSHCKGCPSLSELWRSTRKYLQPDNLSKAEAVRNFLAFIQHLRTAKKEEILQILKMENKEVLPQLVDAVTSAQTSDSLEAILDFLDFKSDSSIILQERFLYACGFASHPNEELLRALISKFKGSIGSSDIRETVMIITGTLVRKLCQNEGCKLKAVVEAKKLILGGLEKAEKKEDTRMYLLALKNALLPEGIPSLLKYAEAGEGPISHLATTALQRYDLPFITDEVKKTLNRIYHQNRKVHEKTVRTAAAAIILNNNPSYMDVKNILLSIGELPQEMNKYMLAIVQDILRFEMPASKIVRRVLKEMVAHNYDRFSRSGSSSAYTGYIERSPRSASTYSLDILYSGSGILRRSNLNIFQYIGKAGLHGSQVVIEAQGLEALIAATPDEGEENLDSYAGMSAILFDVQLRPVTFFNGYSDLMSKMLSASGDPISVVKGLILLIDHSQELQLQSGLKANIEVQGGLAIDISGAMEFSLWYRESKTRVKNRVTVVITTDITVDSSFVKAGLETSTETEAGLEFISTVQFSQYPFLVCMQMDKDEAPFRQFEKKYERLSTGRGYVSQKRKESVLAGCEFPLHQENSEMCKVVFAPQPDSTSSGWF

SEQ ID NO: 51343 - protein, 894 aa, Homo sapiens; identical to SEQ ID NO: 51342
  Payload ID: 10240
  Gene Symbol: MTTP
  Gene Name: microsomal triglyceride transfer protein
  Uniprot ID: P55157
  ENSP ID: ENSP00000400821

SEQ ID NO: 51344 - protein, 151 aa, Homo sapiens
  Payload ID: 10240
  Gene Symbol: MTTP
  Gene Name: microsomal triglyceride transfer protein
  Uniprot ID: P55157
  ENSP ID: ENSP00000407350
MILLAVLFLCFISSYSASVKGHTTGLSLNNDRLYKLTYSTEVLLDRGKGKLQDSVGYRISSNVDVALLWRNPDGDDDQLIQITMKDVNVENVNQQRGEKSIFKGKSPSKIMGKENLEALQRPTLLHLIHGKVKGRLDSTTFSPTSYFSSLQ

SEQ ID NO: 51345 - protein, 72 aa, Homo sapiens
  Payload ID: 10240
  Gene Symbol: MTTP
  Gene Name: microsomal triglyceride transfer protein
  ENSP ID: ENSP00000422178
MEERGGVYAGRGLELVFWEWEVVTVMSVFSRSRIKCVPADVYSFIYSCRPSIITRIHKTEEGDRRDGQSDMK

SEQ ID NO: 51346 - protein, 56 aa, Homo sapiens
  Payload ID: 10240
  Gene Symbol: MTTP
  Gene Name: microsomal triglyceride transfer protein
  ENSP ID: ENSP00000422667
MEERGGVYAGRGLELVFWEWEVVTVMSVFSRSRIKCVPADVYSFIYSCEYWMKELR

SEQ ID NO: 51347 - protein, 50 aa, Homo sapiens
  Payload ID: 10240
  Gene Symbol: MTTP
  Gene Name: microsomal triglyceride transfer protein
  ENSP ID: ENSP00000422782
MEERGGVYAGRGLELVFWEWEVVTVMSVFSRSRIKCVPADVYSFIYSCPV

SEQ ID NO: 51348 - protein, 42 aa, Homo sapiens
  Payload ID: 10240
  Gene Symbol: MTTP
  Gene Name: microsomal triglyceride transfer protein
  ENSP ID: ENSP00000424972
MARAPLRPENTIVRGSANQCQDTYRAEELTGSEEGHSLTGCH

SEQ ID NO: 51349 - protein, 59 aa, Homo sapiens
  Payload ID: 10240
  Gene Symbol: MTTP
  Gene Name: microsomal triglyceride transfer protein
  ENSP ID: ENSP00000425642
MEERGGVYAGRGLELVFWEWEVVTVMSVFSRSRIKCVPADVYSFIYSCSEEGHSLTGCH

SEQ ID NO: 51350 - protein, 55 aa, Homo sapiens
  Payload ID: 10240
  Gene Symbol: MTTP
  Gene Name: microsomal triglyceride transfer protein
  ENSP ID: ENSP00000425987
MARAPLRPENTIVRGSANQCQDTYRAEELTGRPSIITRIHKTEEGDRRDGQSDMK

SEQ ID NO: 51351 - protein, 178 aa, Homo sapiens
  Payload ID: 10240
  Gene Symbol: MTTP
  Gene Name: microsomal triglyceride transfer protein
  ENSP ID: ENSP00000426755
MARAPLRPENTIVRGSANQCQDTYRAEELTGHTTGLSLNNDRLYKLTYSTEVLLDRGKGKLQDSVGYRISSNVDVALLWRNPDGDDDQLIQITMKDVNVENVNQQRGEKSIFKGKSPSKIMGKENLEALQRPTLLHLIHGKVKEFYSYQNEAVAIENIKRGLASLFQTQLSSGTTNEV

SEQ ID NO: 51352 - protein, 921 aa, Homo sapiens
  Payload ID: 10240
  Gene Symbol: MTTP
  Gene Name: microsomal triglyceride transfer protein
  ENSP ID: ENSP00000427679
MEERGGVYAGRGLELVFWEWEVVTVMSVFSRSRIKCVPADVYSFIYSCHTTGLSLNNDRLYKLTYSTEVLLDRGKGKLQDSVGYRISSNVDVALLWRNPDGDDDQLIQITMKDVNVENVNQQRGEKSIFKGKSPSKIMGKENLEALQRPTLLHLIHGKVKEFYSYQNEAVAIENIKRGLASLFQTQLSSGTTNEVDISGNCKVTYQAHQDKVIKIKALDSCKIARSGFTTPNQVLGVSSKATSVTTYKIEDSFVIAVLAEETHNFGLNFLQTIKGKIVSKQKLELKTTEAGPRLMSGKQAAAIIKAVDSKYTAIPIVGQVFQSHCKGCPSLSELWRSTRKYLQPDNLSKAEAVRNFLAFIQHLRTAKKEEILQILKMENKEVLPQLVDAVTSAQTSDSLEAILDFLDFKSDSSIILQERFLYACGFASHPNEELLRALISKFKGSIGSSDIRETVMIITGTLVRKLCQNEGCKLKAVVEAKKLILGGLEKAEKKEDTRMYLLALKNALLPEGIPSLLKYAEAGEGPISHLATTALQRYDLPFITDEVKKTLNRIYHQNRKVHEKTVRTAAAAIILNNNPSYMDVKNILLSIGELPQEMNKYMLAIVQDILRFEMPASKIVRRVLKEMVAHNYDRFSRSGSSSAYTGYIERSPRSASTYSLDILYSGSGILRRSNLNIFQYIGKAGLHGSQVVIEAQGLEALIAATPDEGEENLDSYAGMSAILFDVQLRPVTFFNGYSDLMSKMLSASGDPISVVKGLILLIDHSQELQLQSGLKANIEVQGGLAIDISGAMEFSLWYRESKTRVKNRVTVVITTDITVDSSFVKAGLETSTETEAGLEFISTVQFSQYPFLVCMQMDKDEAPFRQFEKKYERLSTGRGYVSQKRKESVLAGCEFPLHQENSEMCKVVFAPQPDSTSSGWF

SEQ ID NO: 51353 - protein, 516 aa, Homo sapiens
  Payload ID: 10240
  Gene Symbol: MTTP
  Gene Name: microsomal triglyceride transfer protein
  ENSP ID: ENSP00000482850
MILLAVLFLCFISSYSASVKGHTTGLSLNNDRLYKLTYSTEVLLDRGKGKLQDSVGYRISSNVDVALLWRNPDGDDDQLIQITMKDVNVENVNQQRGEKSIFKGKSPSKIMGKENLEALQRPTLLHLIHGKVKEFYSYQNEAVAIENIKRGLASLFQTQLSSGTTNEVDISGNCKVTYQAHQDKVIKIKALDSCKIARSGFTTPNQVLGVSSKATSVTTYKIEDSFVIAVLAEETHNFGLNFLQTIKGKIVSKQKLELKTTEAGPRLMSGKQAAAIIKAVDSKYTAIPIVGQVFQSHCKGCPSLSELWRSTRKYLQPDNLSKAEAVRNFLAFIQHLRTAKKEEILQILKMENKEVLPQLVDAVTSAQTSDSLEAILDFLDFKSDSSIILQERFLYACGFASHPNEELLRALISKFKGSIGSSDIRETVMIITGTLVRKLCQNEGCKLKAVVEAKKLILGGLEKAEKKEDTRMYLLALKNALLPEGIPSLLKYAEAGEGPISHLATTALQRYDLFHN

SEQ ID NO: 51354 - protein, 462 aa, Homo sapiens
  Payload ID: 10241
  Gene Symbol: MCRS1
  Gene Name: microspherule protein 1
  Uniprot ID: Q96EZ8
  ENSP ID: ENSP00000345358
MDKDSQGLLDSSLMASGTASRSEDEESLAGQKRASSQALGTIPKRRSSSRFIKRKKFDDELVESSLAKSSTRAKGASGVEPGRCSGSEPSSSEKKKVSKAPSTPVPPSPAPAPGLTKRVKKSKQPLQVTKDLGRWKPADDLLLINAVLQTNDLTSVHLGVKFSCRFTLREVQERWYALLYDPVISKLACQAMRQLHPEAIAAIQSKALFSKAEEQLLSKVGSTSQPTLETFQDLLHRHPDAFYLARTAKALQAHWQLMKQYYLLEDQTVQPLPKGDQVLNFSDAEDLIDDSKLKDMRDEVLEHELMVADRRQKREIRQLEQELHKWQVLVDSITGMSSPDFDNQTLAVLRGRMVRYLMRSREITLGRATKDNQIDVDLSLEGPAWKISRKQGVIKLKNNGDFFIANEGRRPIYIDGRPVLCGSKWRLSNNSVVEIASLRFVFLINQDLIALIRAEAAKITPQ

SEQ ID NO: 51355 - protein, 475 aa, Homo sapiens
  Payload ID: 10241
  Gene Symbol: MCRS1
  Gene Name: microspherule protein 1
  Uniprot ID: Q96EZ8
  ENSP ID: ENSP00000349640
MTRGTGGTAQRGRSGPDSQGLLDSSLMASGTASRSEDEESLAGQKRASSQALGTIPKRRSSSRFIKRKKFDDELVESSLAKSSTRAKGASGVEPGRCSGSEPSSSEKKKVSKAPSTPVPPSPAPAPGLTKRVKKSKQPLQVTKDLGRWKPADDLLLINAVLQTNDLTSVHLGVKFSCRFTLREVQERWYALLYDPVISKLACQAMRQLHPEAIAAIQSKALFSKAEEQLLSKVGSTSQPTLETFQDLLHRHPDAFYLARTAKALQAHWQLMKQYYLLEDQTVQPLPKGDQVLNFSDAEDLIDDSKLKDMRDEVLEHELMVADRRQKREIRQLEQELHKWQVLVDSITGMSSPDFDNQTLAVLRGRMVRYLMRSREITLGRATKDNQIDVDLSLEGPAWKISRKQGVIKLKNNGDFFIANEGRRPIYIDGRPVLCGSKWRLSNNSVVEIASLRFVFLINQDLIALIRAEAAKITPQ

SEQ ID NO: 51356 - protein, 271 aa, Homo sapiens
  Payload ID: 10241
  Gene Symbol: MCRS1
  Gene Name: microspherule protein 1
  Uniprot ID: Q96EZ8
  ENSP ID: ENSP00000444982
MRQLHPEAIAAIQSKALFSKAEEQLLSKVGSTSQPTLETFQDLLHRHPDAFYLARTAKALQAHWQLMKQYYLLEDQTVQPLPKGDQVLNFSDAEDLIDDSKLKDMRDEVLEHELMVADRRQKREIRQLEQELHKWQVLVDSITGMSSPDFDNQTLAVLRGRMVRYLMRSREITLGRATKDNQIDVDLSLEGPAWKISRKQGVIKLKNNGDFFIANEGRRPIYIDGRPVLCGSKWRLSNNSVVEIASLRFVFLINQDLIALIRAEAAKITPQ

SEQ ID NO: 51357 - protein, 318 aa, Homo sapiens
  Payload ID: 10241
  Gene Symbol: MCRS1
  Gene Name: microspherule protein 1
  ENSP ID: ENSP00000447514
MASGTASRSEDEESLAGQKRASSQALGTIPKRRSSSRFIKRKKFDDELVESSLAKSSTRAKGASGVEPGRCSGSEPSSSEKKKVSKAPSTPVPPSPAPAPGLTKRVKKSKQPLQVTKDLGRWKPADDLLLINAVLQTNDLTSVHLGVKFSCRFTLREVQERWYALLYDPVISKLACQAMRQLHPEAIAAIQSKALFSKAEEQLLSKVGSTSQPTLETFQDLLHRHPDAFYLARTAKALQAHWQLMKQYYLLEDQTVQPLPKGDQVLNFSDAEDLIDDSKLKDMRDEVLEHELMVADRRQKREIRQLEQELHKWQVLVD

SEQ ID NO: 51358 - protein, 144 aa, Homo sapiens
  Payload ID: 10241
  Gene Symbol: MCRS1
  Gene Name: microspherule protein 1
  ENSP ID: ENSP00000447592
MDKDSQGLLDSSLMASGTASRSEDEESLAGQKRASSQALGTIPKRRSSSRTLYRFIKRKKFDDELVESSLAKSSTRAKGASGVEPGRCSGSEPSSSEKKKVSKAPSTPVPPSPAPAPGLTKRVKKSKQPLQVTKDLGRWKPADD

SEQ ID NO: 51359 - protein, 61 aa, Homo sapiens
  Payload ID: 10241
  Gene Symbol: MCRS1
  Gene Name: microspherule protein 1
  ENSP ID: ENSP00000447739
MMSWWRAAWQNLLPGQRGPVGWNQGAVRGVNPPPVRRRRYPKPPALLCHPAQPQPLDSPSV

SEQ ID NO: 51360 - protein, 462 aa, Homo sapiens; identical to SEQ ID NO: 51354
  Payload ID: 10241
  Gene Symbol: MCRS1
  Gene Name: microspherule protein 1
  Uniprot ID: Q96EZ8
  ENSP ID: ENSP00000448056

SEQ ID NO: 51361 - protein, 64 aa, Homo sapiens
  Payload ID: 10241
  Gene Symbol: MCRS1
  Gene Name: microspherule protein 1
  ENSP ID: ENSP00000448700
QLEQELHKWQVLVDSITGMSSPDFDNQTLAVLRGRMVRYLMRSREVPALTCPISPDHPGQSNQG

SEQ ID NO: 51362 - protein, 173 aa, Homo sapiens
  Payload ID: 10241
  Gene Symbol: MCRS1
  Gene Name: microspherule protein 1
  ENSP ID: ENSP00000448947
KLKDMRDEVLEHELMVADRRQKREIRQLEQELHKWQVLVDSITGMSSPDFDNQTLAVLRGRMVRYLMRSREITLGRATKDNQIDVDLSLEGPAWKISRKQGVIKLKNNGDFFIANEGRRPIYIDGRPVLCGSKWRLSNNSVVETGSWGQRSQIHTARKLTEQGYKPSSWLRRN

SEQ ID NO: 51363 - protein, 185 aa, Homo sapiens
  Payload ID: 10241
  Gene Symbol: MCRS1
  Gene Name: microspherule protein 1
  ENSP ID: ENSP00000449343
MDKDSQGLLDSSLMASGTASRSEDEESLAGQKRASSQALGTIPKRRSSSRFIKRKKFDDELVESSLAKSSTRAKGASGVEPGRCSGSEPSSSEKKKVSKAPSTPVPPSPAPAPGLTKRVKKSKQPLQVTKDLGRWKPADDLLLINAVLQTNDLTSVHLGVKFSCRFTLREVQERWYALLYDPVIS

SEQ ID NO: 51364 - protein, 205 aa, Homo sapiens
  Payload ID: 10241
  Gene Symbol: MCRS1
  Gene Name: microspherule protein 1
  ENSP ID: ENSP00000450352
MDKDSQGLLDSSLMASGTASRSEDEESLAGQKRASSQALGTIPKRRSSSRFIKRKKFDDELVESSLAKSSTRAKGASGVEPGRCSGSEPSSSEKKKVSKAPSTPVPPSPAPAPGLTKRVKKSKQPLQVTKDLGRWKPADDLLLINAVLQTNDLTSVHLGVKFSCRFTLREVQERWYALLYDPVISKLACQAMRQLHPEAIAAIQS

SEQ ID NO: 51365 - protein, 981 aa, Homo sapiens
  Payload ID: 10242
  Gene Symbol: MICAL1
  Gene Name: microtubule associated monooxygenase, calponin and LIM domain containing 1
  Uniprot ID: Q8TDZ2
  ENSP ID: ENSP00000351385
MASPTSTNPAHAHFESFLQAQLCQDVLSSFQELCGALGLEPGGGLPQYHKIKDQLNYWSAKSLWTKLDKRAGQPVYQQGRACTSTKCLVVGAGPCGLRVAVELALLGARVVLVEKRTKFSRHNVLHLWPFTIHDLRALGAKKFYGRFCTGTLDHISIRQLQLLLLKVALLLGVEIHWGVTFTGLQPPPRKGSGWRAQLQPNPPAQLANYEFDVLISAAGGKFVPEGFKVREMRGKLAIGITANFVNGRTVEETQVPEISGVARIYNQSFFQSLLKATGIDLENIVYYKDDTHYFVMTAKKQCLLRLGVLRQPFWPLGTGVARGFLAAFDAAWMVKRWAEGAESLEVLAERESLYQLLSQTSPENMHRNVAQYGLDPATRYPNLNLRAVTPNQVRDLYDVLAKEPVQRNNDKTDTGMPATGSAGTQEELLRWCQEQTAGYPGVHVSDLSSSWADGLALCALVYRLQPGLLEPSELQGLGALEATAWALKVAENELGITPVVSAQAVVAGSDPLGLIAYLSHFHSAFKSMAHSPGPVSQASPGTSSAVLFLSKLQRTLQRSRAKENAEDAGGKKLRLEMEAETPSTEVPPDPEPGVPLTPPSQHQEAGAGDLCALCGEHLYVLERLCVNGHFFHRSCFRCHTCEATLWPGGYEQHPGDGHFYCLQHLPQTDHKAEGSDRGPESPELPTPSENSMPPGLSTPTASQEGAGPVPDPSQPTRRQIRLSSPERQRLSSLNLTPDPEMEPPPKPPRSCSALARHALESSFVGWGLPVQSPQALVAMEKEEKESPFSSEEEEEDVPLDSDVEQALQTFAKTSGTMNNYPTWRRTLLRRAKEEEMKRFCKAQTIQRRLNEIEAALRELEAEGVKLELALRRQSSSPEQQKKLWVGQLLQLVDKKNSLVAEEAELMITVQELNLEEKQWQLDQELRGYMNREENLKTAADRQAEDQVLRKLVDLVNQRDALIRFQEERRLSELALGTGAQG

SEQ ID NO: 51366 - protein, 1067 aa, Homo sapiens [sequence omitted]

SEQ ID NO: 51367 - protein, 244 aa, Homo sapiens
  Payload ID: 10242
  Gene Symbol: MICAL1
  Gene Name: microtubule associated monooxygenase, calponin and LIM domain containing 1
  ENSP ID: ENSP00000407075
MASPTSTNPAHAHFESFLQAQLCQDVLSSFQELCGALGLEPGGGLPQYHKIKDQLNYWSAKSLWTKLDKRAGQPVYQQGRACTSTKCLVVGAGPCGLRVAVELALLGARVVLVEKRTKFSRHNVLHLWPFTIHDLRALGAKKFYGRFCTGTLDHISIRQLQLLLLKVALLLGVEIHWGVTFTGLQPPPRKGSGWRAQLQPNPPAQLANYEFDVLISAAGGKFVPEGFKVREMRGKLAIGITANF

SEQ ID NO: 51368 - protein, 252 aa, Homo sapiens
  Payload ID: 10242
  Gene Symbol: MICAL1
  Gene Name: microtubule associated monooxygenase, calponin and LIM domain containing 1
  ENSP ID: ENSP00000408924
  MOD_RES (1)..(1): Any amino acid
XESLYQLLSQTSPENMHRNVAQYGLDPATRYPNLNLRAVTPNQVRDLYDVLAKEPVQRNNDKTDTGMPATGTQEELLRWCQEQTAGYPGVHVSDLSSSWADGLALCALVYRLQPGLLEPSELQGLGALEATAWALKVAENELGITPVVSAQAVVAGSDPLGLIAYLSHFHSAFKSMAHSPGPVSQASPGTSSAVLFLSKLQRTLQRSRAKENAEDAGGKKLRLEMEAETPSTEVPPDPEPGVPLTPPSQHQE

SEQ ID NO: 51369 - protein, 1086 aa, Homo sapiens
  Payload ID: 10242
  Gene Symbol: MICAL1
  Gene Name: microtubule associated monooxygenase, calponin and LIM domain containing 1
  Uniprot ID: Q8TDZ2
  ENSP ID: ENSP00000486901
MSCLSHSSLPSCCPPQEASMASPTSTNPAHAHFESFLQAQLCQDVLSSFQELCGALGLEPGGGLPQYHKIKDQLNYWSAKSLWTKLDKRAGQPVYQQGRACTSTKCLVVGAGPCGLRVAVELALLGARVVLVEKRTKFSRHNVLHLWPFTIHDLRALGAKKFYGRFCTGTLDHISIRQLQLLLLKVALLLGVEIHWGVTFTGLQPPPRKGSGWRAQLQPNPPAQLANYEFDVLISAAGGKFVPEGFKVREMRGKLAIGITANFVNGRTVEETQVPEISGVARIYNQSFFQSLLKATGIDLENIVYYKDDTHYFVMTAKKQCLLRLGVLRQDWPDTNRLLGSANVVPEALQRFTRAAADFATHGKLGKLEFAQDAHGQPDVSAFDFTSMMRAESSARVQEKHGARLLLGLVGDCLVEPFWPLGTGVARGFLAAFDAAWMVKRWAEGAESLEVLAERESLYQLLSQTSPENMHRNVAQYGLDPATRYPNLNLRAVTPNQVRDLYDVLAKEPVQRNNDKTDTGMPATGSAGTQEELLRWCQEQTAGYPGVHVSDLSSSWADGLALCALVYRLQPGLLEPSELQGLGALEATAWALKVAENELGITPVVSAQAVVAGSDPLGLIAYLSHFHSAFKSMAHSPGPVSQASPGTSSAVLFLSKLQRTLQRSRAKENAEDAGGKKLRLEMEAETPSTEVPPDPEPGVPLTPPSQHQEAGAGDLCALCGEHLYVLERLCVNGHFFHRSCFRCHTCEATLWPGGYEQHPGDGHFYCLQHLPQTDHKAEGSDRGPESPELPTPSENSMPPGLSTPTASQEGAGPVPDPSQPTRRQIRLSSPERQRLSSLNLTPDPEMEPPPKPPRSCSALARHALESSFVGWGLPVQSPQALVAMEKEEKESPFSSEEEEEDVPLDSDVEQALQTFAKTSGTMNNYPTWRRTLLRRAKEEEMKRFCKAQTIQRRLNEIEAALRELEAEGVKLELALRRQSSSPEQQKKLWVGQLLQLVDKKNSLVAEEAELMITVQELNLEEKQWQLDQELRGYMNREENLKTAADRQAEDQVLRKLVDLVNQRDALIRFQEERRLSELALGTGAQG

SEQ ID NO: 51370 - protein, 1124 aa, Homo sapiens
  Payload ID: 10243
  Gene Symbol: MICAL2
  Gene Name: microtubule associated monooxygenase, calponin and LIM domain containing 2
  Uniprot ID: O94851
  ENSP ID: ENSP00000256194
MGENEDEKQAQAGQVFENFVQASTCKGTLQAFNILTRHLDLDPLDHRNFYSKLKSKVTTWKAKALWYKLDKRGSHKEYKRGKSCTNTKCLIVGGGPCGLRTAIELAYLGAKVVVVEKRDSFSRNNVLHLWPFTIHDLRGLGAKKFYGKFCAGSIDHISIRQLQLILFKVALMLGVEIHVNVEFVKVLEPPEDQENQKIGWRAEFLPTDHSLSEFEFDVIIGADGRRNTLEGFRRKEFRGKLAIAITANFINRNSTAEAKVEEISGVAFIFNQKFFQDLKEETGIDLENIVYYKDCTHYFVMTAKKQSLLDKGVIINDYIDTEMLLCAENVNQDNLLSYAREAADFATNYQLPSLDFAMNHYGQPDVAMFDFTCMYASENAALVRERQAHQLLVALVGDSLLEPFWPMGTGCARGFLAAFDTAWMVKSWNQGTPPLELLAERESLYRLLPQTTPENINKNFEQYTLDPGTRYPNLNSHCVRPHQVKHLYITKELEHYPLERLGSVRRSVNLSRKESDIRPSKLLTWCQQQTEGYQHVNVTDLTTSWRSGLALCAIIHRFRPELINFDSLNEDDAVENNQLAFDVAEREFGIPPVTTGKEMASAQEPDKLSMVMYLSKFYELFRGTPLRPVDSWRKNYGENADLSLAKSSISNNYLNLTFPRKRTPRVDGQTGENDMNKRRRKGFTNLDEPSNFSSRSLGSNQECGSSKEGGNQNKVKSMANQLLAKFEESTRNPSLMKQERRVSGIGKPVLCSSSGPPVHSCCPKPEEATPSPSPPLKRQFPSVVVTGHVLRELKQVSAGSECLSRPWRARAKSDLQLGGTENFATLPSTRPRAQALSGVLWRLQQVEEKILQKRAQNLANREFHTKNIKEKAAHLASMFGHGDFPQNKLLSKGLSHTHPPSPPSRLPSPDPAASSSPSTVDSASPARKEKKSPSGFHFHPSHLRTVHPQLTVGKVSSGIGAAAEVLVNLYMNDHRPKAQATSPDLESMRKSFPLNLGGSDTCYFCKKRVYVMERLSAEGHFFHRECFRCSICATTLRLAAYTFDCDEGKFYCKPHFIHCKTNSKQRKRRAELKQQREEEATWQEQEAPRRDTPTESSCAVAAIGTLEGSPPVHFSLPVLHPLLG

SEQ ID NO: 51371 - protein, 1103 aa, Homo sapiens
  Payload ID: 10243
  Gene Symbol: MICAL2
  Gene Name: microtubule associated monooxygenase, calponin and LIM domain containing 2
  Uniprot ID: O94851
  ENSP ID: ENSP00000344894
MGENEDEKQAQAGQVFENFVQASTCKGTLQAFNILTRHLDLDPLDHRNFYSKLKSKVTTWKAKALWYKLDKRGSHKEYKRGKSCTNTKCLIVGGGPCGLRTAIELAYLGAKVVVVEKRDSFSRNNVLHLWPFTIHDLRGLGAKKFYGKFCAGSIDHISIRQLQLILFKVALMLGVEIHVNVEFVKVLEPPEDQENQKIGWRAEFLPTDHSLSEFEFDVIIGADGRRNTLEGFRRKEFRGKLAIAITANFINRNSTAEAKVEEISGVAFIFNQKFFQDLKEETGIDLENIVYYKDCTHYFVMTAKKQSLLDKGVIINDYIDTEMLLCAENVNQDNLLSYAREAADFATNYQLPSLDFAMNHYGQPDVAMFDFTCMYASENAALVRERQAHQLLVALVGDSLLEPFWPMGTGCARGFLAAFDTAWMVKSWNQGTPPLELLAERESLYRLLPQTTPENINKNFEQYTLDPGTRYPNLNSHCVRPHQVKHLYITKELEHYPLERLGSVRRSVNLSRKESDIRPSKLLTWCQQQTEGYQHVNVTDLTTSWRSGLALCAIIHRFRPELINFDSLNEDDAVENNQLAFDVAEREFGIPPVTTGKEMASAQEPDKLSMVMYLSKFYELFRGTPLRPVDSWRKNYGENADLSLAKSSISNNYLNLTFPRKRTPRVDGQTGENDMNKRRRKGFTNLDEPSNFSSRSLGSNQECGSSKEGGNQNKVKSMANQLLAKFEESTRNPSLMKQERRVSGIGKPVLCSSSGPPVHSCCPKPEEATPSPSPPLKRQFPSVVVTGHVLRELKQVSAGSECLSRPWRARAKSDLQLGGTENFATLPSTRPRAQALSGVLWRLQQVEEKILQKRAQNLANREFHTKNIKEKAAHLASMFGHGDFPQNKLLSKGLSHTHPPSPPSRLPSPDPAASSSPSTVDSASPARKLTVGKVSSGIGAAAEVLVNLYMNDHRPKAQATSPDLESMRKSFPLNLGGSDTCYFCKKRVYVMERLSAEGHFFHRECFRCSICATTLRLAAYTFDCDEGKFYCKPHFIHCKTNSKQRKRRAELKQQREEEATWQEQEAPRRDTPTESSCAVAAIGTLEGSPPVHFSLPVLHPLLG

SEQ ID NO: 51372 - protein, 976 aa, Homo sapiens
  Payload ID: 10243
  Gene Symbol: MICAL2
  Gene Name: microtubule associated monooxygenase, calponin and LIM domain containing 2
  Uniprot ID: O94851
  ENSP ID: ENSP00000368932
MGENEDEKQAQAGQVFENFVQASTCKGTLQAFNILTRHLDLDPLDHRNFYSKLKSKVTTWKAKALWYKLDKRGSHKEYKRGKSCTNTKCLIVGGGPCGLRTAIELAYLGAKVVVVEKRDSFSRNNVLHLWPFTIHDLRGLGAKKFYGKFCAGSIDHISIRQLQLILFKVALMLGVEIHVNVEFVKVLEPPEDQENQKIGWRAEFLPTDHSLSEFEFDVIIGADGRRNTLEGFRRKEFRGKLAIAITANFINRNSTAEAKVEEISGVAFIFNQKFFQDLKEETGIDLENIVYYKDCTHYFVMTAKKQSLLDKGVIINDYIDTEMLLCAENVNQDNLLSYAREAADFATNYQLPSLDFAMNHYGQPDVAMFDFTCMYASENAALVRERQAHQLLVALVGDSLLEPFWPMGTGCARGFLAAFDTAWMVKSWNQGTPPLELLAERESLYRLLPQTTPENINKNFEQYTLDPGTRYPNLNSHCVRPHQVKHLYITKELEHYPLERLGSVRRSVNLSRKESDIRPSKLLTWCQQQTEGYQHVNVTDLTTSWRSGLALCAIIHRFRPELINFDSLNEDDAVENNQLAFDVAEREFGIPPVTTGKEMASAQEPDKLSMVMYLSKFYELFRGTPLRPVDSWRKNYGENADLSLAKSSISNNYLNLTFPRKRTPRVDGQTGENDMNKRRRKGFTNLDEPSNFSSRSLGSNQECGSSKEGGNQNKVKSMANQLLAKFEESTRNPSLMKQEKKSPSGFHFHPSHLRTVHPQESMRKSFPLNLGGSDTCYFCKKRVYVMERLSAEGHFFHRECFRCSICATTLRLAAYTFDCDEGKFYCKPHFIHCKTNSKQRKRRAELKQQREEEATWQEQEAPRRDTPTESSCAVAAIGTLEGSPPGISTSFFRKVLGWPLRLPRDLCNWMQGLLQAAGLHIRDNAYNYCYMYELLSLGLPLLWAFSEVLAAMYRESEGSLESICNWVLRCFPVKLR

SEQ ID NO: 51373 - protein, 101 aa, Homo sapiens
  Payload ID: 10243
  Gene Symbol: MICAL2
  Gene Name: microtubule associated monooxygenase, calponin and LIM domain containing 2
  ENSP ID: ENSP00000433357
MGENEDEKQAQAGQVFENFVQASTCKGTLQAFNILTRHLDLDPLDHRNFYSKLKSKVTTWKAKALWYKLDKRGSHKEYKRGKSCTNTKCLIVGGGPCGLRT

SEQ ID NO: 51374 - protein, 134 aa, Homo sapiens
  Payload ID: 10243
  Gene Symbol: MICAL2
  Gene Name: microtubule associated monooxygenase, calponin and LIM domain containing 2
  ENSP ID: ENSP00000433509
MGENEDEKQAQAGQVFENFVQASTCKGTLQAFNILTRHLDLDPLDHRNFYSKLKSKVTTWKAKALWYKLDKRGSHKEYKRGKSCTNTKCLIVGGGPCGLRTAIELAYLGAKVVVVEKRDSFSRNNVLHLWPFTI

SEQ ID NO: 51375 - protein, 88 aa, Homo sapiens
  Payload ID: 10243
  Gene Symbol: MICAL2
  Gene Name: microtubule associated monooxygenase, calponin and LIM domain containing 2
  ENSP ID: ENSP00000433818
MGENEDEKQAQAGQVFENFVQASTCKGTLQAFNILTRHLDLDPLDHRNFYSKLKSKVTTWKAKALWYKLDKRGSHKEYKRGKSCTNTK

SEQ ID NO: 51376 - protein, 934 aa, Homo sapiens
  Payload ID: 10243
  Gene Symbol: MICAL2
  Gene Name: microtubule associated monooxygenase, calponin and LIM domain containing 2
  Uniprot ID: O94851
  ENSP ID: ENSP00000433965
MGENEDEKQAQAGQVFENFVQASTCKGTLQAFNILTRHLDLDPLDHRNFYSKLKSKVTTWKAKALWYKLDKRGSHKEYKRGKSCTNTKCLIVGGGPCGLRTAIELAYLGAKVVVVEKRDSFSRNNVLHLWPFTIHDLRGLGAKKFYGKFCAGSIDHISIRQLQLILFKVALMLGVEIHVNVEFVKVLEPPEDQENQKIGWRAEFLPTDHSLSEFEFDVIIGADGRRNTLEGFRRKEFRGKLAIAITANFINRNSTAEAKVEEISGVAFIFNQKFFQDLKEETGIDLENIVYYKDCTHYFVMTAKKQSLLDKGVIINDYIDTEMLLCAENVNQDNLLSYAREAADFATNYQLPSLDFAMNHYGQPDVAMFDFTCMYASENAALVRERQAHQLLVALVGDSLLEPFWPMGTGCARGFLAAFDTAWMVKSWNQGTPPLELLAERESLYRLLPQTTPENINKNFEQYTLDPGTRYPNLNSHCVRPHQVKHLYITKELEHYPLERLGSVRRSVNLSRKESDIRPSKLLTWCQQQTEGYQHVNVTDLTTSWRSGLALCAIIHRFRPELINFDSLNEDDAVENNQLAFDVAEREFGIPPVTTGKEMASAQEPDKLSMVMYLSKFYELFRGTPLRPVDSWRKNYGENADLSLAKSSISNNYLNLTFPRKRTPRVDGQTGENDMNKRRRKGFTNLDEPSNFSSRSLGSNQECGSSKEGGNQNKVKSMANQLLAKFEESTRNPSLMKQEKKSPSGFHFHPSHLRTVHPQLTVGKVSSGIGAAAEVLVNLYMNDHRPKAQATSPDLESMRKSFPLNLGGSDTCYFCKKRVYVMERLSAEGHFFHRECFRCSICATTLRLAAYTFDCDEGKFYCKPHFIHCKTNSKQRKRRAELKQQREEEATWQEQEAPRRDTPTESSCAVAAIGTLEGSPPVHFSLPVLHPLLG

SEQ ID NO: 51377 - protein, 98 aa, Homo sapiens
  Payload ID: 10243
  Gene Symbol: MICAL2
  Gene Name: microtubule associated monooxygenase, calponin and LIM domain containing 2
  ENSP ID: ENSP00000434209
MGENEDEKQAQAGQVFENFVQASTCKGTLQAFNILTRHLDLDPLDHRNFYSKLKSKVTTWKAKALWYKLDKRGSHKEYKRGKSCTNTKCLIVGGGPCG

SEQ ID NO: 51378 - protein, 3 aa, Homo sapiens
  Payload ID: 10243
  Gene Symbol: MICAL2
  Gene Name: microtubule associated monooxygenase, calponin and LIM domain containing 2
  ENSP ID: ENSP00000434957
MGE

SEQ ID NO: 51379 - protein, 88 aa, Homo sapiens; identical to SEQ ID NO: 51375
  Payload ID: 10243
  Gene Symbol: MICAL2
  Gene Name: microtubule associated monooxygenase, calponin and LIM domain containing 2
  ENSP ID: ENSP00000435270

SEQ ID NO: 51380 - protein, 120 aa, Homo sapiens
  Payload ID: 10243
  Gene Symbol: MICAL2
  Gene Name: microtubule associated monooxygenase, calponin and LIM domain containing 2
  ENSP ID: ENSP00000437229
MGENEDEKQAQAGQVFENFVQASTCKGTLQAFNILTRHLDLDPLDHRNFYSKLKSKVTTWKAKALWYKLDKRGSHKEYKRGKSCTNTKCLIVGGGPCGLRTAIELAYLGAKVVVVEKRDS

SEQ ID NO: 51381 - protein, 1124 aa, Homo sapiens; identical to SEQ ID NO: 51370
  Payload ID: 10243
  Gene Symbol: MICAL2
  Gene Name: microtubule associated monooxygenase, calponin and LIM domain containing 2
  Uniprot ID: O94851
  ENSP ID: ENSP00000441689

SEQ ID NO: 51382 - protein, 948 aa, Homo sapiens
  Payload ID: 10244
  Gene Symbol: MICAL3
  Gene Name: microtubule associated monooxygenase, calponin and LIM domain containing 3
  Uniprot ID: Q7RTP6
  ENSP ID: ENSP00000372574
MEERKHETMNPAHVLFDRFVQATTCKGTLKAFQELCDHLELKPKDYRSFYHKLKSKLNYWKAKALWAKLDKRGSHKDYKKGKACTNTKCLIIGAGPCGLRTAIDLSLLGAKVVVIEKRDAFSRNNVLHLWPFTIHDLRGLGAKKFYGKFCAGAIDHISIRQLQLILLKVALILGIEIHVNVEFQGLIQPPEDQENERIGWRALVHPKTHPVSEYEFEVIIGGDGRRNTLEGFRRKEFRGKLAIAITANFINRNTTAEAKVEEISGVAFIFNQKFFQELREATGIDLENIVYYKDDTHYFVMTAKKQSLLDKGVILHDYADTELLLSRENVDQEALLSYAREAADFSTQQQLPSLDFAINHYGQPDVAMFDFTCMYASENAALVREQNGHQLLVALVGDSLLEPFWPMGTGIARGFLAAMDSAWMVRSWSLGTSPLEVLAERESIYRLLPQTTPENVSKNFSQYSIDPVTRYPNINVNFLRPSQVRHLYDTGETKDIHLEMESLVNSRTTPKLTRNESVARSSKLLGWCQRQTDGYAGVNVTDLTMSWKSGLALCAIIHRYRPDLIDFDSLDEQNVEKNNQLAFDIAEKELGISPIMTGKEMASVGEPDKLSMVMYLTQFYEMFKDSLPSSDTLDLNAEEKAVLIASTRSPISFLSKLGQTISRKRSPKDKKEKDLDGAGKRRKTSQSEEEEAPRGHRGERPTLVSTLTDRRMDVAVGNQNKVKYMATQLLAKFEENAPAQSIGIRRQGSMKKEFPQNLGGSDTCYFCQKRVYVMERLSAEGKFFHRSCFKCEYCATTLRLSAYAYDIEDGKFYCKPHYCYRLSGYAQRKRPAVAPLSGKEAKGPLQDGATTDANGRANAVASSTERTPGSGVNGLEEPSIAKRLRGTPERIELENYRLSLRQAEALQEVPEETQAEHNLSSVLDTGAEEDVASRSARRAAGRPPATRP

SEQ ID NO: 51383 - protein, 966 aa, Homo sapiens
  Payload ID: 10244
  Gene Symbol: MICAL3
  Gene Name: microtubule associated monooxygenase, calponin and LIM domain containing 3
  Uniprot ID: Q7RTP6
  ENSP ID: ENSP00000383406
MEERKHETMNPAHVLFDRFVQATTCKGTLKAFQELCDHLELKPKDYRSFYHKLKSKLNYWKAKALWAKLDKRGSHKDYKKGKACTNTKCLIIGAGPCGLRTAIDLSLLGAKVVVIEKRDAFSRNNVLHLWPFTIHDLRGLGAKKFYGKFCAGAIDHISIRQLQLILLKVALILGIEIHVNVEFQGLIQPPEDQENERIGWRALVHPKTHPVSEYEFEVIIGGDGRRNTLEGFRRKEFRGKLAIAITANFINRNTTAEAKVEEISGVAFIFNQKFFQELREATGIDLENIVYYKDDTHYFVMTAKKQSLLDKGVILHDYADTELLLSRENVDQEALLSYAREAADFSTQQQLPSLDFAINHYGQPDVAMFDFTCMYASENAALVREQNGHQLLVALVGDSLLEPFWPMGTGIARGFLAAMDSAWMVRSWSLGTSPLEVLAERESIYRLLPQTTPENVSKNFSQYSIDPVTRYPNINVNFLRPSQVRHLYDTGETKDIHLEMESLVNSRTTPKLTRNESVARSSKLLGWCQRQTDGYAGVNVTDLTMSWKSGLALCAIIHRYRPDLIDFDSLDEQNVEKNNQLAFDIAEKELGISPIMTGKEMASVGEPDKLSMVMYLTQFYEMFKDSLPSSDTLDLNAEEKAVLIASTRSPISFLSKLGQTISRKRSPKDKKEKDLDGAGKRRKTSQSEEEEAPRGHRGERPTLVSTLTDRRMDVAVGNQNKVKYMATQLLAKFEENAPAQSIGIRRQGSMKKEFPQNLGGSDTCYFCQKRVYVMERLSAEGKFFHRSCFKCEYCATTLRLSAYAYDIEDGKFYCKPHYCYRLSGYAQRKRPAVAPLSGKEAKGPLQDGATTDANGRANAVASSTERTPGSGVNGLEEPSIAKRLRGTPERIELENYRLSLRQAEALQEVPEETQAEHNLSSVLDTGAEEDVASRDWVSPWLPRMVSNSWAQMIHPPQPPTVLGSQM

SEQ ID NO: 51384 - protein, 976 aa, Homo sapiens
  Payload ID: 10244
  Gene Symbol: MICAL3
  Gene Name: microtubule associated monooxygenase, calponin and LIM domain containing 3
  Uniprot ID: Q7RTP6
  ENSP ID: ENSP00000391827
MEERKHETMNPAHVLFDRFVQATTCKGTLKAFQELCDHLELKPKDYRSFYHKLKSKLNYWKAKALWAKLDKRGSHKDYKKGKACTNTKCLIIGAGPCGLRTAIDLSLLGAKVVVIEKRDAFSRNNVLHLWPFTIHDLRGLGAKKFYGKFCAGAIDHISIRQLQLILLKVALILGIEIHVNVEFQGLIQPPEDQENERIGWRALVHPKTHPVSEYEFEVIIGGDGRRNTLEGFRRKEFRGKLAIAITANFINRNTTAEAKVEEISGVAFIFNQKFFQELREATGIDLENIVYYKDDTHYFVMTAKKQSLLDKGVILHDYADTELLLSRENVDQEALLSYAREAADFSTQQQLPSLDFAINHYGQPDVAMFDFTCMYASENAALVREQNGHQLLVALVGDSLLEPFWPMGTGIARGFLAAMDSAWMVRSWSLGTSPLEVLAERESIYRLLPQTTPENVSKNFSQYSIDPVTRYPNINVNFLRPSQVRHLYDTGETKDIHLEMESLVNSRTTPKLTRNESVARSSKLLGWCQRQTDGYAGVNVTDLTMSWKSGLALCAIIHRYRPDLIDFDSLDEQNVEKNNQLAFDIAEKELGISPIMTGKEMASVGEPDKLSMVMYLTQFYEMFKDSLPSSDTLDLNAEEKAVLIASTRSPISFLSKLGQTISRKRSPKDKKEKDLDGAGKRRKTSQSEEEEAPRGHRGERPTLVSTLTDRRMDVAVGNQNKVKYMATQLLAKFEENAPAQSIGIRRQLTQERGASQPSCCLPGQVRPAPTPRWKQGSMKKEFPQNLGGSDTCYFCQKRVYVMERLSAEGKFFHRSCFKCEYCATTLRLSAYAYDIEDGKFYCKPHYCYRLSGYAQRKRPAVAPLSGKEAKGPLQDGATTDANGRANAVASSTERTPGSGVNGLEEPSIAKRLRGTPERIELENYRLSLRQAEALQEVPEETQAEHNLSSVLDTGAEEDVASRSARRAAGRPPATRP

SEQ ID NO: 51385 - protein, 125 aa, Homo sapiens
  Payload ID: 10244
  Gene Symbol: MICAL3
  Gene Name: microtubule associated monooxygenase, calponin and LIM domain containing 3
  ENSP ID: ENSP00000406193
MEERKHETMNPAHVLFDRFVQATTCKGTLKAFQELCDHLELKPKDYRSFYHKLKSKLNYWKAKALWAKLDKRGSHKDYKKGKACTNTKCLIIGAGPCGLRTAIDLSLLGAKVVVIEKRDAFSRNN

SEQ ID NO: 51386 - protein, 2002 aa, Homo sapiens
  Payload ID: 10244
  Gene Symbol: MICAL3
  Gene Name: microtubule associated monooxygenase, calponin and LIM domain containing 3
  Uniprot ID: Q7RTP6
  ENSP ID: ENSP00000416015
MEERKHETMNPAHVLFDRFVQATTCKGTLKAFQELCDHLELKPKDYRSFYHKLKSKLNYWKAKALWAKLDKRGSHKDYKKGKACTNTKCLIIGAGPCGLRTAIDLSLLGAKVVVIEKRDAFSRNNVLHLWPFTIHDLRGLGAKKFYGKFCAGAIDHISIRQLQLILLKVALILGIEIHVNVEFQGLIQPPEDQENERIGWRALVHPKTHPVSEYEFEVIIGGDGRRNTLEGFRRKEFRGKLAIAITANFINRNTTAEAKVEEISGVAFIFNQKFFQELREATGIDLENIVYYKDDTHYFVMTAKKQSLLDKGVILHDYADTELLLSRENVDQEALLSYAREAADFSTQQQLPSLDFAINHYGQPDVAMFDFTCMYASENAALVREQNGHQLLVALVGDSLLEPFWPMGTGIARGFLAAMDSAWMVRSWSLGTSPLEVLAERESIYRLLPQTTPENVSKNFSQYSIDPVTRYPNINVNFLRPSQVRHLYDTGETKDIHLEMESLVNSRTTPKLTRNESVARSSKLLGWCQRQTDGYAGVNVTDLTMSWKSGLALCAIIHRYRPDLIDFDSLDEQNVEKNNQLAFDIAEKELGISPIMTGKEMASVGEPDKLSMVMYLTQFYEMFKDSLPSSDTLDLNAEEKAVLIASTRSPISFLSKLGQTISRKRSPKDKKEKDLDGAGKRRKTSQSEEEEAPRGHRGERPTLVSTLTDRRMDVAVGNQNKVKYMATQLLAKFEENAPAQSIGIRRQGSMKKEFPQNLGGSDTCYFCQKRVYVMERLSAEGKFFHRSCFKCEYCATTLRLSAYAYDIEDGKFYCKPHYCYRLSGYAQRKRPAVAPLSGKEAKGPLQDGATTDANGRANAVASSTERTPGSGVNGLEEPSIAKRLRGTPERIELENYRLSLRQAEALQEVPEETQAEHNLSSVLDTGAEEDVASSSSESEMEEEGEEEEEEPRLPPSDLGGVPWKEAVRIHALLKGKSEEELEASKSFGPGNEEEEEEEEEYEEEEEEDYDEEEEESSEAGNQRLQQVMHAADPLEIQADVHWTHIREREEEERMAPASESSASGAPLDENDLEEDVDSEPAEIEGEAAEDGDPGDTGAELDDDQHWSDSPSDADRELRLPCPAEGEAELELRVSEDEEKLPASPKHQERGPSQATSPIRSPQESALLFIPVHSPSTEGPQLPPVPAATQEKSPEERLFPEPLLPKEKPKADAPSDLKAVHSPIRSQPVTLPEARTPVSPGSPQPQPPVAASTPPPSPLPICSQPQPSTEATVPSPTQSPIRFQPAPAKTSTPLAPLPVQSQSDTKDRLGSPLAVDEALRRSDLVEEFWMKSAEIRRSLGLTPVDRSKGPEPSFPTPAFRPVSLKSYSVEKSPQDEGLHLLKPLSIPKRLGLPKPEGEPLSLPTPRSPSDRELRSAQEERRELSSSSGLGLHGSSSNMKTLGSQSFNTSDSAMLTPPSSPPPPPPPGEEPATLRRKLREAEPNASVVPPPLPATWMRPPREPAQPPREEVRKSFVESVEEIPFADDVEDTYDDKTEDSSLQEKFFTPPSCWPRPEKPRHPPLAKENGRLPALEGTLQPQKRGLPLVSAEAKELAEERMRAREKSVKSQALRDAMARQLSRMQQMELASGAPRPRKASSAPSQGKERRPDSPTRPTLRGSEEPTLKHEATSEEVLSPPSDSGGPDGSFTSSEGSSGKSKKRSSLFSPRRNKKEKKSKGEGRPPEKPSSNLLEEAAAKPKSLWKSVFSGYKKDKKKKADDKSCPSTPSSGATVDSGKHRVLPVVRAELQLRRQLSFSEDSDLSSDDVLEKSSQKSRREPRTYTEEELNAKLTRRVQKAARRQAKQEELKRLHRAQIIQRQLQQVEERQRRLEERGVAVEKALRGEAGMGKKDDPKLMQEWFKLVQEKNAMVRYESELMIFARELELEDRQSRLQQELRERMAVEDHLKTEEELSEEKQILNEMLEVVEQRDSLVALLEEQRLREREEDKDLEAAMLSKGFSLNWS

SEQ ID NO: 51387 - protein, 335 aa, Homo sapiens
  Payload ID: 10244
  Gene Symbol: MICAL3
  Gene Name: microtubule associated monooxygenase, calponin and LIM domain containing 3
  ENSP ID: ENSP00000434678
MEERKHETMNPAHVLFDRFVQATTCKGTLKAFQELCDHLELKPKDYRSFYHKLKSKLNYWKAKALWAKLDKRGSHKDYKKGKACTNTKCLIIGAGPCGLRTAIDLSLLGAKVVVIEKRDAFSRNNVLHLWPFTIHDLRGLGAKKFYGKFCAGAIDHISIRQLQLILLKVALILGIEIHVNVEFQGLIQPPEDQENERIGWRALVHPKTHPVSEYEFEVIIGGDGRRNTLEGFRRKEFRGKLAIAITANFINRNTTAEAKVEEISGVAFIFNQKFFQELREATGLRRHRAPAFPRKRGPGGSAQLCQGGGRLLYPAAAAVSGFCHQSLWAARCGHV

SEQ ID NO: 51388 - protein, 1073 aa, Homo sapiens
  Payload ID: 10244
  Gene Symbol: MICAL3
  Gene Name: microtubule associated monooxygenase, calponin and LIM domain containing 3
  Uniprot ID: Q7RTP6
  ENSP ID: ENSP00000462033
MEERKHETMNPAHVLFDRFVQATTCKGTLKAFQELCDHLELKPKDYRSFYHKLKSKLNYWKAKALWAKLDKRGSHKDYKKGKACTNTKCLIIGAGPCGLRTAIDLSLLGAKVVVIEKRDAFSRNNVLHLWPFTIHDLRGLGAKKFYGKFCAGAIDHISIRQLQLILLKVALILGIEIHVNVEFQGLIQPPEDQENERIGWRALVHPKTHPVSEYEFEVIIGGDGRRNTLEGFRRKEFRGKLAIAITANFINRNTTAEAKVEEISGVAFIFNQKFFQELREATGIDLENIVYYKDDTHYFVMTAKKQSLLDKGVILHDYADTELLLSRENVDQEALLSYAREAADFSTQQQLPSLDFAINHYGQPDVAMFDFTCMYASENAALVREQNGHQLLVALVGDSLLEPFWPMGTGIARGFLAAMDSAWMVRSWSLGTSPLEVLAERESIYRLLPQTTPENVSKNFSQYSIDPVTRYPNINVNFLRPSQVRHLYDTGETKDIHLEMESLVNSRTTPKLTRNESVARSSKLLGWCQRQTDGYAGVNVTDLTMSWKSGLALCAIIHRYRPDLIDFDSLDEQNVEKNNQLAFDIAEKELGISPIMTGKEMASVGEPDKLSMVMYLTQFYEMFKDSLPSSDTLDLNAEEKAVLIASTRSPISFLSKLGQTISRKRSPKDKKEKDLDGAGKRRKTSQSEEEEAPRGHRGERPTLVSTLTDRRMDVAVGNQNKVKYMATQLLAKFEENAPAQSIGIRRQQREKECSRTCPKKVITLSPPPTPPPCRAHGGQQTYRDLDADNRGKQSPHHERPEPEPPRRFFVDQWELSLSLRSSARPASPSSDSLRQKYIKMYTGGVSSLAEQIANQLQRKEQPKALLDKKELGSMKKEFPQNLGGSDTCYFCQKRVYVMERLSAEGKFFHRSCFKCEYCATTLRLSAYAYDIEDGKFYCKPHYCYRLSGYAQRKRPAVAPLSGKEAKGPLQDGATTDANGRANAVASSTERTPGSLTSLFGWVARHSLGLCDKAKGMSQHLQSNISSFGQQVAQNPLDSFFMCQLLAFGVPFLYGLSEVLVQIRGEFHWQAVAQ

SEQ ID NO: 51389 - protein, 173 aa, Homo sapiens
  Payload ID: 10244
  Gene Symbol: MICAL3
  Gene Name: microtubule associated monooxygenase, calponin and LIM domain containing 3
  ENSP ID: ENSP00000462107
GYKKDKKKKADDKSCPSTPSSGATVDSGKHRVLPVVRAELQLRRQLSFSEDSDLSSDDVLEKSSQKSRREPRTYTEEELNAKLTRRVQKAARRQAKQEELKRLHRAQIIQRQLQQVEERQRRLEERGVAVEKALRGEAVEPSGGTPRRRPLSFCPCCVQEGMGKKDDPKLMQE

SEQ ID NO: 51390 - protein, 496 aa, Homo sapiens
  Payload ID: 10244
  Gene Symbol: MICAL3
  Gene Name: microtubule associated monooxygenase, calponin and LIM domain containing 3
  ENSP ID: ENSP00000462531
  MOD_RES (1)..(1): Any amino acid
XQVRHLYDTGETKDIHLEMESLVNSRTTPKLTRNESVARSSKLLGWCQRQTDGYAGVNVTDLTMSWKSGLALCAIIHRYRPDLIDFDSLDEQNVEKNNQLAFDIAEKELGISPIMTGKEMASVGEPDKLSMVMYLTQFYEMFKDSLPSSDTLDLNAEEKAVLIASTRSPISFLSKLGQTISRKRSPKDKKEKDLDGAGKRRKTSQSEEEEAPRGHRGERPTLVSTLTDRRMDVAVGNQNKVKYMATQLLAKFEENAPAQSIGIRRQLTQERGASQPSCCLPGQVRPAPTPRWKQGSMKKEFPQNLGGSDTCYFCQKRVYVMERLSAEGKFFHRSCFKCEYCATTLRLSAYAYDIEDGKFYCKPHYCYRLSGYAQRKRPAVAPLSGKEAKGPLQDGATTDANGRANAVASSTERTPGSLTSLFGWVARHSLGLCDKAKGMSQHLQSNISSFGQQVAQNPLDSFFMCQLLAFGVPFLYGLSEVLVQIRGEFHWQAVAQ

SEQ ID NO: 51391 - protein, 139 aa, Homo sapiens
  Payload ID: 10244
  Gene Symbol: MICAL3
  Gene Name: microtubule associated monooxygenase, calponin and LIM domain containing 3
  ENSP ID: ENSP00000462905
  MOD_RES (1)..(1): Any amino acid
XQEELKRLHRAQIIQRQLQQVEERQRRLEERGVAVEKALRGEADYWGESYYSDLIDLHLGGMYGSACADTNPADALSPPTLPSPCSQKQGEINPITKWQKHRPFSSSKQSSVLISPLPTCAPEEDLSLLLLPGVVFNFL

SEQ ID NO: 51392 - protein, 190 aa, Homo sapiens
  Payload ID: 10244
  Gene Symbol: MICAL3
  Gene Name: microtubule associated monooxygenase, calponin and LIM domain containing 3
  ENSP ID: ENSP00000463453
  MOD_RES (1)..(1): Any amino acid
XEEEEEEYEEEEEEDYDEEEEESSEVPDLPSIRHAAVQAWLETVSGAPLDENDLEEDVDSEPAEIEGEAAEDGDPGDTGAELDDDQHWSDSPSDADRELRLPCPAEGEAELELRVSEDEEKLPASPKHQERGPSQATSPIRSPQESALLFIPVHSPSTEGPQLPPVPAATQEKSPEERLFPEPLLPKEKP

SEQ ID NO: 51393 - protein, 269 aa, Homo sapiens
  Payload ID: 10244
  Gene Symbol: MICAL3
  Gene Name: microtubule associated monooxygenase, calponin and LIM domain containing 3
  ENSP ID: ENSP00000463882
  MOD_RES (1)..(1): Any amino acid
XSSNLLEEAAAKPKSLWKSVFSGYKKDKKKKADDKSCPSTPSSGATVDSGKHRVLPVVRAELQLRRQLSFSEDSDLSSDDVLEKSSQKSRRESIYVPHALAFRRSCASKPRTYTEEELNAKLTRRVQKAARRQAKQEELKRLHRAQIIQRQLQQVEERQRRLEERGVAVEKALRGEADYWGESYYSDLIDLHLGGMGKKDDPKLMQEWFKLVQEKNAMVRYESELMIFARELELEDRQSRLQQELRERMAVEGEWGKAPMEARVGATSR

SEQ ID NO: 51394 - protein, 198 aa, Homo sapiens
  Payload ID: 10244
  Gene Symbol: MICAL3
  Gene Name: microtubule associated monooxygenase, calponin and LIM domain containing 3
  ENSP ID: ENSP00000464007
  MOD_RES (1)..(1): Any amino acid
XALLKGKSEEELEASKSFGPGNEEEEEEEEEYEEEEEEDYDEEEEESSEAPLDENDLEEDVDSEPAEIEGEAAEDGDPGDTGAELDDDQHWSDSPSDADRELRLPCPAEGEAELELRVSEDEEKLPASPKHQERGPSQATSPIRSPQESALLFIPVHSPSTEGPQLPPVPAATQEKSPEERLFPEPLLPKEKPKADAP

SEQ ID NO: 51395 - protein, 1570 aa, Homo sapiens
  Payload ID: 10245
  Gene Symbol: MAST1
  Gene Name: microtubule associated serine/threonine kinase 1
  Uniprot ID: Q9Y2H9
  ENSP ID: ENSP00000251472
MSDSLWTALSNFSMPSFPGGSMFRRTKSCRTSNRKSLILTSTSPTLPRPHSPLPGHLGSSPLDSPRNFSPNTPAHFSFASSRRADGRRWSLASLPSSGYGTNTPSSTVSSSCSSQERLHQLPYQPTVDELHFLSKHFGSTESITDEDGGRRSPAVRPRSRSLSPGRSPSSYDNEIVMMNHVYKERFPKATAQMEEKLRDFTRAYEPDSVLPLADGVLSFIHHQIIELARDCLTKSRDGLITTVYFYELQENLEKLLQDAYERSESLEVAFVTQLVKKLLIIISRPARLLECLEFNPEEFYHLLEAAEGHAKEGHLVKTDIPRYIIRQLGLTRDPFPDVVHLEEQDSGGSNTPEQDDLSEGRSSKAKKPPGENDFDTIKLISNGAYGAVYLVRHRDTRQRFAMKKINKQNLILRNQIQQAFVERDILTFAENPFVVGMFCSFETRRHLCMVMEYVEGGDCATLLKNIGALPVEMARMYFAETVLALEYLHNYGIVHRDLKPDNLLITSMGHIKLTDFGLSKMGLMSLTTNLYEGHIEKDAREFLDKQVCGTPEYIAPEVILRQGYGKPVDWWAMGIILYEFLVGCVPFFGDTPEELFGQVISDDILWPEGDEALPTEAQLLISSLLQTNPLVRLGAGGAFEVKQHSFFRDLDWTGLLRQKAEFIPHLESEDDTSYFDTRSDRYHHVNSYDEDDTTEEEPVEIRQFSSCSPRFSKVYSSMEQLSQHEPKTPVAAAGSSKREPSTKGPEEKVAGKREGLGGLTLREKTWRGGSPEIKRFSASEASFLEGEASPPLGARRRFSALLEPSRFSAPQEDEDEARLRRPPRPSSDPAGSLDARAPKEETQGEGTSSAGDSEATDRPRPGDLCPPSKDGDASGPRATNDLVLRRARHQQMSGDVAVEKRPSRTGGKVIKSASATALSVMIPAVDPHGSSPLASPMSPRSLSSNPSSRDSSPSRDYSPAVSGLRSPITIQRSGKKYGFTLRAIRVYMGDTDVYSVHHIVWHVEEGGPAQEAGLCAGDLITHVNGEPVHGMVHPEVVELILKSGNKVAVTTTPFENTSIRIGPARRSSYKAKMARRNKRPSAKEGQESKKRSSLFRKITKQSNLLHTSRSLSSLNRSLSSSDSLPGSPTHGLPARSPTHSYRSTPDSAYLGASSQSSSPASSTPNSPASSASHHIRPSTLHGLSPKLHRQYRSARCKSAGNIPLSPLAHTPSPTQASPPPLPGHTVGSSHTTQSFPAKLHSSPPVVRPRPKSAEPPRSPLLKRVQSAEKLGASLSADKKGALRKHSLEVGHPDFRKDFHGELALHSLAESDGETPPVEGLGAPRQVAVRRLGRQESPLSLGADPLLPEGASRPPVSSKEKESPGGAEACTPPRATTPGGRTLERDVGCTRHQSVQTEDGTGGMARAVAKAALSPVQEHETGRRSSSGEAGTPLVPIVVEPARPGAKAVVPQPLGADSKGLQEPAPLAPSVPEAPRGRERWVLEVVEERTTLSGPRSKPASPKLSPEPQTPSLAPAKCSAPSSAVTPVPPASLLGSGTKPQVGLTSRCPAEAVPPAGLTKKGVSSPAPPGP

SEQ ID NO: 51396 - protein, 133 aa, Homo sapiens
  Payload ID: 10245
  Gene Symbol: MAST1
  Gene Name: microtubule associated serine/threonine kinase 1
  ENSP ID: ENSP00000465187
  MOD_RES (1)..(1): Any amino acid
XRAPPPSLPQATAQMEEKLRDFTRAYEPDSVLPLADGVLSFIHHQIIELARDCLTKSRDGLITTVYFYELQENLEKLLQDAYERSESLEVAFVTQLVKKLLIIISRPARLLECLEFNPEEFYHLLEAAEGHAK

SEQ ID NO: 51397 - protein, 433 aa, Homo sapiens
  Payload ID: 10245
  Gene Symbol: MAST1
  Gene Name: microtubule associated serine/threonine kinase 1
  ENSP ID: ENSP00000465395
  MOD_RES (1)..(1): Any amino acid
XRPHSPLPGHLGSSPLDSPRNFSPNTPAHFSFASSRRADGRRWSLASLPSSGYGTNTPSSTVSSSCSSQERLHQLPYQPTVDELHFLSKHFGSTESITDEDGGRRSPAVRPRSRSLSPGRSPSSYDNEIVMMNHVYKERFPKATAQMEEKLRDFTRAYEPDSVLPLADGVLSFIHHQIIELARDCLTKSRDGLITTVYFYELQENLEKLLQDAYERSESLEVAFVTQLVKKLLIIISRPARLLECLEFNPEEFYHLLEAAEGHAKEGHLVKTDIPRYIIRQLGLTRDPFPDVVHLEEQDSGGSNTPEQDDLSEGRSSKAKKPPGENDFDTIKLISNGAYGAVYLVRHRDTRQRFAMKKINKQNLILRNQIQQAFVERDILTFAENPFVVGMFCSFETRRHLCMVMEYVEGVAACGAAGKMGPCSLVRAAGWPA

SEQ ID NO: 51398 - protein, 475 aa, Homo sapiens
  Payload ID: 10245
  Gene Symbol: MAST1
  Gene Name: microtubule associated serine/threonine kinase 1
  ENSP ID: ENSP00000466470
MDDSGLIRRRRLQKDLPLPRKSSSCRTSNRKSLILTSTSPTLPRPHSPLPGHLGSSPLDSPRNFSPNTPAHFSFASSRRADGRRWSLASLPSSGYGTNTPSSTVSSSCSSQERLHQLPYQPTVDELHFLSKHFGSTESITDEDGGRRSPAVRPRSRSLSPGRSPSSYDNEIVMMNHVYKERFPKATAQMEEKLRDFTRAYEPDSVLPLADGVLSFIHHQIIELARDCLTKSRDGLITTVYFYELQENLEKLLQDAYERSESLEVAFVTQLVKKLLIIISRPARLLECLEFNPEEFYHLLEAAEGHAKEGHLVKTDIPRYIIRQLGLTRDPFPDVVHLEEQDSGGSNTPEQDDLSEGRSSKAKKPPGENDFDTIKLISNGAYGAVYLVRHRDTRQRFAMKKINKQNLILRNQIQQAFVERDILTFAENPFVVGMFCSFETRRHLCMVMEYVEGVAACGAAGKMGPCSLVRAAGWPA

SEQ ID NO: 51399 - protein, 1798 aa, Homo sapiens
  Payload ID: 10246
  Gene Symbol: MAST2
  Gene Name: microtubule associated serine/threonine kinase 2
  Uniprot ID: Q6P0Q8
  ENSP ID: ENSP00000354671
MKRSRCRDRPQPPPPDRREDGVQRAAELSQSLPPRRRAPPGRQRLEERTGPAGPEGKEQDVVTGVSPLLFRKLSNPDIFSSTGKVKLQRQLSQDDCKLWRGNLASSLSGKQLLPLSSSVHSSVGQVTWQSSGEASNLVRMRNQSLGQSAPSLTAGLKELSLPRRGSFCRTSNRKSLIVTSSTSPTLPRPHSPLHGHTGNSPLDSPRNFSPNAPAHFSFVPARRTDGRRWSLASLPSSGYGTNTPSSTVSSSCSSQEKLHQLPFQPTADELHFLTKHFSTESVPDEEGRQSPAMRPRSRSLSPGRSPVSFDSEIIMMNHVYKERFPKATAQMEERLAEFISSNTPDSVLPLADGALSFIHHQVIEMARDCLDKSRSGLITSQYFYELQDNLEKLLQDAHERSESSEVAFVMQLVKKLMIIIARPARLLECLEFDPEEFYHLLEAAEGHAKEGQGIKCDIPRYIVSQLGLTRDPLEEMAQLSSCDSPDTPETDDSIEGHGASLPSKKTPSEEDFETIKLISNGAYGAVFLVRHKSTRQRFAMKKINKQNLILRNQIQQAFVERDILTFAENPFVVSMFCSFDTKRHLCMVMEYVEGGDCATLLKNIGALPVDMVRLYFAETVLALEYLHNYGIVHRDLKPDNLLITSMGHIKLTDFGLSKIGLMSLTTNLYEGHIEKDAREFLDKQVCGTPEYIAPEVILRQGYGKPVDWWAMGIILYEFLVGCVPFFGDTPEELFGQVISDEIVWPEGDEALPPDAQDLTSKLLHQNPLERLGTGSAYEVKQHPFFTGLDWTGLLRQKAEFIPQLESEDDTSYFDTRSERYHHMDSEDEEEVSEDGCLEIRQFSSCSPRFNKVYSSMERLSLLEERRTPPPTKRSLSEEKEDHSDGLAGLKGRDRSWVIGSPEILRKRLSVSESSHTESDSSPPMTVRRRCSGLLDAPRFPEGPEEASSTLRRQPQEGIWVLTPPSGEGVSGPVTEHSGEQRPKLDEEAVGRSSGSSPAMETRGRGTSQLAEGATAKAISDLAVRRARHRLLSGDSTEKRTARPVNKVIKSASATALSLLIPSEHHTCSPLASPMSPHSQSSNPSSRDSSPSRDFLPALGSMRPPIIIHRAGKKYGFTLRAIRVYMGDSDVYTVHHMVWHVEDGGPASEAGLRQGDLITHVNGEPVHGLVHTEVVELILKSGNKVAISTTPLENTSIKVGPARKGSYKAKMARRSKRSRGKDGQESRKRSSLFRKITKQASLLHTSRSLSSLNRSLSSGESGPGSPTHSHSLSPRSPTQGYRVTPDAVHSVGGNSSQSSSPSSSVPSSPAGSGHTRPSSLHGLAPKLQRQYRSPRRKSAGSIPLSPLAHTPSPPPPTASPQRSPSPLSGHVAQAFPTKLHLSPPLGRQLSRPKSAEPPRSPLLKRVQSAEKLAAALAASEKKLATSRKHSLDLPHSELKKELPPREVSPLEVVGARSVLSGKGALPGKGVLQPAPSRALGTLRQDRAERRESLQKQEAIREVDSSEDDTEEGPENSQGAQELSLAPHPEVSQSVAPKGAGESGEEDPFPSRDPRSLGPMVPSLLTGITLGPPRMESPSGPHRRLGSPQAIEEAASSSSAGPNLGQSGATDPIPPEGCWKAQHLHTQALTALSPSTSGLTPTSSCSPPSSTSGKLSMWSWKSLIEGPDRASPSRKATMAGGLANLQDLENTTPAQPKNLSPREQGKTQPPSAPRLAHPSYEDPSQGWLWESECAQAVKEDPALSITQVPDASGDRRQDVPCRGCPLTQKSEPSLRRGQEPGGHQKHRDLALVPDELLKQT

SEQ ID NO: 51400 - protein, 787 aa, Homo sapiens
  Payload ID: 10246
  Gene Symbol: MAST2
  Gene Name: microtubule associated serine/threonine kinase 2
  ENSP ID: ENSP00000361078
MFSPTSAPALFLTKVPFSADCALATSPLAIFLNPRAHSSPGTPCSSRPLPWSCRTSNRKSLIVTSSTSPTLPRPHSPLHGHTGNSPLDSPRNFSPNAPAHFSFVPARRTDGRRWSLASLPSSGYGTNTPSSTVSSSCSSQEKLHQLPFQPTADELHFLTKHFSTESVPDEEGRQSPAMRPRSRSLSPGRSPVSFDSEIIMMNHVYKERFPKATAQMEERLAEFISSNTPDSVLPLADGALSFIHHQVIEMARDCLDKSRSGLITSQYFYELQDNLEKLLQDAHERSESSEVAFVMQLVKKLMIIIARPARLLECLEFDPEEFYHLLEAAEGHAKEGQGIKCDIPRYIVSQLGLTRDPLEEMAQLSSCDSPDTPETDDSIEGHGASLPSKKTPSEEDFETIKLISNGAYGAVFLVRHKSTRQRFAMKKINKQNLILRNQIQQAFVERDILTFAENPFVVSMFCSFDTKRHLCMVMEYVEGGDCATLLKNIGALPVDMVRLYFAETVLALEYLHNYGIVHRDLKPDNLLITSMGHIKLTDFGLSKIGLMSLTTNLYEGHIEKDAREFLDKQVCGTPEYIAPEVILRQGYGKPVDWWAMGIILYEFLVGCVPFFGDTPEELFGQVISDEIVWPEGDEALPPDAQDLTSKLLHQNPLERLGTGSAYEVKQHPFFTGLDWTGLLRQKAEFIPQLESEDDTSYFDTRSERYHHMDSEDEEEVSEDGCLEIRQFSSCSPRFNKVYSSMERLSLLEERRTPPPTKRSLSEEKEDHSDGLAGLKGRDRSWVIGSPE

SEQ ID NO: 51401 - protein, 791 aa, Homo sapiens
  Payload ID: 10246
  Gene Symbol: MAST2
  Gene Name: microtubule associated serine/threonine kinase 2
  ENSP ID: ENSP00000361079
MRPRSRSLSPGRSPVSFDSEIIMMNHVYKERFPKAHERSESSEVAFVMQLVKKLMIIIARPARLLECLEFDPEEFYHLLEAAEGHAKEGQGIKCDIPRYIVSQLGLTRDPLEEMAQLSSCDSPDTPETDDSIEGHGASLPSKKTPSEEDFETIKLISNGAYGAVFLVRHKSTRQRFAMKKINKQNLILRNQIQQAFVERDILTFAENPFVVSMFCSFDTKRHLCMVMEYVEGGDCATLLKNIGALPVDMVRLYFAETVLALEYLHNYGIVHRDLKPDNLLITSMGHIKLTDFGLSKIGLMSLTTNLYEGHIEKDAREFLDKQVCGTPEYIAPEVILRQGYGKPVDWWAMGIILYEFLVGCVPFFGDTPEELFGQVISDEIVWPEGDEALPPDAQDLTSKLLHQNPLERLGTGSAYEVKQHPFFTGLDWTGLLRQKAEFIPQLESEDDTSYFDTRSERYHHMDSEDEEEVSEDGCLEIRQFSSCSPRFNKVYSSMERLSLLEERRTPPPTKRSLSEEKEDHSDGLAGLKGRDRSWVIGSPEILRKRLSVSESSHTESDSSPPMTVRRRCSGLLDAPRFPEGPEEASSTLRRQPQEGIWVLTPPSGEGVSGPVTEHSGEQRPKLDEEAVGRSSGSSPAMETRGRGTSQLAEGATAKAISDLAVRRARHRLLSGDSTEKRTARPVNKVIKSASATALSLLIPSEHHTCSPLASPMSPHSQSSNPSSRDSSPRSMASPCGPFASTWVTPMSTPCTIWCGTWRMEVRPVRQGFVKVTSSPMSMGNLCMAWCTRRWS

SEQ ID NO: 51402 - protein, 1309 aa, Homo sapiens
  Payload ID: 10247
  Gene Symbol: MAST3
  Gene Name: microtubule associated serine/threonine kinase 3
  Uniprot ID: O60307
  ENSP ID: ENSP00000262811
MDESSLLRRRGLQKELSLPRRGRGCRSGNRKSLVVGTPSPTLSRPLSPLSVPTAGSSPLDSPRNFSAASALNFPFARRADGRRWSLASLPSSGYGTNTPSSTLSSSSSSRERLHQLPFQPTPDELHFLSKHFRSSENVLDEEGGRSPRLRPRSRSLSPGRATGTFDNEIVMMNHVYRERFPKATAQMEGRLQEFLTAYAPGARLALADGVLGFIHHQIVELARDCLAKSGENLVTSRYFLEMQEKLERLLQDAHERSDSEEVSFIVQLVRKLLIIISRPARLLECLEFDPEEFYHLLEAAEGHAREGQGIKTDLPQYIIGQLGLAKDPLEEMVPLSHLEEEQPPAPESPESRALVGQSRRKPCESDFETIKLISNGAYGAVYLVRHRDTRQRFAIKKINKQNLILRNQIQQVFVERDILTFAENPFVVSMFCSFETRRHLCMVMEYVEGGDCATLLKNMGPLPVDMARLYFAETVLALEYLHNYGIVHRDLKPDNLLITSLGHIKLTDFGLSKIGLMSMATNLYEGHIEKDAREFIDKQVCGTPEYIAPEVIFRQGYGKPVDWWAMGVVLYEFLVGCVPFFGDTPEELFGQVVSDEIMWPEGDEALPADAQDLITRLLRQSPLDRLGTGGTHEVKQHPFFLALDWAGLLRHKAEFVPQLEAEDDTSYFDTRSERYRHLGSEDDETNDEESSTEIPQFSSCSHRFSKVYSSSEFLAVQPTPTFAERSFSEDREEGWERSEVDYGRRLSADIRLRSWTSSGSSCQSSSSQPERGPSPSLLNTISLDTMPKFAFSSEDEGVGPGPAGPKRPVFILGEPDPPPAATPVMPKPSSLSADTAALSHARLRSNSIGARHSTPRPLDAGRGRRLGGPRDPAPEKSRASSSGGSGGGSGGRVPKSASVSALSLIITADDGSGGPLMSPLSPRSLSSNPSSRDSSPSRDPSPVCGSLRPPIVIHSSGKKYGFSLRAIRVYMGDSDVYTVHHVVWSVEDGSPAQEAGLRAGDLITHINGESVLGLVHMDVVELLLKSGNKISLRTTALENTSIKVGPARKNVAKGRMARRSKRSRRRETQDRRKSLFKKISKQTSVLHTSRSFSSGLHHSLSSSESLPGSPTHSLSPSPTTPCRSPAPDVPADTTASPPSASPSSSSPASPAAAGHTRPSSLHGLAAKLGPPRPKTGRRKSTSSIPPSPLACPPISAPPPRSPSPLPGHPPAPARSPRLRRGQSADKLGTGERLDGEAGRRTRGPEAELVVMRRLHLSERRDSFKKQEAVQEVSFDEPQEEATGLPTSVPQIAVEGEEAVPVALGPTGRD

SEQ ID NO: 51403 - protein, 86 aa, Homo sapiens
  Payload ID: 10247
  Gene Symbol: MAST3
  Gene Name: microtubule associated serine/threonine kinase 3
  ENSP ID: ENSP00000477109
FDTRSERYRHLGSEDDETNDEESSTEIPQFSSCSHRFSKVYSSSEFLAVQPTPTFAERSFSEDREEGWERSEVDYGRRLSADIRGA

SEQ ID NO: 51404 - protein, 2429 aa, Homo sapiens
  Payload ID: 10248
  Gene Symbol: MAST4
  Gene Name: microtubule associated serine/threonine kinase family member 4
  Uniprot ID: O15021
  ENSP ID: ENSP00000261569
MDMSDPNFWTVLSNFTLPHLRSGNRLRRTQSCRTSNRKSLIGNGQSPALPRPHSPLSAHAGNSPQDSPRNFSPSASAHFSFARRTDGRRWSLASLPSSGYGTNTPSSTVSSSCSSQEKLHQLPYQPTPDELHFLSKHFCTTESIATENRCRNTPMRPRSRSLSPGRSPACCDHEIIMMNHVYKERFPKATAQMEERLKEIITSYSPDNVLPLADGVLSFTHHQIIELARDCLDKSHQGLITSRYFLELQHKLDKLLQEAHDRSESGELAFIKQLVRKILIVIARPARLLECLEFDPEEFYYLLEAAEGHAKEGQGIKTDIPRYIISQLGLNKDPLEEMAHLGNYDSGTAETPETDESVSSSNASLKLRRKPRESDFETIKLISNGAYGAVYFVRHKESRQRFAMKKINKQNLILRNQIQQAFVERDILTFAENPFVVSMYCSFETRRHLCMVMEYVEGGDCATLMKNMGPLPVDMARMYFAETVLALEYLHNYGIVHRDLKPDNLLVTSMGHIKLTDFGLSKVGLMSMTTNLYEGHIEKDAREFLDKQVCGTPEYIAPEVILRQGYGKPVDWWAMGIILYEFLVGCVPFFGDTPEELFGQVISDEINWPEKDEAPPPDAQDLITLLLRQNPLERLGTGGAYEVKQHRFFRSLDWNSLLRQKAEFIPQLESEDDTSYFDTRSEKYHHMETEEEDDTNDEDFNVEIRQFSSCSHRFSKVFSSIDRITQNSAEEKEDSVDKTKSTTLPSTETLSWSSEYSEMQQLSTSNSSDTESNRHKLSSGLLPKLAISTEGEQDEAASCPGDPHEEPGKPALPPEECAQEEPEVTTPASTISSSTLSVGSFSEHLDQINGRSECVDSTDNSSKPSSEPASHMARQRLESTEKKKISGKVTKSLSASALSLMIPGDMFAVSPLGSPMSPHSLSSDPSSSRDSSPSRDSSAASASPHQPIVIHSSGKNYGFTIRAIRVYVGDSDIYTVHHIVWNVEEGSPACQAGLKAGDLITHINGEPVHGLVHTEVIELLLKSGNKVSITTTPFENTSIKTGPARRNSYKSRMVRRSKKSKKKESLERRRSLFKKLAKQPSPLLHTSRSFSCLNRSLSSGESLPGSPTHSLSPRSPTPSYRSTPDFPSGTNSSQSSSPSSSAPNSPAGSGHIRPSTLHGLAPKLGGQRYRSGRRKSAGNIPLSPLARTPSPTPQPTSPQRSPSPLLGHSLGNSKIAQAFPSKMHSPPTIVRHIVRPKSAEPPRSPLLKRVQSEEKLSPSYGSDKKHLCSRKHSLEVTQEEVQREQSQREAPLQSLDENVCDVPPLSRARPVEQGCLKRPVSRKVGRQESVDDLDRDKLKAKVVVKKADGFPEKQESHQKSHGPGSDLENFALFKLEEREKKVYPKAVERSSTFENKASMQEAPPLGSLLKDALHKQASVRASEGAMSDGRVPAEHRQGGGDFRRAPAPGTLQDGLCHSLDRGISGKGEGTEKSSQAKELLRCEKLDSKLANIDYLRKKMSLEDKEDNLCPVLKPKMTAGSHECLPGNPVRPTGGQQEPPPASESRAFVSSTHAAQMSAVSFVPLKALTGRVDSGTEKPGLVAPESPVRKSPSEYKLEGRSVSCLKPIEGTLDIALLSGPQASKTELPSPESAQSPSPSGDVRASVPPVLPSSSGKKNDTTSARELSPSSLKMNKSYLLEPWFLPPSRGLQNSPAVSLPDPEFKRDRKGPHPTARSPGTVMESNPQQREGSSPKHQDHTTDPKLLTCLGQNLHSPDLARPRCPLPPEASPSREKPGLRESSERGPPTARSERSAARADTCREPSMELCFPETAKTSDNSKNLLSVGRTHPDFYTQTQAMEKAWAPGGKTNHKDGPGEARPPPRDNSSLHSAGIPCEKELGKVRRGVEPKPEALLARRSLQPPGIESEKSEKLSSFPSLQKDGAKEPERKEQPLQRHPSSIPPPPLTAKDLSSPAARQHCSSPSHASGREPGAKPSTAEPSSSPQDPPKPVAAHSESSSHKPRPGPDPGPPKTKHPDRSLSSQKPSVGATKGKEPATQSLGGSSREGKGHSKSGPDVFPATPGSQNKASDGIGQGEGGPSVPLHTDRAPLDAKPQPTSGGRPLEVLEKPVHLPRPGHPGPSEPADQKLSAVGEKQTLSPKHPKPSTVKDCPTLCKQTDNRQTDKSPSQPAANTDRRAEGKKCTEALYAPAEGDKLEAGLSFVHSENRLKGAERPAAGVGKGFPEARGKGPGPQKPPTEADKPNGMKRSPSATGQSSFRSTALPEKSLSCSSSFPETRAGVREASAASSDTSSAKAAGGMLELPAPSNRDHRKAQPAGEGRTHMTKSDSLPSFRVSTLPLESHHPDPNTMGGASHRDRALSVTATVGETKGKDPAPAQPPPARKQNVGRDVTKPSPAPNTDRPISLSNEKDFVVRQRRGKESLRSSPHKKAL

SEQ ID NO: 51405 - protein, 2444 aa, Homo sapiens
  Payload ID: 10248
  Gene Symbol: MAST4
  Gene Name: microtubule associated serine/threonine kinase family member 4
  ENSP ID: ENSP00000384099
MKAQRERLQIPGLTLDLTPRSLSPTPSSPGSPCSPLLAFHFWSCRTSNRKSLIGNGQSPALPRPHSPLSAHAGNSPQDSPRNFSPSASAHFSFARRNDRTDGRRWSLASLPSSGYGTNTPSSTVSSSCSSQEKLHQLPYQPTPDELHFLSKHFCTTESIATENRCRNTPMRPRSRSLSPGRSPACCDHEIIMMNHVYKERFPKATAQMEERLKEIITSYSPDNVLPLADGVLSFTHHQIIELARDCLDKSHQGLITSRYFLELQHKLDKLLQEAHDRSESGELAFIKQLVRKILIVIARPARLLECLEFDPEEFYYLLEAAEGHAKEGQGIKTDIPRYIISQLGLNKDPLEEMAHLGNYDSGTAETPETDESVSSSNASLKLRRKPRESDFETIKLISNGAYGAVYFVRHKESRQRFAMKKINKQNLILRNQIQQAFVERDILTFAENPFVVSMYCSFETRRHLCMVMEYVEGGDCATLMKNMGPLPVDMARMYFAETVLALEYLHNYGIVHRDLKPDNLLVTSMGHIKLTDFGLSKVGLMSMTTNLYEGHIEKDAREFLDKQVCGTPEYIAPEVILRQGYGKPVDWWAMGIILYEFLVGCVPFFGDTPEELFGQVISDEINWPEKDEAPPPDAQDLITLLLRQNPLERLGTGGAYEVKQHRFFRSLDWNSLLRQKAEFIPQLESEDDTSYFDTRSEKYHHMETEEEDDTNDEDFNVEIRQFSSCSHRFSKVFSSIDRITQNSAEEKEDSVDKTKSTTLPSTETLSWSSEYSEMQQLSTSNSSDTESNRHKLSSGLLPKLAISTEGEQDEAASCPGDPHEEPGKPALPPEECAQEEPEVTTPASTISSSTLSVGSFSEHLDQINGRSECVDSTDNSSKPSSEPASHMARQRLESTEKKKISGKVTKSLSASALSLMIPGDMFAVSPLGSPMSPHSLSSDPSSSRDSSPSRDSSAASASPHQPIVIHSSGKNYGFTIRAIRVYVGDSDIYTVHHIVWNVEEGSPACQAGLKAGDLITHINGEPVHGLVHTEVIELLLKSGNKVSITTTPFENTSIKTGPARRNSYKSRMVRRSKKSKKKESLERRRSLFKKLAKQPSPLLHTSRSFSCLNRSLSSGESLPGSPTHSLSPRSPTPSYRSTPDFPSGTNSSQSSSPSSSAPNSPAGSGHIRPSTLHGLAPKLGGQRYRSGRRKSAGNIPLSPLARTPSPTPQPTSPQRSPSPLLGHSLGNSKIAQAFPSKMHSPPTIVRHIVRPKSAEPPRSPLLKRVQSEEKLSPSYGSDKKHLCSRKHSLEVTQEEVQREQSQREAPLQSLDENVCDVPPLSRARPVEQGCLKRPVSRKVGRQESVDDLDRDKLKAKVVVKKADGFPEKQESHQKSHGPGSDLENFALFKLEEREKKVYPKAVERSSTFENKASMQEAPPLGSLLKDALHKQASVRASEGAMSDGRVPAEHRQGGGDFRRAPAPGTLQDGLCHSLDRGISGKGEGTEKSSQAKELLRCEKLDSKLANIDYLRKKMSLEDKEDNLCPVLKPKMTAGSHECLPGNPVRPTGGQQEPPPASESRAFVSSTHAAQMSAVSFVPLKALTGRVDSGTEKPGLVAPESPVRKSPSEYKLEGRSVSCLKPIEGTLDIALLSGPQASKTELPSPESAQSPSPSGDVRASVPPVLPSSSGKKNDTTSARELSPSSLKMNKSYLLEPWFLPPSRGLQNSPAVSLPDPEFKRDRKGPHPTARSPGTVMESNPQQREGSSPKHQDHTTDPKLLTCLGQNLHSPDLARPRCPLPPEASPSREKPGLRESSERGPPTARSERSAARADTCREPSMELCFPETAKTSDNSKNLLSVGRTHPDFYTQTQAMEKAWAPGGKTNHKDGPGEARPPPRDNSSLHSAGIPCEKELGKVRRGVEPKPEALLARRSLQPPGIESEKSEKLSSFPSLQKDGAKEPERKEQPLQRHPSSIPPPPLTAKDLSSPAARQHCSSPSHASGREPGAKPSTAEPSSSPQDPPKPVAAHSESSSHKPRPGPDPGPPKTKHPDRSLSSQKPSVGATKGKEPATQSLGGSSREGKGHSKSGPDVFPATPGSQNKASDGIGQGEGGPSVPLHTDRAPLDAKPQPTSGGRPLEVLEKPVHLPRPGHPGPSEPADQKLSAVGEKQTLSPKHPKPSTVKDCPTLCKQTDNRQTDKSPSQPAANTDRRAEGKKCTEALYAPAEGDKLEAGLSFVHSENRLKGAERPAAGVGKGFPEARGKGPGPQKPPTEADKPNGMKRSPSATGQSSFRSTALPEKSLSCSSSFPETRAGVREASAASSDTSSAKAAGGMLELPAPSNRDHRKAQPAGEGRTHMTKSDSLPSFRVSTLPLESHHPDPNTMGGASHRDRALSVTATVGETKGKDPAPAQPPPARKQNVGRDVTKPSPAPNTDRPISLSNEKDFVVRQRRGKESLRSSPHKKAL

SEQ ID NO: 51406 - protein, 2434 aa, Homo sapiens
  Payload ID: 10248
  Gene Symbol: MAST4
  Gene Name: microtubule associated serine/threonine kinase family member 4
  Uniprot ID: O15021
  ENSP ID: ENSP00000384313
MDESSILRRRGLQKELSLPRRGSLIDSQKWNCLVKRCRTSNRKSLIGNGQSPALPRPHSPLSAHAGNSPQDSPRNFSPSASAHFSFARRTDGRRWSLASLPSSGYGTNTPSSTVSSSCSSQEKLHQLPYQPTPDELHFLSKHFCTTESIATENRCRNTPMRPRSRSLSPGRSPACCDHEIIMMNHVYKERFPKATAQMEERLKEIITSYSPDNVLPLADGVLSFTHHQIIELARDCLDKSHQGLITSRYFLELQHKLDKLLQEAHDRSESGELAFIKQLVRKILIVIARPARLLECLEFDPEEFYYLLEAAEGHAKEGQGIKTDIPRYIISQLGLNKDPLEEMAHLGNYDSGTAETPETDESVSSSNASLKLRRKPRESDFETIKLISNGAYGAVYFVRHKESRQRFAMKKINKQNLILRNQIQQAFVERDILTFAENPFVVSMYCSFETRRHLCMVMEYVEGGDCATLMKNMGPLPVDMARMYFAETVLALEYLHNYGIVHRDLKPDNLLVTSMGHIKLTDFGLSKVGLMSMTTNLYEGHIEKDAREFLDKQVCGTPEYIAPEVILRQGYGKPVDWWAMGIILYEFLVGCVPFFGDTPEELFGQVISDEINWPEKDEAPPPDAQDLITLLLRQNPLERLGTGGAYEVKQHRFFRSLDWNSLLRQKAEFIPQLESEDDTSYFDTRSEKYHHMETEEEDDTNDEDFNVEIRQFSSCSHRFSKVFSSIDRITQNSAEEKEDSVDKTKSTTLPSTETLSWSSEYSEMQQLSTSNSSDTESNRHKLSSGLLPKLAISTEGEQDEAASCPGDPHEEPGKPALPPEECAQEEPEVTTPASTISSSTLSVGSFSEHLDQINGRSECVDSTDNSSKPSSEPASHMARQRLESTEKKKISGKVTKSLSASALSLMIPGDMFAVSPLGSPMSPHSLSSDPSSSRDSSPSRDSSAASASPHQPIVIHSSGKNYGFTIRAIRVYVGDSDIYTVHHIVWNVEEGSPACQAGLKAGDLITHINGEPVHGLVHTEVIELLLKSGNKVSITTTPFENTSIKTGPARRNSYKSRMVRRSKKSKKKESLERRRSLFKKLAKQPSPLLHTSRSFSCLNRSLSSGESLPGSPTHSLSPRSPTPSYRSTPDFPSGTNSSQSSSPSSSAPNSPAGSGHIRPSTLHGLAPKLGGQRYRSGRRKSAGNIPLSPLARTPSPTPQPTSPQRSPSPLLGHSLGNSKIAQAFPSKMHSPPTIVRHIVRPKSAEPPRSPLLKRVQSEEKLSPSYGSDKKHLCSRKHSLEVTQEEVQREQSQREAPLQSLDENVCDVPPLSRARPVEQGCLKRPVSRKVGRQESVDDLDRDKLKAKVVVKKADGFPEKQESHQKSHGPGSDLENFALFKLEEREKKVYPKAVERSSTFENKASMQEAPPLGSLLKDALHKQASVRASEGAMSDGRVPAEHRQGGGDFRRAPAPGTLQDGLCHSLDRGISGKGEGTEKSSQAKELLRCEKLDSKLANIDYLRKKMSLEDKEDNLCPVLKPKMTAGSHECLPGNPVRPTGGQQEPPPASESRAFVSSTHAAQMSAVSFVPLKALTGRVDSGTEKPGLVAPESPVRKSPSEYKLEGRSVSCLKPIEGTLDIALLSGPQASKTELPSPESAQSPSPSGDVRASVPPVLPSSSGKKNDTTSARELSPSSLKMNKSYLLEPWFLPPSRGLQNSPAVSLPDPEFKRDRKGPHPTARSPGTVMESNPQQREGSSPKHQDHTTDPKLLTCLGQNLHSPDLARPRCPLPPEASPSREKPGLRESSERGPPTARSERSAARADTCREPSMELCFPETAKTSDNSKNLLSVGRTHPDFYTQTQAMEKAWAPGGKTNHKDGPGEARPPPRDNSSLHSAGIPCEKELGKVRRGVEPKPEALLARRSLQPPGIESEKSEKLSSFPSLQKDGAKEPERKEQPLQRHPSSIPPPPLTAKDLSSPAARQHCSSPSHASGREPGAKPSTAEPSSSPQDPPKPVAAHSESSSHKPRPGPDPGPPKTKHPDRSLSSQKPSVGATKGKEPATQSLGGSSREGKGHSKSGPDVFPATPGSQNKASDGIGQGEGGPSVPLHTDRAPLDAKPQPTSGGRPLEVLEKPVHLPRPGHPGPSEPADQKLSAVGEKQTLSPKHPKPSTVKDCPTLCKQTDNRQTDKSPSQPAANTDRRAEGKKCTEALYAPAEGDKLEAGLSFVHSENRLKGAERPAAGVGKGFPEARGKGPGPQKPPTEADKPNGMKRSPSATGQSSFRSTALPEKSLSCSSSFPETRAGVREASAASSDTSSAKAAGGMLELPAPSNRDHRKAQPAGEGRTHMTKSDSLPSFRVSTLPLESHHPDPNTMGGASHRDRALSVTATVGETKGKDPAPAQPPPARKQNVGRDVTKPSPAPNTDRPISLSNEKDFVVRQRRGKESLRSSPHKKAL

SEQ ID NO: 51407 - protein, 238 aa, Homo sapiens
  Payload ID: 10248
  Gene Symbol: MAST4
  Gene Name: microtubule associated serine/threonine kinase family member 4
  ENSP ID: ENSP00000384547
MGEKVSEAPEPVPRGCSGHGSRTPASALVAASSPGASSAESSSGSETLSEEGEPGGFSREHQPPPPPPLGGTLGARAPAAWAPASVLLERGVLALPPPLPGGAVPPAPRGSSASQEEQDEELDHILSPPPMPFRKCSNPDVASGPGKSLKYKRQLSEDGRQLRRGSLGGALTGRYLLPNPVAGQAWPASAETSNLVRMRSQALGQSAPSLTASLKELSLPRRGSFPVCPNAGRTSPLG

SEQ ID NO: 51408 - protein, 250 aa, Homo sapiens
  Payload ID: 10248
  Gene Symbol: MAST4
  Gene Name: microtubule associated serine/threonine kinase family member 4
  Uniprot ID: O15021
  ENSP ID: ENSP00000385088
MGEKVSEAPEPVPRGCSGHGSRTPASALVAASSPGASSAESSSGSETLSEEGEPGGFSREHQPPPPPPLGGTLGARAPAAWAPASVLLERGVLALPPPLPGGAVPPAPRGSSASQEEQDEELDHILSPPPMPFRKCSNPDVASGPGKSLKYKRQLSEDGRQLRRGSLGGALTGRYLLPNPVAGQAWPASAETSNLVRMRSQALGQSAPSLTASLKELSLPRRGSLIDSQKWNCLVKRPVCPNAGRTSPLG

SEQ ID NO: 51409 - protein, 56 aa, Homo sapiens
  Payload ID: 10248
  Gene Symbol: MAST4
  Gene Name: microtubule associated serine/threonine kinase family member 4
  ENSP ID: ENSP00000385260
MKAQRERLQIPGLTLDLTPRSLSPTPSSPGSPCSPLLAFHFWSPVCPNAGRTSPLG

SEQ ID NO: 51410 - protein, 2623 aa, Homo sapiens
  Payload ID: 10248
  Gene Symbol: MAST4
  Gene Name: microtubule associated serine/threonine kinase family member 4
  ENSP ID: ENSP00000385727
MGEKVSEAPEPVPRGCSGHGSRTPASALVAASSPGASSAESSSGSETLSEEGEPGGFSREHQPPPPPPLGGTLGARAPAAWAPASVLLERGVLALPPPLPGGAVPPAPRGSSASQEEQDEELDHILSPPPMPFRKCSNPDVASGPGKSLKYKRQLSEDGRQLRRGSLGGALTGRYLLPNPVAGQAWPASAETSNLVRMRSQALGQSAPSLTASLKELSLPRRGSFCRTSNRKSLIGNGQSPALPRPHSPLSAHAGNSPQDSPRNFSPSASAHFSFARRTDGRRWSLASLPSSGYGTNTPSSTVSSSCSSQEKLHQLPYQPTPDELHFLSKHFCTTESIATENRCRNTPMRPRSRSLSPGRSPACCDHEIIMMNHVYKERFPKATAQMEERLKEIITSYSPDNVLPLADGVLSFTHHQIIELARDCLDKSHQGLITSRYFLELQHKLDKLLQEAHDRSESGELAFIKQLVRKILIVIARPARLLECLEFDPEEFYYLLEAAEGHAKEGQGIKTDIPRYIISQLGLNKDPLEEMAHLGNYDSGTAETPETDESVSSSNASLKLRRKPRESDFETIKLISNGAYGAVYFVRHKESRQRFAMKKINKQNLILRNQIQQAFVERDILTFAENPFVVSMYCSFETRRHLCMVMEYVEGGDCATLMKNMGPLPVDMARMYFAETVLALEYLHNYGIVHRDLKPDNLLVTSMGHIKLTDFGLSKVGLMSMTTNLYEGHIEKDAREFLDKQVCGTPEYIAPEVILRQGYGKPVDWWAMGIILYEFLVGCVPFFGDTPEELFGQVISDEINWPEKDEAPPPDAQDLITLLLRQNPLERLGTGGAYEVKQHRFFRSLDWNSLLRQKAEFIPQLESEDDTSYFDTRSEKYHHMETEEEDDTNDEDFNVEIRQFSSCSHRFSKVFSSIDRITQNSAEEKEDSVDKTKSTTLPSTETLSWSSEYSEMQQLSTSNSSDTESNRHKLSSGLLPKLAISTEGEQDEAASCPGDPHEEPGKPALPPEECAQEEPEVTTPASTISSSTLSVGSFSEHLDQINGRSECVDSTDNSSKPSSEPASHMARQRLESTEKKKISGKVTKSLSASALSLMIPGDMFAVSPLGSPMSPHSLSSDPSSSRDSSPSRDSSAASASPHQPIVIHSSGKNYGFTIRAIRVYVGDSDIYTVHHIVWNVEEGSPACQAGLKAGDLITHINGEPVHGLVHTEVIELLLKSGNKVSITTTPFENTSIKTGPARRNSYKSRMVRRSKKSKKKESLERRRSLFKKLAKQPSPLLHTSRSFSCLNRSLSSGESLPGSPTHSLSPRSPTPSYRSTPDFPSGTNSSQSSSPSSSAPNSPAGSGHIRPSTLHGLAPKLGGQRYRSGRRKSAGNIPLSPLARTPSPTPQPTSPQRSPSPLLGHSLGNSKIAQAFPSKMHSPPTIVRHIVRPKSAEPPRSPLLKRVQSEEKLSPSYGSDKKHLCSRKHSLEVTQEEVQREQSQREAPLQSLDENVCDVPPLSRARPVEQGCLKRPVSRKVGRQESVDDLDRDKLKAKVVVKKADGFPEKQESHQKSHGPGSDLENFALFKLEEREKKVYPKAVERSSTFENKASMQEAPPLGSLLKDALHKQASVRASEGAMSDGRVPAEHRQGGGDFRRAPAPGTLQDGLCHSLDRGISGKGEGTEKSSQAKELLRCEKLDSKLANIDYLRKKMSLEDKEDNLCPVLKPKMTAGSHECLPGNPVRPTGGQQEPPPASESRAFVSSTHAAQMSAVSFVPLKALTGRVDSGTEKPGLVAPESPVRKSPSEYKLEGRSVSCLKPIEGTLDIALLSGPQASKTELPSPESAQSPSPSGDVRASVPPVLPSSSGKKNDTTSARELSPSSLKMNKSYLLEPWFLPPSRGLQNSPAVSLPDPEFKRDRKGPHPTARSPGTVMESNPQQREGSSPKHQDHTTDPKLLTCLGQNLHSPDLARPRCPLPPEASPSREKPGLRESSERGPPTARSERSAARADTCREPSMELCFPETAKTSDNSKNLLSVGRTHPDFYTQTQAMEKAWAPGGKTNHKDGPGEARPPPRDNSSLHSAGIPCEKELGKVRRGVEPKPEALLARRSLQPPGIESEKSEKLSSFPSLQKDGAKEPERKEQPLQRHPSSIPPPPLTAKDLSSPAARQHCSSPSHASGREPGAKPSTAEPSSSPQDPPKPVAAHSESSSHKPRPGPDPGPPKTKHPDRSLSSQKPSVGATKGKEPATQSLGGSSREGKGHSKSGPDVFPATPGSQNKASDGIGQGEGGPSVPLHTDRAPLDAKPQPTSGGRPLEVLEKPVHLPRPGHPGPSEPADQKLSAVGEKQTLSPKHPKPSTVKDCPTLCKQTDNRQTDKSPSQPAANTDRRAEGKKCTEALYAPAEGDKLEAGLSFVHSENRLKGAERPAAGVGKGFPEARGKGPGPQKPPTEADKPNGMKRSPSATGQSSFRSTALPEKSLSCSSSFPETRAGVREASAASSDTSSAKAAGGMLELPAPSNRDHRKAQPAGEGRTHMTKSDSLPSFRVSTLPLESHHPDPNTMGGASHRDRALSVTATVGETKGKDPAPAQPPPARKQNVGRDVTKPSPAPNTDRPISLSNEKDFVVRQRRGKESLRSSPHKKAL

SEQ ID NO: 51411 - protein, 167 aa, Homo sapiens
  Payload ID: 10248
  Gene Symbol: MAST4
  Gene Name: microtubule associated serine/threonine kinase family member 4
  ENSP ID: ENSP00000392478
MDMSDPNFWTVLSNFTLPHLRSGNRLRRTQSCRTSNRKSLIGNGQSPALPRPHSPLSAHAGNSPQDSPRNFSPSASAHFSFARRTDGRRWSLASLPSSGYGTNTPSSTVSSSCSSQEKLHQLPYQPTPDELHFLSKHFCTTESIATENRCRNTPMRPRSRSLSPGRS

SEQ ID NO: 51412 - protein, 80 aa, Homo sapiens
  Payload ID: 10248
  Gene Symbol: MAST4
  Gene Name: microtubule associated serine/threonine kinase family member 4
  ENSP ID: ENSP00000396765
NLVRMRSQALGQSAPSLTASLKELSLPRRGSLIDSQKWNCLVKRSLSPTPSSPGSPCSPLLAFHFWSPVCPNAGRTSPLG

SEQ ID NO: 51413 - protein, 66 aa, Homo sapiens
  Payload ID: 10248
  Gene Symbol: MAST4
  Gene Name: microtubule associated serine/threonine kinase family member 4
  ENSP ID: ENSP00000398417
  MOD_RES (1)..(1): Any amino acid
XTASLEGQPPKSHFNSARHRQRLVDPAASKKELSLPRRGSLCRSSDCDWVIDKRSERNCFLGKMLL

SEQ ID NO: 51414 - protein, 166 aa, Homo sapiens
  Payload ID: 10248
  Gene Symbol: MAST4
  Gene Name: microtubule associated serine/threonine kinase family member 4
  ENSP ID: ENSP00000398694
MDMSDPNFWTVLSNFTLPHLRSGNRLRRTQSCRTSNRKSLIGNGQSPALPRPHSPLSAHAGNSPQDSPRNFSPSASAHFSFARRTDGRRWSLASLPSSGYGTNTPSSTVSSSCSSQEKLHQLPYQPTPDELHFLSKHFCTTESIATENRCRNTPMRPRSRSLSLKG

SEQ ID NO: 51415 - protein, 1680 aa, Homo sapiens
  Payload ID: 10248
  Gene Symbol: MAST4
  Gene Name: microtubule associated serine/threonine kinase family member 4
  ENSP ID: ENSP00000400551
  MOD_RES (1)..(1): Any amino acid
XYHHMETEEEDDTNDEDFNVEIRQFSSCSHRFSKVFSSIDRITQNSAEEKEDSVDKTKSTTLPSTETLSWSSEYSEMQQLSTSNSSDTESNRHKLSSGLLPKLAISTEGEQDEAASCPGDPHEEPGKPALPPEECAQEEPEVTTPASTISSSTLSDMFAVSPLGSPMSPHSLSSDPSSSRDSSPSRDSSAASASPHQPIVIHSSGKNYGFTIRAIRVYVGDSDIYTVHHIVWNVEEGSPACQAGLKAGDLITHINGEPVHGLVHTEVIELLLKSGNKVSITTTPFENTSIKTGPARRNSYKSRMVRRSKKSKKKESLERRRSLFKKLAKQPSPLLHTSRSFSCLNRSLSSGESLPGSPTHSLSPRSPTPSYRSTPDFPSGTNSSQSSSPSSSAPNSPAGSGHIRPSTLHGLAPKLGGQRYRSGRRKSAGNIPLSPLARTPSPTPQPTSPQRSPSPLLGHSLGNSKIAQAFPSKMHSPPTIVRHIVRPKSAEPPRSPLLKRVQSEEKLSPSYGSDKKHLCSRKHSLEVTQEEVQREQSQREAPLQSLDENVCDVPPLSRARPVEQGCLKRPVSRKVGRQESVDDLDRDKLKAKVVVKKADGFPEKQESHQKSHGPGSDLENFALFKLEEREKKVYPKAVERSSTFENKASMQEAPPLGSLLKDALHKQASVRASEGAMSDGRVPAEHRQGGGDFRRAPAPGTLQDGLCHSLDRGISGKGEGTEKSSQAKELLRCEKLDSKLANIDYLRKKMSLEDKEDNLCPVLKPKMTAGSHECLPGNPVRPTGGQQEPPPASESRAFVSSTHAAQMSAVSFVPLKALTGRVDSGTEKPGLVAPESPVRKSPSEYKLEGRSVSCLKPIEGTLDIALLSGPQASKTELPSPESAQSPSPSGDVRASVPPVLPSSSGKKNDTTSARELSPSSLKMNKSYLLEPWFLPPSRGLQNSPAVSLPDPEFKRDRKGPHPTARSPGTVMESNPQQREGSSPKHQDHTTDPKLLTCLGQNLHSPDLARPRCPLPPEASPSREKPGLRESSERGPPTARSERSAARADTCREPSMELCFPETAKTSDNSKNLLSVGRTHPDFYTQTQAMEKAWAPGGKTNHKDGPGEARPPPRDNSSLHSAGIPCEKELGKVRRGVEPKPEALLARRSLQPPGIESEKSEKLSSFPSLQKDGAKEPERKEQPLQRHPSSIPPPPLTAKDLSSPAARQHCSSPSHASGREPGAKPSTAEPSSSPQDPPKPVAAHSESSSHKPRPGPDPGPPKTKHPDRSLSSQKPSVGATKGKEPATQSLGGSSREGKGHSKSGPDVFPATPGSQNKASDGIGQGEGGPSVPLHTDRAPLDAKPQPTSGGRPLEVLEKPVHLPRPGHPGPSEPADQKLSAVGEKQTLSPKHPKPSTVKDCPTLCKQTDNRQTDKSPSQPAANTDRRAEGKKCTEALYAPAEGDKLEAGLSFVHSENRLKGAERPAAGVGKGFPEARGKGPGPQKPPTEADKPNGMKRSPSATGQSSFRSTALPEKSLSCSSSFPETRAGVREASAASSDTSSAKAAGGMLELPAPSNRDHRKAQPAGEGRTHMTKSDSLPSFRVSTLPLESHHPDPNTMGGASHRDRALSVTATVGETKGKDPAPAQPPPARKQNVGRDVTKPSPAPNTDRPISLSNEKDFVVRQRRGKESLRSSPHKKAL

SEQ ID NO: 51416 - protein, 58 aa, Homo sapiens
  Payload ID: 10248
  Gene Symbol: MAST4
  Gene Name: microtubule associated serine/threonine kinase family member 4
  ENSP ID: ENSP00000404801
LRRRGLQKELSLPRRGSLIDSQKWNCLVKRLTPRSLSPTPSSPGSPCSPLLAFHFWRE

SEQ ID NO: 51417 - protein, 99 aa, Homo sapiens
  Payload ID: 10248
  Gene Symbol: MAST4
  Gene Name: microtubule associated serine/threonine kinase family member 4
  ENSP ID: ENSP00000407977
  MOD_RES (1)..(1): Any amino acid
XPPMPFRKCSNPDVASGPGKSLKYKRQLSEDGRQLRRGSLGGALTGRYLLPNPVAGQAWPASAETSNLVRMRSQALGQSAPSLTASLKELSLPRRGSFN

SEQ ID NO: 51418 - protein, 122 aa, Homo sapiens
  Payload ID: 10248
  Gene Symbol: MAST4
  Gene Name: microtubule associated serine/threonine kinase family member 4
  ENSP ID: ENSP00000413573
PPMPFRKCSNPDVASGPGKSLKYKRQLSEDGRQLRRGSLGGALTGRYLLPNPVAGQAWPASAETSNLVRMRSQALGQSAPSLTASLKELSLPRRGSLCRSSDCDWVIDKRSERNCFLGKMLL

SEQ ID NO: 51419 - protein, 59 aa, Homo sapiens
  Payload ID: 10248
  Gene Symbol: MAST4
  Gene Name: microtubule associated serine/threonine kinase family member 4
  ENSP ID: ENSP00000413854
MKAQRERLQIPGLTLDCRTSNRKSLIGNGQSPALPRPHSPLSAHAGNSPQDSPRNFSPS

SEQ ID NO: 51420 - protein, 350 aa, Homo sapiens
  Payload ID: 10248
  Gene Symbol: MAST4
  Gene Name: microtubule associated serine/threonine kinase family member 4
  ENSP ID: ENSP00000421739
MDESSILRRRGLQKELSLPRRGSLIDSQKWNCLVKRCRTSNRKSLIGNGQSPALPRPHSPLSAHAGNSPQDSPRNFSPSASAHFSFARRTDGRRWSLASLPSSGYGTNTPSSTVSSSCSSQEKLHQLPYQPTPDELHFLSKHFCTTESIATENRCRNTPMRPRSRSLSPGRSPACCDHEIIMMNHVYKERFPKATAQMEERLKEIITSYSPDNVLPLADGVLSFTHHQIIELARDCLDKSHQGLITSRYFLELQHKLDKLLQEAHDRSESGELAFIKQLVRKILIVIARPARLLECLEFDPEEFYYLLEAAEGHAKEGQGIKTDIPRYIISQLGLNKDPLEGESLGCSYL

SEQ ID NO: 51421 - protein, 840 aa, Homo sapiens
  Payload ID: 10249
  Gene Symbol: MASTL
  Gene Name: microtubule associated serine/threonine kinase-like
  Uniprot ID: Q96GX5
  ENSP ID: ENSP00000343446
MDPTAGSKKEPGGGAATEEGVNRIAVPKPPSIEEFSIVKPISRGAFGKVYLGQKGGKLYAVKVVKKADMINKNMTHQVQAERDALALSKSPFIVHLYYSLQSANNVYLVMEYLIGGDVKSLLHIYGYFDEEMAVKYISEVALALDYLHRHGIIHRDLKPDNMLISNEGHIKLTDFGLSKVTLNRDINMMDILTTPSMAKPRQDYSRTPGQVLSLISSLGFNTPIAEKNQDPANILSACLSETSQLSQGLVCPMSVDQKDTTPYSSKLLKSCLETVASNPGMPVKCLTSNLLQSRKRLATSSASSQSHTFISSVESECHSSPKWEKDCQESDEALGPTMMSWNAVEKLCAKSANAIETKGFNKKDLELALSPIHNSSALPTTGRSCVNLAKKCFSGEVSWEAVELDVNNINMDTDTSQLGFHQSNQWAVDSGGISEEHLGKRSLKRNFELVDSSPCKKIIQNKKTCVEYKHNEMTNCYTNQNTGLTVEVQDLKLSVHKSQQNDCANKENIVNSFTDKQQTPEKLPIPMIAKNLMCELDEDCEKNSKRDYLSSSFLCSDDDRASKNISMNSDSSFPGISIMESPLESQPLDSDRSIKESSFEESNIEDPLIVTPDCQEKTSPKGVENPAVQESNQKMLGPPLEVLKTLASKRNAVAFRSFNSHINASNNSEPSRMNMTSLDAMDISCAYSGSYPMAITPTQKRRSCMPHQTPNQIKSGTPYRTPKSVRRGVAPVDDGRILGTPDYLAPELLLGRAHDIPWPEGEEKLSDNAQSAVEILLTIDDTKRAGMKELKRHPLFSDVDWENLQHQTMPFIPQPDDETDTSYFEARNTAQHLTVSGFSL

SEQ ID NO: 51422 - protein, 879 aa, Homo sapiens
  Payload ID: 10249
  Gene Symbol: MASTL
  Gene Name: microtubule associated serine/threonine kinase-like
  Uniprot ID: Q96GX5
  ENSP ID: ENSP00000365107
MDPTAGSKKEPGGGAATEEGVNRIAVPKPPSIEEFSIVKPISRGAFGKVYLGQKGGKLYAVKVVKKADMINKNMTHQVQAERDALALSKSPFIVHLYYSLQSANNVYLVMEYLIGGDVKSLLHIYGYFDEEMAVKYISEVALALDYLHRHGIIHRDLKPDNMLISNEGHIKLTDFGLSKVTLNRDINMMDILTTPSMAKPRQDYSRTPGQVLSLISSLGFNTPIAEKNQDPANILSACLSETSQLSQGLVCPMSVDQKDTTPYSSKLLKSCLETVASNPGMPVKCLTSNLLQSRKRLATSSASSQSHTFISSVESECHSSPKWEKDCQESDEALGPTMMSWNAVEKLCAKSANAIETKGFNKKDLELALSPIHNSSALPTTGRSCVNLAKKCFSGEVSWEAVELDVNNINMDTDTSQLGFHQSNQWAVDSGGISEEHLGKRSLKRNFELVDSSPCKKIIQNKKTCVEYKHNEMTNCYTNQNTGLTVEVQDLKLSVHKSQQNDCANKENIVNSFTDKQQTPEKLPIPMIAKNLMCELDEDCEKNSKRDYLSSSFLCSDDDRASKNISMNSDSSFPGISIMESPLESQPLDSDRSIKESSFEESNIEDPLIVTPDCQEKTSPKGVENPAVQESNQKMLGPPLEVLKTLASKRNAVAFRSFNSHINASNNSEPSRMNMTSLDAMDISCAYSGSYPMAITPTQKRRSCMPHQQTPNQIKSGTPYRTPKSVRRGVAPVDDGRILGTPDYLAPELLLGRAHGPAVDWWALGVCLFEFLTGIPPFNDETPQQVFQNILKRDIPWPEGEEKLSDNAQSAVEILLTIDDTKRAGMKELKRHPLFSDVDWENLQHQTMPFIPQPDDETDTSYFEARNTAQHLTVSGFSL

SEQ ID NO: 51423 - protein, 878 aa, Homo sapiens
  Payload ID: 10249
  Gene Symbol: MASTL
  Gene Name: microtubule associated serine/threonine kinase-like
  Uniprot ID: Q96GX5
  ENSP ID: ENSP00000365113
MDPTAGSKKEPGGGAATEEGVNRIAVPKPPSIEEFSIVKPISRGAFGKVYLGQKGGKLYAVKVVKKADMINKNMTHQVQAERDALALSKSPFIVHLYYSLQSANNVYLVMEYLIGGDVKSLLHIYGYFDEEMAVKYISEVALALDYLHRHGIIHRDLKPDNMLISNEGHIKLTDFGLSKVTLNRDINMMDILTTPSMAKPRQDYSRTPGQVLSLISSLGFNTPIAEKNQDPANILSACLSETSQLSQGLVCPMSVDQKDTTPYSSKLLKSCLETVASNPGMPVKCLTSNLLQSRKRLATSSASSQSHTFISSVESECHSSPKWEKDCQESDEALGPTMMSWNAVEKLCAKSANAIETKGFNKKDLELALSPIHNSSALPTTGRSCVNLAKKCFSGEVSWEAVELDVNNINMDTDTSQLGFHQSNQWAVDSGGISEEHLGKRSLKRNFELVDSSPCKKIIQNKKTCVEYKHNEMTNCYTNQNTGLTVEVQDLKLSVHKSQQNDCANKENIVNSFTDKQQTPEKLPIPMIAKNLMCELDEDCEKNSKRDYLSSSFLCSDDDRASKNISMNSDSSFPGISIMESPLESQPLDSDRSIKESSFEESNIEDPLIVTPDCQEKTSPKGVENPAVQESNQKMLGPPLEVLKTLASKRNAVAFRSFNSHINASNNSEPSRMNMTSLDAMDISCAYSGSYPMAITPTQKRRSCMPHQTPNQIKSGTPYRTPKSVRRGVAPVDDGRILGTPDYLAPELLLGRAHGPAVDWWALGVCLFEFLTGIPPFNDETPQQVFQNILKRDIPWPEGEEKLSDNAQSAVEILLTIDDTKRAGMKELKRHPLFSDVDWENLQHQTMPFIPQPDDETDTSYFEARNTAQHLTVSGFSL

SEQ ID NO: 51424 - protein, 479 aa, Homo sapiens
  Payload ID: 10249
  Gene Symbol: MASTL
  Gene Name: microtubule associated serine/threonine kinase-like
  ENSP ID: ENSP00000478938
ESDEALGPTMMSWNAVEKLCAKSANAIETKGFNKKDLELALSPIHNSSALPTTGRSCVNLAKKCFSGEVSWEAVELDVNNINMDTDTSQLGFHQSNQWAVDSGGISEEHLGKRSLKRNFELVDSSPCKKIIQNKKTCVEYKHNEMTNCYTNQNTGLTVEVQDLKLSVHKSQQNDCANKENIVNSFTDKQQTPEKLPIPMIAKNLMCELDEDCEKNSKRDYLSSSFLCSDDDRASKNISMNSDSSFPGISIMESPLESQPLDSDRSIKESSFEESNIEDPLIVTPDCQEKTSPKGVENPAVQESNQKMLGPPLEVLKTLASKRNAVAFRSFNSHINASNNSEPSRMNMTSLDAMDISCAYSGSYPMAITPTQKRRSCMPHQQTPNQIKSGTPYRTPKSVRRGVAPVDDGRILGTPDYLAPELLLGRAHELKRHPLFSDVDWENLQHQTMPFIPQPDDETDTSYFEARNTAQHLTVSGFSL

SEQ ID NO: 51425 - protein, 1270 aa, Homo sapiens
  Payload ID: 10250
  Gene Symbol: MTUS1
  Gene Name: microtubule associated tumor suppressor 1
  Uniprot ID: Q9ULD2
  ENSP ID: ENSP00000262102
MTDDNSDDKIEDELQTFFTSDKDGNTHAYNPKSPPTQNSSASSVNWNSANPDDMVVDYETDPAVVTGENISLSLQGVEVFGHEKSSSDFISKQVLDMHKDSICQCPALVGTEKPKYLQHSCHSLEAVEGQSVEPSLPFVWKPNDNLNCAGYCDALELNQTFDMTVDKVNCTFISHHAIGKSQSFHTAGSLPPTGRRSGSTSSLSYSTWTSSHSDKTHARETTYDRESFENPQVTPSEAQDMTYTAFSDVVMQSEVFVSDIGNQCACSSGKVTSEYTDGSQQRLVGEKETQALTPVSDGMEVPNDSALQEFFCLSHDESNSEPHSQSSYRHKEMGQNLRETVSYCLIDDECPLMVPAFDKSEAQVLNPEHKVTETEDTQMVSKGKDLGTQNHTSELILSSPPGQKVGSSFGLTWDANDMVISTDKTMCMSTPVLEPTKVTFSVSPIEATEKCKKVEKGNRGLKNIPDSKEAPVNLCKPSLGKSTIKTNTPIGCKVRKTEIISYPRPNFKNVKAKVMSRAVLQPKDAALSKVTPRPQQTSASSPSSVNSRQQTVLSRTPRSDLNADKKAEILINKTHKQQFNKLITSQAVHVTTHSKNASHRVPRTTSAVKSNQEDVDKASSSNSACETGSVSALFQKIKGILPVKMESAECLEMTYVPNIDRISPEKKGEKENGTSMEKQELKQEIMNETFEYGSLFLGSASKTTTTSGRNISKPDSCGLRQIAAPKAKVGPPVSCLRRNSDNRNPSADRAVSPQRIRRVSSSGKPTSLKTAQSSWVNLPRPLPKSKASLKSPALRRTGSTPSIASTHSELSTYSNNSGNAAVIKYEEKPPKPAFQNGSSGSFYLKPLVSRAHVHLMKTPPKGPSRKNLFTALNAVEKSRQKNPRSLCIQPQTAPDALPPEKTLELTQYKTKCENQSGFILQLKQLLACGNTKFEALTVVIQHLLSEREEALKQHKTLSQELVNLRGELVTASTTCEKLEKARNELQTVYEAFVQQHQAEKTERENRLKEFYTREYEKLRDTYIEEAEKYKMQLQEQFDNLNAAHETSKLEIEASHSEKLELLKKAYEASLSEIKKGHEIEKKSLEDLLSEKQESLEKQINDLKSENDALNEKLKSEEQKRRAREKANLKNPQIMYLEQELESLKAVLEIKNEKLHQQDIKLMKMEKLVDNNTALVDKLKRFQQENEELKARMDKHMAISRQLSTEQAVLQESLEKESKVNKRLSMENEELLWKLHNGDLCSPKRSPTSSAIPLQSPRNSGSFPSPSISPR

SEQ ID NO: 51426 - protein, 436 aa, Homo sapiens
  Payload ID: 10250
  Gene Symbol: MTUS1
  Gene Name: microtubule associated tumor suppressor 1
  Uniprot ID: Q9ULD2
  ENSP ID: ENSP00000297488
MLLSPKFSLSTIHIRLTAKGLLRNLRLPSGFRRSTVVFHTVEKSRQKNPRSLCIQPQTAPDALPPEKTLELTQYKTKCENQSGFILQLKQLLACGNTKFEALTVVIQHLLSEREEALKQHKTLSQELVNLRGELVTASTTCEKLEKARNELQTVYEAFVQQHQAEKTERENRLKEFYTREYEKLRDTYIEEAEKYKMQLQEQFDNLNAAHETSKLEIEASHSEKLELLKKAYEASLSEIKKGHEIEKKSLEDLLSEKQESLEKQINDLKSENDALNEKLKSEEQKRRAREKANLKNPQIMYLEQELESLKAVLEIKNEKLHQQDIKLMKMEKLVDNNTALVDKLKRFQQENEELKARMDKHMAISRQLSTEQAVLQESLEKESKVNKRLSMENEELLWKLHNGDLCSPKRSPTSSAIPLQSPRNSGSFPSPSISPR

SEQ ID NO: 51427 - protein, 517 aa, Homo sapiens
  Payload ID: 10250
  Gene Symbol: MTUS1
  Gene Name: microtubule associated tumor suppressor 1
  Uniprot ID: Q9ULD2
  ENSP ID: ENSP00000371285
MTVPGGFRSCTETDISSKIFINSTLTPPAGSERHYDATLLTLLVVGSYSLCIIPLLATFTGKKTGNAAVIKYEEKPPKPAFQNGSSGSFYLKPLVSRAHVHLMKTPPKGPSRKNLFTALNAVEKSRQKNPRSLCIQPQTAPDALPPEKTLELTQYKTKCENQSGFILQLKQLLACGNTKFEALTVVIQHLLSEREEALKQHKTLSQELVNLRGELVTASTTCEKLEKARNELQTVYEAFVQQHQAEKTERENRLKEFYTREYEKLRDTYIEEAEKYKMQLQEQFDNLNAAHETSKLEIEASHSEKLELLKKAYEASLSEIKKGHEIEKKSLEDLLSEKQESLEKQINDLKSENDALNEKLKSEEQKRRAREKANLKNPQIMYLEQELESLKAVLEIKNEKLHQQDIKLMKMEKLVDNNTALVDKLKRFQQENEELKARMDKHMAISRQLSTEQAVLQESLEKESKVNKRLSMENEELLWKLHNGDLCSPKRSPTSSAIPLQSPRNSGSFPSPSISPR

SEQ ID NO: 51428 - protein, 1216 aa, Homo sapiens
  Payload ID: 10250
  Gene Symbol: MTUS1
  Gene Name: microtubule associated tumor suppressor 1
  Uniprot ID: Q9ULD2
  ENSP ID: ENSP00000371293
MTDDNSDDKIEDELQTFFTSDKDGNTHAYNPKSPPTQNSSASSVNWNSANPDDMVVDYETDPAVVTGENISLSLQGVEVFGHEKSSSDFISKQVLDMHKDSICQCPALVGTEKPKYLQHSCHSLEAVEGQSVEPSLPFVWKPNDNLNCAGYCDALELNQTFDMTVDKVNCTFISHHAIGKSQSFHTAGSLPPTGRRSGSTSSLSYSTWTSSHSDKTHARETTYDRESFENPQVTPSEAQDMTYTAFSDVVMQSEVFVSDIGNQCACSSGKVTSEYTDGSQQRLVGEKETQALTPVSDGMEVPNDSALQEFFCLSHDESNSEPHSQSSYRHKEMGQNLRETVSYCLIDDECPLMVPAFDKSEAQVLNPEHKVTETEDTQMVSKGKDLGTQNHTSELILSSPPGQKVGSSFGLTWDANDMVISTDKTMCMSTPVLEPTKVTFSVSPIEATEKCKKVEKGNRGLKNIPDSKEAPVNLCKPSLGKSTIKTNTPIGCKVRKTEIISYPRPNFKNVKAKVMSRAVLQPKDAALSKVTPRPQQTSASSPSSVNSRQQTVLSRTPRSDLNADKKAEILINKTHKQQFNKLITSQAVHVTTHSKNASHRVPRTTSAVKSNQEDVDKASSSNSACETGSVSALFQKIKGILPVKMESAECLEMTYVPNIDRISPEKKGEKENGTSMEKQELKQEIMNETFEYGSLFLGSASKTTTTSGRNISKPDSCGLRQIAAPKAKVGPPVSCLRRNSDNRNPSADRAVSPQRIRRVSSSAGNAAVIKYEEKPPKPAFQNGSSGSFYLKPLVSRAHVHLMKTPPKGPSRKNLFTALNAVEKSRQKNPRSLCIQPQTAPDALPPEKTLELTQYKTKCENQSGFILQLKQLLACGNTKFEALTVVIQHLLSEREEALKQHKTLSQELVNLRGELVTASTTCEKLEKARNELQTVYEAFVQQHQAEKTERENRLKEFYTREYEKLRDTYIEEAEKYKMQLQEQFDNLNAAHETSKLEIEASHSEKLELLKKAYEASLSEIKKGHEIEKKSLEDLLSEKQESLEKQINDLKSENDALNEKLKSEEQKRRAREKANLKNPQIMYLEQELESLKAVLEIKNEKLHQQDIKLMKMEKLVDNNTALVDKLKRFQQENEELKARMDKHMAISRQLSTEQAVLQESLEKESKVNKRLSMENEELLWKLHNGDLCSPKRSPTSSAIPLQSPRNSGSFPSPSISPR

SEQ ID NO: 51429 - protein, 1216 aa, Homo sapiens; identical to SEQ ID NO: 51428
  Payload ID: 10250
  Gene Symbol: MTUS1
  Gene Name: microtubule associated tumor suppressor 1
  Uniprot ID: Q9ULD2
  ENSP ID: ENSP00000430167

SEQ ID NO: 51430 - protein, 505 aa, Homo sapiens
  Payload ID: 10250
  Gene Symbol: MTUS1
  Gene Name: microtubule associated tumor suppressor 1
  ENSP ID: ENSP00000431016
  MOD_RES (1)..(1): Any amino acid
XSSGKVTSEYTDGSQQRLVGEKETQALTPVSDGMEVPNDSALQEFFCLSHDESNSEPHSQSSYRHKEMGQNLRETVSYCLIDDECPLMVPAFDKSEAQVLNPEHKVTETEDTQMVSKGKDLGTQNHTSELILSSPPGQKVGSSFGLTWDANDMVISTDKTMCMSTPVLEPTKVTFSVSPIEATEKCKKVEKGNRGLKNIPDSKEAPVNLCKPSLGKSTIKTNTPIGCKVRKTEIISYPRPNFKNVKAKVMSRAVLQPKDAALSKVTPRPQQTSASSPSSVNSRQQTVLSRTPRSDLNADKKAEILINKTHKQQFNKLITSQAVHVTTHSKNASHRVPRTTSAVKSNQEDVDKASSSNSACETGSVSALFQKIKGILPVKMESAECLEMTYVPNIDRISPEKKGEKENGTSMEKQELKQEIMNETFEYGSLFLGSASKTTTTSGRNISKPDSCGLRQIAAPKAKVGPPVSCLRRNSDNRNPSADRAVSPQRIRRVSSSVLPKAAFS

SEQ ID NO: 51431 - protein, 415 aa, Homo sapiens
  Payload ID: 10250
  Gene Symbol: MTUS1
  Gene Name: microtubule associated tumor suppressor 1
  Uniprot ID: Q9ULD2
  ENSP ID: ENSP00000445738
MKTPPKGPSRKNLFTALNAVEKSRQKNPRSLCIQPQTAPDALPPEKTLELTQYKTKCENQSGFILQLKQLLACGNTKFEALTVVIQHLLSEREEALKQHKTLSQELVNLRGELVTASTTCEKLEKARNELQTVYEAFVQQHQAEKTERENRLKEFYTREYEKLRDTYIEEAEKYKMQLQEQFDNLNAAHETSKLEIEASHSEKLELLKKAYEASLSEIKKGHEIEKKSLEDLLSEKQESLEKQINDLKSENDALNEKLKSEEQKRRAREKANLKNPQIMYLEQELESLKAVLEIKNEKLHQQDIKLMKMEKLVDNNTALVDKLKRFQQENEELKARMDKHMAISRQLSTEQAVLQESLEKESKVNKRLSMENEELLWKLHNGDLCSPKRSPTSSAIPLQSPRNSGSFPSPSISPR

SEQ ID NO: 51432 - protein, 41 aa, Homo sapiens
  Payload ID: 10250
  Gene Symbol: MTUS1
  Gene Name: microtubule associated tumor suppressor 1
  ENSP ID: ENSP00000489015
MGCPSSKLCLYSPCAATRREEALKQHKTLSQELVNLRGELA

SEQ ID NO: 51433 - protein, 342 aa, Homo sapiens
  Payload ID: 10250
  Gene Symbol: MTUS1
  Gene Name: microtubule associated tumor suppressor 1
  ENSP ID: ENSP00000489288
MGCPSSKLCLYSPCAATRREEALKQHKTLSQELVNLRGELVTASTTCEKLEKARNELQTVYEAFVQQHQAEKTERENRLKEFYTREYEKLRDTYIEEAEKYKMQLQEQFDNLNAAHETSKLEIEASHSEKLELLKKAYEASLSEIKKGHEIEKKSLEDLLSEKQESLEKQINDLKSENDALNEKLKSEEQKRRAREKANLKNPQIMYLEQELESLKAVLEIKNEKLHQQDIKLMKMEKLVDNNTALVDKLKRFQQENEELKARMDKHMAISRQLSTEQAVLQESLEKESKVNKRLSMENEELLWKLHNGDLCSPKRSPTSSAIPLQSPRNSGSFPSPSISPR

SEQ ID NO: 51434 - protein, 348 aa, Homo sapiens
  Payload ID: 10251
  Gene Symbol: MTUS2
  Gene Name: microtubule associated tumor suppressor candidate 2
  Uniprot ID: Q5JR59
  ENSP ID: ENSP00000370186
MGHCCCKPYNCLQCLDKTNESALVKEKELSIELANIRDEVAFHTAKCEKLQKEKEELERRFEDEVKRLGWQQQAELQELEERLQLQFEAEMARLQEEHGDQLLSIRCQHQEQVEDLTASHDAALLEMENNHTVAITILQDDHDHKVQELMSTHELEKKELEENFEKLRLSLQDQVDTLTFQSQSLRDRARRFEEALRKNTEEQLEIALAPYQHLEEDMKSLKQVLEMKNQQIHEQEKKILELEKLAEKNIILEEKIQVLQQQNEDLKARIDQNTVVTRQLSEENANLQEYVEKETQEKKRLSRTNEELLWKLQTGDPTSPIKLSPTSPVYRGSSSGPSSPARVSTTPR

SEQ ID NO: 51435 - protein, 1379 aa, Homo sapiens
  Payload ID: 10251
  Gene Symbol: MTUS2
  Gene Name: microtubule associated tumor suppressor candidate 2
  ENSP ID: ENSP00000392057
MASSPTKGLTMSVPVAPKKSCYTQLRDNRNAARNNNESILSLGDTNANQIMLEVSSSHDESKTCDLGDEIGNTNSSEPENRTHFHKEFHQLQGFGKGSQAGSASLKDFRLSSTIQRELNEEHTVERGTDSLQTTRSIQGPSLSSWRNVMSEASLDVLAKRDAEIPRHVPKDKLAKTLDNEELRRHSLERASSSVAAVGSLTPQHPQPLSLDSREARGQIPGGGEGPQKTLPDHAVPAAFPATDSTSEGKSVRHPKPSTSESKQSTPSETQTVGAHVLQVCSEHTSHSAHPEPALNLTLASKEIPSKLEAQLGQGKGEAKLDLKYVPPRRVEQEGKAAQEGYLGCHKEENLSALEGRDPCGEAHPEATDALGHLLNSDLHHLGVGRGNCEEKRGVNPGEQDSLHTTPKQGSASLGGADNQPTGKISPCAGEKLGERTSSSFSPGDSHVAFIPNNLTDSKPLDVIEEERRLGSGNKDSVMVLVFNPSVGENKTEVPEPLDPQSGRSEARESKEVTTSVAENRNLLENADKIESTSARADSVLNIPAPLHPETTVNMTYQPTTPSSSFQDVSVFGMDAGSPLVVPPPTDSARLLNTSPKVPDKNTCPSGIPKPVFTHSKDTPSSQEGMENYQVEKTEERTETKPIIMPKPKHVRPKIITYIRRNPQALGQVDASLVPVGLPYAPPTCTMPLPHEEKAAGGDLKPSANLYEKFKPDLQKPRVFSSGLMVSGIKPPGHPFSQMSEKFLQEVTDHPGKEEFCSPPYAHYEVPPTFYRSAMLLKPQLGLGAMSRLPSAKSRILIASQRSSASAIHPPGPITTATSLYSSDPSADLKKASSSNAAKSNLPKSGLRPPGYSRLPAAKLAAFGFVRSSSVSSVSSTQSGDSAQPEQGRPATRSTFGNEEQPVLKASLPSKDTPKGAGRVAPPASSSVTAPRRSLLPAPKSTSTPAGTKKDAQKDQDTNKPAVSSPKRVAASTTKLHSPGYPKQRTAAARNGFPPKPDPQAREAERQLVLRLKERCEQQTRQLGVAQGELKRAICGFDALAVATQHFFRKNESALVKEKELSIELANIRDEVAFHTAKCEKLQKEKEELERRFEDEVKRLGWQQQAELQELEERLQLQFEAEMARLQEEHGDQLLSIRCQHQEQVEDLTASHDAALLEMENNHTVAITILQDDHDHKVQELMSTHELEKKELEENFEKLRLSLQDQVDTLTFQSQSLRDRARRFEEALRKNTEEQLEIALAPYQHLEEDMKSLKQVLEMKNQQIHEQEKKILELEKLAEKNIILEEKIQVLQQQNEDLKARIDQNTVVTRQLSEENANLQEYVEKETQEKKRLSRTNEELLWKLQTGDPTSPIKLSPTSPVYRGSSSGPSSPARVSTTPR

SEQ ID NO: 51436 - protein, 258 aa, Homo sapiens
  Payload ID: 10251
  Gene Symbol: MTUS2
  Gene Name: microtubule associated tumor suppressor candidate 2
  Uniprot ID: Q5JR59
  ENSP ID: ENSP00000445403
MARLQEEHGDQLLSIRCQHQEQVEDLTASHDAALLEMENNHTVAITILQDDHDHKVQELMSTHELEKKELEENFEKLRLSLQDQVDTLTFQSQSLRDRARRFEEALRKNTEEQLEIALAPYQHLEEDMKSLKQVLEMKNQQIHEQEKKILELEKLAEKNIILEEKIQVLQQQNEDLKARIDQNTVVTRQLSEENANLQEYVEKETQEKKRLSRTNEELLWKLQTGDPTSPIKLSPTSPVYRGSSSGPSSPARVSTTPR

SEQ ID NO: 51437 - protein, 1379 aa, Homo sapiens; identical to SEQ ID NO: 51435
  Payload ID: 10251
  Gene Symbol: MTUS2
  Gene Name: microtubule associated tumor suppressor candidate 2
  ENSP ID: ENSP00000483729

SEQ ID NO: 51438 - protein, 1905 aa, Homo sapiens
  Payload ID: 10252
  Gene Symbol: MTCL1
  Gene Name: microtubule crosslinking factor 1
  Uniprot ID: Q9Y4B5
  ENSP ID: ENSP00000305027
METLNGPAGGGAPDAKLQPPGQHHRHHHLHPVAERRRLHRAPSPARPFLKDLHARPAAPGPAVPSSGRAPAPAAPRSPNLAGKAPPSPGSLAAPGRLSRRSGGVPGAKDKPPPGAGARAAGGAKAALGSRRAARVAPAEPLSRAGKPPGAEPPSAAAKGRKAKRGSRAPPARTVGPPTPAARIPAVTLAVTSVAGSPARCSRISHTDSSSDLSDCPSEPLSDEQRLLPAASSDAESGTGSSDREPPRGAPTPSPAARGAPPGSPEPPALLAAPLAAGACPGGRSIPSGVSGGFAGPGVAEDVRGRSPPERPVPGTPKEPSLGEQSRLVPAAEEEELLREMEELRSENDYLKDELDELRAEMEEMRDSYLEEDVYQLQELRRELDRANKNCRILQYRLRKAEQKSLKVAETGQVDGELIRSLEQDLKVAKDVSVRLHHELKTVEEKRAKAEDENETLRQQMIEVEISKQALQNELERLKESSLKRRSTREMYKEKKTFNQDDSADLRCQLQFAKEEAFLMRKKMAKLGREKDELEQELQKYKSLYGDVDSPLPTGEAGGPPSTREAELKLRLKLVEEEANILGRKIVELEVENRGLKAEMEDMRGQQEREGPGRDHAPSIPTSPFGDSLESSTELRRHLQFVEEEAELLRRSISEIEDHNRQLTHELSKFKFEPPREPGWLGEGASPGAGGGAPLQEELKSARLQISELSGKVLKLQHENHALLSNIQRCDLAAHLGLRAPSPRDSDAESDAGKKESDGEESRLPQPKREGPVGGESDSEEMFEKTSGFGSGKPSEASEPCPTELLKAREDSEYLVTLKHEAQRLERTVERLITDTDSFLHDAGLRGGAPLPGPGLQGEEEQGEGDQQEPQLLGTINAKMKAFKKELQAFLEQVNRIGDGLSPLPHLTESSSFLSTVTSVSRDSPIGNLGKELGPDLQSRLKEQLEWQLGPARGDERESLRLRAARELHRRADGDTGSHGLGGQTCFSLEMEEEHLYALRWKELEMHSLALQNTLHERTWSDEKNLMQQELRSLKQNIFLFYVKLRWLLKHWRQGKQMEEEGEEFTEGEHPETLSRLGELGVQGGHQADGPDHDSDRGCGFPVGEHSPHSRVQIGDHSLRLQTADRGQPHKQVVENQQLFSAFKALLEDFRAELREDERARLRLQQQYASDKAAWDVEWAVLKCRLEQLEEKTENKLGELGSSAESKGALKKEREVHQKLLADSHSLVMDLRWQIHHSEKNWNREKVELLDRLDRDRQEWERQKKEFLWRIEQLQKENSPRRGGSFLCDQKDGNVRPFPHQGSLRMPRPVAMWPCADADSIPFEDRPLSKLKESDRCSASENLYLDALSLDDEPEEPPAHRPEREFRNRLPEEEENHKGNLQRAVSVSSMSEFQRLMDISPFLPEKGLPSTSSKEDVTPPLSPDDLKYIEEFNKSWDYTPNRGHNGGGPDLWADRTEVGRAGHEDSTEPFPDSSWYLTTSVTMTTDTMTSPEHCQKQPLRSHVLTEQSGLRVLHSPPAVRRVDSITAAGGEGPFPTSRARGSPGDTKGGPPEPMLSRWPCTSPRHSRDYVEGARRPLDSPLCTSLGFASPLHSLEMSKNLSDDMKEVAFSVRNAICSGPGELQVKDMACQTNGSRTMGTQTVQTISVGLQTEALRGSGVTSSPHKCLTPKAGGGATPVSSPSRSLRSRQVAPAIEKVQAKFERTCCSPKYGSPKLQRKPLPKADQPNNRTSPGMAQKGYSESAWARSTTTRESPVHTTINDGLSSLFNIIDHSPVVQDPFQKGLRAGSRSRSAEPRPELGPGQETGTNSRGRSPSPIGVGSEMCREEGGEGTPVKQDLSAPPGYTLTENVARILNKKLLEHALKEERRQAAHGPPGLHSDSHSLGDTAEPGPMENQTVLLTAPWGL

SEQ ID NO: 51439 - protein, 1586 aa, Homo sapiens
  Payload ID: 10252
  Gene Symbol: MTCL1
  Gene Name: microtubule crosslinking factor 1
  Uniprot ID: Q9Y4B5
  ENSP ID: ENSP00000352927
MEEMRDSYLEEDVYQLQELRRELDRANKNCRILQYRLRKAEQKSLKVAETGQVDGELIRSLEQDLKVAKDVSVRLHHELKTVEEKRAKAEDENETLRQQMIEVEISKQALQNELERLKESSLKRRSTREMYKEKKTFNQDDSADLRCQLQFAKEEAFLMRKKMAKLGREKDELEQELQKYKSLYGDVDSPLPTGEAGGPPSTREAELKLRLKLVEEEANILGRKIVELEVENRGLKAEMEDMRGQQEREGPGRDHAPSIPTSPFGDSLESSTELRRHLQFVEEEAELLRRSISEIEDHNRQLTHELSKFKFEPPREPGWLGEGASPGAGGGAPLQEELKSARLQISELSGKVLKLQHENHALLSNIQRCDLAAHLGLRAPSPRDSDAESDAGKKESDGEESRLPQPKREGPVGGESDSEEMFEKTSGFGSGKPSEASEPCPTELLKAREDSEYLVTLKHEAQRLERTVERLITDTDSFLHDAGLRGGAPLPGPGLQGEEEQGEGDQQEPQLLGTINAKMKAFKKELQAFLEQVNRIGDGLSPLPHLTESSSFLSTVTSVSRDSPIGNLGKELGPDLQSRLKEQLEWQLGPARGDERESLRLRAARELHRRADGDTGSHGLGGQTCFSLELRGPPVLPEQSVSIEELQGQLVQAARLHQEETETFTNKIHKMEEEHLYALRWKELEMHSLALQNTLHERTWSDEKNLMQQELRSLKQNIFLFYVKLRWLLKHWRQGKQMEEEGEEFTEGEHPETLSRLGELGVQGGHQADGPDHDSDRGCGFPVGEHSPHSRVQIGDHSLRLQTADRGQPHKQVVENQQLFSAFKALLEDFRAELREDERARLRLQQQYASDKAAWDVEWAVLKCRLEQLEEKTENKLGELGSSAESKGALKKEREVHQKLLADSHSLVMDLRWQIHHSEKNWNREKVELLDRLDRDRQEWERQKKEFLWRIEQLQKENSPRRGGSFLCDQKDGNVRPFPHQGSLRMPRPVAMWPCADADSIPFEDRPLSKLKESDRCSASENLYLDALSLDDEPEEPPAHRPEREFRNRLPEEEENHKGNLQRAVSVSSMSEFQRLMDISPFLPEKGLPSTSSKEDVTPPLSPDDLKYIEEFNKSWDYTPNRGHNGGGPDLWADRTEVGRAGHEDSTEPFPDSSWYLTTSVTMTTDTMTSPEHCQKQPLRSHVLTEQSGLRVLHSPPAVRRVDSITAAGGEGPFPTSRARGSPGDTKGGPPEPMLSRWPCTSPRHSRDYVEGARRPLDSPLCTSLGFASPLHSLEMSKNLSDDMKEVAFSVRNAICSGPGELQVKDMACQTNGSRTMGTQTVQTISVGLQTEALRGSGVTSSPHKCLTPKAGGGATPVSSPSRSLRSRQVAPAIEKVQAKFERTCCSPKYGSPKLQRKPLPKADQPNNRTSPGMAQKGYSESAWARSTTTRESPVHTTINDGLSSLFNIIDHSPVVQDPFQKGLRAGSRSRSAEPRPELGPGQETGTNSRGRSPSPIGVGSEMCREEGGEGTPVKQDLSAPPGYTLTENVARILNKKLLEHALKEERRQAAHGPPGLHSDSHSLGDTAEPGPMENQTVLLTAPWGL

SEQ ID NO: 51440 - protein, 1586 aa, Homo sapiens; identical to SEQ ID NO: 51439
  Payload ID: 10252
  Gene Symbol: MTCL1
  Gene Name: microtubule crosslinking factor 1
  Uniprot ID: Q9Y4B5
  ENSP ID: ENSP00000382924

SEQ ID NO: 51441 - protein, 1545 aa, Homo sapiens
  Payload ID: 10252
  Gene Symbol: MTCL1
  Gene Name: microtubule crosslinking factor 1
  Uniprot ID: Q9Y4B5
  ENSP ID: ENSP00000429556
MEEMRDSYLEEDVYQLQELRRELDRANKNCRILQYRLRKAEQKSLKVAETGQVDGELIRSLEQDLKVAKDVSVRLHHELKTVEEKRAKAEDENETLRQQMIEVEISKQALQNELERLKESSLKRRSTREMYKEKKTFNQDDSADLRCQLQFAKEEAFLMRKKMAKLGREKDELEQELQKYKSLYGDVDSPLPTGEAGGPPSTREAELKLRLKLVEEEANILGRKIVELEVENRGLKAEMEDMRGQQEREGPGRDHAPSIPTSPFGDSLESSTELRRHLQFVEEEAELLRRSISEIEDHNRQLTHELSKFKFEPPREPGWLGEGASPGAGGGAPLQEELKSARLQISELSGKVLKLQHENHALLSNIQRCDLAAHLGLRAPSPRDSDAESDAGKKESDGEESRLPQPKREGPVGGESDSEEMFEKTSGFGSGKPSEASEPCPTELLKAREDSEYLVTLKHEAQRLERTVERLITDTDSFLHDAGLRGGAPLPGPGLQGEEEQGEGDQQEPQLLGTINAKMKAFKKELQAFLEQVNRIGDGLSPLPHLTESSSFLSTVTSVSRDSPIGNLGKELGPDLQSRLKEQLEWQLGPARGDERESLRLRAARELHRRADGDTGSHGLGGQTCFSLEMEEEHLYALRWKELEMHSLALQNTLHERTWSDEKNLMQQELRSLKQNIFLFYVKLRWLLKHWRQGKQMEEEGEEFTEGEHPETLSRLGELGVQGGHQADGPDHDSDRGCGFPVGEHSPHSRVQIGDHSLRLQTADRGQPHKQVVENQQLFSAFKALLEDFRAELREDERARLRLQQQYASDKAAWDVEWAVLKCRLEQLEEKTENKLGELGSSAESKGALKKEREVHQKLLADSHSLVMDLRWQIHHSEKNWNREKVELLDRLDRDRQEWERQKKEFLWRIEQLQKENSPRRGGSFLCDQKDGNVRPFPHQGSLRMPRPVAMWPCADADSIPFEDRPLSKLKESDRCSASENLYLDALSLDDEPEEPPAHRPEREFRNRLPEEEENHKGNLQRAVSVSSMSEFQRLMDISPFLPEKGLPSTSSKEDVTPPLSPDDLKYIEEFNKSWDYTPNRGHNGGGPDLWADRTEVGRAGHEDSTEPFPDSSWYLTTSVTMTTDTMTSPEHCQKQPLRSHVLTEQSGLRVLHSPPAVRRVDSITAAGGEGPFPTSRARGSPGDTKGGPPEPMLSRWPCTSPRHSRDYVEGARRPLDSPLCTSLGFASPLHSLEMSKNLSDDMKEVAFSVRNAICSGPGELQVKDMACQTNGSRTMGTQTVQTISVGLQTEALRGSGVTSSPHKCLTPKAGGGATPVSSPSRSLRSRQVAPAIEKVQAKFERTCCSPKYGSPKLQRKPLPKADQPNNRTSPGMAQKGYSESAWARSTTTRESPVHTTINDGLSSLFNIIDHSPVVQDPFQKGLRAGSRSRSAEPRPELGPGQETGTNSRGRSPSPIGVGSEMCREEGGEGTPVKQDLSAPPGYTLTENVARILNKKLLEHALKEERRQAAHGPPGLHSDSHSLGDTAEPGPMENQTVLLTAPWGL

SEQ ID NO: 51442 - protein, 509 aa, Homo sapiens
  Payload ID: 10252
  Gene Symbol: MTCL1
  Gene Name: microtubule crosslinking factor 1
  ENSP ID: ENSP00000463438
MRKKMAKLGREKDELEQELQKYKSLYGDVDSPLPTGEAGGPPSTREAELKLRLKLVEEEANILGRKIVELEVENRGLKAEMEDMRGQQEREGPGRDHAPSIPTSPFGDSLESSTELRRHLQFVEEEAELLRRSISEIEDHNRQLTHELSKFKFEPPREPGWLGEGASPGAGGGAPLQEELKSARLQISELSGKVLKLQHENHALLSNIQRCDLAAHLGLRAPSPRDSDAESDAGKKESDGEESRLPQPKREGPVGGESDSEEMFEKTSGFGSGKPSEASEPCPTELLKAREDSEYLVTLKHEAQRLERTVERLITDTDSFLHDAGLRGGAPLPGPGLQGEEEQGEGDQQEPQLLGTINAKMKAFKKELQAFLEQVNRIGDGLSPLPHLTESSSFLSTVTSVSRDSPIGNLGKELGPDLQMCPPAPLLILILVQTERAAGVAARAGPRGRAGEPAPPSRAGAAPPRRRGHREPRAGRPDLLQPGDGGGAPLCLEVERTGNAQPGFAKHPP

SEQ ID NO: 51443 - protein, 976 aa, Homo sapiens
  Payload ID: 10252
  Gene Symbol: MTCL1
  Gene Name: microtubule crosslinking factor 1
  Uniprot ID: Q9Y4B5
  ENSP ID: ENSP00000463465
MHSLALQNTLHERTWSDEKNLMQQELRSLKQNIFLFYVKLRWLLKHWRQGKQMEEEGEEFTEGEHPETLSRLGELGVQGGHQADGPDHDSDRGCGFPVGEHSPHSRVQIGDHSLRLQTADRGQPHKQVVENQQLFSAFKALLEDFRAELREDERARLRLQQQYASDKAAWDVEWAVLKCRLEQNCCGYPRINIEEETLGFTRLPAGSTVKTLKSLGLQRLELEEKTENKLGELGSSAESKGALKKEREVHQKLLADSHSLVMDLRWQIHHSEKNWNREKVELLDRLDRDRQEWERQKKEFLWRIEQGSLRMPRPVAMWPCADADSIPFEDRPLSKLKESDRCSASENLYLDALSLDDEPEEPPAHRPEREFRNRLPEEEENHKGNLQRAVSVSSMSEFQRLMDISPFLPEKGLPSTSSKEDVTPPLSPDDLKYIEEFNKSWDYTPNRGHNGGGPDLWADRTEVGRAGHEDSTEPFPDSSWYLTTSVTMTTDTMTSPEHCQKQPLRSHVLTEQSGLRVLHSPPAVRRVDSITAAGGEGPFPTSRARGSPGDTKGGPPEPMLSRWPCTSPRHSRDYVEGARRPLDSPLCTSLGFASPLHSLEMSKNLSDDMKEVAFSVRNAICSGPGELQVKDMACQTNGSRTMGTQTVQTISVGLQTEALRGSGVTSSPHKCLTPKAGGGATPVSSPSRSLRSRQVAPAIEKVQAKFERTCCSPKYGSPKLQRKPLPKADQPNNRTSPGMAQKGYSESAWARSTTTRESPVHTTINDGLSSLFNIIDHSPVVQDPFQKGLRAGSRSRSAEPRPELGPGQETGTNSRGRSPSPIGVGSEMCREEGGEGTPVKQDLSAPPGYTLTENVARILNKKLLEHALKEERRQAAHGPPGLHSDSHSLGDTAEPGPMEELPCSALAPSLEPCFSRPERPANRRPPSRWAPHSPTASQPQSPGDPTSLEEHGGEEPPEEQPHRDASLHGLSQYNSL

SEQ ID NO: 51444 - protein, 47 aa, Homo sapiens
  Payload ID: 10252
  Gene Symbol: MTCL1
  Gene Name: microtubule crosslinking factor 1
  ENSP ID: ENSP00000463506
MEEMRDSYLEEDVYQLQELRRELDRANKNCRILQYRLRKAEQKSLKV

SEQ ID NO: 51445 - protein, 5938 aa, Homo sapiens
  Payload ID: 10253
  Gene Symbol: MACF1
  Gene Name: microtubule-actin crosslinking factor 1
  Uniprot ID: Q9UPN3
  ENSP ID: ENSP00000289893
MQKGLLDQDTGLVLLESQVIMSGLIAPETGENLSLEEGIARNLINPQMYQQLRELQDALALISRLTESRGPLSVVEAIEKRIISETVGLKILEAHLATGGFSLSPSENCINLEEAFHQGLISAWLHSVLESYLRTSKNLIDPNTAEKIGLLDLMQRCIVHQESGFKLLPVKQLAGGMVSLKSGRKVSIFRAVQEGLIDRQVTVRLLEAQLFAGGIVDPRTGHRLTVEEAVRHNLIDQDMACAILIRQLQTGGIIDTVTGQRLTIDEAVSNDLVAAKIALVILESLWSFMGLLWPESGEILPITDALEQGIVSTELAHKILSNRQHIKALFLPATTEILSWKKAIESGILDRDLANNLKSICIPDVMPHMQLADSAEQNINPGAAVLPCSKSHPKATASQSENLLFQLMTHSYINVQNGQRLLLLDKELMETLTSRDEYQTSPPKVVEIGHQRQKTPEGLQESANVKISGTFSSGWTVRLPEFQFSSQNKEYPDREDCTTEKGKKTTVETEDSSVENPEQDLFVEQKERNPNIDALKVINKVKLEVQRQLIGTQREDQTAVSVRENASRGHLLTIPPAEAEGVPLVVDKDVFSVETPKKEHQPLRNTSFTCQNEQAHTLETEYIHDETGGSHIKPQSKKLQVQVKKTLGIKLELKSETDGNVHPLDKKEMLKKTFLAKDDHKESQEAQNIAGGSMMMSEKTDEEDSGREIFLSCSHPLELLEEATLNVLSAQLLDGGIFHEQTGQKLLLNEAISRGIVPSHTAVKLMEKLNMFQGFFDSQTCESLTTEEVINEGLMDEKLLHNVLMADKAISGVLDPRTQTLCSVKDAVTVGLLDKETATRILERQVVTGGIIDLKRGKKVSVTLASTLGLVDVADQPELINLEKASKGRDAEKTVRERLISLQMETTGLIDPDSKAPLTVVQSIDRGLLEREEAVRLLTKQVVDGGIIHHISGMRLSVDNAFRHGLIGEDLAEKLKRVENLNIHQIFNPETKENISLPKAIKLDLITSDLKREIQEVQAFTGNFVDLISGQRLTLAEAKKEGLLTNEAVLSPGMMHGIVDPENCRIVPYSELVKKCKIDIESGQRYLEVIPFSDIKDGVSDKVLTLSQAIQLGKVDFASTLKVLEAQANTGGIIDTATGKRLTLASALEEKLVDENMVRIIASHQVLNGGIVDIFSDQRVTLVEAIEKRLISPELANMIQIDSSEFSDHRAQIEKQEGIEVCALQNEFLGKDMLIACNQTAEMSCNKVEESERLFQVENQSAQEKVKVRVSDGEQAKKSREISLKEFGCKDQRKPRMSSDAKEFISIINPHNLKGKSLGQVSLTHPYSECDFKLKEVARNNMGNDTNEEQEKAVTKIEIISHMKQSTSCLDSEEIRENQGEVILEVQETYCETSGKLPSEQVLQQPMNARVKSKREKREVIVEESIRTCKPAFLSEEKLYQETAIRDEHDSHIKSQPREMTSSEKGKEADTEMGFSITFKIEESSSQVVPQGISVKHLDALTLFSSKQANEGKVNNLSLCLTLKPEENLSREIACGAQSEPFPCMTPRPEGLHYQESDGKAQVTGPSQISKTDKSFQGTTRQETNYQDSWVTSKTKETKHQISSSNECKEKSYQEVSFDPARGLKLEEITVSRPDSKEVRYLEFSDRKDLHHQGSKSDDKLCGTLKSEIATQELTGEKFLEMANPNVAGLEAGSIEDIVTQRGSRVLGSFLPEKLFKGVSQKENTGQQNAIISPTVLETSEEKTVSLTVCSAVKTEKTPQEKLRESPGSEQTPFMTAPEGKGNGGVNPEPFRATQNVFTRQLCLEHDEKLVSYLSLLRNIEMRTKQIQPLELNLAELQDLLCQAKVLERELKDLTTLVSQELECVNQIIISQPQEVPAQLLKALEKDAKNLQKSLSSVSDTWNSRLLHFQNAVEIEKTKVLNQHTQLEGRLQDLRAWVGNKNLILNSKGSNSEIDVDSLNLCLQQYEDLKQPMAERKAQLDALAFDIQFFISEHAQDLSPQQNRQMLRLLNELQRSFQDILEQTAAQVDALQGHLQQMEQEALVKTLQKQQNTCHQQLEDLCSWVGQAERALAGHQGRTTQQDLSALQKNQSDLKDLQDDIQNRATSFATVVKDIEGFMEENQTKLSPRELTALREKLHQAKEQYEALQEETRVAQKELEEAVTSALQQETEKSKAAKELAENKKKIDALLDWVTSVGSSGGQLLTNLPGMEQLSGASLEKGALDTTDGYMGVNQAPEKLDKQCEMMKARHQELLSQQQNFILATQSAQAFLDQHGHNLTPEEQQMLQQKLGELKEQYSTSLAQSEAELKQVQTLQDELQKFLQDHKEFESWLERSEKELENMHKGGSSPETLPSLLKRQGSFSEDVISHKGDLRFVTISGQKVLDMENSFKEGKEPSEIGNLVKDKLKDATERYTALHSKCTRLGSHLNMLLGQYHQFQNSADSLQAWMQACEANVEKLLSDTVASDPGVLQEQLATTKQLQEELAEHQVPVEKLQKVARDIMEIEGEPAPDHRHVQETTDSILSHFQSLSYSLAERSSLLQKAIAQSQSVQESLESLLQSIGEVEQNLEGKQVSSLSSGVIQEALATNMKLKQDIARQKSSLEATREMVTRFMETADSTTAAVLQGKLAEVSQRFEQLCLQQQEKESSLKKLLPQAEMFEHLSGKLQQFMENKSRMLASGNQPDQDITHFFQQIQELNLEMEDQQENLDTLEHLVTELSSCGFALDLCQHQDRVQNLRKDFTELQKTVKEREKDASSCQEQLDEFRKLVRTFQKWLKETEGSIPPTETSMSAKELEKQIEHLKSLLDDWASKGTLVEEINCKGTSLENLIMEITAPDSQGKTGSILPSVGSSVGSVNGYHTCKDLTEIQCDMSDVNLKYEKLGGVLHERQESLQAILNRMEEVHKEANSVLQWLESKEEVLKSMDAMSSPTKTETVKAQAESNKAFLAELEQNSPKIQKVKEALAGLLVTYPNSQEAENWKKIQEELNSRWERATEVTVARQRQLEESASHLACFQAAESQLRPWLMEKELMMGVLGPLSIDPNMLNAQKQQVQFMLKEFEARRQQHEQLNEAAQGILTGPGDVSLSTSQVQKELQSINQKWVELTDKLNSRSSQIDQAIVKSTQYQELLQDLSEKVRAVGQRLSVQSAISTQPEAVKQQLEETSEIRSDLEQLDHEVKEAQTLCDELSVLIGEQYLKDELKKRLETVALPLQGLEDLAADRINRLQAALASTQQFQQMFDELRTWLDDKQSQQAKNCPISAKLERLQSQLQENEEFQKSLNQHSGSYEVIVAEGESLLLSVPPGEEKRTLQNQLVELKNHWEELSKKTADRQSRLKDCMQKAQKYQWHVEDLVPWIEDCKAKMSELRVTLDPVQLESSLLRSKAMLNEVEKRRSLLEILNSAADILINSSEADEDGIRDEKAGINQNMDAVTEELQAKTGSLEEMTQRLREFQESFKNIEKKVEGAKHQLEIFDALGSQACSNKNLEKLRAQQEVLQALEPQVDYLRNFTQGLVEDAPDGSDASQLLHQAEVAQQEFLEVKQRVNSGCVMMENKLEGIGQFHCRVREMFSQLADLDDELDGMGAIGRDTDSLQSQIEDVRLFLNKIHVLKLDIEASEAECRHMLEEEGTLDLLGLKRELEALNKQCGKLTERGKARQEQLELTLGRVEDFYRKLKGLNDATTAAEEAEALQWVVGTEVEIINQQLADFKMFQKEQVDPLQMKLQQVNGLGQGLIQSAGKDCDVQGLEHDMEEINARWNTLNKKVAQRIAQLQEALLHCGKFQDALEPLLSWLADTEELIANQKPPSAEYKVVKAQIQEQKLLQRLLDDRKATVDMLQAEGGRIAQSAELADREKITGQLESLESRWTELLSKAAARQKQLEDILVLAKQFHETAEPISDFLSVTEKKLANSEPVGTQTAKIQQQIIRHKALEEDIENHATDVHQAVKIGQSLSSLTSPAEQGVLSEKIDSLQARYSEIQDRCCRKAALLDQALSNARLFGEDEVEVLNWLAEVEDKLSSVFVKDFKQDVLHRQHADHLALNEEIVNRKKNVDQAIKNGQALLKQTTGEEVLLIQEKLDGIKTRYADITVTSSKALRTLEQARQLATKFQSTYEELTGWLREVEEELATSGGQSPTGEQIPQFQQRQKELKKEVMEHRLVLDTVNEVSRALLELVPWRAREGLDKLVSDANEQYKLVSDTIGQRVDEIDAAIQRSQQYEQAADAELAWVAETKRKLMALGPIRLEQDQTTAQLQVQKAFSIDIIRHKDSMDELFSHRSEIFGTCGEEQKTVLQEKTESLIQQYEAISLLNSERYARLERAQVLVNQFWETYEELSPWIEETRALIAQLPSPAIDHEQLRQQQEEMRQLRESIAEHKPHIDKLLKIGPQLKELNPEEGEMVEEKYQKAENMYAQIKEEVRQRALALDEAVSQSTQITEFHDKIEPMLETLENLSSRLRMPPLIPAEVDKIRECISDNKSATVELEKLQPSFEALKRRGEELIGRSQGADKDLAAKEIQDKLDQMVFFWEDIKARAEEREIKFLDVLELAEKFWYDMAALLTTIKDTQDIVHDLESPGIDPSIIKQQVEAAETIKEETDGLHEELEFIRILGADLIFACGETEKPEVRKSIDEMNNAWENLNKTWKERLEKLEDAMQAAVQYQDTLQAMFDWLDNTVIKLCTMPPVGTDLNTVKDQLNEMKEFKVEVYQQQIEMEKLNHQGELMLKKATDETDRDIIREPLTELKHLWENLGEKIAHRQHKLEGALLALGQFQHALEELMSWLTHTEELLDAQRPISGDPKVIEVELAKHHVLKNDVLAHQATVETVNKAGNELLESSAGDDASSLRSRLEAMNQCWESVLQKTEEREQQLQSTLQQAQGFHSEIEDFLLELTRMESQLSASKPTGGLPETAREQLDTHMELYSQLKAKEETYNQLLDKGRLMLLSRDDSGSGSKTEQSVALLEQKWHVVSSKMEERKSKLEEALNLATEFQNSLQEFINWLTLAEQSLNIASPPSLILNTVLSQIEEHKVFANEVNAHRDQIIELDQTGNQLKFLSQKQDVVLIKNLLVSVQSRWEKVVQRSIERGRSLDDARKRAKQFHEAWKKLIDWLEDAESHLDSELEISNDPDKIKLQLSKHKEFQKTLGGKQPVYDTTIRTGRALKEKTLLPEDSQKLDNFLGEVRDKWDTVCGKSVERQHKLEEALLFSGQFMDALQALVDWLYKVEPQLAEDQPVHGDLDLVMNLMDAHKVFQKELGKRTGTVQVLKRSGRELIENSRDDTTWVKGQLQELSTRWDTVCKLSVSKQSRLEQALKQAEVFRDTVHMLLEWLSEAEQTLRFRGALPDDTEALQSLIDTHKEFMKKVEEKRVDVNSAVAMGEVILAVCHPDCITTIKHWITIIRARFEEVLTWAKQHQQRLETALSELVANAELLEELLAWIQWAETTLIQRDQEPIPQNIDRVKALIAEHQTFMEEMTRKQPDVDRVTKTYKRKNIEPTHAPFIEKSRSGGRKSLSQPTPPPMPILSQSEAKNPRINQLSARWQQVWLLALERQRKLNDALDRLEELKEFANFDFDVWRKKYMRWMNHKKSRVMDFFRRIDKDQDGKITRQEFIDGILASKFPTTKLEMTAVADIFDRDGDGYIDYYEFVAALHPNKDAYRPTTDADKIEDEVTRQVAQCKCAKRFQVEQIGENKYRFFLGNQFGDSQQLRLVRILRSTVMVRVGGGWMALDEFLVKNDPCRARGRTNIELREKFILPEGASQGMTPFRSRGRRSKPSSRAASPTRSSSSASQSNHSCTSMPSSPATPASGTKVIPSSGSKLKRPTPTFHSSRTSLAGDTSNSSSPASTGAKTNRADPKKSASRPGSRAGSRAGSRASSRRGSDASDFDLLETQSACSDTSESSAAGGQGNSRRGLNKPSKIPTMSKKTTTASPRTPGPKR

SEQ ID NO: 51446 - protein, 543 aa, Homo sapiens
  Payload ID: 10253
  Gene Symbol: MACF1
  Gene Name: microtubule-actin crosslinking factor 1
  ENSP ID: ENSP00000353231
  MOD_RES (1)..(1): Any amino acid
XRFEEVLTWAKQHQQRLETALSELVANAELLEELLAWIQWAETTLIQRDQEPIPQNIDRVKALIAEHQTFMEEMTRKQPDVDRVTKTYKRKNIEPTHAPFIEKSRSGGRKSLSQPTPPPMPILSQSEAKNPRINQLSARWQQVWLLALERQRKLNDALDRLEEQLCLELKEFANFDFDVWRKKYMRWMNHKKSRVMDFFRRIDKDQDGKITRQEFIDGILASKFPTTKLEMTAVADIFDRDGDGYIDYYEFVAALHPNKDAYRPTTDADKIEDEVTRQVAQCKCAKRFQVEQIGENKYRFFLGNQFGDSQQLRLVRILRSTVMVRVGGGWMALDEFLVKNDPCRARGRTNIELREKFILPEGASQGMTPFRSRGRRSKPSSRAASPTRSSSSASQSNHSCTSMPSSPATPASGTKVIPSSGSKLKRPTPTFHSSRTSLAGDTSNSSSPASTGAKTNRADPKKSASRPGSRAGSRAGSRASSRRGSDASDFDLLETQSACSDTSESSAAGGQGNSRRGLNKPSKIPTMSKKTTTASPRTPGPKR

SEQ ID NO: 51447 - protein, 5430 aa, Homo sapiens
  Payload ID: 10253
  Gene Symbol: MACF1
  Gene Name: microtubule-actin crosslinking factor 1
  Uniprot ID: Q9UPN3
  ENSP ID: ENSP00000354573
MSSSDEETLSERSCRSERSCRSERSYRSERSGSLSPCPPGDTLPWNLPLHEQKKRKSQDSVLDPAERAVVRVADERDRVQKKTFTKWVNKHLMKVRKHINDLYEDLRDGHNLISLLEVLSGIKLPREKGRMRFHRLQNVQIALDFLKQRQVKLVNIRNDDITDGNPKLTLGLIWTIILHFQISDIYISGESGDMSAKEKLLLWTQKVTAGYTGIKCTNFSSCWSDGKMFNALIHRYRPDLVDMERVQIQSNRENLEQAFEVAERLGVTRLLDAEDVDVPSPDEKSVITYVSSIYDAFPKVPEGGEGISATEVDSRWQEYQSRVDSLIPWIKQHTILMSDKTFPQNPVELKALYNQYIHFKETEILAKEREKGRIEELYKLLEVWIEFGRIKLPQGYHPNDVEEEWGKLIIEMLEREKSLRPAVERLELLLQIANKIQNGALNCEEKLTLAKNTLQADAAHLESGQPVQCESDVIMYIQECEGLIRQLQVDLQILRDENYYQLEELAFRVMRLQDELVTLRLECTNLYRKGHFTSLELVPPSTLTTTHLKAEPLTKATHSSSTSWFRKPMTRAELVAISSSEDEGNLRFVYELLSWVEEMQMKLERAEWGNDLPSVELQLETQQHIHTSVEELGSSVKEARLYEGKMSQNFHTSYAETLGKLETQYCKLKETSSFRMRHLQSLHKFVSRATAELIWLNEKEEEELAYDWSDNNSNISAKRNYFSELTMELEEKQDVFRSLQDTAELLSLENHPAKQTVEAYSAAVQSQLQWMKQLCLCVEQHVKENTAYFQFFSDARELESFLRNLQDSIKRKYSCDHNTSLSRLEDLLQDSMDEKEQLIQSKSSVASLVGRSKTIVQLKPRSPDHVLKNTISVKAVCDYRQIEITICKNDECVLEDNSQRTKWKVISPTGNEAMVPSVCFLIPPPNKDAIEMASRVEQSYQKVMALWHQLHVNTKSLISWNYLRKDLDLVQTWNLEKLRSSAPGECHQIMKNLQAHYEDFLQDSRDSVLFSVADRLRLEEEVEACKARFQHLMKSMENEDKEETVAKMYISELKNIRLRLEEYEQRVVKRIQSLASSRTDRDAWQDNALRIAEQEHTQEDLQQLRSDLDAVSMKCDSFLHQSPSSSSVPTLRSELNLLVEKMDHVYGLSTVYLNKLKTVDVIVRSIQDAELLVKGYEIKLSQEEVVLADLSALEAHWSTLRHWLSDVKDKNSVFSVLDEEIAKAKVVAEQMSRLTPERNLDLERYQEKGSQLQERWHRVIAQLEIRQSELESIQEVLGDYRACHGTLIKWIEETTAQQEMMKPGQAEDSRVLSEQLSQQTALFAEIERNQTKLDQCQKFSQQYSTIVKDYELQLMTYKAFVESQQKSPGKRRRMLSSSDAITQEFMDLRTRYTALVTLTTQHVKYISDALRRLEEEEKVVEEEKQEHVEKVKELLGWVSTLARNTQGKATSSETKESTDIEKAILEQQVLSEELTTKKEQVSEAIKTSQIFLAKHGHKLSEKEKKQISEQLNALNKAYHDLCDGSANQLQQLQSQLAHQTEQKTLQKQQNTCHQQLEDLCSWVGQAERALAGHQGRTTQQDLSALQKNQSDLKDLQDDIQNRATSFATVVKDIEGFMEENQTKLSPRELTALREKLHQAKEQYEALQEETRVAQKELEEAVTSALQQETEKSKAAKELAENKKKIDALLDWVTSVGSSGGQLLTNLPGMEQLSGASLEKGALDTTDGYMGVNQAPEKLDKQCEMMKARHQELLSQQQNFILATQSAQAFLDQHGHNLTPEEQQMLQQKLGELKEQYSTSLAQSEAELKQVQTLQDELQKFLQDHKEFESWLERSEKELENMHKGGSSPETLPSLLKRQGSFSEDVISHKGDLRFVTISGQKVLDMENSFKEGKEPSEIGNLVKDKLKDATERYTALHSKCTRLGSHLNMLLGQYHQFQNSADSLQAWMQACEANVEKLLSDTVASDPGVLQEQLATTKQLQEELAEHQVPVEKLQKVARDIMEIEGEPAPDHRHVQETTDSILSHFQSLSYSLAERSSLLQKAIAQSQSVQESLESLLQSIGEVEQNLEGKQVSSLSSGVIQEALATNMKLKQDIARQKSSLEATREMVTRFMETADSTTAAVLQGKLAEVSQRFEQLCLQQQEKESSLKKLLPQAEMFEHLSGKLQQFMENKSRMLASGNQPDQDITHFFQQIQELNLEMEDQQENLDTLEHLVTELSSCGFALDLCQHQDRVQNLRKDFTELQKTVKEREKDASSCQEQLDEFRKLVRTFQKWLKETEGSIPPTETSMSAKELEKQIEHLKSLLDDWASKGTLVEEINCKGTSLENLIMEITAPDSQGKTGSILPSVGSSVGSVNGYHTCKDLTEIQCDMSDVNLKYEKLGGVLHERQESLQAILNRMEEVHKEANSVLQWLESKEEVLKSMDAMSSPTKTETVKAQAESNKAFLAELEQNSPKIQKVKEALAGLLVTYPNSQEAENWKKIQEELNSRWERATEVTVARQRQLEESASHLACFQAAESQLRPWLMEKELMMGVLGPLSIDPNMLNAQKQQVQFMLKEFEARRQQHEQLNEAAQGILTGPGDVSLSTSQVQKELQSINQKWVELTDKLNSRSSQIDQAIVKSTQYQELLQDLSEKVRAVGQRLSVQSAISTQPEAVKQQLEETSEIRSDLEQLDHEVKEAQTLCDELSVLIGEQYLKDELKKRLETVALPLQGLEDLAADRINRLQAALASTQQFQQMFDELRTWLDDKQSQQAKNCPISAKLERLQSQLQENEEFQKSLNQHSGSYEVIVAEGESLLLSVPPGEEKRTLQNQLVELKNHWEELSKKTADRQSRLKDCMQKAQKYQWHVEDLVPWIEDCKAKMSELRVTLDPVQLESSLLRSKAMLNEVEKRRSLLEILNSAADILINSSEADEDGIRDEKAGINQNMDAVTEELQAKTGSLEEMTQRLREFQESFKNIEKKVEGAKHQLEIFDALGSQACSNKNLEKLRAQQEVLQALEPQVDYLRNFTQGLVEDAPDGSDASQLLHQAEVAQQEFLEVKQRVNSGCVMMENKLEGIGQFHCRVREMFSQLADLDDELDGMGAIGRDTDSLQSQIEDVRLFLNKIHVLKLDIEASEAECRHMLEEEGTLDLLGLKRELEALNKQCGKLTERGKARQEQLELTLGRVEDFYRKLKGLNDATTAAEEAEALQWVVGTEVEIINQQLADFKMFQKEQVDPLQMKLQQVNGLGQGLIQSAGKDCDVQGLEHDMEEINARWNTLNKKVAQRIAQLQEALLHCGKFQDALEPLLSWLADTEELIANQKPPSAEYKVVKAQIQEQKLLQRLLDDRKATVDMLQAEGGRIAQSAELADREKITGQLESLESRWTELLSKAAARQKQLEDILVLAKQFHETAEPISDFLSVTEKKLANSEPVGTQTAKIQQQIIRHKALEEDIENHATDVHQAVKIGQSLSSLTSPAEQGVLSEKIDSLQARYSEIQDRCCRKAALLDQALSNARLFGEDEVEVLNWLAEVEDKLSSVFVKDFKQDVLHRQHADHLALNEEIVNRKKNVDQAIKNGQALLKQTTGEEVLLIQEKLDGIKTRYADITVTSSKALRTLEQARQLATKFQSTYEELTGWLREVEEELATSGGQSPTGEQIPQFQQRQKELKKEVMEHRLVLDTVNEVSRALLELVPWRAREGLDKLVSDANEQYKLVSDTIGQRVDEIDAAIQRSQQYEQAADAELAWVAETKRKLMALGPIRLEQDQTTAQLQVQKAFSIDIIRHKDSMDELFSHRSEIFGTCGEEQKTVLQEKTESLIQQYEAISLLNSERYARLERAQVLVNQFWETYEELSPWIEETRALIAQLPSPAIDHEQLRQQQEEMRQLRESIAEHKPHIDKLLKIGPQLKELNPEEGEMVEEKYQKAENMYAQIKEEVRQRALALDEAVSQSTQITEFHDKIEPMLETLENLSSRLRMPPLIPAEVDKIRECISDNKSATVELEKLQPSFEALKRRGEELIGRSQGADKDLAAKEIQDKLDQMVFFWEDIKARAEEREIKFLDVLELAEKFWYDMAALLTTIKDTQDIVHDLESPGIDPSIIKQQVEAAETIKEETDGLHEELEFIRILGADLIFACGETEKPEVRKSIDEMNNAWENLNKTWKERLEKLEDAMQAAVQYQDTLQAMFDWLDNTVIKLCTMPPVGTDLNTVKDQLNEMKEFKVEVYQQQIEMEKLNHQGELMLKKATDETDRDIIREPLTELKHLWENLGEKIAHRQHKLEGALLALGQFQHALEELMSWLTHTEELLDAQRPISGDPKVIEVELAKHHVLKNDVLAHQATVETVNKAGNELLESSAGDDASSLRSRLEAMNQCWESVLQKTEEREQQLQSTLQQAQGFHSEIEDFLLELTRMESQLSASKPTGGLPETAREQLDTHMELYSQLKAKEETYNQLLDKGRLMLLSRDDSGSGSKTEQSVALLEQKWHVVSSKMEERKSKLEEALNLATEFQNSLQEFINWLTLAEQSLNIASPPSLILNTVLSQIEEHKVFANEVNAHRDQIIELDQTGNQLKFLSQKQDVVLIKNLLVSVQSRWEKVVQRSIERGRSLDDARKRAKQFHEAWKKLIDWLEDAESHLDSELEISNDPDKIKLQLSKHKEFQKTLGGKQPVYDTTIRTGRALKEKTLLPEDSQKLDNFLGEVRDKWDTVCGKSVERQHKLEEALLFSGQFMDALQALVDWLYKVEPQLAEDQPVHGDLDLVMNLMDAHKVFQKELGKRTGTVQVLKRSGRELIENSRDDTTWVKGQLQELSTRWDTVCKLSVSKQSRLEQALKQAEVFRDTVHMLLEWLSEAEQTLRFRGALPDDTEALQSLIDTHKEFMKKVEEKRVDVNSAVAMGEVILAVCHPDCITTIKHWITIIRARFEEVLTWAKQHQQRLETALSELVANAELLEELLAWIQWAETTLIQRDQEPIPQNIDRVKALIAEHQTFMEEMTRKQPDVDRVTKTYKRKNIEPTHAPFIEKSRSGGRKSLSQPTPPPMPILSQSEAKNPRINQLSARWQQVWLLALERQRKLNDALDRLEELKEFANFDFDVWRKKYMRWMNHKKSRVMDFFRRIDKDQDGKITRQEFIDGILASKFPTTKLEMTAVADIFDRDGDGYIDYYEFVAALHPNKDAYRPTTDADKIEDEVTRQVAQCKCAKRFQVEQIGENKYRFGDSQQLRLVRILRSTVMVRVGGGWMALDEFLVKNDPCRARGRTNIELREKFILPEGASQGMTPFRSRGRRSKPSSRAASPTRSSSSASQSNHSCTSMPSSPATPASGTKVIPSSGSKLKRPTPTFHSSRTSLAGDTSNSSSPASTGAKTNRADPKKSASRPGSRAGSRAGSRASSRRGSDASDFDLLETQSACSDTSESSAAGGQGNSRRGLNKPSKIPTMSKKTTTASPRTPGPKR

SEQ ID NO: 51448 - protein, 7388 aa, Homo sapiens
  Payload ID: 10253
  Gene Symbol: MACF1
  Gene Name: microtubule-actin crosslinking factor 1
  Uniprot ID: Q9UPN3
  ENSP ID: ENSP00000362006
MSSSDEETLSERSCRSERSCRSERSYRSERSGSLSPCPPGDTLPWNLPLHEQKKRKSQDSVLDPAERAVVRVADERDRVQKKTFTKWVNKHLMKVRKHINDLYEDLRDGHNLISLLEVLSGIKLPREKGRMRFHRLQNVQIALDFLKQRQVKLVNIRNDDITDGNPKLTLGLIWTIILHFQISDIYISGESGDMSAKEKLLLWTQKVTAGYTGIKCTNFSSCWSDGKMFNALIHRYRPDLVDMERVQIQSNRENLEQAFEVAERLGVTRLLDAEDVDVPSPDEKSVITYVSSIYDAFPKVPEGGEGISATEVDSRWQEYQSRVDSLIPWIKQHTILMSDKTFPQNPVELKALYNQYIHFKETEILAKEREKGRIEELYKLLEVWIEFGRIKLPQGYHPNDVEEEWGKLIIEMLEREKSLRPAVERLELLLQIANKIQNGALNCEEKLTLAKNTLQADAAHLESGQPVQCESDVIMYIQECEGLIRQLQVDLQILRDENYYQLEELAFRVMRLQDELVTLRLECTNLYRKGHFTSLELVPPSTLTTTHLKAEPLTKATHSSSTSWFRKPMTRAELVAISSSEDEGNLRFVYELLSWVEEMQMKLERAEWGNDLPSVELQLETQQHIHTSVEELGSSVKEARLYEGKMSQNFHTSYAETLGKLETQYCKLKETSSFRMRHLQSLHKFVSRATAELIWLNEKEEEELAYDWSDNNSNISAKRNYFSELTMELEEKQDVFRSLQDTAELLSLENHPAKQTVEAYSAAVQSQLQWMKQLCLCVEQHVKENTAYFQFFSDARELESFLRNLQDSIKRKYSCDHNTSLSRLEDLLQDSMDEKEQLIQSKSSVASLVGRSKTIVQLKPRSPDHVLKNTISVKAVCDYRQIEITICKNDECVLEDNSQRTKWKVISPTGNEAMVPSVCFLIPPPNKDAIEMASRVEQSYQKVMALWHQLHVNTKSLISWNYLRKDLDLVQTWNLEKLRSSAPGECHQIMKNLQAHYEDFLQDSRDSVLFSVADRLRLEEEVEACKARFQHLMKSMENEDKEETVAKMYISELKNIRLRLEEYEQRVVKRIQSLASSRTDRDAWQDNALRIAEQEHTQEDLQQLRSDLDAVSMKCDSFLHQSPSSSSVPTLRSELNLLVEKMDHVYGLSTVYLNKLKTVDVIVRSIQDAELLVKGYEIKLSQEEVVLADLSALEAHWSTLRHWLSDVKDKNSVFSVLDEEIAKAKVVAEQMSRLTPERNLDLERYQEKGSQLQERWHRVIAQLEIRQSELESIQEVLGDYRACHGTLIKWIEETTAQQEMMKPGQAEDSRVLSEQLSQQTALFAEIERNQTKLDQCQKFSQQYSTIVKDYELQLMTYKAFVESQQKSPGKRRRMLSSSDAITQEFMDLRTRYTALVTLTTQHVKYISDALRRLEEEEKVVEEEKQEHVEKVKELLGWVSTLARNTQGKATSSETKESTDIEKAILEQQVLSEELTTKKEQVSEAIKTSQIFLAKHGHKLSEKEKKQISEQLNALNKAYHDLCDGSANQLQQLQSQLAHQTEQKECRAVAGVIDLGTVEIFPIFKAMQKGLLDQDTGLVLLESQVIMSGLIAPETGENLSLEEGIARNLINPQMYQQLRELQDALALISRLTESRGPLSVVEAIEKRIISETVGLKILEAHLATGGFSLSPSENCINLEEAFHQGLISAWLHSVLESYLRTSKNLIDPNTAEKIGLLDLMQRCIVHQESGFKLLPVKQLAGGMVSLKSGRKVSIFRAVQEGLIDRQVTVRLLEAQLFAGGIVDPRTGHRLTVEEAVRHNLIDQDMACAILIRQLQTGGIIDTVTGQRLTIDEAVSNDLVAAKIALVILESLWSFMGLLWPESGEILPITDALEQGIVSTELAHKILSNRQHIKALFLPATTEILSWKKAIESGILDRDLANNLKSICIPDVMPHMQLADSAEQNINPGAAVLPCSKSHPKATASQSENLLFQLMTHSYINVQNGQRLLLLDKELMETLTSRDEYQTSPPKVVEIGHQRQKTPEGLQESANVKISGTFSSGWTVRLPEFQFSSQNKEYPDREDCTTEKGKKTTVETEDSSVENPEQDLFVEQKERNPNIDALKVINKVKLEVQRQLIGTQREDQTAVSVRENASRGHLLTIPPAEAEGVPLVVDKDVFSVETPKKEHQPLRNTSFTCQNEQAHTLETEYIHDETGGSHIKPQSKKLQVQVKKTLGIKLELKSETDGNVHPLDKKEMLKKTFLAKDDHKESQEAQNIAGGSMMMSEKTDEEDSGREIFLSCSHPLELLEEATLNVLSAQLLDGGIFHEQTGQKLLLNEAISRGIVPSHTAVKLMEKLNMFQGFFDSQTCESLTTEEVINEGLMDEKLLHNVLMADKAISGVLDPRTQTLCSVKDAVTVGLLDKETATRILERQVVTGGIIDLKRGKKVSVTLASTLGLVDVADQPELINLEKASKGRDAEKTVRERLISLQMETTGLIDPDSKAPLTVVQSIDRGLLEREEAVRLLTKQVVDGGIIHHISGMRLSVDNAFRHGLIGEDLAEKLKRVENLNIHQIFNPETKENISLPKAIKLDLITSDLKREIQEVQAFTGNFVDLISGQRLTLAEAKKEGLLTNEAVLSPGMMHGIVDPENCRIVPYSELVKKCKIDIESGQRYLEVIPFSDIKDGVSDKVLTLSQAIQLGKVDFASTLKVLEAQANTGGIIDTATGKRLTLASALEEKLVDENMVRIIASHQVLNGGIVDIFSDQRVTLVEAIEKRLISPELANMIQIDSSEFSDHRAQIEKQEGIEVCALQNEFLGKDMLIACNQTAEMSCNKVEESERLFQVENQSAQEKVKVRVSDGEQAKKSREISLKEFGCKDQRKPRMSSDAKEFISIINPHNLKGKSLGQVSLTHPYSECDFKLKEVARNNMGNDTNEEQEKAVTKIEIISHMKQSTSCLDSEEIRENQGEVILEVQETYCETSGKLPSEQVLQQPMNARVKSKREKREVIVEESIRTCKPAFLSEEKLYQETAIRDEHDSHIKSQPREMTSSEKGKEADTEMGFSITFKIEESSSQVVPQGISVKHLDALTLFSSKQANEGKVNNLSLCLTLKPEENLSREIACGAQSEPFPCMTPRPEGLHYQESDGKAQVTGPSQISKTDKSFQGTTRQETNYQDSWVTSKTKETKHQISSSNECKEKSYQEVSFDPARGLKLEEITVSRPDSKEVRYLEFSDRKDLHHQGSKSDDKLCGTLKSEIATQELTGEKFLEMANPNVAGLEAGSIEDIVTQRGSRVLGSFLPEKLFKGVSQKENTGQQNAIISPTVLETSEEKTVSLTVCSAVKTEKTPQEKLRESPGSEQTPFMTAPEGKGNGGVNPEPFRATQNVFTRQLCLEHDEKLVSYLSLLRNIEMRTKQIQPLELNLAELQDLLCQAKVLERELKDLTTLVSQELECVNQIIISQPQEVPAQLLKALEKDAKNLQKSLSSVSDTWNSRLLHFQNAVEIEKTKVLNQHTQLEGRLQDLRAWVGNKNLILNSKGSNSEIDVDSLNLCLQQYEDLKQPMAERKAQLDALAFDIQFFISEHAQDLSPQQNRQMLRLLNELQRSFQDILEQTAAQVDALQGHLQQMEQEALVKTLQKQQNTCHQQLEDLCSWVGQAERALAGHQGRTTQQDLSALQKNQSDLKDLQDDIQNRATSFATVVKDIEGFMEENQTKLSPRELTALREKLHQAKEQYEALQEETRVAQKELEEAVTSALQQETEKSKAAKELAENKKKIDALLDWVTSVGSSGGQLLTNLPGMEQLSGASLEKGALDTTDGYMGVNQAPEKLDKQCEMMKARHQELLSQQQNFILATQSAQAFLDQHGHNLTPEEQQMLQQKLGELKEQYSTSLAQSEAELKQVQTLQDELQKFLQDHKEFESWLERSEKELENMHKGGSSPETLPSLLKRQGSFSEDVISHKGDLRFVTISGQKVLDMENSFKEGKEPSEIGNLVKDKLKDATERYTALHSKCTRLGSHLNMLLGQYHQFQNSADSLQAWMQACEANVEKLLSDTVASDPGVLQEQLATTKQLQEELAEHQVPVEKLQKVARDIMEIEGEPAPDHRHVQETTDSILSHFQSLSYSLAERSSLLQKAIAQSQSVQESLESLLQSIGEVEQNLEGKQVSSLSSGVIQEALATNMKLKQDIARQKSSLEATREMVTRFMETADSTTAAVLQGKLAEVSQRFEQLCLQQQEKESSLKKLLPQAEMFEHLSGKLQQFMENKSRMLASGNQPDQDITHFFQQIQELNLEMEDQQENLDTLEHLVTELSSCGFALDLCQHQDRVQNLRKDFTELQKTVKEREKDASSCQEQLDEFRKLVRTFQKWLKETEGSIPPTETSMSAKELEKQIEHLKSLLDDWASKGTLVEEINCKGTSLENLIMEITAPDSQGKTGSILPSVGSSVGSVNGYHTCKDLTEIQCDMSDVNLKYEKLGGVLHERQESLQAILNRMEEVHKEANSVLQWLESKEEVLKSMDAMSSPTKTETVKAQAESNKAFLAELEQNSPKIQKVKEALAGLLVTYPNSQEAENWKKIQEELNSRWERATEVTVARQRQLEESASHLACFQAAESQLRPWLMEKELMMGVLGPLSIDPNMLNAQKQQVQFMLKEFEARRQQHEQLNEAAQGILTGPGDVSLSTSQVQKELQSINQKWVELTDKLNSRSSQIDQAIVKSTQYQELLQDLSEKVRAVGQRLSVQSAISTQPEAVKQQLEETSEIRSDLEQLDHEVKEAQTLCDELSVLIGEQYLKDELKKRLETVALPLQGLEDLAADRINRLQAALASTQQFQQMFDELRTWLDDKQSQQAKNCPISAKLERLQSQLQENEEFQKSLNQHSGSYEVIVAEGESLLLSVPPGEEKRTLQNQLVELKNHWEELSKKTADRQSRLKDCMQKAQKYQWHVEDLVPWIEDCKAKMSELRVTLDPVQLESSLLRSKAMLNEVEKRRSLLEILNSAADILINSSEADEDGIRDEKAGINQNMDAVTEELQAKTGSLEEMTQRLREFQESFKNIEKKVEGAKHQLEIFDALGSQACSNKNLEKLRAQQEVLQALEPQVDYLRNFTQGLVEDAPDGSDASQLLHQAEVAQQEFLEVKQRVNSGCVMMENKLEGIGQFHCRVREMFSQLADLDDELDGMGAIGRDTDSLQSQIEDVRLFLNKIHVLKLDIEASEAECRHMLEEEGTLDLLGLKRELEALNKQCGKLTERGKARQEQLELTLGRVEDFYRKLKGLNDATTAAEEAEALQWVVGTEVEIINQQLADFKMFQKEQVDPLQMKLQQVNGLGQGLIQSAGKDCDVQGLEHDMEEINARWNTLNKKVAQRIAQLQEALLHCGKFQDALEPLLSWLADTEELIANQKPPSAEYKVVKAQIQEQKLLQRLLDDRKATVDMLQAEGGRIAQSAELADREKITGQLESLESRWTELLSKAAARQKQLEDILVLAKQFHETAEPISDFLSVTEKKLANSEPVGTQTAKIQQQIIRHKALNEEIVNRKKNVDQAIKNGQALLKQTTGEEVLLIQEKLDGIKTRYADITVTSSKALRTLEQARQLATKFQSTYEELTGWLREVEEELATSGGQSPTGEQIPQFQQRQKELKKEVMEHRLVLDTVNEVSRALLELVPWRAREGLDKLVSDANEQYKLVSDTIGQRVDEIDAAIQRSQQYEQAADAELAWVAETKRKLMALGPIRLEQDQTTAQLQVQKAFSIDIIRHKDSMDELFSHRSEIFGTCGEEQKTVLQEKTESLIQQYEAISLLNSERYARLERAQVLVNQFWETYEELSPWIEETRALIAQLPSPAIDHEQLRQQQEEMRQLRESIAEHKPHIDKLLKIGPQLKELNPEEGEMVEEKYQKAENMYAQIKEEVRQRALALDEAVSQSTQITEFHDKIEPMLETLENLSSRLRMPPLIPAEVDKIRECISDNKSATVELEKLQPSFEALKRRGEELIGRSQGADKDLAAKEIQDKLDQMVFFWEDIKARAEEREIKFLDVLELAEKFWYDMAALLTTIKDTQDIVHDLESPGIDPSIIKQQVEAAETIKEETDGLHEELEFIRILGADLIFACGETEKPEVRKSIDEMNNAWENLNKTWKERLEKLEDAMQAAVQYQDTLQAMFDWLDNTVIKLCTMPPVGTDLNTVKDQLNEMKEFKVEVYQQQIEMEKLNHQGELMLKKATDETDRDIIREPLTELKHLWENLGEKIAHRQHKLEGALLALGQFQHALEELMSWLTHTEELLDAQRPISGDPKVIEVELAKHHVLKNDVLAHQATVETVNKAGNELLESSAGDDASSLRSRLEAMNQCWESVLQKTEEREQQLQSTLQQAQGFHSEIEDFLLELTRMESQLSASKPTGGLPETAREQLDTHMELYSQLKAKEETYNQLLDKGRLMLLSRDDSGSGSKTEQSVALLEQKWHVVSSKMEERKSKLEEALNLATEFQNSLQEFINWLTLAEQSLNIASPPSLILNTVLSQIEEHKVFANEVNAHRDQIIELDQTGNQLKFLSQKQDVVLIKNLLVSVQSRWEKVVQRSIERGRSLDDARKRAKQFHEAWKKLIDWLEDAESHLDSELEISNDPDKIKLQLSKHKEFQKTLGGKQPVYDTTIRTGRALKEKTLLPEDSQKLDNFLGEVRDKWDTVCGKSVERQHKLEEALLFSGQFMDALQALVDWLYKVEPQLAEDQPVHGDLDLVMNLMDAHKVFQKELGKRTGTVQVLKRSGRELIENSRDDTTWVKGQLQELSTRWDTVCKLSVSKQSRLEQALKQAEVFRDTVHMLLEWLSEAEQTLRFRGALPDDTEALQSLIDTHKEFMKKVEEKRVDVNSAVAMGEVILAVCHPDCITTIKHWITIIRARFEEVLTWAKQHQQRLETALSELVANAELLEELLAWIQWAETTLIQRDQEPIPQNIDRVKALIAEHQTFMEEMTRKQPDVDRVTKTYKRKNIEPTHAPFIEKSRSGGRKSLSQPTPPPMPILSQSEAKNPRINQLSARWQQVWLLALERQRKLNDALDRLEELKEFANFDFDVWRKKYMRWMNHKKSRVMDFFRRIDKDQDGKITRQEFIDGILASKFPTTKLEMTAVADIFDRDGDGYIDYYEFVAALHPNKDAYRPTTDADKIEDEVTRQVAQCKCAKRFQVEQIGENKYRFGDSQQLRLVRILRSTVMVRVGGGWMALDEFLVKNDPCRARGRTNIELREKFILPEGASQGMTPFRSRGRRSKPSSRAASPTRSSSSASQSNHSCTSMPSSPATPASGTKVIPSSGSKLKRPTPTFHSSRTSLAGDTSNSSSPASTGAKTNRADPKKSASRPGSRAGSRAGSRASSRRGSDASDFDLLETQSACSDTSESSAAGGQGNSRRGLNKPSKIPTMSKKTTTASPRTPGPKR

SEQ ID NO: 51449 - protein, 4434 aa, Homo sapiens
  Payload ID: 10253
  Gene Symbol: MACF1
  Gene Name: microtubule-actin crosslinking factor 1
  ENSP ID: ENSP00000362016
  MOD_RES (1)..(1): Any amino acid
XKNTISVKAVCDYRQIEITICKNDECVLEDNSQRTKWKVISPTGNEAMVPSVCFLIPPPNKDAIEMASRVEQSYQKVMALWHQLHVNTKSLISWNYLRKDLDLVQTWNLEKLRSSAPGECHQIMKNLQAHYEDFLQDSRDSVLFSVADRLRLEEEVEACKARFQHLMKSMENEDKEETVAKMYISELKNIRLRLEEYEQRVVKRIQSLASSRTDRDAWQDNALRIAEQEHTQEDLQQLRSDLDAVSMKCDSFLHQSPSSSSVPTLRSELNLLVEKMDHVYGLSTVYLNKLKTVDVIVRSIQDAELLVKGYEIKLSQEEVVLADLSALEAHWSTLRHWLSDVKDKNSVFSVLDEEIAKAKVVAEQMSRLTPERNLDLERYQEKGSQLQERWHRVIAQLEIRQSELESIQEVLGDYRACHGTLIKWIEETTAQQEMMKPGQAEDSRVLSEQLSQQTALFAEIERNQTKLDQCQKFSQQYSTIVKDYELQLMTYKAFVESQQKSPGKRRRMLSSSDAITQEFMDLRTRYTALVTLTTQHVKYISDALRRLEEEEKVVEEEKQEHVEKVKELLGWVSTLARNTQGKATSSETKESTDIEKAILEQQVLSEELTTKKEQVSEAIKTSQIFLAKHGHKLSEKEKKQISEQLNALNKAYHDLCDGSANQLQQLQSQLAHQTEQKTLQKQQNTCHQQLEDLCSWVGQAERALAGHQGRTTQQDLSALQKNQSDLKDLQDDIQNRATSFATVVKDIEGFMEENQTKLSPRELTALREKLHQAKEQYEALQEETRVAQKELEEAVTSALQQETEKSKAAKELAENKKKIDALLDWVTSVGSSGGQLLTNLPGMEQLSGASLEKGALDTTDGYMGVNQAPEKLDKQCEMMKARHQELLSQQQNFILATQSAQAFLDQHGHNLTPEEQQMLQQKLGELKEQYSTSLAQSEAELKQVQTLQDELQKFLQDHKEFESWLERSEKELENMHKGGSSPETLPSLLKRQGSFSEDVISHKGDLRFVTISGQKVLDMENSFKEGKEPSEIGNLVKDKLKDATERYTALHSKCTRLGSHLNMLLGQYHQFQNSADSLQAWMQACEANVEKLLSDTVASDPGVLQEQLATTKQLQEELAEHQVPVEKLQKVARDIMEIEGEPAPDHRHVQETTDSILSHFQSLSYSLAERSSLLQKAIAQSQSVQESLESLLQSIGEVEQNLEGKQVSSLSSGVIQEALATNMKLKQDIARQKSSLEATREMVTRFMETADSTTAAVLQGKLAEVSQRFEQLCLQQQEKESSLKKLLPQAEMFEHLSGKLQQFMENKSRMLASGNQPDQDITHFFQQIQELNLEMEDQQENLDTLEHLVTELSSCGFALDLCQHQDRVQNLRKDFTELQKTVKEREKDASSCQEQLDEFRKLVRTFQKWLKETEGSIPPTETSMSAKELEKQIEHLKSLLDDWASKGTLVEEINCKGTSLENLIMEITAPDSQGKTDLTEIQCDMSDVNLKYEKLGGVLHERQESLQAILNRMEEVHKEANSVLQWLESKEEVLKSMDAMSSPTKTETVKAQAESNKAFLAELEQNSPKIQKVKEALAGLLVTYPNSQEAENWKKIQEELNSRWERATEVTVARQRQLEESASHLACFQAAESQLRPWLMEKELMMGVLGPLSIDPNMLNAQKQQVQFMLKEFEARRQQHEQLNEAAQGILTGPGDVSLSTSQVQKELQSINQKWVELTDKLNSRSSQIDQAIVKSTQYQELLQDLSEKVRAVGQRLSVQSAISTQPEAVKQQLEETSEIRSDLEQLDHEVKEAQTLCDELSVLIGEQYLKDELKKRLETVALPLQGLEDLAADRINRLQAALASTQQFQQMFDELRTWLDDKQSQQAKNCPISAKLERLQSQLQENEEFQKSLNQHSGSYEVIVAEGESLLLSVPPGEEKRTLQNQLVELKNHWEELSKKTADRQSRLKDCMQKAQKYQWHVEDLVPWIEDCKAKMSELRVTLDPVQLESSLLRSKAMLNEVEKRRSLLEILNSAADILINSSEADEDGIRDEKAGINQNMDAVTEELQAKTGSLEEMTQRLREFQESFKNIEKKVEGAKHQLEIFDALGSQACSNKNLEKLRAQQEVLQALEPQVDYLRNFTQGLVEDAPDGSDASQLLHQAEVAQQEFLEVKQRVNSGCVMMENKLEGIGQFHCRVREMFSQLADLDDELDGMGAIGRDTDSLQSQIEDVRLFLNKIHVLKLDIEASEAECRHMLEEEGTLDLLGLKRELEALNKQCGKLTERGKARQEQLELTLGRVEDFYRKLKGLNDATTAAEEAEALQWVVGTEVEIINQQLADFKMFQKEQVDPLQMKLQQVNGLGQGLIQSAGKDCDVQGLEHDMEEINARWNTLNKKVAQRIAQLQEALLHCGKFQDALEPLLSWLADTEELIANQKPPSAEYKVVKAQIQEQKLLQRLLDDRKATVDMLQAEGGRIAQSAELADREKITGQLESLESRWTELLSKAAARQKQLEDILVLAKQFHETAEPISDFLSVTEKKLANSEPVGTQTAKIQQQIIRHKALNEEIVNRKKNVDQAIKNGQALLKQTTGEEVLLIQEKLDGIKTRYADITVTSSKALRTLEQARQLATKFQSTYEELTGWLREVEEELATSGGQSPTGEQIPQFQQRQKELKKEVMEHRLVLDTVNEVSRALLELVPWRAREGLDKLVSDANEQYKLVSDTIGQRVDEIDAAIQRSQQYEQAADAELAWVAETKRKLMALGPIRLEQDQTTAQLQVQKAFSIDIIRHKDSMDELFSHRSEIFGTCGEEQKTVLQEKTESLIQQYEAISLLNSERYARLERAQVLVNQFWETYEELSPWIEETRALIAQLPSPAIDHEQLRQQQEEMRQLRESIAEHKPHIDKLLKIGPQLKELNPEEGEMVEEKYQKAENMYAQIKEEVRQRALALDEAVSQSTQITEFHDKIEPMLETLENLSSRLRMPPLIPAEVDKIRECISDNKSATVELEKLQPSFEALKRRGEELIGRSQGADKDLAAKEIQDKLDQMVFFWEDIKARAEEREIKFLDVLELAEKFWYDMAALLTTIKDTQDIVHDLESPGIDPSIIKQQVEAAETIKEETDGLHEELEFIRILGADLIFACGETEKPEVRKSIDEMNNAWENLNKTWKERLEKLEDAMQAAVQYQDTLQAMFDWLDNTVIKLCTMPPVGTDLNTVKDQLNEMKEFKVEVYQQQIEMEKLNHQGELMLKKATDETDRDIIREPLTELKHLWENLGEKIAHRQHKLEGALLALGQFQHALEELMSWLTHTEELLDAQRPISGDPKVIEVELAKHHVLKNDVLAHQATVETVNKAGNELLESSAGDDASSLRSRLEAMNQCWESVLQKTEEREQQLQSTLQQAQGFHSEIEDFLLELTRMESQLSASKPTGGLPETAREQLDTHMELYSQLKAKEETYNQLLDKGRLMLLSRDDSGSGSKTEQSVALLEQKWHVVSSKMEERKSKLEEALNLATEFQNSLQEFINWLTLAEQSLNIASPPSLILNTVLSQIEEHKVFANEVNAHRDQIIELDQTGNQLKFLSQKQDVVLIKNLLVSVQSRWEKVVQRSIERGRSLDDARKRAKQFHEAWKKLIDWLEDAESHLDSELEISNDPDKIKLQLSKHKEFQKTLGGKQPVYDTTIRTGRALKEKTLLPEDSQKLDNFLGEVRDKWDTVCGKSVERQHKLEEALLFSGQFMDALQALVDWLYKVEPQLAEDQPVHGDLDLVMNLMDAHKVFQKELGKRTGTVQVLKRSGRELIENSRDDTTWVKGQLQELSTRWDTVCKLSVSKQSRLEQALKQAEVFRDTVHMLLEWLSEAEQTLRFRGALPDDTEALQSLIDTHKEFMKKVEEKRVDVNSAVAMGEVILAVCHPDCITTIKHWITIIRARFEEVLTWAKQHQQRLETALSELVANAELLEELLAWIQWAETTLIQRDQEPIPQNIDRVKALIAEHQTFMEEMTRKQPDVDRVTKTYKRKNIEPTHAPFIEKSRSGGRKSLSQPTPPPMPILSQSEAKNPRINQLSARWQQVWLLALERQRKLNDALDRLEELKEFANFDFDVWRKKYMRWMNHKKSRVMDFFRRIDKDQDGKITRQEFIDGILASKFPTTKLEMTAVADIFDRDGDGYIDYYEFVAALHPNKDAYRPTTDADKIEDEVTRQVAQCKCAKRFQVEQIGENKYRFGDSQQLRLVRILRSTVMVRVGGGWMALDEFLVKNDPCRARGRTNIELREKFILPEGASQGMTPFRSRGRRSKPSSRAASPTRSSSSASQSNHSCTSMPSSPATPASGTKVIPSSGSKLKRPTPTFHSSRTSLAGDTSNSSSPASTGAKTNRADPKKSASRPGSRAGSRAGSRASSRRGSDASDFDLLETQSACSDTSESSAAGGQGNSRRGLNKPSKIPTMSKKTTTASPRTPGPKR

SEQ ID NO: 51450 - protein, 455 aa, Homo sapiens
  Payload ID: 10253
  Gene Symbol: MACF1
  Gene Name: microtubule-actin crosslinking factor 1
  ENSP ID: ENSP00000391512
  MOD_RES (1)..(1): Any amino acid
XILSQSEAKNPRINQLSARWQQVWLLALERQRKLNDALDRLEELKEFANFDFDVWRKKYMRWMNHKKSRVMDFFRRIDKDQDGKITRQEFIDGILASKFPTTKLEMTAVADIFDRDGDGYIDYYEFVAALHPNKDAYRPTTDADKIEDEVTRQVAQCKCAKRFQVEQIGENKYRFFLGNQFGDSQQLRLVRILRSTVMVRVGGGWMALDEFLVKNDPCRARGRTNIELREKFILPEGASQGMTPFRSRGRRSKPSSRAASPTRSSSSASQSNHSCTSMPSSPATPASGTKTSLQFSRCYDKPWLVNSKAGTPIRDSHSPDLQLPTPEVIPSSGSKLKRPTPTFHSSRTSLAGDTSNSSSPASTGAKTNRADPKKSASRPGSRAGSRAGSRASSRRGSDASDFDLLETQSACSDTSESSAAGGQGNSRRGLNKPSKIPTMSKKTTTASPRTPGPKR

SEQ ID NO: 51451 - protein, 368 aa, Homo sapiens
  Payload ID: 10253
  Gene Symbol: MACF1
  Gene Name: microtubule-actin crosslinking factor 1
  ENSP ID: ENSP00000407776
  MOD_RES (1)..(1): Any amino acid
XGKITRQEFIDGILASKFPTTKLEMTAVADIFDRDGDGYIDYYEFVAALHPNKDAYRPTTDADKIEDEVTRQVAQCKCAKRFQVEQIGENKYRFGDSQQLRLVRILRSTVMVRVGGGWMALDEFLVKNDPCRARGRTNIELREKFILPEGASQGMTPFRSRGRRSKPSSRAASPTRSSSSASQSNHSCTSMPSSPATPASGTKTSLQFSRCYDKPWLVNSKAGTPIRDSHSPDLQLPTPEVIPSSGSKLKRPTPTFHSSRTSLAGDTSNSSSPASTGAKTNRADPKKSASRPGSRAGSRAGSRASSRRGSDASDFDLLETQSACSDTSESSAAGGQGNSRRGLNKPSKIPTMSKKTTTASPRTPGPKR

SEQ ID NO: 51452 - protein, 159 aa, Homo sapiens
  Payload ID: 10253
  Gene Symbol: MACF1
  Gene Name: microtubule-actin crosslinking factor 1
  ENSP ID: ENSP00000412910
DKIEDEVTRQVAQCKCAKRFQVEQIGENKYRFGDSQQLRLVRILRSTVMVRVGGGWMALDEFLVKNDPCRVHHPGSKIKRSDSSSSISSQSPIARGRTNIELREKFILPEGASQGMTPFRSRGRRSKPSSRAASPTRSSSSASQSNHSCTSMPSSPATP

SEQ ID NO: 51453 - protein, 1427 aa, Homo sapiens
  Payload ID: 10253
  Gene Symbol: MACF1
  Gene Name: microtubule-actin crosslinking factor 1
  ENSP ID: ENSP00000431179
MGKPLSRPDCLRRNPSCLGKGEEEDGYIEDCYVPQRSIYDTMRINEQIDQGSKLNQTSKSTMEKMEGSTISSNGTLGAASNVFESRAPEGKKLDERIIFDALKLSSDVQKSAPVPPRRRPNAERKDNVNRRSWKSFMPPNFPEFAERIEASLSEVSEAGASNPSLQEKKESSSALTESSGHLDHREPQSESVTLEHVSKSIGIPEVQDFKNLSGDCQDFRFQQHSANPPHEFQPVESEAVATSGNTDVMQESRFSSATWPRATKSLAKGGFSEKQHPLGDTACTVEMPPLSPCLSEELLDPELHVLITPSLREKTESELKFEEDERWIMMEAEGEWEEEKLSDREKTFLMADEKNSLADIFEEREQANTAVVEDGSDCLAAVLRTFGHLSLGQICCPDDPQPAKDQLATVPKDIPLDCDCVLTGEDILGEVANRTAQGLEGLVSDSACTVGTIDAEQLSDTDSVQMFLELEKECLCEEGVTPLVELQNQISSEGLAASQDAENLLVISHFSGAALEKEQHLGLLHVRAKDYDTRLDCGYFNTLDSSQVPNAVELIAHVDIMRDTSTVSKEECEKVPFSPRTAEFKSRQPADLDSLEKLDPGGLLNSDHRVSHEEKLSGFIASELAKDNGSLSQGDCSQTEGNGEECIERVTFSFAFNHELTDVTSGPEVEVLYESNLLTDEIHLESGNVTVNQENNSLTSMGNVVTCELSVEKVCDEDGEAKELDYQATLLEDQAPAHFHRNFPEQVFQDLQRKSPESEILSLHLLVEELRLNPDGVETVNDTKPELNVASSEGGEMERRDSDSFLNIFPEKQVTKAGNTEPVLEEWIPVLQRPSRTAAVPTVKDALDAALPSPEEGTSIAAVPAPEGTAVVAALVPFPHEDILVASIVSLEEEDVTAAAVSAPERATVPAVTVSVPEGTAAVAAVSSPEETAPAVAAAITQEGMSAVAGFSPEWAALAITVPITEEDGTPEGPVTPATTVHAPEEPDTAAVRVSTPEEPASPAAAVPTPEEPTSPAAAVPTPEEPTSPAAAVPPPEEPTSPAAAVPTPEEPTSPAAAVPTPEEPTSPAAAVPTPEEPTSPAAAVPTPEEPTSPAAAVPTPEEPTSPAAAVPTPEEPASPAAAVPTPEEPASPAAAVPTPEEPAFPAPAVPTPEESASAAVAVPTPEESASPAAAVPTPAESASFAAVVATLEEPTSPAASVPTPAAMVATLEEFTSPAASVPTSEEPASLAAAVSNPEEPTSPAAAVPTLEEPTSSAAAVLTPEELSSPAASVPTPEEPASPAAAVSNLEEPASPAAAVPTPEVAAIPAASVPTPEVPAIPAAAVPPMEEVSPIGVPFLGVSAHTDSVPISEEGTPVLEEASSTGMWIKEDLDSLVFGIKEVTSTVLHGKVPLAATAGLNSDEVIVHFDSGKGLKSKVRFAGLTWW

SEQ ID NO: 51454 - protein, 362 aa, Homo sapiens
  Payload ID: 10253
  Gene Symbol: MACF1
  Gene Name: microtubule-actin crosslinking factor 1
  ENSP ID: ENSP00000433104
  MOD_RES (1)..(1): Any amino acid
XIPAASVPTPEVPAIPAAAVPPMEEVSPIGVPFLGVSAHTDSVPISEEGTPVLEEASSTGMWIKEDLDSLVFGIKEVTSTVLHGKVPLAATAGLNSDEMFQKEQVDPLQMKLQQVNGLGQGLIQSAGKDCDVQGLEHDMEEINARWNTLNKKVAQRIAQLQEALLHCGKFQDALEPLLSWLADTEELIANQKPPSAEYKVVKAQIQEQKLLQRLLDDRKATVDMLQAEGGRIAQSAELADREKITGQLESLESRWTELLSKAAARQKQLEDILVLAKQFHETAEPISDFLSVTEKKLANSEPVGTQTAKIQQQIIRHKALEEDIENHATDVHQAVKIGQSLSSLTSPAEQGVLSEKIDSLQA

SEQ ID NO: 51455 - protein, 121 aa, Homo sapiens
  Payload ID: 10253
  Gene Symbol: MACF1
  Gene Name: microtubule-actin crosslinking factor 1
  ENSP ID: ENSP00000434859
MSSSDEETLSERSCRSERSCRSERSYRSERSGSLSPCPPGDTLPWNLPLHEQKKRKSQDSVLDPAERAVVRVADALPSTSFCFPHCSLLRNAAAVSPIRSKRKSKTKRRKPQSFCDCVVWL

SEQ ID NO: 51456 - protein, 1375 aa, Homo sapiens
  Payload ID: 10253
  Gene Symbol: MACF1
  Gene Name: microtubule-actin crosslinking factor 1
  ENSP ID: ENSP00000435070
MAGYVPGQQPANRSQEKEFVQAYEDVLERYKDERDRVQKKTFTKWVNKHLMKVRKHINDLYEDLRDGHNLISLLEVLSGIKLPREKGRMRFHRLQNVQIALDFLKQRQVKLVNIRNDDITDGNPKLTLGLIWTIILHFQISDIYISGESGDMSAKEKLLLWTQKVTAGYTGIKCTNFSSCWSDGKMFNALIHRYRPDLVDMERVQIQSNRENLEQAFEVAERLGVTRLLDAEDVDVPSPDEKSVITYVSSIYDAFPKVPEGGEGISATEVDSRWQEYQSRVDSLIPWIKQHTILMSDKTFPQNPVELKALYNQYIHFKETEILAKEREKGRIEELYKLLEVWIEFGRIKLPQGYHPNDVEEEWGKLIIEMLEREKSLRPAVERLELLLQIANKIQNGALNCEEKLTLAKNTLQADAAHLESGQPVQCESDVIMYIQECEGLIRQLQVDLQILRDENYYQLEELAFRVMRLQDELVTLRLECTNLYRKGHFTSLELVPPSTLTTTHLKAEPLTKATHSSSTSWFRKPMTRAELVAISSSEDEGNLRFVYELLSWVEEMQMKLERAEWGNDLPSVELQLETQQHIHTSVEELGSSVKEARLYEGKMSQNFHTSYAETLGKLETQYCKLKETSSFRMRHLQSLHKFVSRATAELIWLNEKEEEELAYDWSDNNSNISAKRNYFSELTMELEEKQDVFRSLQDTAELLSLENHPAKQTVEAYSAAVQSQLQWMKQLCLCVEQHVKENTAYFQFFSDARELESFLRNLQDSIKRKYSCDHNTSLSRLEDLLQDSMDEKEQLIQSKSSVASLVGRSKTIVQLKPRSPDHVLKNTISVKAVCDYRQIEITICKNDECVLEDNSQRTKWKVISPTGNEAMVPSVCFLIPPPNKDAIEMASRVEQSYQKVMALWHQLHVNTKSLISWNYLRKDLDLVQTWNLEKLRSSAPGECHQIMKNLQAHYEDFLQDSRDSVLFSVADRLRLEEEVEACKARFQHLMKSMENEDKEETVAKMYISELKNIRLRLEEYEQRVVKRIQSLASSRTDRDAWQDNALRIAEQEHTQEDLQQLRSDLDAVSMKCDSFLHQSPSSSSVPTLRSELNLLVEKMDHVYGLSTVYLNKLKTVDVIVRSIQDAELLVKGYEIKLSQEEVVLADLSALEAHWSTLRHWLSDVKDKNSVFSVLDEEIAKAKVVAEQMSRLTPERNLDLERYQEKGSQLQERWHRVIAQLEIRQSELESIQEVLGDYRACHGTLIKWIEETTAQQEMMKPGQAEDSRVLSEQLSQQTALFAEIERNQTKLDQCQKFSQQYSTIVKDYELQLMTYKAFVESQQKSPGKRRRMLSSSDAITQEFMDLRTRYTALVTLTTQHVKYISDALRRLEEEE

SEQ ID NO: 51457 - protein, 1062 aa, Homo sapiens
  Payload ID: 10253
  Gene Symbol: MACF1
  Gene Name: microtubule-actin crosslinking factor 1
  ENSP ID: ENSP00000435078
MGNSLGCFKEPKESIAIPEKAPISPKKRVRFKRRWRGKKIPTPEASHQEETSEGTGVIEETETLTKLTESLQKEDGVGGVEHTPPDILLPGDSAPNSRVVDRGMIVQVKERFQGEVQTAHLLLENESSVAGGVWDSLEEGMTVIAHLLDNPAERNCEKSVSQLVEFPRTASCSSRAVLLPLQGETAVEKGNIQRGFRSCALPRTDYPTDKGNQEQFSEGWSVEEGTKSVSGAPQTASWIIECSVSSLLLDQPGGQRRTEPSHVGQVPPQDSRLPTSQSDLSISGVTVSILPSSSGYGSDGPHIHGIQPKDTEPEKSSTSFSEEDGTLSLEASHTPSWGLEEISDIYISGESGDMSAKEKLLLWTQKVTAGYTGIKCTNFSSCWSDGKMFNALIHRYRPDLVDMERVQIQSNRENLEQAFEVAERLGVTRLLDAEDVDVPSPDEKSVITYVSSIYDAFPKVPEGGEGISATEVDSRWQEYQSRVDSLIPWIKQHTILMSDKTFPQNPVELKALYNQYIHFKETEILAKEREKGRIEELYKLLEVWIEFGRIKLPQGYHPNDVEEEWGKLIIEMLEREKSLRPAVERLELLLQIANKIQNGALNCEEKLTLAKNTLQADAAHLESGQPVQCESDVIMYIQECEGLIRQLQVDLQILRDENYYQLEELAFRVMRLQDELVTLRLECTNLYRKGHFTSLELVPPSTLTTTHLKAEPLTKATHSSSTSWFRKPMTRAELVAISSSEDEGNLRFVYELLSWVEEMQMKLERAEWGNDLPSVELQLETQQHIHTSVEELGSSVKEARLYEGKMSQNFHTSYAETLGKLETQYCKLKETSSFRMRHLQSLHKFVSRATAELIWLNEKEEEELAYDWSDNNSNISAKRNYFSELTMELEEKQDVFRSLQDTAELLSLENHPAKQTVEAYSAAVQSQLQWMKQLCLCVEQHVKENTAYFQFFSDARELESFLRNLQDSIKRKYSCDHNTSLSRLEDLLQDSMAQDEKEQLIQSKSSVASLVGRSKTIVQLKPRSPDHVLKNTISVKAVCDYRQIEGRTILSEGYGPLASAAC

SEQ ID NO: 51458 - protein, 113 aa, Homo sapiens
  Payload ID: 10253
  Gene Symbol: MACF1
  Gene Name: microtubule-actin crosslinking factor 1
  ENSP ID: ENSP00000435892
MPLLDSSYLPPTIFILTHVLGVAGVLYWKRHARGRADERDRVQKKTFTKWVNKHLMKVRKHINDLYEDLRDGHNLISLLEVLSGIKLPREKGRMRFHRLQNVQIALDFLKQRQ

SEQ ID NO: 51459 - protein, 2028 aa, Homo sapiens
  Payload ID: 10253
  Gene Symbol: MACF1
  Gene Name: microtubule-actin crosslinking factor 1
  ENSP ID: ENSP00000437059
MGNSLGCFKEPKESIAIPEKAPISPKKRVRFKRRWRGKKIPTPEASHQEETSEGTGVIEETETLTKLTESLQKEDGVGGVEHTPPDILLPGDSAPNSRVVDRGMIVQVKERFQGEVQTAHLLLENESSVAGGVWDSLEEGMTVIAHLLDNPAERNCEKSVSQLVEFPRTASCSSRAVLLPLQGETAVEKGNIQRGFRSCALPRTDYPTDKGNQEQFSEGWSVEEGTKSVSGAPQTASWIIECSVSSLLLDQPGGQRRTEPSHVGQVPPQDSRLPTSQSDLSISGVTVSILPSSSGYGSDGPHIHGIQPKDTEPEKSSTSFSEEDGTLSLEISDIYISGESGDMSAKEKLLLWTQKVTAGYTGIKCTNFSSCWSDGKMFNALIHRYRPDLVDMERVQIQSNRENLEQAFEVAERLGVTRLLDAEDVDVPSPDEKSVITYVSSIYDAFPKVPEGGEGISATEVDSRWQEYQSRVDSLIPWIKQHTILMSDKTFPQNPVELKALYNQYIHFKETEILAKEREKGRIEELYKLLEVWIEFGRIKLPQGYHPNDVEEEWGKLIIEMLEREKSLRPAVERLELLLQIANKIQNGALNCEEKLTLAKNTLQADAAHLESGQPVQCESDVIMYIQECEGLIRQLQVDLQILRDENYYQLEELAFRVMRLQDELVTLRLECTNLYRKGHFTSLELVPPSTLTTTHLKAEPLTKATHSSSTSWFRKPMTRAELVAISSSEDEGNLRFVYELLSWVEEMQMKLERAEWGNDLPSVELQLETQQHIHTSVEELGSSVKEARLYEGKMSQNFHTSYAETLGKLETQYCKLKETSSFRMRHLQSLHKFVSRATAELIWLNEKEEEELAYDWSDNNSNISAKRNYFSELTMELEEKQDVFRSLQDTAELLSLENHPAKQTVEAYSAAVQSQLQWMKQLCLCVEQHVKENTAYFQFFSDARELESFLRNLQDSIKRKYSCDHNTSLSRLEDLLQDSMDEKEQLIQSKSSVASLVGRSKTIVQLKPRSPDHVLKNTISVKAVCDYRQIEITICKNDECVLEDNSQRTKWKVISPTGNEAMVPSVCFLIPPPNKDAIEMASRVEQSYQKVMALWHQLHVNTKSLISWNYLRKDLDLVQTWNLEKLRSSAPGECHQIMKNLQAHYEDFLQDSRDSVLFSVADRLRLEEEVEACKARFQHLMKSMENEDKEETVAKMYISELKNIRLRLEEYEQRVVKRIQSLASSRTDRDAWQDNALRIAEQEHTQEDLQQLRSDLDAVSMKCDSFLHQSPSSSSVPTLRSELNLLVEKMDHVYGLSTVYLNKLKTVDVIVRSIQDAELLVKGYEIKLSQEEVVLADLSALEAHWSTLRHWLSDVKDKNSVFSVLDEEIAKAKVVAEQMSRLTPERNLDLERYQEKGSQLQERWHRVIAQLEIRQSELESIQEVLGDYRACHGTLIKWIEETTAQQEMMKPGQAEDSRVLSEQLSQQTALFAEIERNQTKLDQCQKFSQQYSTIVKDYELQLMTYKAFVESQQKSPGKRRRMLSSSDAITQEFMDLRTRYTALVTLTTQHVKYISDALRRLEEEEKVVEEEKQEHVEKVKELLGWVSTLARNTQGKATSSETKESTDIEKAILEQQVLSEELTTKKEQVSEAIKTSQIFLAKHGHKLSEKEKKQISEQLNALNKAYHDLCDGSANQLQQLQSQLAHQTEQKTLQKQQNTCHQQLEDLCSWVGQAERALAGHQGRTTQQDLSALQKNQSDLKDLQDDIQNRATSFATVVKDIEGFMEENQTKLSPRELTALREKLHQAKEQYEALQEETRVAQKELEEAVTSALQQETEKSKAAKELAENKKKIDALLDWVTSVGSSGGQLLTNLPGMEQLSGASLEKGALDTTDGYMGVNQAPEKLDKQCEMMKARHQELLSQQQNFILATQSAQAFLDQHGHNLTPEEQQMLQQKLGELKEQYSTSLAQSEAELKQVQTLQDELQKFLQDHKEFESWLERSEKELENMHKGGSSPETLPSLLKRQGSFSEDVISHKGDLRFVTISG

SEQ ID NO: 51460 - protein, 7555 aa, Homo sapiens
  Payload ID: 10253
  Gene Symbol: MACF1
  Gene Name: microtubule-actin crosslinking factor 1
  ENSP ID: ENSP00000455274
MPLLDSSYLPPTIFILTHVLGVAGVLYWKRHARGRADERDRVQKKTFTKWVNKHLMKVRKHINDLYEDLRDGHNLISLLEVLSGIKLEPAGLKTLRLVSMPSWCHTNNEEQAEEDDDDVPREKGRMRFHRLQNVQIALDFLKQRQVKLVNIRNDDITDGNPKLTLGLIWTIILHFQISDIYISGESGDMSAKEKLLLWTQKVTAGYTGIKCTNFSSCWSDGKMFNALIHRYRPDLVDMERVQIQSNRENLEQAFEVAERLGVTRLLDAEDVDVPSPDEKSVITYVSSIYDAFPKVPEGGEGISATEVDSRWQEYQSRVDSLIPWIKQHTILMSDKTFPQNPVELKALYNQYIHFKETEILAKEREKGRIEELYKLLEVWIEFGRIKLPQGYHPNDVEEEWGKLIIEMLEREKSLRPAVERLELLLQIANKIQNGALNCEEKLTLAKNTLQADAAHLESGQPVQCESDVIMYIQECEGLIRQLQVDLQILRDENYYQLEELAFRVMRLQDELVTLRLECTNLYRKGHFTSLELVPPSTLTTTHLKAEPLTKATHSSSTSWFRKPMTRAELVAISSSEDEGNLRFVYELLSWVEEMQMKLERAEWGNDLPSVELQLETQQHIHTSVEELGSSVKEARLYEGKMSQNFHTSYAETLGKLETQYCKLKETSSFRMRHLQSLHKFVSRATAELIWLNEKEEEELAYDWSDNNSNISAKRNYFSELTMELEEKQDVFRSLQDTAELLSLENHPAKQTVEAYSAAVQSQLQWMKQLCLCVEQHVKENTAYFQFFSDARELESFLRNLQDSIKRKYSCDHNTSLSRLEDLLQDSMDEKEQLIQSKSSVASLVGRSKTIVQLKPRSPDHVLKNTISVKAVCDYRQIEITICKNDECVLEDNSQRTKWKVISPTGNEAMVPSVCFLIPPPNKDAIEMASRVEQSYQKVMALWHQLHVNTKSLISWNYLRKDLDLVQTWNLEKLRSSAPGECHQIMKNLQAHYEDFLQDSRDSVLFSVADRLRLEEEVEACKARFQHLMKSMENEDKEETVAKMYISELKNIRLRLEEYEQRVVKRIQSLASSRTDRDAWQDNALRIAEQEHTQEDLQQLRSDLDAVSMKCDSFLHQSPSSSSVPTLRSELNLLVEKMDHVYGLSTVYLNKLKTVDVIVRSIQDAELLVKGYEIKLSQEEVVLADLSALEAHWSTLRHWLSDVKDKNSVFSVLDEEIAKAKVVAEQMSRLTPERNLDLERYQEKGSQLQERWHRVIAQLEIRQSELESIQEVLGDYRACHGTLIKWIEETTAQQEMMKPGQAEDSRVLSEQLSQQTALFAEIERNQTKLDQCQKFSQQYSTIVKDYELQLMTYKAFVESQQKSPGKRRRMLSSSDAITQEFMDLRTRYTALVTLTTQHVKYISDALRRLEEEEKVVEEEKQEHVEKVKELLGWVSTLARNTQGKATSSETKESTDIEKAILEQQVLSEELTTKKEQVSEAIKTSQIFLAKHGHKLSEKEKKQISEQLNALNKAYHDLCDGSANQLQQLQSQLAHQTEQKECRAVAGVIDLGTVEIFPIFKAMQKGLLDQDTGLVLLESQVIMSGLIAPETGENLSLEEGIARNLINPQMYQQLRELQDALALISRLTESRGPLSVVEAIEKRIISETVGLKILEAHLATGGFSLSPSENCINLEEAFHQGLISAWLHSVLESYLRTSKNLIDPNTAEKIGLLDLMQRCIVHQESGFKLLPVKQLAGGMVSLKSGRKVSIFRAVQEGLIDRQVTVRLLEAQLFAGGIVDPRTGHRLTVEEAVRHNLIDQDMACAILIRQLQTGGIIDTVTGQRLTIDEAVSNDLVAAKIALVILESLWSFMGLLWPESGEILPITDALEQGIVSTELAHKILSNRQHIKALFLPATTEILSWKKAIESGILDRDLANNLKSICIPDVMPHMQLADSAEQNINPGAAVLPCSKSHPKATASQSENLLFQLMTHSYINVQNGQRLLLLDKELMETLTSRDEYQTSPPKVVEIGHQRQKTPEGLQESANVKISGTFSSGWTVRLPEFQFSSQNKEYPDREDCTTEKGKKTTVETEDSSVENPEQDLFVEQKERNPNIDALKVINKVKLEVQRQLIGTQREDQTAVSVRENASRGHLLTIPPAEAEGVPLVVDKDVFSVETPKKEHQPLRNTSFTCQNEQAHTLETEYIHDETGGSHIKPQSKKLQVQVKKTLGIKLELKSETDGNVHPLDKKEMLKKTFLAKDDHKESQEAQNIAGGSMMMSEKTDEEDSGREIFLSCSHPLELLEEATLNVLSAQLLDGGIFHEQTGQKLLLNEAISRGIVPSHTAVKLMEKLNMFQGFFDSQTCESLTTEEVINEGLMDEKLLHNVLMADKAISGVLDPRTQTLCSVKDAVTVGLLDKETATRILERQVVTGGIIDLKRGKKVSVTLASTLGLVDVADQPELINLEKASKGRDAEKTVRERLISLQMETTGLIDPDSKAPLTVVQSIDRGLLEREEAVRLLTKQVVDGGIIHHISGMRLSVDNAFRHGLIGEDLAEKLKRVENLNIHQIFNPETKENISLPKAIKLDLITSDLKREIQEVQAFTGNFVDLISGQRLTLAEAKKEGLLTNEAVLSPGMMHGIVDPENCRIVPYSELVKKCKIDIESGQRYLEVIPFSDIKDGVSDKVLTLSQAIQLGKVDFASTLKVLEAQANTGGIIDTATGKRLTLASALEEKLVDENMVRIIASHQVLNGGIVDIFSDQRVTLVEAIEKRLISPELANMIQIDSSEFSDHRAQIEKQEGIEVCALQNEFLGKDMLIACNQTAEMSCNKVEESERLFQVENQSAQEKVKVRVSDGEQAKKSREISLKEFGCKDQRKPRMSSDAKEFISIINPHNLKGKSLGQVSLTHPYSECDFKLKEVARNNMGNDTNEEQEKAVTKIEIISHMKQSTSCLDSEEIRENQGEVILEVQETYCETSGKLPSEQVLQQPMNARVKSKREKREVIVEESIRTCKPAFLSEEKLYQETAIRDEHDSHIKSQPREMTSSEKGKEADTEMGFSITFKIEESSSQVVPQGISVKHLDALTLFSSKQANEGKVNNLSLCLTLKPEENLSREIACGAQSEPFPCMTPRPEGLHYQESDGKAQVTGPSQISKTDKSFQGTTRQETNYQDSWVTSKTKETKHQISSSNECKEKSYQEVSFDPARGLKLEEITVSRPDSKEVRYLEFSDRKDLHHQGSKSDDKLCGTLKSEIATQELTGEKFLEMANPNVAGLEAGSIEDIVTQRGSRVLGSFLPEKLFKGVSQKENTGQQNAIISPTVLETSEEKTVSLTVCSAVKTEKTPQEKLRESPGSEQTPFMTAPEGKGNGGVNPEPFRATQNVFTRQLCLEHDEKLVSYLSLLRNIEMRTKQIQPLELNLAELQDLLCQAKVLERELKDLTTLVSQELECVNQIIISQPQEVPAQLLKALEKDAKNLQKSLSSVSDTWNSRLLHFQNAVEIEKTKVLNQHTQLEGRLQDLRAWVGNKNLILNSKGSNSEIDVDSLNLCLQQYEDLKQPMAERKAQLDALAFDIQFFISEHAQDLSPQQNRQMLRLLNELQRSFQDILEQTAAQVDALQGHLQQMEQEALVKTLQKQQNTCHQQLEDLCSWVGQAERALAGHQGRTTQQDLSALQKNQSDLKDLQDDIQNRATSFATVVKDIEGFMEENQTKLSPRELTALREKLHQAKEQYEALQEETRVAQKELEEAVTSALQQETEKSKAAKELAENKKKIDALLDWVTSVGSSGGQLLTNLPGMEQLSGASLEKGALDTTDGYMGVNQAPEKLDKQCEMMKARHQELLSQQQNFILATQSAQAFLDQHGHNLTPEEQQMLQQKLGELKEQYSTSLAQSEAELKQVQTLQDELQKFLQDHKEFESWLERSEKELENMHKGGSSPETLPSLLKRQGSFSEDVISHKGDLRFVTISGQKVLDMENSFKEGKEPSEIGNLVKDKLKDATERYTALHSKCTRLGSHLNMLLGQYHQFQNSADSLQAWMQACEANVEKLLSDTVASDPGVLQEQLATTKQLQEELAEHQVPVEKLQKVARDIMEIEGEPAPDHRHVQETTDSILSHFQSLSYSLAERSSLLQKAIAQSQSVQESLESLLQSIGEVEQNLEGKQVSSLSSGVIQEALATNMKLKQDIARQKSSLEATREMVTRFMETADSTTAAVLQGKLAEVSQRFEQLCLQQQEKESSLKKLLPQAEMFEHLSGKLQQFMENKSRMLASGNQPDQDITHFFQQIQELNLEMEDQQENLDTLEHLVTELSSCGFALDLCQHQDRVQNLRKDFTELQKTVKEREKDASSCQEQLDEFRKLVRTFQKWLKETEGSIPPTETSMSAKELEKQIEHLKSLLDDWASKGTLVEEINCKGTSLENLIMEITAPDSQGKTGSILPSVGSSVGSVNGYHTCKDLTEIQCDMSDVNLKYEKLGGVLHERQESLQAILNRMEEVHKEANSVLQWLESKEEVLKSMDAMSSPTKTETVKAQAESNKAFLAELEQNSPKIQKVKEALAGLLVTYPNSQEAENWKKIQEELNSRWERATEVTVARQRQLEESASHLACFQAAESQLRPWLMEKELMMGVLGPLSIDPNMLNAQKQQVQFMLKEFEARRQQHEQLNEAAQGILTGPGDVSLSTSQVQKELQSINQKWVELTDKLNSRSSQIDQAIVKSTQYQELLQDLSEKVRAVGQRLSVQSAISTQPEAVKQQLEETSEIRSDLEQLDHEVKEAQTLCDELSVLIGEQYLKDELKKRLETVALPLQGLEDLAADRINRLQAALASTQQFQQMFDELRTWLDDKQSQQAKNCPISAKLERLQSQLQENEEFQKSLNQHSGSYEVIVAEGESLLLSVPPGEEKRTLQNQLVELKNHWEELSKKTADRQSRLKDCMQKAQKYQWHVEDLVPWIEDCKAKMSELRVTLDPVQLESSLLRSKAMLNEVEKRRSLLEILNSAADILINSSEADEDGIRDEKAGINQNMDAVTEELQAKTGSLEEMTQRLREFQESFKNIEKKVEGAKHQLEIFDALGSQACSNKNLEKLRAQQEVLQALEPQVDYLRNFTQGLVEDAPDGSDASQLLHQAEVAQQEFLEVKQRVNSGCVMMENKLEGIGQFHCRVREMFSQLADLDDELDGMGAIGRDTDSLQSQIEDVRLFLNKIHVLKLDIEASEAECRHMLEEEGTLDLLGLKRELEALNKQCGKLTERGKARQEQLELTLGRVEDFYRKLKGLNDATTAAEEAEALQWVVGTEVEIINQQLADFKMFQKEQVDPLQMKLQQVNGLGQGLIQSAGKDCDVQGLEHDMEEINARWNTLNKKVAQRIAQLQEALLHCGKFQDALEPLLSWLADTEELIANQKPPSAEYKVVKAQIQEQKLLQRLLDDRKATVDMLQAEGGRIAQSAELADREKITGQLESLESRWTELLSKAAARQKQLEDILVLAKQFHETAEPISDFLSVTEKKLANSEPVGTQTAKIQQQIIRHKALEEDIENHATDVHQAVKIGQSLSSLTSPAEQGVLSEKIDSLQARYSEIQDRCCRKAALLDQALSNARLFGEDEVEVLNWLAEVEDKLSSVFVKDFKQDVLHRQHADHLALNEEIVNRKKNVDQAIKNGQALLKQTTGEEVLLIQEKLDGIKTRYADITVTSSKALRTLEQARQLATKFQSTYEELTGWLREVEEELATSGGQSPTGEQIPQFQQRQKELKKEVMEHRLVLDTVNEVSRALLELVPWRAREGLDKLVSDANEQYKLVSDTIGQRVDEIDAAIQRSQQYEQAADAELAWVAETKRKLMALGPIRLEQDQTTAQLQVQKAFSIDIIRHKDSMDELFSHRSEIFGTCGEEQKTVLQEKTESLIQQYEAISLLNSERYARLERAQVLVNQFWETYEELSPWIEETRALIAQLPSPAIDHEQLRQQQEEMRQLRESIAEHKPHIDKLLKIGPQLKELNPEEGEMVEEKYQKAENMYAQIKEEVRQRALALDEAVSQSTQFHDKIEPMLETLENLSSRLRMPPLIPAEVDKIRECISDNKSATVELEKLQPSFEALKRRGEELIGRSQGADKDLAAKEIQDKLDQMVFFWEDIKARAEEREIKFLDVLELAEKFWYDMAALLTTIKDTQDIVHDLESPGIDPSIIKQQVEAAETIKEETDGLHEELEFIRILGADLIFACGETEKPEVRKSIDEMNNAWENLNKTWKERLEKLEDAMQAAVQYQDTLQAMFDWLDNTVIKLCTMPPVGTDLNTVKDQLNEMKEFKVEVYQQQIEMEKLNHQGELMLKKATDETDRDIIREPLTELKHLWENLGEKIAHRQHKLEGALLALGQFQHALEELMSWLTHTEELLDAQRPISGDPKVIEVELAKHHVLKNDVLAHQATVETVNKAGNELLESSAGDDASSLRSRLEAMNQCWESVLQKTEEREQQLQSTLQQAQGFHSEIEDFLLELTRMESQLSASKPTGGLPETAREQLDTHMELYSQLKAKEETYNQLLDKGRLMLLSRDDSGSGSKTEQSVALLEQKWHVVSSKMEERKSKLEEALNLATEFQNSLQEFINWLTLAEQSLNIASPPSLILNTVLSQIEEHKVFANEVNAHRDQIIELDQTGNQLKFLSQKQDVVLIKNLLVSVQSRWEKVVQRSIERGRSLDDARKRAKQFHEAWKKLIDWLEDAESHLDSELEISNDPDKIKLQLSKHKEFQKTLGGKQPVYDTTIRTGRALKEKTLLPEDSQKLDNFLGEVRDKWDTVCGKSVERQHKLEEALLFSGQFMDALQALVDWLYKVEPQLAEDQPVHGDLDLVMNLMDAHKVFQKELGKRTGTVQVLKRSGRELIENSRDDTTWVKGQLQELSTRWDTVCKLSVSKQSRLEQALKQAEVFRDTVHMLLEWLSEAEQTLRFRGALPDDTEALQSLIDTHKEFMKKVEEKRVDVNSAVAMGEVILAVCHPDCITTIKHWITIIRARFEEVLTWAKQHQQRLETALSELVANAELLEELLAWIQWAETTLIQRDQEPIPQNIDRVKALIAEHQTFMEEMTRKQPDVDRVTKTYKRKNIEPTHAPFIEKSRSGGRKSLSQPTPPPMPILSQSEAKNPRINQLSARWQQVWLLALERQRKLNDALDRLEELKEFANFDFDVWRKKYMRWMNHKKSRVMDFFRRIDKDQDGKITRQEFIDGILASKFPTTKLEMTAVADIFDRDGDGYIDYYEFVAALHPNKDAYRPTTDADKIEDEVTRQVAQCKCAKRFQVEQIGENKYRFFLGNQFGDSQQLRLVRILRSTVMVRVGGGWMALDEFLVKNDPCRVHHPGSKIKRSDSSSSISSQSPIARGRTNIELREKFILPEGASQGMTPFRSRGRRSKPSSRAASPTRSSSSASQSNHSCTSMPSSPATPASGTKTSLQFSRCYDKPWLVNSKAGTPIRDSHSPDLQLPTPEVIPSSGSKLKRPTPTFHSSRTSLAGDTSNSSSPASTGAKTNRADPKKSASRPGSRAGSRAGSRASSRRGSDASDFDLLETQSACSDTSESSAAGGQGNSRRGLNKPSKIPTMSKKTTTASPRTPGPKR

SEQ ID NO: 51461 - protein, 7592 aa, Homo sapiens
  Payload ID: 10253
  Gene Symbol: MACF1
  Gene Name: microtubule-actin crosslinking factor 1
  ENSP ID: ENSP00000455823
MSSSDEETLSERSCRSERSCRSERSYRSERSGSLSPCPPGDTLPWNLPLHEQKKRKSQDSVLDPAERAVVRVADERDRVQKKTFTKWVNKHLMKVRKHINDLYEDLRDGHNLISLLEVLSGIKLEPAGLKTLRLVSMPSWCHTNNEEQAEEDDDDVPREKGRMRFHRLQNVQIALDFLKQRQVKLVNIRNDDITDGNPKLTLGLIWTIILHFQISDIYISGESGDMSAKEKLLLWTQKVTAGYTGIKCTNFSSCWSDGKMFNALIHRYRPDLVDMERVQIQSNRENLEQAFEVAERLGVTRLLDAEDVDVPSPDEKSVITYVSSIYDAFPKVPEGGEGISATEVDSRWQEYQSRVDSLIPWIKQHTILMSDKTFPQNPVELKALYNQYIHFKETEILAKEREKGRIEELYKLLEVWIEFGRIKLPQGYHPNDVEEEWGKLIIEMLEREKSLRPAVERLELLLQIANKIQNGALNCEEKLTLAKNTLQADAAHLESGQPVQCESDVIMYIQECEGLIRQLQVDLQILRDENYYQLEELAFRVMRLQDELVTLRLECTNLYRKGHFTSLELVPPSTLTTTHLKAEPLTKATHSSSTSWFRKPMTRAELVAISSSEDEGNLRFVYELLSWVEEMQMKLERAEWGNDLPSVELQLETQQHIHTSVEELGSSVKEARLYEGKMSQNFHTSYAETLGKLETQYCKLKETSSFRMRHLQSLHKFVSRATAELIWLNEKEEEELAYDWSDNNSNISAKRNYFSELTMELEEKQDVFRSLQDTAELLSLENHPAKQTVEAYSAAVQSQLQWMKQLCLCVEQHVKENTAYFQFFSDARELESFLRNLQDSIKRKYSCDHNTSLSRLEDLLQDSMDEKEQLIQSKSSVASLVGRSKTIVQLKPRSPDHVLKNTISVKAVCDYRQIEITICKNDECVLEDNSQRTKWKVISPTGNEAMVPSVCFLIPPPNKDAIEMASRVEQSYQKVMALWHQLHVNTKSLISWNYLRKDLDLVQTWNLEKLRSSAPGECHQIMKNLQAHYEDFLQDSRDSVLFSVADRLRLEEEVEACKARFQHLMKSMENEDKEETVAKMYISELKNIRLRLEEYEQRVVKRIQSLASSRTDRDAWQDNALRIAEQEHTQEDLQQLRSDLDAVSMKCDSFLHQSPSSSSVPTLRSELNLLVEKMDHVYGLSTVYLNKLKTVDVIVRSIQDAELLVKGYEIKLSQEEVVLADLSALEAHWSTLRHWLSDVKDKNSVFSVLDEEIAKAKVVAEQMSRLTPERNLDLERYQEKGSQLQERWHRVIAQLEIRQSELESIQEVLGDYRACHGTLIKWIEETTAQQEMMKPGQAEDSRVLSEQLSQQTALFAEIERNQTKLDQCQKFSQQYSTIVKDYELQLMTYKAFVESQQKSPGKRRRMLSSSDAITQEFMDLRTRYTALVTLTTQHVKYISDALRRLEEEEKVVEEEKQEHVEKVKELLGWVSTLARNTQGKATSSETKESTDIEKAILEQQVLSEELTTKKEQVSEAIKTSQIFLAKHGHKLSEKEKKQISEQLNALNKAYHDLCDGSANQLQQLQSQLAHQTEQKECRAVAGVIDLGTVEIFPIFKAMQKGLLDQDTGLVLLESQVIMSGLIAPETGENLSLEEGIARNLINPQMYQQLRELQDALALISRLTESRGPLSVVEAIEKRIISETVGLKILEAHLATGGFSLSPSENCINLEEAFHQGLISAWLHSVLESYLRTSKNLIDPNTAEKIGLLDLMQRCIVHQESGFKLLPVKQLAGGMVSLKSGRKVSIFRAVQEGLIDRQVTVRLLEAQLFAGGIVDPRTGHRLTVEEAVRHNLIDQDMACAILIRQLQTGGIIDTVTGQRLTIDEAVSNDLVAAKIALVILESLWSFMGLLWPESGEILPITDALEQGIVSTELAHKILSNRQHIKALFLPATTEILSWKKAIESGILDRDLANNLKSICIPDVMPHMQLADSAEQNINPGAAVLPCSKSHPKATASQSENLLFQLMTHSYINVQNGQRLLLLDKELMETLTSRDEYQTSPPKVVEIGHQRQKTPEGLQESANVKISGTFSSGWTVRLPEFQFSSQNKEYPDREDCTTEKGKKTTVETEDSSVENPEQDLFVEQKERNPNIDALKVINKVKLEVQRQLIGTQREDQTAVSVRENASRGHLLTIPPAEAEGVPLVVDKDVFSVETPKKEHQPLRNTSFTCQNEQAHTLETEYIHDETGGSHIKPQSKKLQVQVKKTLGIKLELKSETDGNVHPLDKKEMLKKTFLAKDDHKESQEAQNIAGGSMMMSEKTDEEDSGREIFLSCSHPLELLEEATLNVLSAQLLDGGIFHEQTGQKLLLNEAISRGIVPSHTAVKLMEKLNMFQGFFDSQTCESLTTEEVINEGLMDEKLLHNVLMADKAISGVLDPRTQTLCSVKDAVTVGLLDKETATRILERQVVTGGIIDLKRGKKVSVTLASTLGLVDVADQPELINLEKASKGRDAEKTVRERLISLQMETTGLIDPDSKAPLTVVQSIDRGLLEREEAVRLLTKQVVDGGIIHHISGMRLSVDNAFRHGLIGEDLAEKLKRVENLNIHQIFNPETKENISLPKAIKLDLITSDLKREIQEVQAFTGNFVDLISGQRLTLAEAKKEGLLTNEAVLSPGMMHGIVDPENCRIVPYSELVKKCKIDIESGQRYLEVIPFSDIKDGVSDKVLTLSQAIQLGKVDFASTLKVLEAQANTGGIIDTATGKRLTLASALEEKLVDENMVRIIASHQVLNGGIVDIFSDQRVTLVEAIEKRLISPELANMIQIDSSEFSDHRAQIEKQEGIEVCALQNEFLGKDMLIACNQTAEMSCNKVEESERLFQVENQSAQEKVKVRVSDGEQAKKSREISLKEFGCKDQRKPRMSSDAKEFISIINPHNLKGKSLGQVSLTHPYSECDFKLKEVARNNMGNDTNEEQEKAVTKIEIISHMKQSTSCLDSEEIRENQGEVILEVQETYCETSGKLPSEQVLQQPMNARVKSKREKREVIVEESIRTCKPAFLSEEKLYQETAIRDEHDSHIKSQPREMTSSEKGKEADTEMGFSITFKIEESSSQVVPQGISVKHLDALTLFSSKQANEGKVNNLSLCLTLKPEENLSREIACGAQSEPFPCMTPRPEGLHYQESDGKAQVTGPSQISKTDKSFQGTTRQETNYQDSWVTSKTKETKHQISSSNECKEKSYQEVSFDPARGLKLEEITVSRPDSKEVRYLEFSDRKDLHHQGSKSDDKLCGTLKSEIATQELTGEKFLEMANPNVAGLEAGSIEDIVTQRGSRVLGSFLPEKLFKGVSQKENTGQQNAIISPTVLETSEEKTVSLTVCSAVKTEKTPQEKLRESPGSEQTPFMTAPEGKGNGGVNPEPFRATQNVFTRQLCLEHDEKLVSYLSLLRNIEMRTKQIQPLELNLAELQDLLCQAKVLERELKDLTTLVSQELECVNQIIISQPQEVPAQLLKALEKDAKNLQKSLSSVSDTWNSRLLHFQNAVEIEKTKVLNQHTQLEGRLQDLRAWVGNKNLILNSKGSNSEIDVDSLNLCLQQYEDLKQPMAERKAQLDALAFDIQFFISEHAQDLSPQQNRQMLRLLNELQRSFQDILEQTAAQVDALQGHLQQMEQEALVKTLQKQQNTCHQQLEDLCSWVGQAERALAGHQGRTTQQDLSALQKNQSDLKDLQDDIQNRATSFATVVKDIEGFMEENQTKLSPRELTALREKLHQAKEQYEALQEETRVAQKELEEAVTSALQQETEKSKAAKELAENKKKIDALLDWVTSVGSSGGQLLTNLPGMEQLSGASLEKGALDTTDGYMGVNQAPEKLDKQCEMMKARHQELLSQQQNFILATQSAQAFLDQHGHNLTPEEQQMLQQKLGELKEQYSTSLAQSEAELKQVQTLQDELQKFLQDHKEFESWLERSEKELENMHKGGSSPETLPSLLKRQGSFSEDVISHKGDLRFVTISGQKVLDMENSFKEGKEPSEIGNLVKDKLKDATERYTALHSKCTRLGSHLNMLLGQYHQFQNSADSLQAWMQACEANVEKLLSDTVASDPGVLQEQLATTKQLQEELAEHQVPVEKLQKVARDIMEIEGEPAPDHRHVQETTDSILSHFQSLSYSLAERSSLLQKAIAQSQSVQESLESLLQSIGEVEQNLEGKQVSSLSSGVIQEALATNMKLKQDIARQKSSLEATREMVTRFMETADSTTAAVLQGKLAEVSQRFEQLCLQQQEKESSLKKLLPQAEMFEHLSGKLQQFMENKSRMLASGNQPDQDITHFFQQIQELNLEMEDQQENLDTLEHLVTELSSCGFALDLCQHQDRVQNLRKDFTELQKTVKEREKDASSCQEQLDEFRKLVRTFQKWLKETEGSIPPTETSMSAKELEKQIEHLKSLLDDWASKGTLVEEINCKGTSLENLIMEITAPDSQGKTGSILPSVGSSVGSVNGYHTCKDLTEIQCDMSDVNLKYEKLGGVLHERQESLQAILNRMEEVHKEANSVLQWLESKEEVLKSMDAMSSPTKTETVKAQAESNKAFLAELEQNSPKIQKVKEALAGLLVTYPNSQEAENWKKIQEELNSRWERATEVTVARQRQLEESASHLACFQAAESQLRPWLMEKELMMGVLGPLSIDPNMLNAQKQQVQFMLKEFEARRQQHEQLNEAAQGILTGPGDVSLSTSQVQKELQSINQKWVELTDKLNSRSSQIDQAIVKSTQYQELLQDLSEKVRAVGQRLSVQSAISTQPEAVKQQLEETSEIRSDLEQLDHEVKEAQTLCDELSVLIGEQYLKDELKKRLETVALPLQGLEDLAADRINRLQAALASTQQFQQMFDELRTWLDDKQSQQAKNCPISAKLERLQSQLQENEEFQKSLNQHSGSYEVIVAEGESLLLSVPPGEEKRTLQNQLVELKNHWEELSKKTADRQSRLKDCMQKAQKYQWHVEDLVPWIEDCKAKMSELRVTLDPVQLESSLLRSKAMLNEVEKRRSLLEILNSAADILINSSEADEDGIRDEKAGINQNMDAVTEELQAKTGSLEEMTQRLREFQESFKNIEKKVEGAKHQLEIFDALGSQACSNKNLEKLRAQQEVLQALEPQVDYLRNFTQGLVEDAPDGSDASQLLHQAEVAQQEFLEVKQRVNSGCVMMENKLEGIGQFHCRVREMFSQLADLDDELDGMGAIGRDTDSLQSQIEDVRLFLNKIHVLKLDIEASEAECRHMLEEEGTLDLLGLKRELEALNKQCGKLTERGKARQEQLELTLGRVEDFYRKLKGLNDATTAAEEAEALQWVVGTEVEIINQQLADFKMFQKEQVDPLQMKLQQVNGLGQGLIQSAGKDCDVQGLEHDMEEINARWNTLNKKVAQRIAQLQEALLHCGKFQDALEPLLSWLADTEELIANQKPPSAEYKVVKAQIQEQKLLQRLLDDRKATVDMLQAEGGRIAQSAELADREKITGQLESLESRWTELLSKAAARQKQLEDILVLAKQFHETAEPISDFLSVTEKKLANSEPVGTQTAKIQQQIIRHKALEEDIENHATDVHQAVKIGQSLSSLTSPAEQGVLSEKIDSLQARYSEIQDRCCRKAALLDQALSNARLFGEDEVEVLNWLAEVEDKLSSVFVKDFKQDVLHRQHADHLALNEEIVNRKKNVDQAIKNGQALLKQTTGEEVLLIQEKLDGIKTRYADITVTSSKALRTLEQARQLATKFQSTYEELTGWLREVEEELATSGGQSPTGEQIPQFQQRQKELKKEVMEHRLVLDTVNEVSRALLELVPWRAREGLDKLVSDANEQYKLVSDTIGQRVDEIDAAIQRSQQYEQAADAELAWVAETKRKLMALGPIRLEQDQTTAQLQVQKAFSIDIIRHKDSMDELFSHRSEIFGTCGEEQKTVLQEKTESLIQQYEAISLLNSERYARLERAQVLVNQFWETYEELSPWIEETRALIAQLPSPAIDHEQLRQQQEEMRQLRESIAEHKPHIDKLLKIGPQLKELNPEEGEMVEEKYQKAENMYAQIKEEVRQRALALDEAVSQSTQFHDKIEPMLETLENLSSRLRMPPLIPAEVDKIRECISDNKSATVELEKLQPSFEALKRRGEELIGRSQGADKDLAAKEIQDKLDQMVFFWEDIKARAEEREIKFLDVLELAEKFWYDMAALLTTIKDTQDIVHDLESPGIDPSIIKQQVEAAETIKEETDGLHEELEFIRILGADLIFACGETEKPEVRKSIDEMNNAWENLNKTWKERLEKLEDAMQAAVQYQDTLQAMFDWLDNTVIKLCTMPPVGTDLNTVKDQLNEMKEFKVEVYQQQIEMEKLNHQGELMLKKATDETDRDIIREPLTELKHLWENLGEKIAHRQHKLEGALLALGQFQHALEELMSWLTHTEELLDAQRPISGDPKVIEVELAKHHVLKNDVLAHQATVETVNKAGNELLESSAGDDASSLRSRLEAMNQCWESVLQKTEEREQQLQSTLQQAQGFHSEIEDFLLELTRMESQLSASKPTGGLPETAREQLDTHMELYSQLKAKEETYNQLLDKGRLMLLSRDDSGSGSKTEQSVALLEQKWHVVSSKMEERKSKLEEALNLATEFQNSLQEFINWLTLAEQSLNIASPPSLILNTVLSQIEEHKVFANEVNAHRDQIIELDQTGNQLKFLSQKQDVVLIKNLLVSVQSRWEKVVQRSIERGRSLDDARKRAKQFHEAWKKLIDWLEDAESHLDSELEISNDPDKIKLQLSKHKEFQKTLGGKQPVYDTTIRTGRALKEKTLLPEDSQKLDNFLGEVRDKWDTVCGKSVERQHKLEEALLFSGQFMDALQALVDWLYKVEPQLAEDQPVHGDLDLVMNLMDAHKVFQKELGKRTGTVQVLKRSGRELIENSRDDTTWVKGQLQELSTRWDTVCKLSVSKQSRLEQALKQAEVFRDTVHMLLEWLSEAEQTLRFRGALPDDTEALQSLIDTHKEFMKKVEEKRVDVNSAVAMGEVILAVCHPDCITTIKHWITIIRARFEEVLTWAKQHQQRLETALSELVANAELLEELLAWIQWAETTLIQRDQEPIPQNIDRVKALIAEHQTFMEEMTRKQPDVDRVTKTYKRKNIEPTHAPFIEKSRSGGRKSLSQPTPPPMPILSQSEAKNPRINQLSARWQQVWLLALERQRKLNDALDRLEELKEFANFDFDVWRKKYMRWMNHKKSRVMDFFRRIDKDQDGKITRQEFIDGILASKFPTTKLEMTAVADIFDRDGDGYIDYYEFVAALHPNKDAYRPTTDADKIEDEVTRQVAQCKCAKRFQVEQIGENKYRFFLGNQFGDSQQLRLVRILRSTVMVRVGGGWMALDEFLVKNDPCRVHHPGSKIKRSDSSSSISSQSPIARGRTNIELREKFILPEGASQGMTPFRSRGRRSKPSSRAASPTRSSSSASQSNHSCTSMPSSPATPASGTKTSLQFSRCYDKPWLVNSKAGTPIRDSHSPDLQLPTPEVIPSSGSKLKRPTPTFHSSRTSLAGDTSNSSSPASTGAKTNRADPKKSASRPGSRAGSRAGSRASSRRGSDASDFDLLETQSACSDTSESSAAGGQGNSRRGLNKPSKIPTMSKKTTTASPRTPGPKR

SEQ ID NO: 51462 - protein, 121 aa, Homo sapiens; identical to SEQ ID NO: 51455
  Payload ID: 10253
  Gene Symbol: MACF1
  Gene Name: microtubule-actin crosslinking factor 1
  ENSP ID: ENSP00000473615

SEQ ID NO: 51463 - protein, 121 aa, Homo sapiens
  Payload ID: 10254
  Gene Symbol: MAP1LC3A
  Gene Name: microtubule-associated protein 1 light chain 3 alpha
  Uniprot ID: Q9H492
  ENSP ID: ENSP00000353886
MPSDRPFKQRRSFADRCKEVQQIRDQHPSKIPVIIERYKGEKQLPVLDKTKFLVPDHVNMSELVKIIRRRLQLNPTQAFFLLVNQHSMVSVSTPIADIYEQEKDEDGFLYMVYASQETFGF

SEQ ID NO: 51464 - protein, 125 aa, Homo sapiens
  Payload ID: 10254
  Gene Symbol: MAP1LC3A
  Gene Name: microtubule-associated protein 1 light chain 3 alpha
  Uniprot ID: Q9H492
  ENSP ID: ENSP00000363970
MKMRFFSSPCGKAAVDPADRCKEVQQIRDQHPSKIPVIIERYKGEKQLPVLDKTKFLVPDHVNMSELVKIIRRRLQLNPTQAFFLLVNQHSMVSVSTPIADIYEQEKDEDGFLYMVYASQETFGF

SEQ ID NO: 51465 - protein, 121 aa, Homo sapiens; identical to SEQ ID NO: 51463
  Payload ID: 10254
  Gene Symbol: MAP1LC3A
  Gene Name: microtubule-associated protein 1 light chain 3 alpha
  Uniprot ID: Q9H492
  ENSP ID: ENSP00000380821

SEQ ID NO: 51466 - protein, 125 aa, Homo sapiens
  Payload ID: 10255
  Gene Symbol: MAP1LC3B
  Gene Name: microtubule-associated protein 1 light chain 3 beta
  Uniprot ID: Q9GZQ8
  ENSP ID: ENSP00000268607
MPSEKTFKQRRTFEQRVEDVRLIREQHPTKIPVIIERYKGEKQLPVLDKTKFLVPDHVNMSELIKIIRRRLQLNANQAFFLLVNGHSMVSVSTPISEVYESEKDEDGFLYMVYASQETFGMKLSV

SEQ ID NO: 51467 - protein, 68 aa, Homo sapiens
  Payload ID: 10255
  Gene Symbol: MAP1LC3B
  Gene Name: microtubule-associated protein 1 light chain 3 beta
  ENSP ID: ENSP00000454293
MPSEKTFKQRRTFGECRREGGGCGGAGVRAVEGGRAWDAVRGRGRAGRPSGAGGCRPAGPRDAGPGAP

SEQ ID NO: 51468 - protein, 47 aa, Homo sapiens
  Payload ID: 10255
  Gene Symbol: MAP1LC3B
  Gene Name: microtubule-associated protein 1 light chain 3 beta
  ENSP ID: ENSP00000457141
MPSEKTFKQRRTFEQRVEDVRLIREQHPTKIPGGRITVYRKDVRSVQ

SEQ ID NO: 51469 - protein, 75 aa, Homo sapiens
  Payload ID: 10255
  Gene Symbol: MAP1LC3B
  Gene Name: microtubule-associated protein 1 light chain 3 beta
  ENSP ID: ENSP00000457225
MPSEKTFKQRRTFEQRVEDVRLIREQHPTKIPVIIERYKGEKQLPVLDKTKFLVPDHVNMSELIKIIRYSVTFVS

SEQ ID NO: 51470 - protein, 125 aa, Homo sapiens
  Payload ID: 10256
  Gene Symbol: MAP1LC3B2
  Gene Name: microtubule-associated protein 1 light chain 3 beta 2
  Uniprot ID: A6NCE7
  ENSP ID: ENSP00000450524
MPSEKTFKQRRTFEQRVEDVRLIREQHPTKIPVIIERYKGEKQLPVLDKTKFLVPDHVNMSELIKIIRRRLQLNANQAFFLLVNGHSMVSVSTPISEVYESEKDEDGFLYMVCASQETFGMKLSV

SEQ ID NO: 51471 - protein, 147 aa, Homo sapiens
  Payload ID: 10257
  Gene Symbol: MAP1LC3C
  Gene Name: microtubule-associated protein 1 light chain 3 gamma
  Uniprot ID: Q9BXW4
  ENSP ID: ENSP00000349785
MPPPQKIPSVRPFKQRKSLAIRQEEVAGIRAKFPNKIPVVVERYPRETFLPPLDKTKFLVPQELTMTQFLSIIRSRMVLRATEAFYLLVNNKSLVSMSATMAEIYRDYKDEDGFVYMTYASQETFGCLESAAPRDGSSLEDRPCNPL

SEQ ID NO: 51472 - protein, 1047 aa, Homo sapiens
  Payload ID: 10258
  Gene Symbol: MAP10
  Gene Name: microtubule-associated protein 10
  Uniprot ID: Q9P2G4
  ENSP ID: ENSP00000403208
MAHCGQLTNWLCLAWERKESPDFLSIFLRYIDLTPKLHKICSDKTITQKTHCLLPLISSALSSIVLIQGWWQKTAHKYAYKGAKHIEQQNPQSRHRPRPAGALPQISRDSRQRCLLLRFLVRPRGFSFSFAEPAAAFPGATAMAASLSERLFSLELLVDWVRLEARLLPSPAAAVEQEEEEEEKEQGEASSPRGLCPAVAFRLLDFPTLLVYPPDGPGAPAAEPWPGVIRFGRGKSCLFRLQPATLHCRLLRTPLATLLLQLPPGRPTPTPQLLGACDISLATAAHRVVGPAASGCSHRHRGRFPLHNRVGERTGDIALAYRLTDLGSRLLSQLERPLTFTRTGGGAEVSPQTQQERQQLQQPASQPSPKEADKPLGELEIPEAQKDLKEMVKSKAECDNVGSVENGKTNSVVTCSGAGNGRNVSSLNEEVTELDMETNIFCPPPLYYTNLTQEKPPPAQAKITIEPQMNAPEEMDDASPEKKRVNPPAHRSCLKHPSSAAHEHPPMLVNPPHIQNIGATNQTCQTEQNRINTIRQLPLLNALLVELSLLYDQPVTSPAHIHPHLAWLYRTEDKKSPESSAKSTCRSEAKKDKRSVGGCEKSVSLQYKKNQIENYKEDKYSEKSSGALHKRVPKGRLLYGLTNTLRLRLKLTNPDMLVVHEKRELYRKRQSQMLGTKFRIPSSKVKLLSSAEQSQKPQLPEDKYLDSDASFTENSDTSRQISGVFDEPSTSKETKLKYATEKKTVDCSKNRINNVSLEEVVSPANSIIPERLTPTNILGGNVEMKIQSPCVFQQDAVVDRIVDKEIDIRQVKTTDNDILMADISDKRTGKNSCYENISELKYSDDLSSPCYSEDFCTSEDTSRSFKAHDSSSRTENPKHSQYTSKSSDTGVSKKKNSSDRSSILSPPFSAGSPVHSYRKFHISKTQDKSLEEASSISASDLSSTHWTEQKENQIDQNSMHNSEITKRAQDISVKTRSSWKSLEKSQSPQTSQVSSYLPSNVSELNVLDSSTSDHFEEGNDDVGSLNISKQCKDICELVINKLPGYTM

SEQ ID NO: 51473 - protein, 2803 aa, Homo sapiens
  Payload ID: 10259
  Gene Symbol: MAP1A
  Gene Name: microtubule-associated protein 1A
  Uniprot ID: P78559
  ENSP ID: ENSP00000300231
MDGVAEFSEYVSETVDVPSPFDLLEPPTSGGFLKLSKPCCYIFPGGRGDSALFAVNGFNILVDGGSDRKSCFWKLVRHLDRIDSVLLTHIGADNLPGINGLLQRKVAELEEEQSQGSSSYSDWVKNLISPELGVVFFNVPEKLRLPDASRKAKRSIEEACLTLQHLNRLGIQAEPLYRVVSNTIEPLTLFHKMGVGRLDMYVLNPVKDSKEMQFLMQKWAGNSKAKTGIVLPNGKEAEISVPYLTSITALVVWLPANPTEKIVRVLFPGNAPQNKILEGLEKLRHLDFLRYPVATQKDLASGAVPTNLKPSKIKQRADSKESLKATTKTAVSKLAKREEVVEEGAKEARSELAKELAKTEKKAKESSEKPPEKPAKPERVKTESSEALKAEKRKLIKDKVGKKHLKEKISKLEEKKDKEKKEIKKERKELKKDEGRKEEKKDAKKEEKRKDTKPELKKISKPDLKPFTPEVRKTLYKAKVPGRVKIDRSRAIRGEKELSSEPQTPPAQKGTVPLPTISGHRELVLSSPEDLTQDFEEMKREERALLAEQRDTGLGDKPFPLDTAEEGPPSTAIQGTPPSVPGLGQEEHVMKEKELVPEVPEEQGSKDRGLDSGAETEEEKDTWEEKKQREAERLPDRTEAREESEPEVKEDVIEKAELEEMEEVHPSDEEEEDATKAEGFYQKHMQEPLKVTPRSREAFGGRELGLQGKAPEKETSLFLSSLTTPAGATEHVSYIQDETIPGYSETEQTISDEEIHDEPEERPAPPRFHTSTYDLPGPEGAGPFEASQPADSAVPATSGKVYGTPETELTYPTNIVAAPLAEEEHVSSATSITECDKLSSFATSVAEDQSVASLTAPQTEETGKSSLLLDTVTSIPSSRTEATQGLDYVPSAGTISPTSSLEEDKGFKSPPCEDFSVTGESEKRGEIIGKGLSGERAVEEEEEETANVEMSEKLCSQYGTPVFSAPGHALHPGEPALGEAEERCLSPDDSTVKMASPPPSGPPSATHTPFHQSPVEEKSEPQDFQEADSWGDTKRTPGVGKEDAAEETVKPGPEEGTLEKEEKVPPPRSPQAQEAPVNIDEGLTGCTIQLLPAQDKAIVFEIMEAGEPTGPILGAEALPGGLRTLPQEPGKPQKDEVLRYPDRSLSPEDAESLSVLSVPSPDTANQEPTPKSPCGLTEQYLHKDRWPEVSPEDTQSLSLSEESPSKETSLDVSSKQLSPESLGTLQFGELNLGKEEMGHLMQAEDTSHHTAPMSVPEPHAATASPPTDGTTRYSAQTDITDDSLDRKSPASSFSHSTPSGNGKYLPGAITSPDEHILTPDSSFSKSPESLPGPALEDIAIKWEDKVPGLKDRTSEQKKEPEPKDEVLQQKDKTLEHKEVVEPKDTAIYQKDEALHVKNEAVKQQDKALEQKGRDLEQKDTALEQKDKALEPKDKDLEEKDKALEQKDKIPEEKDKALEQKDTALEQKDKALEPKDKDLEQKDRVLEQKEKIPEEKDKALDQKVRSVEHKAPEDTVAEMKDRDLEQTDKAPEQKHQAQEQKDKVSEKKDQALEQKYWALGQKDEALEQNIQALEENHQTQEQESLVQEDKTRKPKMLEEKSPEKVKAMEEKLEALLEKTKALGLEESLVQEGRAREQEEKYWRGQDVVQEWQETSPTREEPAGEQKELAPAWEDTSPEQDNRYWRGREDVALEQDTYWRELSCERKVWFPHELDGQGARPHYTEERESTFLDEGPDDEQEVPLREHATRSPWASDFKDFQESSPQKGLEVERWLAESPVGLPPEEEDKLTRSPFEIISPPASPPEMVGQRVPSAPGQESPIPDPKLMPHMKNEPTTPSWLADIPPWVPKDRPLPPAPLSPAPGPPTPAPESHTPAPFSWGTAEYDSVVAAVQEGAAELEGGPYSPLGKDYRKAEGEREEEGRAEAPDKSSHSSKVPEASKSHATTEPEQTEPEQREPTPYPDERSFQYADIYEQMMLTGLGPACPTREPPLGAAGDWPPCLSTKEAAAGRNTSAEKELSSPISPKSLQSDTPTFSYAALAGPTVPPRPEPGPSMEPSLTPPAVPPRAPILSKGPSPPLNGNILSCSPDRRSPSPKESGRSHWDDSTSDSELEKGAREQPEKEAQSPSPPHPIPMGSPTLWPETEAHVSPPLDSHLGPARPSLDFPASAFGFSSLQPAPPQLPSPAEPRSAPCGSLAFSGDRALALAPGPPTRTRHDEYLEVTKAPSLDSSLPQLPSPSSPGAPLLSNLPRPASPALSEGSSSEATTPVISSVAERFSPSLEAAEQESGELDPGMEPAAHSLWDLTPLSPAPPASLDLALAPAPSLPGDMGDGILPCHLECSEAATEKPSPFQVPSEDCAANGPTETSPNPPGPAPAKAENEEAAACPAWERGAWPEGAERSSRPDTLLSPEQPVCPAGGSGGPPSSASPEVEAGPQGCATEPRPHRGELSPSFLNPPLPPSIDDRDLSTEEVRLVGRGGRRRVGGPGTTGGPCPVTDETPPTSASDSGSSQSDSDVPPETEECPSITAEAALDSDEDGDFLPVDKAGGVSGTHHPRPGHDPPPLPQPDPRPSPPRPDVCMADPEGLSSESGRVERLREKEKVQGRVGRRAPGKAKPASPARRLDLRGKRSPTPGKGPADRASRAPPRPRSTTSQVTPAEEKDGHSPMSKGLVNGLKAGPMALSSKGSSGAPVYVDLAYIPNHCSGKTADLDFFRRVRASYYVVSGNDPANGEPSRAVLDALLEGKAQWGENLQVTLIPTHDTEVTREWYQQTHEQQQQLNVLVLASSSTVVMQDESFPACKIEF

SEQ ID NO: 51474 - protein, 3041 aa, Homo sapiens
  Payload ID: 10259
  Gene Symbol: MAP1A
  Gene Name: microtubule-associated protein 1A
  ENSP ID: ENSP00000371462
METEAEPARPHGVAMETTPGLGLRSPGAPLAQNPAELLCEAGAAVAAARWDLQKHSLLIVIGDIGTESQLRAVRAHLEQGILSWNIDLSSFDLNQQLRLFITRHLAHFSSEVKGQRTLCHQSEILETIILVNPSADSISSEVHHLLSSSSAYKLLILSGQSLEPGGDLILQSGTYSYENFAQVLHNPEISQLLSNRDPGIQAFLTVSCLGEGDWSHLGLSSSQETLHLRLNPEPTLPTMDGVAEFSEYVSETVDVPSPFDLLEPPTSGGFLKLSKPCCYIFPGGRGDSALFAVNGFNILVDGGSDRKSCFWKLVRHLDRIDSVLLTHIGADNLPGINGLLQRKVAELEEEQSQGSSSYSDWVKNLISPELGVVFFNVPEKLRLPDASRKAKRSIEEACLTLQHLNRLGIQAEPLYRVVSNTIEPLTLFHKMGVGRLDMYVLNPVKDSKEMQFLMQKWAGNSKAKTGIVLPNGKEAEISVPYLTSITALVVWLPANPTEKIVRVLFPGNAPQNKILEGLEKLRHLDFLRYPVATQKDLASGAVPTNLKPSKIKQRADSKESLKATTKTAVSKLAKREEVVEEGAKEARSELAKELAKTEKKAKESSEKPPEKPAKPERVKTESSEALKAEKRKLIKDKVGKKHLKEKISKLEEKKDKEKKEIKKERKELKKDEGRKEEKKDAKKEEKRKDTKPELKKISKPDLKPFTPEVRKTLYKAKVPGRVKIDRSRAIRGEKELSSEPQTPPAQKGTVPLPTISGHRELVLSSPEDLTQDFEEMKREERALLAEQRDTGLGDKPFPLDTAEEGPPSTAIQGTPPSVPGLGQEEHVMKEKELVPEVPEEQGSKDRGLDSGAETEEEKDTWEEKKQREAERLPDRTEAREESEPEVKEDVIEKAELEEMEEVHPSDEEEEDATKAEGFYQKHMQEPLKVTPRSREAFGGRELGLQGKAPEKETSLFLSSLTTPAGATEHVSYIQDETIPGYSETEQTISDEEIHDEPEERPAPPRFHTSTYDLPGPEGAGPFEASQPADSAVPATSGKVYGTPETELTYPTNIVAAPLAEEEHVSSATSITECDKLSSFATSVAEDQSVASLTAPQTEETGKSSLLLDTVTSIPSSRTEATQGLDYVPSAGTISPTSSLEEDKGFKSPPCEDFSVTGESEKRGEIIGKGLSGERAVEEEEEETANVEMSEKLCSQYGTPVFSAPGHALHPGEPALGEAEERCLSPDDSTVKMASPPPSGPPSATHTPFHQSPVEEKSEPQDFQEADSWGDTKRTPGVGKEDAAEETVKPGPEEGTLEKEEKVPPPRSPQAQEAPVNIDEGLTGCTIQLLPAQDKAIVFEIMEAGEPTGPILGAEALPGGLRTLPQEPGKPQKDEVLRYPDRSLSPEDAESLSVLSVPSPDTANQEPTPKSPCGLTEQYLHKDRWPEVSPEDTQSLSLSEESPSKETSLDVSSKQLSPESLGTLQFGELNLGKEEMGHLMQAEDTSHHTAPMSVPEPHAATASPPTDGTTRYSAQTDITDDSLDRKSPASSFSHSTPSGNGKYLPGAITSPDEHILTPDSSFSKSPESLPGPALEDIAIKWEDKVPGLKDRTSEQKKEPEPKDEVLQQKDKTLEHKEVVEPKDTAIYQKDEALHVKNEAVKQQDKALEQKGRDLEQKDTALEQKDKALEPKDKDLEEKDKALEQKDKIPEEKDKALEQKDTALEQKDKALEPKDKDLEQKDRVLEQKEKIPEEKDKALDQKVRSVEHKAPEDTVAEMKDRDLEQTDKAPEQKHQAQEQKDKVSEKKDQALEQKYWALGQKDEALEQNIQALEENHQTQEQESLVQEDKTRKPKMLEEKSPEKVKAMEEKLEALLEKTKALGLEESLVQEGRAREQEEKYWRGQDVVQEWQETSPTREEPAGEQKELAPAWEDTSPEQDNRYWRGREDVALEQDTYWRELSCERKVWFPHELDGQGARPHYTEERESTFLDEGPDDEQEVPLREHATRSPWASDFKDFQESSPQKGLEVERWLAESPVGLPPEEEDKLTRSPFEIISPPASPPEMVGQRVPSAPGQESPIPDPKLMPHMKNEPTTPSWLADIPPWVPKDRPLPPAPLSPAPGPPTPAPESHTPAPFSWGTAEYDSVVAAVQEGAAELEGGPYSPLGKDYRKAEGEREEEGRAEAPDKSSHSSKVPEASKSHATTEPEQTEPEQREPTPYPDERSFQYADIYEQMMLTGLGPACPTREPPLGAAGDWPPCLSTKEAAAGRNTSAEKELSSPISPKSLQSDTPTFSYAALAGPTVPPRPEPGPSMEPSLTPPAVPPRAPILSKGPSPPLNGNILSCSPDRRSPSPKESGRSHWDDSTSDSELEKGAREQPEKEAQSPSPPHPIPMGSPTLWPETEAHVSPPLDSHLGPARPSLDFPASAFGFSSLQPAPPQLPSPAEPRSAPCGSLAFSGDRALALAPGPPTRTRHDEYLEVTKAPSLDSSLPQLPSPSSPGAPLLSNLPRPASPALSEGSSSEATTPVISSVAERFSPSLEAAEQESGELDPGMEPAAHSLWDLTPLSPAPPASLDLALAPAPSLPGDMGDGILPCHLECSEAATEKPSPFQVPSEDCAANGPTETSPNPPGPAPAKAENEEAAACPAWERGAWPEGAERSSRPDTLLSPEQPVCPAGGSGGPPSSASPEVEAGPQGCATEPRPHRGELSPSFLNPPLPPSIDDRDLSTEEVRLVGRGGRRRVGGPGTTGGPCPVTDETPPTSASDSGSSQSDSDVPPETEECPSITAEAALDSDEDGDFLPVDKAGGVSGTHHPRPGHDPPPLPQPDPRPSPPRPDVCMADPEGLSSESGRVERLREKEKVQGRVGRRAPGKAKPASPARRLDLRGKRSPTPGKGPADRASRAPPRPRSTTSQVTPAEEKDGHSPMSKGLVNGLKAGPMALSSKGSSGAPVYVDLAYIPNHCSGKTADLDFFRRVRASYYVVSGNDPANGEPSRAVLDALLEGKAQWGENLQVTLIPTHDTEVTREWYQQTHEQQQQLNVLVLASSSTVVMQDESFPACKIEF

SEQ ID NO: 51475 - protein, 2468 aa, Homo sapiens
  Payload ID: 10260
  Gene Symbol: MAP1B
  Gene Name: microtubule-associated protein 1B
  Uniprot ID: P46821
  ENSP ID: ENSP00000296755
MATVVVEATEPEPSGSIANPAASTSPSLSHRFLDSKFYLLVVVGEIVTEEHLRRAIGNIELGIRSWDTNLIECNLDQELKLFVSRHSARFSPEVPGQKILHHRSDVLETVVLINPSDEAVSTEVRLMITDAARHKLLVLTGQCFENTGELILQSGSFSFQNFIEIFTDQEIGELLSTTHPANKASLTLFCPEEGDWKNSNLDRHNLQDFINIKLNSASILPEMEGLSEFTEYLSESVEVPSPFDILEPPTSGGFLKLSKPCCYIFPGGRGDSALFAVNGFNMLINGGSERKSCFWKLIRHLDRVDSILLTHIGDDNLPGINSMLQRKIAELEEEQSQGSTTNSDWMKNLISPDLGVVFLNVPENLKNPEPNIKMKRSIEEACFTLQYLNKLSMKPEPLFRSVGNTIDPVILFQKMGVGKLEMYVLNPVKSSKEMQYFMQQWTGTNKDKAEFILPNGQEVDLPISYLTSVSSLIVWHPANPAEKIIRVLFPGNSTQYNILEGLEKLKHLDFLKQPLATQKDLTGQVPTPVVKQTKLKQRADSRESLKPAAKPLPSKSVRKESKEETPEVTKVNHVEKPPKVESKEKVMVKKDKPIKTETKPSVTEKEVPSKEEPSPVKAEVAEKQATDVKPKAAKEKTVKKETKVKPEDKKEEKEKPKKEVAKKEDKTPIKKEEKPKKEEVKKEVKKEIKKEEKKEPKKEVKKETPPKEVKKEVKKEEKKEVKKEEKEPKKEIKKLPKDAKKSSTPLSEAKKPAALKPKVPKKEESVKKDSVAAGKPKEKGKIKVIKKEGKAAEAVAAAVGTGATTAAVMAAAGIAAIGPAKELEAERSLMSSPEDLTKDFEELKAEEVDVTKDIKPQLELIEDEEKLKETEPVEAYVIQKEREVTKGPAESPDEGITTTEGEGECEQTPEELEPVEKQGVDDIEKFEDEGAGFEESSETGDYEEKAETEEAEEPEEDGEEHVCVSASKHSPTEDEESAKAEADAYIREKRESVASGDDRAEEDMDEAIEKGEAEQSEEEADEEDKAEDAREEEYEPEKMEAEDYVMAVVDKAAEAGGAEEQYGFLTTPTKQLGAQSPGREPASSIHDETLPGGSESEATASDEENREDQPEEFTATSGYTQSTIEISSEPTPMDEMSTPRDVMSDETNNEETESPSQEFVNITKYESSLYSQEYSKPADVTPLNGFSEGSKTDATDGKDYNASASTISPPSSMEEDKFSRSALRDAYCSEVKASTTLDIKDSISAVSSEKVSPSKSPSLSPSPPSPLEKTPLGERSVNFSLTPNEIKVSAEAEVAPVSPEVTQEVVEEHCASPEDKTLEVVSPSQSVTGSAGHTPYYQSPTDEKSSHLPTEVIEKPPAVPVSFEFSDAKDENERASVSPMDEPVPDSESPIEKVLSPLRSPPLIGSESAYESFLSADDKASGRGAESPFEEKSGKQGSPDQVSPVSEMTSTSLYQDKQEGKSTDFAPIKEDFGQEKKTDDVEAMSSQPALALDERKLGDVSPTQIDVSQFGSFKEDTKMSISEGTVSDKSATPVDEGVAEDTYSHMEGVASVSTASVATSSFPEPTTDDVSPSLHAEVGSPHSTEVDDSLSVSVVQTPTTFQETEMSPSKEECPRPMSISPPDFSPKTAKSRTPVQDHRSEQSSMSIEFGQESPEQSLAMDFSRQSPDHPTVGAGVLHITENGPTEVDYSPSDMQDSSLSHKIPPMEEPSYTQDNDLSELISVSQVEASPSTSSAHTPSQIASPLQEDTLSDVAPPRDMSLYASLTSEKVQSLEGEKLSPKSDISPLTPRESSPLYSPTFSDSTSAVKEKTATCHSSSSPPIDAASAEPYGFRASVLFDTMQHHLALNRDLSTPGLEKDSGGKTPGDFSYAYQKPEETTRSPDEEDYDYESYEKTTRTSDVGGYYYEKIERTTKSPSDSGYSYETIGKTTKTPEDGDYSYEIIEKTTRTPEEGGYSYDISEKTTSPPEVSGYSYEKTERSRRLLDDISNGYDDSEDGGHTLGDPSYSYETTEKITSFPESEGYSYETSTKTTRTPDTSTYCYETAEKITRTPQASTYSYETSDLCYTAEKKSPSEARQDVDLCLVSSCEYKHPKTELSPSFINPNPLEWFASEEPTEESEKPLTQSGGAPPPPGGKQQGRQCDETPPTSVSESAPSQTDSDVPPETEECPSITADANIDSEDESETIPTDKTVTYKHMDPPPAPVQDRSPSPRHPDVSMVDPEALAIEQNLGKALKKDLKEKTKTKKPGTKTKSSSPVKKSDGKSKPLAASPKPAGLKESSDKVSRVASPKKKESVEKAAKPTTTPEVKAARGEEKDKETKNAANASASKSAKTATAGPGTTKTTKSSAVPPGLPVYLDLCYIPNHSNSKNVDVEFFKRVRSSYYVVSGNDPAAEEPSRAVLDALLEGKAQWGSNMQVTLIPTHDSEVMREWYQETHEKQQDLNIMVLASSSTVVMQDESFPACKIEL

SEQ ID NO: 51476 - protein, 569 aa, Homo sapiens
  Payload ID: 10260
  Gene Symbol: MAP1B
  Gene Name: microtubule-associated protein 1B
  ENSP ID: ENSP00000423416
MITDAARHKLLVLTGQCFENTGELILQSGSFSFQNFIEIFTDQEIGELLSTTHPANKASLTLFCPEEGDWKNSNLDRHNLQDFINIKLNSASILPEMEGLSEFTEYLSESVEVPSPFDILEPPTSGGFLKLSKPCCYIFPGGRGDSALFAVNGFNMLINGGSERKSCFWKLIRHLDRVDSILLTHIGDDNLPGINSMLQRKIAELEEEQSQGSTTNSDWMKNLISPDLGVVFLNVPENLKNPEPNIKMKRSIEEACFTLQYLNKLSMKPEPLFRSVGNTIDPVILFQKMGVGKLEMYVLNPVKSSKEMQYFMQQWTGTNKDKAEFILPNGQEVDLPISYLTSVSSLIVWHPANPAEKIIRVLFPGNSTQYNILEGLEKLKHLDFLKQPLATQKDLTGQVPTPVVKQTKLKQRADSRESLKPAAKPLPSKSVRKESKEETPEVTKVNHVEKPPKVESKEKVMVKKDKPIKTETKPSVTEKEVPSKEEPSPVKAEVAEKQATDVKPKAAKEKTVKKETKVKPEDKKEEKEKPKKEVAKKEDKTPIKKEEKPKKEEVKKEVKKEIKKEEKKE

SEQ ID NO: 51477 - protein, 670 aa, Homo sapiens
  Payload ID: 10260
  Gene Symbol: MAP1B
  Gene Name: microtubule-associated protein 1B
  ENSP ID: ENSP00000423444
MATVVVEATEPEPSGSIANPAASTSPSLSHRFLDSKFYLLVVVGEIVTEEHLRRAIGNIELGIRSWDTNLIECNLDQELKLFVSRHSARFSPEVPGQKILHHRSDVLETVVLINPSDEAVSTEVRLMITDAARHKLLVLTGQCFENTGELILQSGSFSFQNFIEIFTDQEILKGGHNKCPVNLNFFKIGELLSTTHPANKASLTLFCPEEGDWKNSNLDRHNLQDFINIKLNSASILPEMEGLSEFTEYLSESVEVPSPFDILEPPTSGGFLKLSKPCCYIFPGGRGDSALFAVNGFNMLINGGSERKSCFWKLIRHLDRVDSILLTHIGDDNLPGINSMLQRKIAELEEEQSQGSTTNSDWMKNLISPDLGVVFLNVPENLKNPEPNIKMKRSIEEACFTLQYLNKLSMKPEPLFRSVGNTIDPVILFQKMGVGKLEMYVLNPVKSSKEMQYFMQQWTGTNKDKAEFILPNGQEVDLPISYLTSVSSLIVWHPANPAEKIIRVLFPGNSTQYNILEGLEKLKHLDFLKQPLATQKDLTGQVPTPVVKQTKLKQRADSRESLKPAAKPLPSKSVRKESKEETPEVTKVNHVEKPPKVESKEKVMVKKDKPIKTETKPSVTEKEVPSKEEPSPVKAEVAEKQATDVKPKAAKEKTVKKETKVKPEDKKEEK

SEQ ID NO: 51478 - protein, 122 aa, Homo sapiens
  Payload ID: 10260
  Gene Symbol: MAP1B
  Gene Name: microtubule-associated protein 1B
  ENSP ID: ENSP00000426312
MATVVVEATEPEPSGSIANPAASTSPSLSHRFLDSKFYLLVVVGEIVTEEHLRRAIGNIELGIRSWDTNLIECNLDQELKLFVSRHSARFSPEVPGQKILHHRSDVLETVVLINPSDEAVST

SEQ ID NO: 51479 - protein, 103 aa, Homo sapiens
  Payload ID: 10260
  Gene Symbol: MAP1B
  Gene Name: microtubule-associated protein 1B
  ENSP ID: ENSP00000427194
MATVVVEATEPEPSGSIANPAASTSPSLSHRFLDSKFYLLVVVGEIVTEEHLRRAIGNIELGIRSWDTNLIECNLDQELKLFVSRHSARFSPEVPEMKKNIKE

SEQ ID NO: 51480 - protein, 1059 aa, Homo sapiens
  Payload ID: 10261
  Gene Symbol: MAP1S
  Gene Name: microtubule-associated protein 1S
  Uniprot ID: Q66K74
  ENSP ID: ENSP00000325313
MAAVAGSGAAAAPSSLLLVVGSEFGSPGLLTYVLEELERGIRSWDVDPGVCNLDEQLKVFVSRHSATFSSIVKGQRSLHHRGDNLETLVLLNPSDKSLYDELRNLLLDPASHKLLVLAGPCLEETGELLLQTGGFSPHHFLQVLKDREIRDILATTPPPVQPPILTITCPTFGDWAQLAPAVPGLQGALRLQLRLNPPAQLPNSEGLCEFLEYVAESLEPPSPFELLEPPTSGGFLRLGRPCCYIFPGGLGDAAFFAVNGFTVLVNGGSNPKSSFWKLVRHLDRVDAVLVTHPGADSLPGLNSLLRRKLAERSEVAAGGGSWDDRLRRLISPNLGVVFFNACEAASRLARGEDEAELALSLLAQLGITPLPLSRGPVPAKPTVLFEKMGVGRLDMYVLHPPSAGAERTLASVCALLVWHPAGPGEKVVRVLFPGCTPPACLLDGLVRLQHLRFLREPVVTPQDLEGPGRAESKESVGSRDSSKREGLLATHPRPGQERPGVARKEPARAEAPRKTEKEAKTPRELKKDPKPSVSRTQPREVRRAASSVPNLKKTNAQAAPKPRKAPSTSHSGFPPVANGPRSPPSLRCGEASPPSAACGSPASQLVATPSLELGPIPAGEEKALELPLAASSIPRPRTPSPESHRSPAEGSERLSLSPLRGGEAGPDASPTVTTPTVTTPSLPAEVGSPHSTEVDESLSVSFEQVLPPSAPTSEAGLSLPLRGPRARRSASPHDVDLCLVSPCEFEHRKAVPMAPAPASPGSSNDSSARSQERAGGLGAEETPPTSVSESLPTLSDSDPVPLAPGAADSDEDTEGFGVPRHDPLPDPLKVPPPLPDPSSICMVDPEMLPPKTARQTENVSRTRKPLARPNSRAAAPKATPVAAAKTKGLAGGDRASRPLSARSEPSEKGGRAPLSRKSSTPKTATRGPSGSASSRPGVSATPPKSPVYLDLAYLPSGSSAHLVDEEFFQRVRALCYVISGQDQRKEEGMRAVLDALLASKQHWDRDLQVTLIPTFDSVAMHTWYAETHARHQALGITVLGSNSMVSMQDDAFPACKVEF

SEQ ID NO: 51481 - protein, 1033 aa, Homo sapiens
  Payload ID: 10261
  Gene Symbol: MAP1S
  Gene Name: microtubule-associated protein 1S
  Uniprot ID: Q66K74
  ENSP ID: ENSP00000439243
MAGMIDRFSPANTGIRSWDVDPGVCNLDEQLKVFVSRHSATFSSIVKGQRSLHHRGDNLETLVLLNPSDKSLYDELRNLLLDPASHKLLVLAGPCLEETGELLLQTGGFSPHHFLQVLKDREIRDILATTPPPVQPPILTITCPTFGDWAQLAPAVPGLQGALRLQLRLNPPAQLPNSEGLCEFLEYVAESLEPPSPFELLEPPTSGGFLRLGRPCCYIFPGGLGDAAFFAVNGFTVLVNGGSNPKSSFWKLVRHLDRVDAVLVTHPGADSLPGLNSLLRRKLAERSEVAAGGGSWDDRLRRLISPNLGVVFFNACEAASRLARGEDEAELALSLLAQLGITPLPLSRGPVPAKPTVLFEKMGVGRLDMYVLHPPSAGAERTLASVCALLVWHPAGPGEKVVRVLFPGCTPPACLLDGLVRLQHLRFLREPVVTPQDLEGPGRAESKESVGSRDSSKREGLLATHPRPGQERPGVARKEPARAEAPRKTEKEAKTPRELKKDPKPSVSRTQPREVRRAASSVPNLKKTNAQAAPKPRKAPSTSHSGFPPVANGPRSPPSLRCGEASPPSAACGSPASQLVATPSLELGPIPAGEEKALELPLAASSIPRPRTPSPESHRSPAEGSERLSLSPLRGGEAGPDASPTVTTPTVTTPSLPAEVGSPHSTEVDESLSVSFEQVLPPSAPTSEAGLSLPLRGPRARRSASPHDVDLCLVSPCEFEHRKAVPMAPAPASPGSSNDSSARSQERAGGLGAEETPPTSVSESLPTLSDSDPVPLAPGAADSDEDTEGFGVPRHDPLPDPLKVPPPLPDPSSICMVDPEMLPPKTARQTENVSRTRKPLARPNSRAAAPKATPVAAAKTKGLAGGDRASRPLSARSEPSEKGGRAPLSRKSSTPKTATRGPSGSASSRPGVSATPPKSPVYLDLAYLPSGSSAHLVDEEFFQRVRALCYVISGQDQRKEEGMRAVLDALLASKQHWDRDLQVTLIPTFDSVAMHTWYAETHARHQALGITVLGSNSMVSMQDDAFPACKVEF

SEQ ID NO: 51482 - protein, 81 aa, Homo sapiens
  Payload ID: 10261
  Gene Symbol: MAP1S
  Gene Name: microtubule-associated protein 1S
  ENSP ID: ENSP00000468878
MRQAFGQWTQGYGRDDRQVQPCQHRSGLGMDPKRVRRWNKLPAHMVSGRMRRLQGTERTVSLSTRSSRSLCPDTLPPSPAL

SEQ ID NO: 51483 - protein, 82 aa, Homo sapiens
  Payload ID: 10261
  Gene Symbol: MAP1S
  Gene Name: microtubule-associated protein 1S
  ENSP ID: ENSP00000469123
MAAVAGSGAAAAPSSLLLVVGSEFGSPGLLTYVLEELERAQGLCVPTLCHLLQHCERPAEPAPPWRQPGDPGPPEPIRQVPV

SEQ ID NO: 51484 - protein, 79 aa, Homo sapiens
  Payload ID: 10261
  Gene Symbol: MAP1S
  Gene Name: microtubule-associated protein 1S
  ENSP ID: ENSP00000469232
MRQAFGQWTQGYGRDDRQVQPCQHRSGLGMDPKRVRRWNKLPAHMVSGRMRRLQGTERTVSLSTRRHPVLGCRSWRLQP

SEQ ID NO: 51485 - protein, 185 aa, Homo sapiens
  Payload ID: 10261
  Gene Symbol: MAP1S
  Gene Name: microtubule-associated protein 1S
  ENSP ID: ENSP00000469321
MAAVAGSGAAAAPSSLLLVVGSEFGSPGLLTYVLEELERGIRSWDVDPGVCNLDEQLKVFVSRHSATFSSIVKGQRSLHHRGDNLETLVLLNPSDKSLYDELRNLLLDPASHKLLVLAGHPCPESPQPPRLPLEARRGQPAAGPGCQPPHPSPRSTWTWPTCPAGAAPTWWMRSSSSACARSATS

SEQ ID NO: 51486 - protein, 189 aa, Homo sapiens
  Payload ID: 10261
  Gene Symbol: MAP1S
  Gene Name: microtubule-associated protein 1S
  ENSP ID: ENSP00000469571
MKKKMNEWSLGRGGSQADTQESANPFNARIPCSPRPQRACIRSWDVDPGVCNLDEQLKVFVSRHSATFSSIVKGQRSLHHRGDNLETLVLLNPSDKSLYDELRNLLLDPASHKLLVLAGPCLEETGELLLQTGGFSPHHFLQVLKDREIRDILATTPPPVQPPILTITCPTFGDWAQLAPAVPGLQGAL

SEQ ID NO: 51487 - protein, 67 aa, Homo sapiens
  Payload ID: 10261
  Gene Symbol: MAP1S
  Gene Name: microtubule-associated protein 1S
  ENSP ID: ENSP00000469854
MRQAFGQWTQGYGRDDRQVQPCQHRSGLGMDPKRVRRWNKLPAHMVSGRMRRLQGTERTVSLSTRRC

SEQ ID NO: 51488 - protein, 93 aa, Homo sapiens
  Payload ID: 10261
  Gene Symbol: MAP1S
  Gene Name: microtubule-associated protein 1S
  ENSP ID: ENSP00000470306
MAAVAGSGAAAAPSSLLLVVGSEFGSPGLLTYVLEELERGIRSWDVDPGVCNLDEQLKVFVSRHSATFSSIVKDEEIGIEGGRGREISEEGVF

SEQ ID NO: 51489 - protein, 188 aa, Homo sapiens
  Payload ID: 10261
  Gene Symbol: MAP1S
  Gene Name: microtubule-associated protein 1S
  ENSP ID: ENSP00000471903
MAAVAGSGAAAAPSSLLLVVGSEFGSPGLLTYVLEELERGQRSLHHRGDNLETLVLLNPSDKSLYDELRNLLLDPASHKLLVLAGPCLEETGELLLQTGGFSPHHFLQVLKDREIRDILATTPPPVQPPILTITCPTFGDWAQLAPAVPGLQGALRLQLRLNPPAQLPNSEGLCEFLEYVAESLEPPS

SEQ ID NO: 51490 - protein, 120 aa, Homo sapiens
  Payload ID: 10261
  Gene Symbol: MAP1S
  Gene Name: microtubule-associated protein 1S
  ENSP ID: ENSP00000471994
RWAPRTRPRWTSPCRCPLSSAHLVDEEFFQRVRALCYVISGQDQRKEEGMRAVLDALLASKQHWDRDLQVTLIPTFDSVAMHTWYAETHARHQALGITVLGSNSMVSMQDDAFPACKVEF

SEQ ID NO: 51491 - protein, 559 aa, Homo sapiens
  Payload ID: 10262
  Gene Symbol: MAP2
  Gene Name: microtubule-associated protein 2
  Uniprot ID: P11137
  ENSP ID: ENSP00000199940
MADERKDEAKAPHWTSAPLTEASAHSHPPEIKDQGGAGEGLVRSANGFPYREDEEGAFGEHGSQGTYSNTKENGINGELTSADRETAEEVSARIVQVVTAEAVAVLKGEQEKEAQHKDQTAALPLAAEETANLPPSPPPSPASEQTVTVEEAAGGESALAPSVFKQAKDKVSNSTLSKIPALQGSTKSPRYSSACPSTTKRATFSDSLLIQPTSAGSTDRLPYSKSGNKDGVTKSPEKRSSLPRPSSILPPRRGVSGDRDENSFSLNSSISSSARRTTRSEPIRRAGKSGTSTPTTPGSTAITPGTPPSYSSRTPGTPGTPSYPRTPHTPGTPKSAILVPSEKKVAIIRTPPKSPATPKQLRLINQPLPDLKNVKSKIGSTDNIKYQPKGGQVRILNKKIDFSKVQSRCGSKDNIKHSAGGGNVQIVTKKIDLSHVTSKCGSLKNIRHRPGGGRVKIESVKLDFKEKAQAKVGSLDNAHHVPGGGNVKIDSQKLNFREHAKARVDHGAEIITQSPGRSSVASPRRLSNVSSSGSINLLESPQLATLAEDVTAALAKQGL

SEQ ID NO: 51492 - protein, 1827 aa, Homo sapiens
  Payload ID: 10262
  Gene Symbol: MAP2
  Gene Name: microtubule-associated protein 2
  Uniprot ID: P11137
  ENSP ID: ENSP00000353508
MADERKDEAKAPHWTSAPLTEASAHSHPPEIKDQGGAGEGLVRSANGFPYREDEEGAFGEHGSQGTYSNTKENGINGELTSADRETAEEVSARIVQVVTAEAVAVLKGEQEKEAQHKDQTAALPLAAEETANLPPSPPPSPASEQTVTVEEDLLTASKMEFHDQQELTPSTAEPSDQKEKESEKQSKPGEDLKHAALVSQPETTKTYPDKKDMQGTEEEKAPLALFGHTLVASLEDMKQKTEPSLVVPGIDLPKEPPTPKEQKDWFIEMPTEAKKDEWGLVAPISPGPLTPMREKDVFDDIPKWEGKQFDSPMPSPFQGGSFTLPLDVMKNEIVTETSPFAPAFLQPDDKKSLQQTSGPATAKDSFKIEEPHEAKPDKMAEAPPSEAMTLPKDAHIPVVEEHVMGKVLEEEKEAINQETVQQRDTFTPSGQEPILTEKETELKLEEKTTISDKEAVPKESKPPKPADEEIGIIQTSTEHTFSEQKDQEPTTDMLKQDSFPVSLEQAVTDSAMTSKTLEKAMTEPSALIEKSSIQELFEMRVDDKDKIEGVGAATSAELDMPFYEDKSGMSKYFETSALKEEATKSIEPGSDYYELSDTRESVHESIDTMSPMHKNGDKEFQTGKESQPSPPAQEAGYSTLAQSYPSDLPEEPSSPQERMFTIDPKVYGEKRDLHSKNKDDLTLSRSLGLGGRSAIEQRSMSINLPMSCLDSIALGFNFGRGHDLSPLASDILTNTSGSMDEGDDYLPATTPALEKAPCFPVESKEEEQIEKVKATGEESTQAEISCESPFLAKDFYKNGTVMAPDLPEMLDLAGTRSRLASVSADAEVARRKSVPSETVVEDSRTGLPPVTDENHVIVKTDSQLEDLGYCVFNKYTVPLPSPVQDSENLSGESGTFYEGTDDKVRRDLATDLSLIEVKLAAAGRVKDEFSVDKEASAHISGDKSGLSKEFDQEKKANDRLDTVLEKSEEHADSKEHAKKTEEAGDEIETFGLGVTYEQALAKDLSIPTDASSEKAEKGLSSVPEIAEVEPSKKVEQGLDFAVQGQLDVKISDFGQMASGLNIDDRRATELKLEATQDMTPSSKAPQEADAFMGVESGHMKEGTKVSETEVKEKVAKPDLVHQEAVDKEESYESSGEHESLTMESLKADEGKKETSPESSLIQDEIAVKLSVEIPCPPAVSEADLATDERADVQMEFIQGPKEESKETPDISITPSDVAEPLHETIVSEPAEIQSEEEEIEAQGEYDKLLFRSDTLQITDLGVSGAREEFVETCPSEHKGVIESVVTIEDDFITVVQTTTDEGESGSHSVRFAALEQPEVERRPSPHDEEEFEVEEAAEAQAEPKDGSPEAPASPEREEVALSEYKTETYDDYKDETTIDDSIMDADSLWVDTQDDDRSIMTEQLETIPKEEKAEKEARRSSLEKHRKEKPFKTGRGRISTPERKVAKKEPSTVSRDEVRRKKAVYKKAELAKKTEVQAHSPSRKFILKPAIKYTRPTHLSCVKRKTTAAGGESALAPSVFKQAKDKVSDGVTKSPEKRSSLPRPSSILPPRRGVSGDRDENSFSLNSSISSSARRTTRSEPIRRAGKSGTSTPTTPGSTAITPGTPPSYSSRTPGTPGTPSYPRTPHTPGTPKSAILVPSEKKVAIIRTPPKSPATPKQLRLINQPLPDLKNVKSKIGSTDNIKYQPKGGQVQIVTKKIDLSHVTSKCGSLKNIRHRPGGGRVKIESVKLDFKEKAQAKVGSLDNAHHVPGGGNVKIDSQKLNFREHAKARVDHGAEIITQSPGRSSVASPRRLSNVSSSGSINLLESPQLATLAEDVTAALAKQGL

SEQ ID NO: 51493 - protein, 471 aa, Homo sapiens
  Payload ID: 10262
  Gene Symbol: MAP2
  Gene Name: microtubule-associated protein 2
  Uniprot ID: P11137
  ENSP ID: ENSP00000355290
MADERKDEAKAPHWTSAPLTEASAHSHPPEIKDQGGAGEGLVRSANGFPYREDEEGAFGEHGSQGTYSNTKENGINGELTSADRETAEEVSARIVQVVTAEAVAVLKGEQEKEAQHKDQTAALPLAAEETANLPPSPPPSPASEQTVTVEEAAGGESALAPSVFKQAKDKVSDGVTKSPEKRSSLPRPSSILPPRRGVSGDRDENSFSLNSSISSSARRTTRSEPIRRAGKSGTSTPTTPGSTAITPGTPPSYSSRTPGTPGTPSYPRTPHTPGTPKSAILVPSEKKVAIIRTPPKSPATPKQLRLINQPLPDLKNVKSKIGSTDNIKYQPKGGQVQIVTKKIDLSHVTSKCGSLKNIRHRPGGGRVKIESVKLDFKEKAQAKVGSLDNAHHVPGGGNVKIDSQKLNFREHAKARVDHGAEIITQSPGRSSVASPRRLSNVSSSGSINLLESPQLATLAEDVTAALAKQGL

SEQ ID NO: 51494 - protein, 106 aa, Homo sapiens
  Payload ID: 10262
  Gene Symbol: MAP2
  Gene Name: microtubule-associated protein 2
  ENSP ID: ENSP00000376031
MADERKDEAKAPHWTSAPLTEASAHSHPPEIKDQGGAGEGLVRSANGFPYREDEEGAFGEHGSQGTYSNTKENGINGELTSADRETAEEVSARIVQVVTAEAVAVL

SEQ ID NO: 51495 - protein, 471 aa, Homo sapiens; identical to SEQ ID NO: 51493
  Payload ID: 10262
  Gene Symbol: MAP2
  Gene Name: microtubule-associated protein 2
  Uniprot ID: P11137
  ENSP ID: ENSP00000376032

SEQ ID NO: 51496 - protein, 208 aa, Homo sapiens
  Payload ID: 10262
  Gene Symbol: MAP2
  Gene Name: microtubule-associated protein 2
  ENSP ID: ENSP00000388824
INGELTSADRETAEEVSARIVQVVTAEAVAVLKGEQEKEAQHKDQTAALPLAAEETANLPPSPPPSPASEQTVTVEEAAGGESALAPSVFKQAKDKVSGVHVQACYKGILRDAENSTLSKIPALQGSTKSPRYSSACPSTTKRATFSDSLLIQPTSAGSTDRLPYSKSGNKDGVTKSPEKRSSLPRPSSILPPRRGVSGDRDENSFSL

SEQ ID NO: 51497 - protein, 1823 aa, Homo sapiens
  Payload ID: 10262
  Gene Symbol: MAP2
  Gene Name: microtubule-associated protein 2
  Uniprot ID: P11137
  ENSP ID: ENSP00000392164
MADERKDEAKAPHWTSAPLTEASAHSHPPEIKDQGGAGEGLVRSANGFPYREDEEGAFGEHGSQGTYSNTKENGINGELTSADRETAEEVSARIVQVVTAEAVAVLKGEQEKEAQHKDQTAALPLAAEETANLPPSPPPSPASEQTVTVEEASKMEFHDQQELTPSTAEPSDQKEKESEKQSKPGEDLKHAALVSQPETTKTYPDKKDMQGTEEEKAPLALFGHTLVASLEDMKQKTEPSLVVPGIDLPKEPPTPKEQKDWFIEMPTEAKKDEWGLVAPISPGPLTPMREKDVFDDIPKWEGKQFDSPMPSPFQGGSFTLPLDVMKNEIVTETSPFAPAFLQPDDKKSLQQTSGPATAKDSFKIEEPHEAKPDKMAEAPPSEAMTLPKDAHIPVVEEHVMGKVLEEEKEAINQETVQQRDTFTPSGQEPILTEKETELKLEEKTTISDKEAVPKESKPPKPADEEIGIIQTSTEHTFSEQKDQEPTTDMLKQDSFPVSLEQAVTDSAMTSKTLEKAMTEPSALIEKSSIQELFEMRVDDKDKIEGVGAATSAELDMPFYEDKSGMSKYFETSALKEEATKSIEPGSDYYELSDTRESVHESIDTMSPMHKNGDKEFQTGKESQPSPPAQEAGYSTLAQSYPSDLPEEPSSPQERMFTIDPKVYGEKRDLHSKNKDDLTLSRSLGLGGRSAIEQRSMSINLPMSCLDSIALGFNFGRGHDLSPLASDILTNTSGSMDEGDDYLPATTPALEKAPCFPVESKEEEQIEKVKATGEESTQAEISCESPFLAKDFYKNGTVMAPDLPEMLDLAGTRSRLASVSADAEVARRKSVPSETVVEDSRTGLPPVTDENHVIVKTDSQLEDLGYCVFNKYTVPLPSPVQDSENLSGESGTFYEGTDDKVRRDLATDLSLIEVKLAAAGRVKDEFSVDKEASAHISGDKSGLSKEFDQEKKANDRLDTVLEKSEEHADSKEHAKKTEEAGDEIETFGLGVTYEQALAKDLSIPTDASSEKAEKGLSSVPEIAEVEPSKKVEQGLDFAVQGQLDVKISDFGQMASGLNIDDRRATELKLEATQDMTPSSKAPQEADAFMGVESGHMKEGTKVSETEVKEKVAKPDLVHQEAVDKEESYESSGEHESLTMESLKADEGKKETSPESSLIQDEIAVKLSVEIPCPPAVSEADLATDERADVQMEFIQGPKEESKETPDISITPSDVAEPLHETIVSEPAEIQSEEEEIEAQGEYDKLLFRSDTLQITDLGVSGAREEFVETCPSEHKGVIESVVTIEDDFITVVQTTTDEGESGSHSVRFAALEQPEVERRPSPHDEEEFEVEEAAEAQAEPKDGSPEAPASPEREEVALSEYKTETYDDYKDETTIDDSIMDADSLWVDTQDDDRSIMTEQLETIPKEEKAEKEARRSSLEKHRKEKPFKTGRGRISTPERKVAKKEPSTVSRDEVRRKKAVYKKAELAKKTEVQAHSPSRKFILKPAIKYTRPTHLSCVKRKTTAAGGESALAPSVFKQAKDKVSDGVTKSPEKRSSLPRPSSILPPRRGVSGDRDENSFSLNSSISSSARRTTRSEPIRRAGKSGTSTPTTPGSTAITPGTPPSYSSRTPGTPGTPSYPRTPHTPGTPKSAILVPSEKKVAIIRTPPKSPATPKQLRLINQPLPDLKNVKSKIGSTDNIKYQPKGGQVQIVTKKIDLSHVTSKCGSLKNIRHRPGGGRVKIESVKLDFKEKAQAKVGSLDNAHHVPGGGNVKIDSQKLNFREHAKARVDHGAEIITQSPGRSSVASPRRLSNVSSSGSINLLESPQLATLAEDVTAALAKQGL

SEQ ID NO: 51498 - protein, 567 aa, Homo sapiens
  Payload ID: 10262
  Gene Symbol: MAP2
  Gene Name: microtubule-associated protein 2
  ENSP ID: ENSP00000409969
MADERKDEAKAPHWTSAPLTEASAHSHPPEIKDQGGAGEGLVRSANGFPYREDEEGAFGEHGSQGTYSNTKENGINGELTSADRETAEEVSARIVQVVTAEAVAVLKGEQEKEAQHKDQTAALPLAAEETANLPPSPPPSPASEQTVTVEEEEETLESRMAEEEKPAALPEKECGAAKSSDQPKGLSKGQMESSAEAQIVPEESAPAGAPHEKSVKEVKEVSPEVKTPSSAGEDLLTASKMEFHDQQELTPSTAEPSDQKEKESEKQSKPGEDLKHAALVSQPETTKTYPDKKDMQGTEEEKAPLALFGHTLVASLEDMKQKTEPSLVVPGIDLPKEPPTPKEQKDWFIEMPTEAKKDEWGLVAPISPGPLTPMREKDVFDDIPKWEGKQFDSPMPSPFQGGSFTLPLDVMKNEIVTETSPFAPAFLQPDDKKSLQQTSGPATAKDSFKIEEPHEAKPDKMAEAPPSEAMTLPKDAHIPVVEEHVMGKVLEEEKEAINQETVQQRDTFTPSGQEPILTEKETELKLEEKTTISDKEAVPKESKPPKPADEEIGIIQTSTEHTFSEQK

SEQ ID NO: 51499 - protein, 463 aa, Homo sapiens
  Payload ID: 10263
  Gene Symbol: MAP4
  Gene Name: microtubule-associated protein 4
  ENSP ID: ENSP00000334770
ICEEPVAKKREELAHFSNSSSNSGKKELGTAGLYLHSKLEQIPEGSSKEKGQEDFSETRIDSCSQVCQRGEKQPGQTALAGKKEIEVTATQSTPSFLFEKPPRDGIARPEEGRPVVSGTGNDITTPPNKELPPSPEKKTKPIADAKAPEKRASPSKPASAPASRSGSKSTQTVAKTTTAAAVASTGPSSRSPSTLLPKKPTAIKTEGKPAEVKKMTAKSVPADLSRPKSTSTSSMKKTTTLSGTAPAAGVVPSRVKATPMPSRPSTTPFIDKKPTSAKPSSTTPRLSRLATNTSAPDLKNVRSKVGSTENIKHQPGGGRVQIVSKKVSYSHIQSKCGSKDNIKHVPGGGNVQIQNKKVDISKVSSKCGSKANIKHKPGGGDVKIESQKLNFKEKAQAKVGSLDNVGHLPAGGAVKIETYRLTFRANARARTDHGADIVSRPPHFPGGPNSGSRVLGPLSRAVH

SEQ ID NO: 51500 - protein, 1152 aa, Homo sapiens
  Payload ID: 10263
  Gene Symbol: MAP4
  Gene Name: microtubule-associated protein 4
  Uniprot ID: P27816
  ENSP ID: ENSP00000353375
MADLSLADALTEPSPDIEGEIKRDFIATLEAEAFDDVVGETVGKTDYIPLLDVDEKTGNSESKKKPCSETSQIEDTPSSKPTLLANGGHGVEGSDTTGSPTEFLEEKMAYQEYPNSQNWPEDTNFCFQPEQVVDPIQTDPFKMYHDDDLADLVFPSSATADTSIFAGQNDPLKDSYGMSPCNTAVVPQGWSVEALNSPHSESFVSPEAVAEPPQPTAVPLELAKEIEMASEERPPAQALEIMMGLKTTDMAPSKETEMALAKDMALATKTEVALAKDMESPTKLDVTLAKDMQPSMESDMALVKDMELPTEKEVALVKDVRWPTETDVSSAKNVVLPTETEVAPAKDVTLLKETERASPIKMDLAPSKDMGPPKENKKETERASPIKMDLAPSKDMGPPKENKIVPAKDLVLLSEIEVAQANDIISSTEISSAEKVALSSETEVALARDMTLPPETNVILTKDKALPLEAEVAPVKDMAQLPETEIAPAKDVAPSTVKEVGLLKDMSPLSETEMALGKDVTPPPETEVVLIKNVCLPPEMEVALTEDQVPALKTEAPLAKDGVLTLANNVTPAKDVPPLSETEATPVPIKDMEIAQTQKGISEDSHLESLQDVGQSAAPTFMISPETVTGTGKKCSLPAEEDSVLEKLGERKPCNSQPSELSSETSGIARPEEGRPVVSGTGNDITTPPNKELPPSPEKKTKPLATTQPAKTSTSKAKTQPTSLPKQPAPTTIGGLNKKPMSLASGLVPAAPPKRPAVASARPSILPSKDVKPKPIADAKAPEKRASPSKPASAPASRSGSKSTQTVAKTTTAAAVASTGPSSRSPSTLLPKKPTAIKTEGKPAEVKKMTAKSVPADLSRPKSTSTSSMKKTTTLSGTAPAAGVVPSRVKATPMPSRPSTTPFIDKKPTSAKPSSTTPRLSRLATNTSAPDLKNVRSKVGSTENIKHQPGGGRAKVEKKTEAAATTRKPESNAVTKTAGPIASAQKQPAGKVQIVSKKVSYSHIQSKCGSKDNIKHVPGGGNVQIQNKKVDISKVSSKCGSKANIKHKPGGGDVKIESQKLNFKEKAQAKVGSLDNVGHLPAGGAVKTEGGGSEAPLCPGPPAGEEPAISEAAPEAGAPTSASGLNGHPTLSGGGDQREAQTLDSQIQETSI

SEQ ID NO: 51501 - protein, 760 aa, Homo sapiens
  Payload ID: 10263
  Gene Symbol: MAP4
  Gene Name: microtubule-associated protein 4
  ENSP ID: ENSP00000373242
KTDAANRYTAVADKPSKRSNDGKSKKVKNSSPEKHILENKIDATKIHVPMETTGDQGIEGMAYMDENRNITFTCPRTPSELINKSSPLEVLESAACEKLPTPTPQVVKEGDSFPDTLAKNGQEIAPAQISKSLMVDNYTKDGVPGQERPKGPSAVVPSTSTGGVALPITTAIETVNIHGDHSLKNKAELADSMKNEAGIDEGHVIGESESVHSGASKHSVEKVTELAKGHLLPGVPVEDQSLPGEARALEGYADRGNFPAHPVNEEKETKEGSVAVQIPDLLEDKAQKLSFCEDQNAQDRNSKGSDSLNKKVDLTLLSPKSENDKLKEISLACKITELESVSLPTPEIQSDFLHSKVEAPPSEVADTLVIMTASKGVRLPEPKDKILETPQKMTEKSESKTPGEGKKEDKSRMAEPMKGYMRPTKSRGLTPLLPKSTIQEQERHKQLKSAGIARPEEGRPVVSGTGNDITTPPNKELPPSPEKKTKPLATTQPAKTSTSKAKTQPTSLPKQPAPTTIGGLNKKPMSLASGLVPAAPPKRPAVASARPSILPSKDVKPKPIADAKAPEKRASPSKPASAPASRSGSKSTQTVAKTTTAAAVASTGPSSRSPSTLLPKKPTAIKTEGKPAEVKKMTAKSVPADLSRPKSTSTSSMKKTTTLSGTAPAAGVVPSRVKATPMPSRPSTTPFIDKKPTSAKPSSTTPRLSRLATNTSAPDLKNVRSKAKVEKKTEAAATTRKPESNAVTKTAGPIASAQKQPAGK

SEQ ID NO: 51502 - protein, 1135 aa, Homo sapiens
  Payload ID: 10263
  Gene Symbol: MAP4
  Gene Name: microtubule-associated protein 4
  Uniprot ID: P27816
  ENSP ID: ENSP00000379083
MADLSLADALTEPSPDIEGEIKRDFIATLEAEAFDDVVGETVGKTDYIPLLDVDEKTGNSESKKKPCSETSQIEDTPSSKPTLLANGGHGVEGSDTTGSPTEFLEEKMAYQEYPNSQNWPEDTNFCFQPEQVVDPIQTDPFKMYHDDDLADLVFPSSATADTSIFAGQNDPLKDSYGMSPCNTAVVPQGWSVEALNSPHSESFVSPEAVAEPPQPTAVPLELAKEIEMASEERPPAQALEIMMGLKTTDMAPSKETEMALAKDMALATKTEVALAKDMESPTKLDVTLAKDMQPSMESDMALVKDMELPTEKEVALVKDVRWPTETDVSSAKNVVLPTETEVAPAKDVTLLKETERASPIKMDLAPSKDMGPPKENKKETERASPIKMDLAPSKDMGPPKENKIVPAKDLVLLSEIEVAQANDIISSTEISSAEKVALSSETEVALARDMTLPPETNVILTKDKALPLEAEVAPVKDMAQLPETEIAPAKDVAPSTVKEVGLLKDMSPLSETEMALGKDVTPPPETEVVLIKNVCLPPEMEVALTEDQVPALKTEAPLAKDGVLTLANNVTPAKDVPPLSETEATPVPIKDMEIAQTQKGISEDSHLESLQDVGQSAAPTFMISPETVTGTGKKCSLPAEEDSVLEKLGERKPCNSQPSELSSETSGIARPEEGRPVVSGTGNDITTPPNKELPPSPEKKTKPLATTQPAKTSTSKAKTQPTSLPKQPAPTTIGGLNKKPMSLASGLVPAAPPKRPAVASARPSILPSKDVKPKPIADAKAPEKRASPSKPASAPASRSGSKSTQTVAKTTTAAAVASTGPSSRSPSTLLPKKPTAIKTEGKPAEVKKMTAKSVPADLSRPKSTSTSSMKKTTTLSGTAPAAGVVPSRVKATPMPSRPSTTPFIDKKPTSAKPSSTTPRLSRLATNTSAPDLKNVRSKVGSTENIKHQPGGGRAKVEKKTEAAATTRKPESNAVTKTAGPIASAQKQPAGKVQIVSKKVSYSHIQSKCGSKDNIKHVPGGGNVQIQNKKVDISKVSSKCGSKANIKHKPGGGDVKIESQKLNFKEKAQAKVGSLDNVGHLPAGGAVKIETYRLTFRANARARTDHGADIVSRPPHFPGGPNSGSRVLGPLSRAVH

SEQ ID NO: 51503 - protein, 99 aa, Homo sapiens
  Payload ID: 10263
  Gene Symbol: MAP4
  Gene Name: microtubule-associated protein 4
  Uniprot ID: P27816
  ENSP ID: ENSP00000397414
MADLSLADALTEPSPDIEGEIKRDFIATLEAEAFDDVVGETVGKTDYIPLLDVDEKTGNSESKKKPCSETSQIEDTPSSKPTLLANGGHGVEGSDTTEA

SEQ ID NO: 51504 - protein, 99 aa, Homo sapiens; identical to SEQ ID NO: 51503
  Payload ID: 10263
  Gene Symbol: MAP4
  Gene Name: microtubule-associated protein 4
  Uniprot ID: P27816
  ENSP ID: ENSP00000402767

SEQ ID NO: 51505 - protein, 2297 aa, Homo sapiens
  Payload ID: 10263
  Gene Symbol: MAP4
  Gene Name: microtubule-associated protein 4
  ENSP ID: ENSP00000407602
MADLSLADALTEPSPDIEGEIKRDFIATLEAEAFDDVVGETVGKTDYIPLLDVDEKTGNSESKKKPCSETSQIEDLPLPPHPASLSFHLPLDTPSSKPTLLANGGHGVEGSDTTGSPTEFLEEKMAYQEYPNSQNWPEDTNFCFQPEQVVDPIQTDPFKMYHDDDLADLVFPSSATADTSIFAGQNDPLKDSYGMSPCNTAVVPQGWSVEALNSPHSESFVSPEAVAEPPQPTAVPLELAKEIEMASEERPPAQALEIMMGLKTTDMAPSKETEMALAKDMALATKTEVALAKDMESPTKLDVTLAKDMQPSMESDMALVKDMELPTEKEVALVKDVRWPTETDVSSAKNVVLPTETEVAPAKDVTLLKETERASPIKMDLAPSKDMGPPKENKKETERASPIKMDLAPSKDMGPPKENKIVPAKDLVLLSEIEVAQANDIISSTEISSAEKVALSSETEVALARDMTLPPETNVILTKDKALPLEAEVAPVKDMAQLPETEIAPAKDVAPSTVKEVGLLKDMSPLSETEMALGKDVTPPPETEVVLIKNVCLPPEMEVALTEDQVPALKTEAPLAKDGVLTLANNVTPAKDVPPLSETEATPVPIKDMEIAQTQKGISEDSHLESLQDVGQSAAPTFMISPETVTGTGKKCSLPAEEDSVLEKLGERKPCNSQPSELSSETSANFMYCGTPPTQAKQVCRPSDRRSTRPKPARVPPELLGGSPPWKTLDHRLGHCSLSESGWVSGSSSCGGPGNQRKSIHVDSLEPQRDLGREAWDIESTPIMMKKKKKKPKQKRYSQPRAGGPSDDDNADKPKGHPFAADTQKSGVLPSQPTTMGTEYGLVSGENLKRECLVNSSAARLVAENFVSESLRIPLYPSEEAPKTAISSQSKLRVEEESKSNKSVLQNQDKKLLKQHEYKPQPAPHLKTPVDKSQSVGPLNLKGPLAEVSAYNVETPLDIRLKEGCSPFLDQEVMGVVSKPTAAKEIPNLVPTLIASNPLECNLKEGNNESKMTKLQNVKLKEFPEGAEEDKELKKEAFPNERQEISIFTSEQLQGQVLVQVPGVENEPFKRMAGDGKSRKGRGSSGKMRTDSGKVKAKSELPFLLDSQKDGRAVLIPSEPVSKTEGMTTQDKSEELGLNSSKQPGTKADLTEAVVMGEPKEMTQPKVAGTMQALIPLESGSGMTQTSGVSTETGDVVKDMGVNNQSKEGRCPWKDHEAAPWISEKPKKRGNEGKSKKFKNNYSTQPARMERKEEILNPPFEGKDGDTGSIPHKSKEIGFTFPKMHDSSFSHTPDTPTVEAVDRKGGNFQVNFVELGTLGENKISTVKASTVTEPPAKVTDVSCQEQIQGAGFVPSVVSEENKTDAANRYTAVADKPSKRSNDGKSKKVKNSSPEKHILENKIDATKIHVPMETTGDQGIEGMAYMDENRNITFTCPRTPSELINKSSPLEVLESAACEKLPTPTPQVVKEGDSFPDTLAKNGQEIAPAQISKSLMVDNYTKDGVPGQERPKGPSAVVPSTSTGGVALPITTAIETVNIHGDHSLKNKAELADSMKNEAGIDEGHVIGESESVHSGASKHSVEKVTELAKGHLLPGVPVEDQSLPGEARALEGYADRGNFPAHPVNEEKETKEGSVAVQIPDLLEDKAQKLSFCEDQNAQDRNSKGSDSLNKKVDLTLLSPKSENDKLKEISLACKITELESVSLPTPEIQSDFLHSKVEAPPSEVADTLVIMTASKGVRLPEPKDKILETPQKMTEKSESKTPGEGKKEDKSRMAEPMKGYMRPTKSRGLTPLLPKSTIQEQERHKQLKSAGIARPEEGRPVVSGTGNDITTPPNKELPPSPEKKTKPLATTQPAKTSTSKAKTQPTSLPKQPAPTTIGGLNKKPMSLASGLVPAAPPKRPAVASARPSILPSKDVKPKPIADAKAPEKRASPSKPASAPASRSGSKSTQTVAKTTTAAAVASTGPSSRSPSTLLPKKPTAIKTEGKPAEVKKMTAKSVPADLSRPKSTSTSSMKKTTTLSGTAPAAGVVPSRVKATPMPSRPSTTPFIDKKPTSAKPSSTTPRLSRLATNTSAPDLKNVRSKVGSTENIKHQPGGGRAKVEKKTEAAATTRKPESNAVTKTAGPIASAQKQPAGKVQIVSKKVSYSHIQSKCGSKDNIKHVPGGGNVQIQNKKVDISKVSSKCGSKANIKHKPGGGDVKIESQKLNFKEKAQAKVGSLDNVGHLPAGGAVKTEGGGSEAPLCPGPPAGEEPAISEAAPEAGAPTSASGLNGHPTLSGGGDQREAQTLDSQIQETSI

SEQ ID NO: 51506 - protein, 828 aa, Homo sapiens
  Payload ID: 10263
  Gene Symbol: MAP4
  Gene Name: microtubule-associated protein 4
  ENSP ID: ENSP00000409731
MSLSDKQTASLTAAYGQLSKGKPAECRMDSPKEISQAGFEWQRTEGKLNEIGLNVSMDGQPKDGLVKNASFLEQNKLCFFEGKLDKELSIEMQDKDCQEASGHLESRYVISETCHPLEGNSVHQKTSEFHLGLIEGPDKNKTIPVQGKVAGKNGLETKSQSDLDFPGAADIPTRYVKEQETSVWNPSFHPVAQGSLGSREATPGEMENSITPGCPVIGVVNDNSEQLKCESPLLVSLAHPAPIIEHSPTTIPPITMVFTQEHLNASCHIRDHDKELEKLSSTEEAVLNQAPQQKKAVRRALSECSHLSVPPAVNLADKYPELPAREEPSSGLLPPPSSPMPSPTPGKLGAPAMKRSMTVGEEQTASYKLSPGKLPILSTKEIPPFICEEPVAKKREELAHFSNSSSNSGKKELGTAGLYLHSKLEQIPEGSSKEKGQEDFSETRIDSCSQVCQRGEKQPGQTALAGKKEIEVTATQSTPSFLFEKPPRDGIARPEEGRPVVSGTGNDITTPPNKELPPSPEKKTKPIADAKAPEKRASPSKPASAPASRSGSKSTQTVAKTTTAAAVASTGPSSRSPSTLLPKKPTADLSRPKSTSTSSMKKTTTLSGTAPAAGVVPSRVKATPMPSRPSTTPFIDKKPTSAKPSSTTPRLSRLATNTSAPDLKNVRSKVGSTENIKHQPGGGRVQIVSKKVSYSHIQSKCGSKDNIKHVPGGGNVQIQNKKVDISKVSSKCGSKANIKHKPGGGDVKIESQKLNFKEKAQAKVGSLDNVGHLPAGGAVKIETYRLTFRANARARTDHGADIVSRPPHFPGGPNSGSRVLGPLSRAVH

SEQ ID NO: 51507 - protein, 283 aa, Homo sapiens
  Payload ID: 10263
  Gene Symbol: MAP4
  Gene Name: microtubule-associated protein 4
  ENSP ID: ENSP00000415689
MADLSLADALTEPSPDIEGEIKRDFIATLEAEAFDDVVGETVGKTDYIPLLDVDEKTGNSESKKKPCSETSQIEDTPSSKPTLLANGGHGVEGSDTTGSPTEFLEEKMAYQEYPNSQNWPEDTNFCFQPEQVVDPIQTGMSPCNTAVVPQGWSVEALNSPHSESFVSPEAVAEPPQPTAVPLELAKEIEMASEERPPAQALEIMMGLKTTDMAPSKETEMALAKDMALATKTEVALAKDMESPTKLDVTLAKDMQPSMESDMALVKDMELPTEKEVALVKDVR

SEQ ID NO: 51508 - protein, 493 aa, Homo sapiens
  Payload ID: 10263
  Gene Symbol: MAP4
  Gene Name: microtubule-associated protein 4
  ENSP ID: ENSP00000416743
  MOD_RES (1)..(1): Any amino acid
XKGVRLPEPKDKILETPQKMTEKSESKTPGEGKKEDKSRMAEPMKGYMRPTKSRGLTPLLPKSTIQEQERHKQLKSAGIARPEEGRPVVSGTGNDITTPPNKELPPSPEKKTKPLATTQPAKTSTSKAKTQPTSLPKQPAPTTIGGLNKKPMSLASGLVPAAPPKRPAVASARPSILPSKDVKPKPIADAKAPEKRASPSKPASAPASRSGSKSTQTVAKTTTAAAVASTGPSSRSPSTLLPKKPTAIKTEGKPAEVKKMTAKSVPADLSRPKSTSTSSMKKTTTLSGTAPAAGVVPSRVKATPMPSRPSTTPFIDKKPTSAKPSSTTPRLSRLATNTSAPDLKNVRSKVGSTENIKHQPGGGRVQIQNKKVDISKVSSKCGSKANIKHKPGGGDVKIESQKLNFKEKAQAKVGSLDNVGHLPAGGAVKTEGGGSEAPLCPGPPAGEEPAISEAAPEAGAPTSASGLNGHPTLSGGGDQREAQTLDSQIQETN

SEQ ID NO: 51509 - protein, 76 aa, Homo sapiens
  Payload ID: 10263
  Gene Symbol: MAP4
  Gene Name: microtubule-associated protein 4
  ENSP ID: ENSP00000487698
MADLSLADALTEPSPDIEGEIKRDFIATLEAEAFDDVVGETVGKTDYIPLLDVDEKTGNSESKKKPCSETSQIEDT

SEQ ID NO: 51510 - protein, 140 aa, Homo sapiens
  Payload ID: 10263
  Gene Symbol: MAP4
  Gene Name: microtubule-associated protein 4
  ENSP ID: ENSP00000487797
MADLSLADALTEPSPDIEGEIKRDFIATLEAEAFDDVVGETVGKTDYIPLLDVDEKTGNSESKKKPCSETSQIEDLPLPPHPASLSFHLPLDTPSSKPTLLANGGHGVEGSDTTGSPTEFLEEKMAYQEYPNSQNWPEDT

SEQ ID NO: 51511 - protein, 813 aa, Homo sapiens
  Payload ID: 10264
  Gene Symbol: MAP6
  Gene Name: microtubule-associated protein 6
  Uniprot ID: Q96JE9
  ENSP ID: ENSP00000307093
MAWPCITRACCIARFWNQLDKADIAVPLVFTKYSEATEHPGAPPQPPPPQQQAQPALAPPSARAVAIETQPAQGELDAVARATGPAPGPTGEREPAAGPGRSGPGPGLGSGSTSGPADSVMRQDYRAWKVQRPEPSCRPRSEYQPSDAPFERETQYQKDFRAWPLPRRGDHPWIPKPVQISAASQASAPILGAPKRRPQSQERWPVQAAAEAREQEAAPGGAGGLAAGKASGADERDTRRKAGPAWIVRRAEGLGHEQTPLPAAQAQVQATGPEAGRGRAAADALNRQIREEVASAVSSSYRNEFRAWTDIKPVKPIKAKPQYKPPDDKMVHETSYSAQFKGEASKPTTADNKVIDRRRIRSLYSEPFKEPPKVEKPSVQSSKPKKTSASHKPTRKAKDKQAVSGQAAKKKSAEGPSTTKPDDKEQSKEMNNKLAEAKESLAQPVSDSSKTQGPVATEPDKDQGSVVPGLLKGQGPMVQEPLKKQGSVVPGPPKDLGPMIPLPVKDQDHTVPEPLKNESPVISAPVKDQGPSVPVPPKNQSPMVPAKVKDQGSVVPESLKDQGPRIPEPVKNQAPMVPAPVKDEGPMVSASVKDQGPMVSAPVKDQGPIVPAPVKGEGPIVPAPVKDEGPMVSAPIKDQDPMVPEHPKDESAMATAPIKNQGSMVSEPVKNQGLVVSGPVKDQDVVVPEHAKVHDSAVVAPVKNQGPVVPESVKNQDPILPVLVKDQGPTVLQPPKNQGRIVPEPLKNQVPIVPVPLKDQDPLVPVPAKDQGPAVPEPLKTQGPRDPQLPTVSPLPRVMIPTAPHTEYIESSP

SEQ ID NO: 51512 - protein, 439 aa, Homo sapiens
  Payload ID: 10264
  Gene Symbol: MAP6
  Gene Name: microtubule-associated protein 6
  Uniprot ID: Q96JE9
  ENSP ID: ENSP00000415108
MAWPCITRACCIARFWNQLDKADIAVPLVFTKYSEATEHPGAPPQPPPPQQQAQPALAPPSARAVAIETQPAQGELDAVARATGPAPGPTGEREPAAGPGRSGPGPGLGSGSTSGPADSVMRQDYRAWKVQRPEPSCRPRSEYQPSDAPFERETQYQKDFRAWPLPRRGDHPWIPKPVQISAASQASAPILGAPKRRPQSQERWPVQAAAEAREQEAAPGGAGGLAAGKASGADERDTRRKAGPAWIVRRAEGLGHEQTPLPAAQAQVQATGPEAGRGRAAADALNRQIREEVASAVSSSYRNEFRAWTDIKPVKPIKAKPQYKPPDDKMVHETSYSAQFKGEASKPTTADNKVIDRRRIRSLYSEPFKEPPKVEKPSVQSSKPKKTSASHKPTRKAKDKQAVSGQAAKKKSAEGPSTTKPDDKEQSKEMNNKLAEAKE

SEQ ID NO: 51513 - protein, 484 aa, Homo sapiens
  Payload ID: 10264
  Gene Symbol: MAP6
  Gene Name: microtubule-associated protein 6
  Uniprot ID: Q96JE9
  ENSP ID: ENSP00000434278
MVHETSYSAQFKGEASKPTTADNKVIDRRRIRSLYSEPFKEPPKVEKPSVQSSKPKKTSASHKPTRKAKDKQAVSGQAAKKKSAEGPSTTKPDDKEQSKEMNNKLAEAKESLAQPVSDSSKTQGPVATEPDKDQGSVVPGLLKGQGPMVQEPLKKQGSVVPGPPKDLGPMIPLPVKDQDHTVPEPLKNESPVISAPVKDQGPSVPVPPKNQSPMVPAKVKDQGSVVPESLKDQGPRIPEPVKNQAPMVPAPVKDEGPMVSASVKDQGPMVSAPVKDQGPIVPAPVKGEGPIVPAPVKDEGPMVSAPIKDQDPMVPEHPKDESAMATAPIKNQGSMVSEPVKNQGLVVSGPVKDQDVVVPEHAKVHDSAVVAPVKNQGPVVPESVKNQDPILPVLVKDQGPTVLQPPKNQGRIVPEPLKNQVPIVPVPLKDQDPLVPVPAKDQGPAVPEPLKTQGPRDPQLPTVSPLPRVMIPTAPHTEYIESSP

SEQ ID NO: 51514 - protein, 749 aa, Homo sapiens
  Payload ID: 10265
  Gene Symbol: MAP7
  Gene Name: microtubule-associated protein 7
  Uniprot ID: Q14244
  ENSP ID: ENSP00000346581
MAELGAGGDGHRGGDGAVRSETAPDSYKVQDKKNASSRPASAISGQNNNHSGNKPDPPPVLRVDDRQRLARERREEREKQLAAREIVWLEREERARQHYEKHLEERKKRLEEQRQKEERRRAAVEEKRRQRLEEDKERHEAVVRRTMERSQKPKQKHNRWSWGGSLHGSPSIHSADPDRRSVSTMNLSKYVDPVISKRLSSSSATLLNSPDRARRLQLSPWESSVVNRLLTPTHSFLARSKSTAALSGEAASCSPIIMPYKAAHSRNSMDRPKLFVTPPEGSSRRRIIHGTASYKKERERENVLFLTSGTRRAVSPSNPKARQPARSRLWLPSKSLPHLPGTPRPTSSLPPGSVKAAPAQVRPPSPGNIRPVKREVKVEPEKKDPEKEPQKVANEPSLKGRAPLVKVEEATVEERTPAEPEVGPAAPAMAPAPASAPAPASAPAPAPVPTPAMVSAPSSTVNASASVKTSAGTTDPEEATRLLAEKRRLAREQREKEERERREQEELERQKREELAQRVAEERTTRREEESRRLEAEQAREKEEQLQRQAEERALREREEAERAQRQKEEEARVREEAERVRQEREKHFQREEQERLERKKRLEEIMKRTRRTEATDKKTSDQRNGDIAKGALTGGTEVSALPCTTNAPGNGKPVGSPHVVTSHQSKVTVESTPDLEKQPNENGVSVQNENFEEIINLPIGSKPSRLDVTNSESPEIPLNPILAFDDEGTLGPLPQVDGVQTQQTAEVI

SEQ ID NO: 51515 - protein, 734 aa, Homo sapiens
  Payload ID: 10265
  Gene Symbol: MAP7
  Gene Name: microtubule-associated protein 7
  Uniprot ID: Q14244
  ENSP ID: ENSP00000400790
MPGSATALRHERLKKTNARPIPLGLFTINEEDEQQKNGNSRRPKAPDSYKVQDKKNASSRPASAISGQNNNHSGNKPDPPPVLRVDDRQRLARERREEREKQLAAREIVWLEREERARQHYEKHLEERKKRLEEQRQKEERRRAAVEEKRRQRLEEDKERHEAVVRRTMERSQKPKQKHNRWSWGGSLHGSPSIHSAARRLQLSPWESSVVNRLLTPTHSFLARSKSTAALSGEAASCSPIIMPYKAAHSRNSMDRPKLFVTPPEGSSRRRIIHGTASYKKERERENVLFLTSGTRRAVSPSNPKARQPARSRLWLPSKSLPHLPGTPRPTSSLPPGSVKAAPAQVRPPSPGNIRPVKREVKVEPEKKDPEKEPQKVANEPSLKGRAPLVKVEEATVEERTPAEPEVGPAAPAMAPAPASAPAPASAPAPAPVPTPAMVSAPSSTVNASASVKTSAGTTDPEEATRLLAEKRRLAREQREKEERERREQEELERQKREELAQRVAEERTTRREEESRRLEAEQAREKEEQLQRQAEERALREREEAERAQRQKEEEARVREEAERVRQEREKHFQREEQERLERKKRLEEIMKRTRRTEATDKKTSDQRNGDIAKGALTGGTEVSALPCTTNAPGNGKPVGSPHVVTSHQSKVTVESTPDLEKQPNENGVSVQNENFEEIINLPIGSKPSRLDVTNSESPEIPLNPILAFDDEGTLGPLPQVDGVQTQQTAEVI

SEQ ID NO: 51516 - protein, 771 aa, Homo sapiens
  Payload ID: 10265
  Gene Symbol: MAP7
  Gene Name: microtubule-associated protein 7
  Uniprot ID: Q14244
  ENSP ID: ENSP00000414712
MPGSATALRHERLKKTNARPIPLGLFTINEEDEQQKNGNSRRPKAPDSYKVQDKKNASSRPASAISGQNNNHSGNKPDPPPVLRVDDRQRLARERREEREKQLAAREIVWLEREERARQHYEKHLEERKKRLEEQRQKEERRRAAVEEKRRQRLEEDKERHEAVVRRTMERSQKPKQKHNRWSWGGSLHGSPSIHSADPDRRSVSTMNLSKYVDPVISKRLSSSSATLLNSPDRARRLQLSPWESSVVNRLLTPTHSFLARSKSTAALSGEAASCSPIIMPYKAAHSRNSMDRPKLFVTPPEGSSRRRIIHGTASYKKERERENVLFLTSGTRRAVSPSNPKARQPARSRLWLPSKSLPHLPGTPRPTSSLPPGSVKAAPAQVRPPSPGNIRPVKREVKVEPEKKDPEKEPQKVANEPSLKGRAPLVKVEEATVEERTPAEPEVGPAAPAMAPAPASAPAPASAPAPAPVPTPAMVSAPSSTVNASASVKTSAGTTDPEEATRLLAEKRRLAREQREKEERERREQEELERQKREELAQRVAEERTTRREEESRRLEAEQAREKEEQLQRQAEERALREREEAERAQRQKEEEARVREEAERVRQEREKHFQREEQERLERKKRLEEIMKRTRRTEATDKKTSDQRNGDIAKGALTGGTEVSALPCTTNAPGNGKPVGSPHVVTSHQSKVTVESTPDLEKQPNENGVSVQNENFEEIINLPIGSKPSRLDVTNSESPEIPLNPILAFDDEGTLGPLPQVDGVQTQQTAEVI

SEQ ID NO: 51517 - protein, 603 aa, Homo sapiens
  Payload ID: 10265
  Gene Symbol: MAP7
  Gene Name: microtubule-associated protein 7
  Uniprot ID: Q14244
  ENSP ID: ENSP00000414879
MERSQKPKQKHNRWSWGGSLHGSPSIHSADPDRRSVSTMNLSKYVDPVISKRLSSSSATLLNSPDRARRLQLSPWESSVVNRLLTPTHSFLARSKSTAALSGEAASCSPIIMPYKAAHSRNSMDRPKLFVTPPEGSSRRRIIHGTASYKKERERENVLFLTSGTRRAVSPSNPKARQPARSRLWLPSKSLPHLPGTPRPTSSLPPGSVKAAPAQVRPPSPGNIRPVKREVKVEPEKKDPEKEPQKVANEPSLKGRAPLVKVEEATVEERTPAEPEVGPAAPAMAPAPASAPAPASAPAPAPVPTPAMVSAPSSTVNASASVKTSAGTTDPEEATRLLAEKRRLAREQREKEERERREQEELERQKREELAQRVAEERTTRREEESRRLEAEQAREKEEQLQRQAEERALREREEAERAQRQKEEEARVREEAERVRQEREKHFQREEQERLERKKRLEEIMKRTRRTEATDKKTSDQRNGDIAKGALTGGTEVSALPCTTNAPGNGKPVGSPHVVTSHQSKVTVESTPDLEKQPNENGVSVQNENFEEIINLPIGSKPSRLDVTNSESPEIPLNPILAFDDEGTLGPLPQVDGVQTQQTAEVI

SEQ ID NO: 51518 - protein, 734 aa, Homo sapiens
  Payload ID: 10265
  Gene Symbol: MAP7
  Gene Name: microtubule-associated protein 7
  Uniprot ID: Q14244
  ENSP ID: ENSP00000445737
MEDTKLYSPDSYKVQDKKNASSRPASAISGQNNNHSGNKPDPPPVLRVDDRQRLARERREEREKQLAAREIVWLEREERARQHYEKHLEERKKRLEEQRQKEERRRAAVEEKRRQRLEEDKERHEAVVRRTMERSQKPKQKHNRWSWGGSLHGSPSIHSADPDRRSVSTMNLSKYVDPVISKRLSSSSATLLNSPDRARRLQLSPWESSVVNRLLTPTHSFLARSKSTAALSGEAASCSPIIMPYKAAHSRNSMDRPKLFVTPPEGSSRRRIIHGTASYKKERERENVLFLTSGTRRAVSPSNPKARQPARSRLWLPSKSLPHLPGTPRPTSSLPPGSVKAAPAQVRPPSPGNIRPVKREVKVEPEKKDPEKEPQKVANEPSLKGRAPLVKVEEATVEERTPAEPEVGPAAPAMAPAPASAPAPASAPAPAPVPTPAMVSAPSSTVNASASVKTSAGTTDPEEATRLLAEKRRLAREQREKEERERREQEELERQKREELAQRVAEERTTRREEESRRLEAEQAREKEEQLQRQAEERALREREEAERAQRQKEEEARVREEAERVRQEREKHFQREEQERLERKKRLEEIMKRTRRTEATDKKTSDQRNGDIAKGALTGGTEVSALPCTTNAPGNGKPVGSPHVVTSHQSKVTVESTPDLEKQPNENGVSVQNENFEEIINLPIGSKPSRLDVTNSESPEIPLNPILAFDDEGTLGPLPQVDGVQTQQTAEVI

SEQ ID NO: 51519 - protein, 779 aa, Homo sapiens
  Payload ID: 10265
  Gene Symbol: MAP7
  Gene Name: microtubule-associated protein 7
  ENSP ID: ENSP00000482335
MPGSATALRHERLKKTNARPIPLGLFTINEEDEQQKNGNSRRPKAPDSYKVQDKKNASSRPASAISGQNNNHSGNKPDPPPVLRVDDRQRLARERREEREKQLAAREIVWLEREERARQHYEKHLEERKKRLEEQRQKEERRRAAVEEKRRQRLEEDKERHEAVVRRTMERSQKPKQKHNRWSWGGSLHGSPSIHSADPDRRSVSTMNLSKYVDPVISKRLSSSSATLLNSPDRARRLQLSPWESSVVNRLLTPTHSFLARSKSTAALSGEAVIPICPRSASCSPIIMPYKAAHSRNSMDRPKLFVTPPEGSSRRRIIHGTASYKKERERENVLFLTSGTRRAVSPSNPKARQPARSRLWLPSKSLPHLPGTPRPTSSLPPGSVKAAPAQVRPPSPGNIRPVKREVKVEPEKKDPEKEPQKVANEPSLKGRAPLVKVEEATVEERTPAEPEVGPAAPAMAPAPASAPAPASAPAPAPVPTPAMVSAPSSTVNASASVKTSAGTTDPEEATRLLAEKRRLAREQREKEERERREQEELERQKREELAQRVAEERTTRREEESRRLEAEQAREKEEQLQRQAEERALREREEAERAQRQKEEEARVREEAERVRQEREKHFQREEQERLERKKRLEEIMKRTRRTEATDKKTSDQRNGDIAKGALTGGTEVSALPCTTNAPGNGKPVGSPHVVTSHQSKVTVESTPDLEKQPNENGVSVQNENFEEIINLPIGSKPSRLDVTNSESPEIPLNPILAFDDEGTLGPLPQVDGVQTQQTAEVI

SEQ ID NO: 51520 - protein, 712 aa, Homo sapiens
  Payload ID: 10265
  Gene Symbol: MAP7
  Gene Name: microtubule-associated protein 7
  Uniprot ID: Q14244
  ENSP ID: ENSP00000482356
MAELGAGGDGHRGGDGAVRSETAPDSYKVQDKKNASSRPASAISGQNNNHSGNKPDPPPVLRVDDRQRLARERREEREKQLAAREIVWLEREERARQHYEKHLEERKKRLEEQRQKEERRRAAVEEKRRQRLEEDKERHEAVVRRTMERSQKPKQKHNRWSWGGSLHGSPSIHSAARRLQLSPWESSVVNRLLTPTHSFLARSKSTAALSGEAASCSPIIMPYKAAHSRNSMDRPKLFVTPPEGSSRRRIIHGTASYKKERERENVLFLTSGTRRAVSPSNPKARQPARSRLWLPSKSLPHLPGTPRPTSSLPPGSVKAAPAQVRPPSPGNIRPVKREVKVEPEKKDPEKEPQKVANEPSLKGRAPLVKVEEATVEERTPAEPEVGPAAPAMAPAPASAPAPASAPAPAPVPTPAMVSAPSSTVNASASVKTSAGTTDPEEATRLLAEKRRLAREQREKEERERREQEELERQKREELAQRVAEERTTRREEESRRLEAEQAREKEEQLQRQAEERALREREEAERAQRQKEEEARVREEAERVRQEREKHFQREEQERLERKKRLEEIMKRTRRTEATDKKTSDQRNGDIAKGALTGGTEVSALPCTTNAPGNGKPVGSPHVVTSHQSKVTVESTPDLEKQPNENGVSVQNENFEEIINLPIGSKPSRLDVTNSESPEIPLNPILAFDDEGTLGPLPQVDGVQTQQTAEVI

SEQ ID NO: 51521 - protein, 603 aa, Homo sapiens; identical to SEQ ID NO: 51517
  Payload ID: 10265
  Gene Symbol: MAP7
  Gene Name: microtubule-associated protein 7
  Uniprot ID: Q14244
  ENSP ID: ENSP00000482998

SEQ ID NO: 51522 - protein, 655 aa, Homo sapiens
  Payload ID: 10265
  Gene Symbol: MAP7
  Gene Name: microtubule-associated protein 7
  Uniprot ID: Q14244
  ENSP ID: ENSP00000483511
MAELGAGGDGHRGGDGAVRSETAPDSYKVQDKKNASSRPASAISGQNNNHSGNKPDPPPVLRVDDRQRLARERREEREKQLDPDRRSVSTMNLSKYVDPVISKRLSSSSATLLNSPDRARRLQLSPWESSVVNRLLTPTHSFLARSKSTAALSGEAASCSPIIMPYKAAHSRNSMDRPKLFVTPPEGSSRRRIIHGTASYKKERERENVLFLTSGTRRAVSPSNPKARQPARSRLWLPSKSLPHLPGTPRPTSSLPPGSVKAAPAQVRPPSPGNIRPVKREVKVEPEKKDPEKEPQKVANEPSLKGRAPLVKVEEATVEERTPAEPEVGPAAPAMAPAPASAPAPASAPAPAPVPTPAMVSAPSSTVNASASVKTSAGTTDPEEATRLLAEKRRLAREQREKEERERREQEELERQKREELAQRVAEERTTRREEESRRLEAEQAREKEEQLQRQAEERALREREEAERAQRQKEEEARVREEAERVRQEREKHFQREEQERLERKKRLEEIMKRTRRTEATDKKTSDQRNGDIAKGALTGGTEVSALPCTTNAPGNGKPVGSPHVVTSHQSKVTVESTPDLEKQPNENGVSVQNENFEEIINLPIGSKPSRLDVTNSESPEIPLNPILAFDDEGTLGPLPQVDGVQTQQTAEVI

SEQ ID NO: 51523 - protein, 647 aa, Homo sapiens
  Payload ID: 10266
  Gene Symbol: MAP9
  Gene Name: microtubule-associated protein 9
  Uniprot ID: Q49MG5
  ENSP ID: ENSP00000310593
MSDEVFSTTLAYTKSPKVTKRTTFQDELIRAITARSARQRSSEYSDDFDSDEIVSLGDFSDTSADENSVNKKMNDFHISDDEEKNPSKLLFLKTNKSNGNITKDEPVCAIKNEEEMAPDGCEDIVVKSFSESQNKDEEFEKDKIKMKPKPRILSIKSTSSAENNSLDTDDHFKPSPRPRSMLKKKSHMEEKDGLEDKETALSEELELHSAPSSLPTPNGIQLEAEKKAFSENLDPEDSCLTSLASSSLKQILGDSFSPGSEGNASGKDPNEEITENHNSLKSDENKENSFSADHVTTAVEKSKESQVTADDLEEEKAKAELIMDDDRTVDPLLSKSQSILISTSATASSKKTIEDRNIKNKKSTNNRASSASARLMTSEFLKKSSSKRRTPSTTTSSHYLGTLKVLDQKPSQKQSIEPDRADNIRAAVYQEWLEKKNVYLHEMHRIKRIESENLRIQNEQKKAAKREEALASFEAWKAMKEKEAKKIAAKKRLEEKNKKKTEEENAARKGEALQAFEKWKEKKMEYLKEKNRKEREYERAKKQKEEETVAEKKKDNLTAVEKWNEKKEAFFKQKEKEKINEKRKEELKRAEKKDKDKQAINEYEKWLENKEKQERIERKQKKRHSFLESEALPPWSPPSRTVFAKVF

SEQ ID NO: 51524 - protein, 190 aa, Homo sapiens
  Payload ID: 10266
  Gene Symbol: MAP9
  Gene Name: microtubule-associated protein 9
  ENSP ID: ENSP00000368550
MNDFHISDDEEKNPSKLLFLKTNKSNGNITKDEPVCAIKNEEEMAPDGCEDIVVKSFSESQNKDEEFEKDKIKMKPKPRILSIKSTSSENNSLDTDDHFKPSPRPRSMLKKKSHMEEKDGLEDKETALSEELELHSAPSSLPTPNGIQLEAEKKAFSENLDPEVSTTTKLLNCVLEFMLFYLIMKKRRRE

SEQ ID NO: 51525 - protein, 488 aa, Homo sapiens
  Payload ID: 10266
  Gene Symbol: MAP9
  Gene Name: microtubule-associated protein 9
  ENSP ID: ENSP00000394048
MSDEVFSTTLAYTKSPKVTKRTTFQDELIRAITARSARQRSSEYSDDFDSDEIVSLGDFSDTSADENSVNKKMNDFHISDDEEKNPSKLLFLKTNKSNGNITKDEPVCAIKNEEEMAPDGCEDIVVKSFSESQNKDEEFEKDKIKMKPKPRILSIKSTSSENNSLDTDDHFKPSPRPRSMLKKKSHMEEKDGLEDKETALSEELELHSAPSSLPTPNGIQLEAEKKAFSENLDPEDSCLTSLASSSLKQILGDSFSPGSEGNASGKDPNEEITENHNSLKSDENKENSFSADHVTTAVEKSKESQVTADDLEEEKAKAELIMDDDRTVDPLLSKSQSILISTSATASSKKTIEDRNIKNKKSTNNRASSASARLMTSEFLKKSSSKRRTPSTTTSSHYLGTLKVLDQKPSQKQSIEPDRADNIRAAVYQEWLEKKNVYLHEMHRIKRIESENLRIQNEQKKAAKREEALASFEAWKAMKEKEAKKIAA

SEQ ID NO: 51526 - protein, 31 aa, Homo sapiens
  Payload ID: 10266
  Gene Symbol: MAP9
  Gene Name: microtubule-associated protein 9
  ENSP ID: ENSP00000401509
MSDEVFSTTLAYTKSPKVTKRTTFQDELIRA

SEQ ID NO: 51527 - protein, 376 aa, Homo sapiens
  Payload ID: 10266
  Gene Symbol: MAP9
  Gene Name: microtubule-associated protein 9
  ENSP ID: ENSP00000413553
MSDEVFSTTLAYTKSPKVTKRTTFQDELIRAITARSARQRSSEYSDDFDSDEIVSLGDFSDTSADENSVNKKMNDFHISDDEEKNPSKLLFLKTNKSNGNITKDEPVCAIKNEEEMAPDGCEDIVVKSFSESQNKDEEFEKDKIKMKPKPRILSIKSTSSAENNSLDTDDHFKPSPRPRSMLKKKSHMEEKDGLEDKETALSEELELHSAPSSLPTPNGIQLEAEKKAFSENLDPEDSCLTSLASSSLKQILGDSFSPGSEGNASGKDPNEEITENHNSLKSDENKENSFSADHVTTAVEKSKESQVTADDLEEEKAKAELIMDDDRTVDPLLSKSQSILISTSATASSKKTIEDRNIKNKKSTNNRASSASARSG

SEQ ID NO: 51528 - protein, 33 aa, Homo sapiens
  Payload ID: 10266
  Gene Symbol: MAP9
  Gene Name: microtubule-associated protein 9
  ENSP ID: ENSP00000422989
  MOD_RES (1)..(1): Any amino acid
XKINEKRKEELKRAEKKDKDKQAINEYEKWLIE

SEQ ID NO: 51529 - protein, 623 aa, Homo sapiens
  Payload ID: 10266
  Gene Symbol: MAP9
  Gene Name: microtubule-associated protein 9
  ENSP ID: ENSP00000427402
MSDEVFSTTLAYTKSPKVTKRTTFQDELIRAITARSARQRSSEYSDDFDSDEIVSLGDFSDTSADENSVNKKMNDFHISDDEEKNPSKLLFLKTNKSNGNITKDEPVCAIKNEEEMAPDGCEDIVVKSFSESQNKDEEFEKDKIKMKPKPRILSIKSTSSAENNSLDTDDHFKPSPRPRSMLKKKSHMEEKDGLEDKETALSEELELHSAPSSLPTPNGIQLEAEKKAFSENLDPEDSCLTSLASSSLKQILGDSFSPGSEGNASGKADHVTTAVEKSKESQVTADDLEEEKAKAELIMDDDRTVDPLLSKSQSILISTSATASSKKTIEDRNIKNKKSTNNRASSASARLMTSEFLKKSSSKRRTPSTTTSSHYLGTLKVLDQKPSQKQSIEPDRADNIRAAVYQEWLEKKNVYLHEMHRIKRIESENLRIQNEQKKAAKREEALASFEAWKAMKEKEAKKIAAKKRLEEKNKKKTEEENAARKGEALQAFEKWKEKKMEYLKEKNRKEREYERAKKQKEEETVAEKKKDNLTAVEKWNEKKEAFFKQKEKEKINEKRKEELKRAEKKDKDKQAINEYEKWLENKEKQERIERKQKKRHSFLESEALPPWSPPSRTVFAKVF

SEQ ID NO: 51530 - protein, 758 aa, Homo sapiens
  Payload ID: 10267
  Gene Symbol: MAPT
  Gene Name: microtubule-associated protein tau
  Uniprot ID: P10636
  ENSP ID: ENSP00000262410
MAEPRQEFEVMEDHAGTYGLGDRKDQGGYTMHQDQEGDTDAGLKESPLQTPTEDGSEEPGSETSDAKSTPTAEDVTAPLVDEGAPGKQAAAQPHTEIPEGTTAEEAGIGDTPSLEDEAAGHVTQEPESGKVVQEGFLREPGPPGLSHQLMSGMPGAPLLPEGPREATRQPSGTGPEDTEGGRHAPELLKHQLLGDLHQEGPPLKGAGGKERPGSKEEVDEDRDVDESSPQDSPPSKASPAQDGRPPQTAAREATSIPGFPAEGAIPLPVDFLSKVSTEIPASEPDGPSVGRAKGQDAPLEFTFHVEITPNVQKEQAHSEEHLGRAAFPGAPGEGPEARGPSLGEDTKEADLPEPSEKQPAAAPRGKPVSRVPQLKARMVSKSKDGTGSDDKKAKTSTRSSAKTLKNRPCLSPKHPTPGSSDPLIQPSSPAVCPEPPSSPKYVSSVTSRTGSSGAKEMKLKGADGKTKIATPRGAAPPGQKGQANATRIPAKTPPAPKTPPSSGEPPKSGDRSGYSSPGSPGTPGSRSRTPSLPTPPTREPKKVAVVRTPPKSPSSAKSRLQTAPVPMPDLKNVKSKIGSTENLKHQPGGGKVQIINKKLDLSNVQSKCGSKDNIKHVPGGGSVQIVYKPVDLSKVTSKCGSLGNIHHKPGGGQVEVKSEKLDFKDRVQSKIGSLDNITHVPGGGNKKIETHKLTFRENAKAKTDHGAEIVYKSPVVSGDTSPRHLSNVSSTGSIDMVDSPQLATLADEVSASLAKQGL

SEQ ID NO: 51531 - protein, 441 aa, Homo sapiens
  Payload ID: 10267
  Gene Symbol: MAPT
  Gene Name: microtubule-associated protein tau
  Uniprot ID: P10636
  ENSP ID: ENSP00000303214
MAEPRQEFEVMEDHAGTYGLGDRKDQGGYTMHQDQEGDTDAGLKESPLQTPTEDGSEEPGSETSDAKSTPTAEDVTAPLVDEGAPGKQAAAQPHTEIPEGTTAEEAGIGDTPSLEDEAAGHVTQARMVSKSKDGTGSDDKKAKGADGKTKIATPRGAAPPGQKGQANATRIPAKTPPAPKTPPSSGEPPKSGDRSGYSSPGSPGTPGSRSRTPSLPTPPTREPKKVAVVRTPPKSPSSAKSRLQTAPVPMPDLKNVKSKIGSTENLKHQPGGGKVQIINKKLDLSNVQSKCGSKDNIKHVPGGGSVQIVYKPVDLSKVTSKCGSLGNIHHKPGGGQVEVKSEKLDFKDRVQSKIGSLDNITHVPGGGNKKIETHKLTFRENAKAKTDHGAEIVYKSPVVSGDTSPRHLSNVSSTGSIDMVDSPQLATLADEVSASLAKQGL

SEQ ID NO: 51532 - protein, 352 aa, Homo sapiens
  Payload ID: 10267
  Gene Symbol: MAPT
  Gene Name: microtubule-associated protein tau
  Uniprot ID: P10636
  ENSP ID: ENSP00000334886
MAEPRQEFEVMEDHAGTYGLGDRKDQGGYTMHQDQEGDTDAGLKAEEAGIGDTPSLEDEAAGHVTQARMVSKSKDGTGSDDKKAKGADGKTKIATPRGAAPPGQKGQANATRIPAKTPPAPKTPPSSGEPPKSGDRSGYSSPGSPGTPGSRSRTPSLPTPPTREPKKVAVVRTPPKSPSSAKSRLQTAPVPMPDLKNVKSKIGSTENLKHQPGGGKVQIVYKPVDLSKVTSKCGSLGNIHHKPGGGQVEVKSEKLDFKDRVQSKIGSLDNITHVPGGGNKKIETHKLTFRENAKAKTDHGAEIVYKSPVVSGDTSPRHLSNVSSTGSIDMVDSPQLATLADEVSASLAKQGL

SEQ ID NO: 51533 - protein, 412 aa, Homo sapiens
  Payload ID: 10267
  Gene Symbol: MAPT
  Gene Name: microtubule-associated protein tau
  Uniprot ID: P10636
  ENSP ID: ENSP00000340438
MAEPRQEFEVMEDHAGTYGLGDRKDQGGYTMHQDQEGDTDAGLKESPLQTPTEDGSEEPGSETSDAKSTPTAEAEEAGIGDTPSLEDEAAGHVTQARMVSKSKDGTGSDDKKAKGADGKTKIATPRGAAPPGQKGQANATRIPAKTPPAPKTPPSSGEPPKSGDRSGYSSPGSPGTPGSRSRTPSLPTPPTREPKKVAVVRTPPKSPSSAKSRLQTAPVPMPDLKNVKSKIGSTENLKHQPGGGKVQIINKKLDLSNVQSKCGSKDNIKHVPGGGSVQIVYKPVDLSKVTSKCGSLGNIHHKPGGGQVEVKSEKLDFKDRVQSKIGSLDNITHVPGGGNKKIETHKLTFRENAKAKTDHGAEIVYKSPVVSGDTSPRHLSNVSSTGSIDMVDSPQLATLADEVSASLAKQGL

SEQ ID NO: 51534 - protein, 776 aa, Homo sapiens
  Payload ID: 10267
  Gene Symbol: MAPT
  Gene Name: microtubule-associated protein tau
  Uniprot ID: P10636
  ENSP ID: ENSP00000340820
MAEPRQEFEVMEDHAGTYGLGDRKDQGGYTMHQDQEGDTDAGLKESPLQTPTEDGSEEPGSETSDAKSTPTAEDVTAPLVDEGAPGKQAAAQPHTEIPEGTTAEEAGIGDTPSLEDEAAGHVTQEPESGKVVQEGFLREPGPPGLSHQLMSGMPGAPLLPEGPREATRQPSGTGPEDTEGGRHAPELLKHQLLGDLHQEGPPLKGAGGKERPGSKEEVDEDRDVDESSPQDSPPSKASPAQDGRPPQTAAREATSIPGFPAEGAIPLPVDFLSKVSTEIPASEPDGPSVGRAKGQDAPLEFTFHVEITPNVQKEQAHSEEHLGRAAFPGAPGEGPEARGPSLGEDTKEADLPEPSEKQPAAAPRGKPVSRVPQLKARMVSKSKDGTGSDDKKAKTSTRSSAKTLKNRPCLSPKHPTPGSSDPLIQPSSPAVCPEPPSSPKYVSSVTSRTGSSGAKEMKLKGADGKTKIATPRGAAPPGQKGQANATRIPAKTPPAPKTPPSSATKQVQRRPPPAGPRSERGEPPKSGDRSGYSSPGSPGTPGSRSRTPSLPTPPTREPKKVAVVRTPPKSPSSAKSRLQTAPVPMPDLKNVKSKIGSTENLKHQPGGGKVQIINKKLDLSNVQSKCGSKDNIKHVPGGGSVQIVYKPVDLSKVTSKCGSLGNIHHKPGGGQVEVKSEKLDFKDRVQSKIGSLDNITHVPGGGNKKIETHKLTFRENAKAKTDHGAEIVYKSPVVSGDTSPRHLSNVSSTGSIDMVDSPQLATLADEVSASLAKQGL

SEQ ID NO: 51535 - protein, 410 aa, Homo sapiens
  Payload ID: 10267
  Gene Symbol: MAPT
  Gene Name: microtubule-associated protein tau
  Uniprot ID: P10636
  ENSP ID: ENSP00000389250
MAEPRQEFEVMEDHAGTYGLGDRKDQGGYTMHQDQEGDTDAGLKESPLQTPTEDGSEEPGSETSDAKSTPTAEDVTAPLVDEGAPGKQAAAQPHTEIPEGTTAEEAGIGDTPSLEDEAAGHVTQARMVSKSKDGTGSDDKKAKGADGKTKIATPRGAAPPGQKGQANATRIPAKTPPAPKTPPSSGEPPKSGDRSGYSSPGSPGTPGSRSRTPSLPTPPTREPKKVAVVRTPPKSPSSAKSRLQTAPVPMPDLKNVKSKIGSTENLKHQPGGGKVQIVYKPVDLSKVTSKCGSLGNIHHKPGGGQVEVKSEKLDFKDRVQSKIGSLDNITHVPGGGNKKIETHKLTFRENAKAKTDHGAEIVYKSPVVSGDTSPRHLSNVSSTGSIDMVDSPQLATLADEVSASLAKQGL

SEQ ID NO: 51536 - protein, 383 aa, Homo sapiens
  Payload ID: 10267
  Gene Symbol: MAPT
  Gene Name: microtubule-associated protein tau
  Uniprot ID: P10636
  ENSP ID: ENSP00000408975
MAEPRQEFEVMEDHAGTYGLGDRKDQGGYTMHQDQEGDTDAGLKAEEAGIGDTPSLEDEAAGHVTQARMVSKSKDGTGSDDKKAKGADGKTKIATPRGAAPPGQKGQANATRIPAKTPPAPKTPPSSGEPPKSGDRSGYSSPGSPGTPGSRSRTPSLPTPPTREPKKVAVVRTPPKSPSSAKSRLQTAPVPMPDLKNVKSKIGSTENLKHQPGGGKVQIINKKLDLSNVQSKCGSKDNIKHVPGGGSVQIVYKPVDLSKVTSKCGSLGNIHHKPGGGQVEVKSEKLDFKDRVQSKIGSLDNITHVPGGGNKKIETHKLTFRENAKAKTDHGAEIVYKSPVVSGDTSPRHLSNVSSTGSIDMVDSPQLATLADEVSASLAKQGL

SEQ ID NO: 51537 - protein, 776 aa, Homo sapiens; identical to SEQ ID NO: 51534
  Payload ID: 10267
  Gene Symbol: MAPT
  Gene Name: microtubule-associated protein tau
  Uniprot ID: P10636
  ENSP ID: ENSP00000410838

SEQ ID NO: 51538 - protein, 412 aa, Homo sapiens; identical to SEQ ID NO: 51533
  Payload ID: 10267
  Gene Symbol: MAPT
  Gene Name: microtubule-associated protein tau
  Uniprot ID: P10636
  ENSP ID: ENSP00000413056

SEQ ID NO: 51539 - protein, 410 aa, Homo sapiens; identical to SEQ ID NO: 51535
  Payload ID: 10267
  Gene Symbol: MAPT
  Gene Name: microtubule-associated protein tau
  Uniprot ID: P10636
  ENSP ID: ENSP00000443028

SEQ ID NO: 51540 - protein, 758 aa, Homo sapiens; identical to SEQ ID NO: 51530
  Payload ID: 10267
  Gene Symbol: MAPT
  Gene Name: microtubule-associated protein tau
  Uniprot ID: P10636
  ENSP ID: ENSP00000458742

SEQ ID NO: 51541 - protein, 59 aa, Homo sapiens
  Payload ID: 10267
  Gene Symbol: MAPT
  Gene Name: microtubule-associated protein tau
  ENSP ID: ENSP00000460048
MAEPRQEFEVMEDHAGTYGLGDRKDQGGYTMHQDQEGDTDAGLKEGSEFTELRAEEPLI

SEQ ID NO: 51542 - protein, 441 aa, Homo sapiens; identical to SEQ ID NO: 51531
  Payload ID: 10267
  Gene Symbol: MAPT
  Gene Name: microtubule-associated protein tau
  Uniprot ID: P10636
  ENSP ID: ENSP00000460965

SEQ ID NO: 51543 - protein, 441 aa, Homo sapiens; identical to SEQ ID NO: 51531
  Payload ID: 10267
  Gene Symbol: MAPT
  Gene Name: microtubule-associated protein tau
  Uniprot ID: P10636
  ENSP ID: ENSP00000477703

SEQ ID NO: 51544 - protein, 412 aa, Homo sapiens; identical to SEQ ID NO: 51533
  Payload ID: 10267
  Gene Symbol: MAPT
  Gene Name: microtubule-associated protein tau
  Uniprot ID: P10636
  ENSP ID: ENSP00000478602

SEQ ID NO: 51545 - protein, 383 aa, Homo sapiens; identical to SEQ ID NO: 51536
  Payload ID: 10267
  Gene Symbol: MAPT
  Gene Name: microtubule-associated protein tau
  Uniprot ID: P10636
  ENSP ID: ENSP00000479142

SEQ ID NO: 51546 - protein, 776 aa, Homo sapiens
  Payload ID: 10267
  Gene Symbol: MAPT
  Gene Name: microtubule-associated protein tau
  ENSP ID: ENSP00000480217
MAEPRQEFEVMEDHAGTYGLGDRKDQGGYTMHQDQEGDTDAGLKESPLQTPTEDGSEEPGSETSDAKSTPTAEDVTAPLVDEGAPGKQAAAQPHTEIPEGTTAEEAGIGDTPSLEDEAAGHVTQEPESGKVVQEGFLREPGPPGLSHQLMSGMPGAPLLPEGPREATRQPSGTGPEDTEGGRHAPELLKHQLLGDLHQEGPPLKGAGGKERPGSKEEVDEDRDVDESSPQDSPPSKASPAQDGRPPQTAAREATSIPGFPAEGAIPLPVDFLSKVSTEIPASEPDGPSVGRAKGQDAPLEFTFHVEITPNVQKEQAHSEEHLGRAAFPGAPGEGPEARGPSLGEDTKEADLPEPSEKQPAAAPRGKPVSRVPQLKARMVSKSKDGTGSDDKKAKTSTRSSAKTLKNRPCLSPKHPTPGSSDPLIQPSSPAVCPEPPSSPKHVSSVTSRTGSSGAKEMKLKGADGKTKIATPRGAAPPGQKGQANATRIPAKTPPAPKTPPSSATKQVQRRPPPAGPRSERGEPPKSGDRSGYSSPGSPGTPGSRSRTPSLPTPPTREPKKVAVVRTPPKSPSSAKSRLQTAPVPMPDLKNVKSKIGSTENLKHQPGGGKVQIINKKLDLSNVQSKCGSKDNIKHVPGGGSVQIVYKPVDLSKVTSKCGSLGNIHHKPGGGQVEVKSEKLDFKDRVQSKIGSLDNITHVPGGGNKKIETHKLTFRENAKAKTDHGAEIVYKSPVVSGDTSPRHLSNVSSTGSIDMVDSPQLATLADEVSASLAKQGL

SEQ ID NO: 51547 - protein, 410 aa, Homo sapiens; identical to SEQ ID NO: 51535
  Payload ID: 10267
  Gene Symbol: MAPT
  Gene Name: microtubule-associated protein tau
  Uniprot ID: P10636
  ENSP ID: ENSP00000481769

SEQ ID NO: 51548 - protein, 383 aa, Homo sapiens; identical to SEQ ID NO: 51536
  Payload ID: 10267
  Gene Symbol: MAPT
  Gene Name: microtubule-associated protein tau
  Uniprot ID: P10636
  ENSP ID: ENSP00000482244

SEQ ID NO: 51549 - protein, 758 aa, Homo sapiens
  Payload ID: 10267
  Gene Symbol: MAPT
  Gene Name: microtubule-associated protein tau
  ENSP ID: ENSP00000483396
MAEPRQEFEVMEDHAGTYGLGDRKDQGGYTMHQDQEGDTDAGLKESPLQTPTEDGSEEPGSETSDAKSTPTAEDVTAPLVDEGAPGKQAAAQPHTEIPEGTTAEEAGIGDTPSLEDEAAGHVTQEPESGKVVQEGFLREPGPPGLSHQLMSGMPGAPLLPEGPREATRQPSGTGPEDTEGGRHAPELLKHQLLGDLHQEGPPLKGAGGKERPGSKEEVDEDRDVDESSPQDSPPSKASPAQDGRPPQTAAREATSIPGFPAEGAIPLPVDFLSKVSTEIPASEPDGPSVGRAKGQDAPLEFTFHVEITPNVQKEQAHSEEHLGRAAFPGAPGEGPEARGPSLGEDTKEADLPEPSEKQPAAAPRGKPVSRVPQLKARMVSKSKDGTGSDDKKAKTSTRSSAKTLKNRPCLSPKHPTPGSSDPLIQPSSPAVCPEPPSSPKHVSSVTSRTGSSGAKEMKLKGADGKTKIATPRGAAPPGQKGQANATRIPAKTPPAPKTPPSSGEPPKSGDRSGYSSPGSPGTPGSRSRTPSLPTPPTREPKKVAVVRTPPKSPSSAKSRLQTAPVPMPDLKNVKSKIGSTENLKHQPGGGKVQIINKKLDLSNVQSKCGSKDNIKHVPGGGSVQIVYKPVDLSKVTSKCGSLGNIHHKPGGGQVEVKSEKLDFKDRVQSKIGSLDNITHVPGGGNKKIETHKLTFRENAKAKTDHGAEIVYKSPVVSGDTSPRHLSNVSSTGSIDMVDSPQLATLADEVSASLAKQGL

SEQ ID NO: 51550 - protein, 412 aa, Homo sapiens; identical to SEQ ID NO: 51533
  Payload ID: 10267
  Gene Symbol: MAPT
  Gene Name: microtubule-associated protein tau
  Uniprot ID: P10636
  ENSP ID: ENSP00000483784

SEQ ID NO: 51551 - protein, 410 aa, Homo sapiens; identical to SEQ ID NO: 51535
  Payload ID: 10267
  Gene Symbol: MAPT
  Gene Name: microtubule-associated protein tau
  Uniprot ID: P10636
  ENSP ID: ENSP00000484321

SEQ ID NO: 51552 - protein, 441 aa, Homo sapiens; identical to SEQ ID NO: 51531
  Payload ID: 10267
  Gene Symbol: MAPT
  Gene Name: microtubule-associated protein tau
  Uniprot ID: P10636
  ENSP ID: ENSP00000484491

SEQ ID NO: 51553 - protein, 59 aa, Homo sapiens; identical to SEQ ID NO: 51541
  Payload ID: 10267
  Gene Symbol: MAPT
  Gene Name: microtubule-associated protein tau
  ENSP ID: ENSP00000485831

SEQ ID NO: 51554 - protein, 758 aa, Homo sapiens
  Payload ID: 10267
  Gene Symbol: MAPT
  Gene Name: microtubule-associated protein tau
  ENSP ID: ENSP00000485913
MAEPRQEFEVMEDHAGTYGLGDRKDQGGYTMHQDQEGDTDAGLKESPLQTPTEDGSEEPGSETSDAKSTPTAEDVTAPLVDEGAPGKQAAAQPHTEIPEGTTAEEAGIGDTPSLEDEAAGHVTQEPESGKVVQEGFLREPGPPGLSHQLMSGMPGAPLLPEGPREATRQPSGTGPEDTEGGRHAPELLKHQLLGDLHQEGPLLKGAGGKERPGSKEEVDEDRDVDESSPQDSPPSKASPAQDGRPPQTAAREATSIPGFPAEGAIPLPVDFLSKVSTEIPASEPNGPSAGRAKGQDAPLEFTFHVEITPNVQKEQAHSEEHLGRAAFPGAPGEGPEARGPSLGEDTKEADLPEPSEKQPAAAPRGKPVSWVPQLKARMVSKSKDGTGSDDKKAKTSTRSSAKTLKNRPCLSPKHPTPGSSDPLIQPSSPAVCPEPPSSPKYVSSVTPRTGSSGAKEMKLKGADGKTKIATPRGAAPPGQKGQANATRIPAKTPPAPKTPPSSGEPPKSGDRSGYSSPGSPGTPGSRSRTPSLPTPPTREPKKVAVVRTPPKSPSSAKSRLQTAPVPMPDLKNVKSKIGSTENLKHQPGGGKVQIINKKLDLSNVQSKCGSKDNIKHVPGGGSVQIVYKPVDLSKVTSKCGSLGNIHHKPGGGQVEVKSEKLDFKDRVQSKIGSLDNITHVPGGGNKKIETHKLTFRENAKAKTDHGAEIVYKSPVVSGDTSPRHLSNVSSTGSIDMVDSPQLATLADEVSASLAKQGL

SEQ ID NO: 51555 - protein, 383 aa, Homo sapiens; identical to SEQ ID NO: 51536
  Payload ID: 10267
  Gene Symbol: MAPT
  Gene Name: microtubule-associated protein tau
  Uniprot ID: P10636
  ENSP ID: ENSP00000486039

SEQ ID NO: 51556 - protein, 776 aa, Homo sapiens
  Payload ID: 10267
  Gene Symbol: MAPT
  Gene Name: microtubule-associated protein tau
  ENSP ID: ENSP00000487403
MAEPRQEFEVMEDHAGTYGLGDRKDQGGYTMHQDQEGDTDAGLKESPLQTPTEDGSEEPGSETSDAKSTPTAEDVTAPLVDEGAPGKQAAAQPHTEIPEGTTAEEAGIGDTPSLEDEAAGHVTQEPESGKVVQEGFLREPGPPGLSHQLMSGMPGAPLLPEGPREATRQPSGTGPEDTEGGRHAPELLKHQLLGDLHQEGPLLKGAGGKERPGSKEEVDEDRDVDESSPQDSPPSKASPAQDGRPPQTAAREATSIPGFPAEGAIPLPVDFLSKVSTEIPASEPNGPSAGRAKGQDAPLEFTFHVEITPNVQKEQAHSEEHLGRAAFPGAPGEGPEARGPSLGEDTKEADLPEPSEKQPAAAPRGKPVSWVPQLKARMVSKSKDGTGSDDKKAKTSTRSSAKTLKNRPCLSPKHPTPGSSDPLIQPSSPAVCPEPPSSPKYVSSVTPRTGSSGAKEMKLKGADGKTKIATPRGAAPPGQKGQANATRIPAKTPPAPKTPPSSATKQVQRRPPPAGPRSERGEPPKSGDRSGYSSPGSPGTPGSRSRTPSLPTPPTREPKKVAVVRTPPKSPSSAKSRLQTAPVPMPDLKNVKSKIGSTENLKHQPGGGKVQIINKKLDLSNVQSKCGSKDNIKHVPGGGSVQIVYKPVDLSKVTSKCGSLGNIHHKPGGGQVEVKSEKLDFKDRVQSKIGSLDNITHVPGGGNKKIETHKLTFRENAKAKTDHGAEIVYKSPVVSGDTSPRHLSNVSSTGSIDMVDSPQLATLADEVSASLAKQGL

SEQ ID NO: 51557 - protein, 352 aa, Homo sapiens; identical to SEQ ID NO: 51532
  Payload ID: 10267
  Gene Symbol: MAPT
  Gene Name: microtubule-associated protein tau
  Uniprot ID: P10636
  ENSP ID: ENSP00000487570

SEQ ID NO: 51558 - protein, 59 aa, Homo sapiens; identical to SEQ ID NO: 51541
  Payload ID: 10267
  Gene Symbol: MAPT
  Gene Name: microtubule-associated protein tau
  ENSP ID: ENSP00000487613

SEQ ID NO: 51559 - protein, 441 aa, Homo sapiens; identical to SEQ ID NO: 51531
  Payload ID: 10267
  Gene Symbol: MAPT
  Gene Name: microtubule-associated protein tau
  Uniprot ID: P10636
  ENSP ID: ENSP00000487819

SEQ ID NO: 51560 - protein, 412 aa, Homo sapiens; identical to SEQ ID NO: 51533
  Payload ID: 10267
  Gene Symbol: MAPT
  Gene Name: microtubule-associated protein tau
  Uniprot ID: P10636
  ENSP ID: ENSP00000487837

SEQ ID NO: 51561 - protein, 776 aa, Homo sapiens; identical to SEQ ID NO: 51546
  Payload ID: 10267
  Gene Symbol: MAPT
  Gene Name: microtubule-associated protein tau
  ENSP ID: ENSP00000488046

SEQ ID NO: 51562 - protein, 758 aa, Homo sapiens; identical to SEQ ID NO: 51549
  Payload ID: 10267
  Gene Symbol: MAPT
  Gene Name: microtubule-associated protein tau
  ENSP ID: ENSP00000488081

SEQ ID NO: 51563 - protein, 341 aa, Homo sapiens
  Payload ID: 10267
  Gene Symbol: MAPT
  Gene Name: microtubule-associated protein tau
  ENSP ID: ENSP00000488101
MFKGKCPKVQRAWFLVNNNCLAFTPLHLLTHTPAEEAGIGDTPSLEDEAAGHVTQARMVSKSKDGTGSDDKKAKGADGKTKIATPRGAAPPGQKGQANATRIPAKTPPAPKTPPSSGEPPKSGDRSGYSSPGSPGTPGSRSRTPSLPTPPTREPKKVAVVRTPPKSPSSAKSRLQTAPVPMPDLKNVKSKIGSTENLKHQPGGGKVQIVYKPVDLSKVTSKCGSLGNIHHKPGGGQVEVKSEKLDFKDRVQSKIGSLDNITHVPGGGNKKIETHKLTFRENAKAKTDHGAEIVYKSPVVSGDTSPRHLSNVSSTGSIDMVDSPQLATLADEVSASLAKQGL

SEQ ID NO: 51564 - protein, 352 aa, Homo sapiens; identical to SEQ ID NO: 51532
  Payload ID: 10267
  Gene Symbol: MAPT
  Gene Name: microtubule-associated protein tau
  Uniprot ID: P10636
  ENSP ID: ENSP00000488245

SEQ ID NO: 51565 - protein, 410 aa, Homo sapiens; identical to SEQ ID NO: 51535
  Payload ID: 10267
  Gene Symbol: MAPT
  Gene Name: microtubule-associated protein tau
  Uniprot ID: P10636
  ENSP ID: ENSP00000488373

SEQ ID NO: 51566 - protein, 268 aa, Homo sapiens
  Payload ID: 10268
  Gene Symbol: MAPRE1
  Gene Name: microtubule-associated protein, RP/EB family, member 1
  Uniprot ID: Q15691
  ENSP ID: ENSP00000364721
MAVNVYSTSVTSDNLSRHDMLAWINESLQLNLTKIEQLCSGAAYCQFMDMLFPGSIALKKVKFQAKLEHEYIQNFKILQAGFKRMGVDKIIPVDKLVKGKFQDNFEFVQWFKKFFDANYDGKDYDPVAARQGQETAVAPSLVAPALNKPKKPLTSSSAAPQRPISTQRTAAAPKAGPGVVRKNPGVGNGDDEAAELMQQVNVLKLTVEDLEKERDFYFGKLRNIELICQENEGENDPVLQRIVDILYATDEGFVIPDEGGPQEEQEEY

SEQ ID NO: 51567 - protein, 327 aa, Homo sapiens
  Payload ID: 10269
  Gene Symbol: MAPRE2
  Gene Name: microtubule-associated protein, RP/EB family, member 2
  Uniprot ID: Q15555
  ENSP ID: ENSP00000300249
MPGPTQTLSPNGENNNDIIQDNNGTIIPFRKHTVRGERSYSWGMAVNVYSTSITQETMSRHDIIAWVNDIVSLNYTKVEQLCSGAAYCQFMDMLFPGCISLKKVKFQAKLEHEYIHNFKLLQASFKRMNVDKVIPVEKLVKGRFQDNLDFIQWFKKFYDANYDGKEYDPVEARQGQDAIPPPDPGEQIFNLPKKSHHANSPTAGAAKSSPAAKPGSTPSRPSSAKRASSSGSASKSDKDLETQVIQLNEQVHSLKLALEGVEKERDFYFGKLREIELLCQEHGQENDDLVQRLMDILYASEEHEGHTEEPEAEEQAHEQQPPQQEEY

SEQ ID NO: 51568 - protein, 284 aa, Homo sapiens
  Payload ID: 10269
  Gene Symbol: MAPRE2
  Gene Name: microtubule-associated protein, RP/EB family, member 2
  Uniprot ID: Q15555
  ENSP ID: ENSP00000396074
MAVNVYSTSITQETMSRHDIIAWVNDIVSLNYTKVEQLCSGAAYCQFMDMLFPGCISLKKVKFQAKLEHEYIHNFKLLQASFKRMNVDKVIPVEKLVKGRFQDNLDFIQWFKKFYDANYDGKEYDPVEARQGQDAIPPPDPGEQIFNLPKKSHHANSPTAGAAKSSPAAKPGSTPSRPSSAKRASSSGSASKSDKDLETQVIQLNEQVHSLKLALEGVEKERDFYFGKLREIELLCQEHGQENDDLVQRLMDILYASEEHEGHTEEPEAEEQAHEQQPPQQEEY

SEQ ID NO: 51569 - protein, 315 aa, Homo sapiens
  Payload ID: 10269
  Gene Symbol: MAPRE2
  Gene Name: microtubule-associated protein, RP/EB family, member 2
  Uniprot ID: Q15555
  ENSP ID: ENSP00000407723
MKQNRDQKCPVSQRNSSFQQPGRKPGCSSWGMAVNVYSTSITQETMSRHDIIAWVNDIVSLNYTKVEQLCSGAAYCQFMDMLFPGCISLKKVKFQAKLEHEYIHNFKLLQASFKRMNVDKVIPVEKLVKGRFQDNLDFIQWFKKFYDANYDGKEYDPVEARQGQDAIPPPDPGEQIFNLPKKSHHANSPTAGAAKSSPAAKPGSTPSRPSSAKRASSSGSASKSDKDLETQVIQLNEQVHSLKLALEGVEKERDFYFGKLREIELLCQEHGQENDDLVQRLMDILYASEEHEGHTEEPEAEEQAHEQQPPQQEEY

SEQ ID NO: 51570 - protein, 274 aa, Homo sapiens
  Payload ID: 10269
  Gene Symbol: MAPRE2
  Gene Name: microtubule-associated protein, RP/EB family, member 2
  Uniprot ID: Q15555
  ENSP ID: ENSP00000446343
MARTTTTSSRIITGPSFLSGSTQCAGSVPTGAAYCQFMDMLFPGCISLKKVKFQAKLEHEYIHNFKLLQASFKRMNVDKVIPVEKLVKGRFQDNLDFIQWFKKFYDANYDGKEYDPVEARQGQDAIPPPDPGEQIFNLPKKSHHANSPTAGAAKSSPAAKPGSTPSRPSSAKRASSSGSASKSDKDLETQVIQLNEQVHSLKLALEGVEKERDFYFGKLREIELLCQEHGQENDDLVQRLMDILYASEEHEGHTEEPEAEEQAHEQQPPQQEEY

SEQ ID NO: 51571 - protein, 284 aa, Homo sapiens; identical to SEQ ID NO: 51568
  Payload ID: 10269
  Gene Symbol: MAPRE2
  Gene Name: microtubule-associated protein, RP/EB family, member 2
  Uniprot ID: Q15555
  ENSP ID: ENSP00000464921

SEQ ID NO: 51572 - protein, 134 aa, Homo sapiens
  Payload ID: 10269
  Gene Symbol: MAPRE2
  Gene Name: microtubule-associated protein, RP/EB family, member 2
  ENSP ID: ENSP00000465939
MTSLHGLKKVKFQAKLEHEYIHNFKLLQASFKRMNVDKVIPVEKLVKGRFQDNLDFIQWFKKFYDANYDGKEYDPVEARQGQDAIPPPDPGEQIFNLPKKSHHANSPTAGAAKSSPAAKPGSTPSRPSSAKRAS

SEQ ID NO: 51573 - protein, 78 aa, Homo sapiens
  Payload ID: 10269
  Gene Symbol: MAPRE2
  Gene Name: microtubule-associated protein, RP/EB family, member 2
  ENSP ID: ENSP00000466871
MAVNVYSTSITQETMSRHDIIAWVNDIVSLNYTKVEQLCSGAAYCQFMDMLFPGCISLKKVKFQAKLEHEYIHNFKLL

SEQ ID NO: 51574 - protein, 194 aa, Homo sapiens
  Payload ID: 10269
  Gene Symbol: MAPRE2
  Gene Name: microtubule-associated protein, RP/EB family, member 2
  ENSP ID: ENSP00000468216
MAVNVYSTSITQETMSRHDIIAWVNDIVSLNYTKVEQLCSGAAYCQFMDMLFPGCISLKKVKFQAKLEHEYIHNFKLLQASFKRMNVDKVIPVEKLVKGRFQDNLDFIQWFKKFYDANYDGKEYDPVEARQGQDAIPPPDPGEQIFNLPKKSHHANSPTAGAAKSSPAAKPGSTPSRPSSAKRASSSGSASKSD

SEQ ID NO: 51575 - protein, 259 aa, Homo sapiens
  Payload ID: 10269
  Gene Symbol: MAPRE2
  Gene Name: microtubule-associated protein, RP/EB family, member 2
  Uniprot ID: Q15555
  ENSP ID: ENSP00000468588
MPGPTQTLSPNGENNNDIIQDNNGTIIPFRKHTVRGERSYSWGMAVNVYSTSITQETMSRHDIIAWVNDIVSLNYTKVEQLCSGAAYCQFMDMLFPGCISLKKVKFQAKLEHEYIHNFKLLQASFKRMNVDKVIPVEKLVKGRFQDNLDFIQWFKKFYDANYDGKEYDPVEARQGQDAIPPPDPGEQIFNLPKKSHHANSPTAGAAKSSPAAKPGSTPSRPSSAKRASSSGSASKSDKDLETQVIQLNEQVMHQLWPRL

SEQ ID NO: 51576 - protein, 127 aa, Homo sapiens
  Payload ID: 10269
  Gene Symbol: MAPRE2
  Gene Name: microtubule-associated protein, RP/EB family, member 2
  ENSP ID: ENSP00000468904
MAVNVYSTSITQETMSRHDIIAWVNDIVSLNYTKVEQLCSGAAYCQFMDMLFPGCISLKKVKFQAKLEHEYIHNFKLLQASFKRMNVDKVIPVEKLVKGRFQDNLDFIQWFKKFYDANYDGKEYDPV

SEQ ID NO: 51577 - protein, 281 aa, Homo sapiens
  Payload ID: 10270
  Gene Symbol: MAPRE3
  Gene Name: microtubule-associated protein, RP/EB family, member 3
  Uniprot ID: Q9UPY8
  ENSP ID: ENSP00000233121
MAVNVYSTSVTSENLSRHDMLAWVNDSLHLNYTKIEQLCSGAAYCQFMDMLFPGCVHLRKVKFQAKLEHEYIHNFKVLQAAFKKMGVDKIIPVEKLVKGKFQDNFEFIQWFKKFFDANYDGKDYNPLLARQGQDVAPPPNPGDQIFNKSKKLIGTAVPQRTSPTGPKNMQTSGRLSNVAPPCILRKNPPSARNGGHETDAQILELNQQLVDLKLTVDGLEKERDFYFSKLRDIELICQEHESENSPVISGIIGILYATEEGFAPPEDDEIEEHQQEDQDEY

SEQ ID NO: 51578 - protein, 266 aa, Homo sapiens
  Payload ID: 10270
  Gene Symbol: MAPRE3
  Gene Name: microtubule-associated protein, RP/EB family, member 3
  Uniprot ID: Q9UPY8
  ENSP ID: ENSP00000383915
MAVNVYSTSVTSENLSRHDMLAWVNDSLHLNYTKIEQLCSGAAYCQFMDMLFPGCVHLRKVKFQAKLEHEYIHNFKVLQAAFKKMGVDKIIPVEKLVKGKFQDNFEFIQWFKKFFDANYDGKDYNPLLARQGQDVAPPPNPVPQRTSPTGPKNMQTSGRLSNVAPPCILRKNPPSARNGGHETDAQILELNQQLVDLKLTVDGLEKERDFYFSKLRDIELICQEHESENSPVISGIIGILYATEEGFAPPEDDEIEEHQQEDQDEY

SEQ ID NO: 51579 - protein, 266 aa, Homo sapiens; identical to SEQ ID NO: 51578
  Payload ID: 10270
  Gene Symbol: MAPRE3
  Gene Name: microtubule-associated protein, RP/EB family, member 3
  Uniprot ID: Q9UPY8
  ENSP ID: ENSP00000385715

SEQ ID NO: 51580 - protein, 218 aa, Homo sapiens
  Payload ID: 10270
  Gene Symbol: MAPRE3
  Gene Name: microtubule-associated protein, RP/EB family, member 3
  ENSP ID: ENSP00000391705
MAVNVYSTSVTSENLSRHDMLAWVNDSLHLNYTKIEQLCSGAAYCQFMDMLFPGCVHLRKVKFQAKLEHEYIHNFKVLQAAFKKMGVDKIIPVEKLVKGKFQDNFEFIQWFKKFFDANYDGKDYNPLLARQGQDVAPPPNPGDQIFNKSKKLIGTAVPQRTSPTGPKNMQTSGRLSNVAPPCILRKNPPSARNGGHETDAQILELNQQLVDLKLTVDG

SEQ ID NO: 51581 - protein, 183 aa, Homo sapiens
  Payload ID: 10271
  Gene Symbol: MID1IP1
  Gene Name: MID1 interacting protein 1
  Uniprot ID: Q9NPA3
  ENSP ID: ENSP00000338706
MMQICDTYNQKHSLFNAMNRFIGAVNNMDQTVMVPSLLRDVPLADPGLDNDVGVEVGGSGGCLEERTPPVPDSGSANGSFFAPSRDMYSHYVLLKSIRNDIEWGVLHQPPPPAGSEEGSAWKSKDILVDLGHLEGADAGEEDLEQQFHYHLRGLHTVLSKLTRKANILTNRYKQEIGFGNWGH

SEQ ID NO: 51582 - protein, 183 aa, Homo sapiens; identical to SEQ ID NO: 51581
  Payload ID: 10271
  Gene Symbol: MID1IP1
  Gene Name: MID1 interacting protein 1
  Uniprot ID: Q9NPA3
  ENSP ID: ENSP00000367735

SEQ ID NO: 51583 - protein, 183 aa, Homo sapiens; identical to SEQ ID NO: 51581
  Payload ID: 10271
  Gene Symbol: MID1IP1
  Gene Name: MID1 interacting protein 1
  Uniprot ID: Q9NPA3
  ENSP ID: ENSP00000416670

SEQ ID NO: 51584 - protein, 183 aa, Homo sapiens; identical to SEQ ID NO: 51581
  Payload ID: 10271
  Gene Symbol: MID1IP1
  Gene Name: MID1 interacting protein 1
  Uniprot ID: Q9NPA3
  ENSP ID: ENSP00000483547

SEQ ID NO: 51585 - protein, 5596 aa, Homo sapiens
  Payload ID: 10272
  Gene Symbol: MDN1
  Gene Name: midasin AAA ATPase 1
  Uniprot ID: Q9NU22
  ENSP ID: ENSP00000358400
MEHFLLEVAAAPLRLIAAKNEKSRSELGRFLAKQVWTPQDRQCVLSTLAQLLLDKDCTVLVGRQLRPLLLDLLERNAEAIKAGGQINHDLHERLCVSMSKLIGNHPDVLPFALRYFKDTSPVFQRLFLESSDANPVRYGRRRMKLRDLMEAAFKFLQQEQSVFRELWDWSVCVPLLRSHDTLVRWYTANCLALVTCMNEEHKLSFLKKIFNSDELIHFRLRLLEEAQLQDLEKALVLANPEVSLWRKQKELQYLQGHLVSSDLSPRVTAVCGVVLPGQLPAPGELGGNRSSSREQELALRSYVLVESVCKSLQTLAMAVASQNAVLLEGPIGCGKTSLVEYLAAVTGRTKPPQLLKVQLGDQTDSKMLLGMYRCTDVPGEFVWQPGTLTQAATMGHWILLEDIDYAPLDVVSVLIPLLENGELLIPGRGDCLKVAPGFQFFATRRLLSCGGNWYRPLNSHATLLDKYWTKIHLDNLDKRELNEVLQSRYPSLLAVVDHLLDIYIQLTGEKHHSWSDSSVGCEQAPEEVSEARRENKRPTLEGRELSLRDLLNWCNRIAHSFDSSSLSASLNIFQEALDCFTAMLSEHTSKLKMAEVIGSKLNISRKKAEFFCQLYKPEIVINELDLQVGRVRLLRKQSEAVHLQREKFTFAATRPSSVLIEQLAVCVSKGEPVLLVGETGTGKTSTIQYLAHITGHRLRVVNMNQQSDTADLLGGYKPVDHKLIWLPLREAFEELFAQTFSKKQNFTFLGHIQTCYRQKRWHDLLRLMQHVHKSAVNKDGKDSETGLLIKEKWEAFGLRLNHAQQQMKMTENTLLFAFVEGTLAQAVKKGEWILLDEINLAAPEILECLSGLLEGSSGSLVLLDRGDTEPLVRHPDFRLFACMNPATDVGKRNLPPGIRNRFTELYVEELESKEDLQVLIVDYLKGLSVNKNTVQGIINFYTALRKESGTKLVDGTGHRPHYSLRTLCRALRFAASNPCGNIQRSLYEGFCLGFLTQLDRASHPIVQKLICQHIVPGNVKSLLKQPIPEPKGGRLIQVEGYWIAVGDKEPTIDETYILTSSVKLNLRDIVRVVSAGTYPVLIQGETSVGKTSLIQWLAAATGNHCVRINNHEHTDIQEYIGCYTSDSSGKLVFKEGVLIDAMRKGYWIILDELNLAPTDVLEALNRLLDDNRELLVTETQEVVKAHPRFMLFATQNPPGLYGGRKVLSRAFRNRFVELHFDELPSSELETILHKRCSLPPSYCSKLVKVMLDLQSYRRSSSVFAGKQGFITLRDLFRWAERYRLAEPTEKEYDWLQHLANDGYMLLAGRVRKQEEIDVIQEVLEKHFKKKLCPQSLFSKENVLKLLGKLSTQISTLECNFGHIVWTEGMRRLAMLVGRALEFGEPVLLVGDTGCGKTTICQVFAALANQKLYSVSCHLHMETSDFLGGLRPVRQKPNDKEEIDTSRLFEWHDGPLVQAMKEDGFFLLDEISLADDSVLERLNSVLEVEKSLVLAEKGSPEDKDSEIELLTAGKKFRILATMNPGGDFGKKELSPALRNRFTEIWCPQSTSREDLIQIISHNLRPGLCLGRIDPKGSDIPEVMLDFIDWLTHQEFGRKCVVSIRDILSWVNFMNKMGEEAALKRPEIISTVTSFVHAACLVYIDGIGSGVTSSGFGTALLARKECLKFLIKRLAKIVRLTEYQKNELKIYDRMKAKEFTGIDNLWGIHPFFIPRGPVLHRNNIADYALSAGTTAMNAQRLLRATKLKKPILLEGSPGVGKTSLVGALAKASGNTLVRINLSEQTDITDLFGADLPVEGGKGGEFAWRDGPLLAALKAGHWVVLDELNLASQSVLEGLNACFDHRGEIYVPELGMSFQVQHEKTKIFGCQNPFRQGGGRKGLPRSFLNRFTQVFVDPLTVIDMEFIASTLFPAIEKNIVKKMVAFNNQIDHEVTVEKKWGQKGGPWEFNLRDLFRWCQLMLVDQSPGCYDPGQHVFLVYGERMRTEEDKKKVIAVFKDVFGSNSNPYMGTRLFRITPYDVQLGYSVLSRGSCVPHPSRHPLLLLHQSFQPLESIMKCVQMSWMVILVGPASVGKTSLVQLLAHLTGHTLKIMAMNSAMDTTELLGGFEQVDLIRPWRRLLEKVEGTVRALLRDSLLISADDAEVVLRAWSHFLLTYKPKCLGEGGKAITMEIVNKLEAVLLLMQRLNNKINSYCKAEFAKLVEEFRSFGVKLTQLASGHSHGTFEWVDSMLVQALKSGDWLLMDNVNFCNPSVLDRLNALLEPGGVLTISERGMIDGSTPTITPNPNFRLFLSMDPVHGDISRAMRNRGLEIYISGEGDASTPDNLDLKVLLHSLGLVGNSVCDILLALHTETRSTVVGSPTSSVSTLIQTAILIVQYLQRGLSLDRAFSEACWEVYVCSQHSPANRKLVQALLEKHVSSLRAHETWGDSILGMGLWPDSVPSALFATEDSHLSTVRRDGQILVYCLNRMSMKTSSWTRSQPFTLQDLEKIMQSPSPENLKFNAVEVNTYWIDEPDVLVMAVKLLIERATNQDWMLRVKWLYHLAKNIPQGLESIQIHLEASAASLRNFYSHSLSGAVSNVFKILQPNTTDEFVIPLDPRWNMQALDMIRNLMDFDPQTDQPDQLFALLESAANKTIIYLDREKRVFTEANLVSVGSKKLRESVLRMSFEFHQDPESYHTLPHEIVVNLAAFFELCDALVLLWVQSSQGMVSDASANEILGSLRWRDRFWTVADTVKVDAPGLALLALHWHWVLKHLVHQIPRLLMNYEDKYYKEVQTVSEHIQNCLGSQTGGFAGIKKLQKFLGRPFPFKDKLVVECFSQLKVLNKVLAIREQMSALGESGWQEDINRLQVVASQWTLKKSLLQAWGLILRANILEDVSLDELKNFVHAQCLELKAKGLSLGFLEKKHDEASSLSHPDLTSVIHLTRSVQLWPAMEYLAMLWRYKVTADFMAQACLRRCSKNQQPQINEEISHLISFCLYHTPVTPQELRDLWSLLHHQKVSPEEITSLWSELFNSMFMSFWSSTVTTNPEYWLMWNPLPGMQQREAPKSVLDSTLKGPGNLNRPIFSKCCFEVLTSSWRASPWDVSGLPILSSSHVTLGEWVERTQQLQDISSMLWTNMAISSVAEFRRTDSQLQGQVLFRHLAGLAELLPESRRQEYMQNCEQLLLGSSQAFQHVGQTLGDMAGQEVLPKELLCQLLTSLHHFVGEGESKRSLPEPAQRGSLWVSLGLLQIQTWLPQARFDPAVKREYKLNYVKEELHQLQCEWKTRNLSSQLQTGRDLEDEVVVSYSHPHVRLLRQRMDRLDNLTCHLLKKQAFRPQLPAYESLVQEIHHYVTSIAKAPAVQDLLTRLLQALHIDGPRSAQVAQSLLKEEASWQQSHHQFRKRLSEEYTFYPDAVSPLQASILQLQHGMRLVASELHTSLHSSMVGADRLGTLATALLAFPSVGPTFPTYYAHADTLCSVKSEEVLRGLGKLILKRSGGKELEGKGQKACPTREQLLMNALLYLRSHVLCKGELDQRALQLFRHVCQEIISEWDEQERIAQEKAEQESGLYRYRSRNSRTALSEEEEEEREFRKQFPLHEKDFADILVQPTLEENKGTSDGQEEEAGTNPALLSQNSMQAVMLIHQQLCLNFARSLWYQQTLPPHEAKHYLSLFLSCYQTGASLVTHFYPLMGVELNDRLLGSQLLACTLSHNTLFGEAPSDLMVKPDGPYDFYQHPNVPEARQCQPVLQGFSEAVSHLLQDWPEHPALEQLLVVMDRIRSFPLSSPISKFLNGLEILLAKAQDWEENASRALSLRKHLDLISQMIIRWRKLELNCWSMSLDNTMKRHTEKSTKHWFSIYQMLEKHMQEQTEEQEDDKQMTLMLLVSTLQAFIEGSSLGEFHVRLQMLLVFHCHVLLMPQVEGKDSLCSVLWNLYHYYKQFFDRVQAKIVELRSPLEKELKEFVKISKWNDVSFWSIKQSVEKTHRTLFKFMKKFEAVLSEPCRSSLVESDKEEQPDFLPRPTDGAASELSSIQNLNRALRETLLAQPAAGQATIPEWCQGAAPSGLEGELLRRLPKLRKRMRKMCLTFMKESPLPRLVEGLDQFTGEVISSVSELQSLKVEPSAEKEKQRSEAKHILMQKQRALSDLFKHLAKIGLSYRKGLAWARSKNPQEMLHLHPLDLQSALSIVSSTQEADSRLLTEISSSWDGCQKYFYRSLARHARLNAALATPAKEMGMGNVERCRGFSAHLMKMLVRQRRSLTTLSEQWIILRNLLSCVQEIHSRLMGPQAYPVAFPPQDGVQQWTERLQHLAMQCQILLEQLSWLLQCCPSVGPAPGHGNVQVLGQPPGPCLEGPELSKGQLCGVVLDLIPSNLSYPSPIPGSQLPSGCRMRKQDHLWQQSTTRLTEMLKTIKTVKADVDKIRQQSCETLFHSWKDFEVCSSALSCLSQVSVHLQGLESLFILPGMEVEQRDSQMALVESLEYVRGEISKAMADFTTWKTHLLTSDSQGGNQMLDEGFVEDFSEQMEIAIRAILCAIQNLEERKNEKAEENTDQASPQEDYAGFERLQSGHLTKLLEDDFWADVSTLHVQKIISAISELLERLKSYGEDGTAAKHLFFSQSCSLLVRLVPVLSSYSDLVLFFLTMSLATHRSTAKLLSVLAQVFTELAQKGFCLPKEFMEDSAGEGATEFHDYEGGGIGEGEGMKDVSDQIGNEEQVEDTFQKGQEKDKEDPDSKSDIKGEDNAIEMSEDFDGKMHDGELEEQEEDDEKSDSEGGDLDKHMGDLNGEEADKLDERLWGDDDEEEDEEEEDNKTEETGPGMDEEDSELVAKDDNLDSGNSNKDKSQQDKKEEKEEAEADDGGQGEDKINEQIDERDYDENEVDPYHGNQEKVPEPEALDLPDDLNLDSEDKNGGEDTDNEEGEEENPLEIKEKPEEAGHEAEERGETETDQNESQSPQEPEEGPSEDDKAEGEEEMDTGADDQDGDAAQHPEEHSEEQQQSVEEKDKEADEEGGENGPADQGFQPQEEEEREDSDTEEQVPEALERKEHASCGQTGVENMQNTQAMELAGAAPEKEQGKEEHGSGAADANQAEGHESNFIAQLASQKHTRKNTQSFKRKPGQADNERSMGDHNERVHKRLRTVDTDSHAEQGPAQQPQAQVEDADAFEHIKQGSDAYDAQTYDVASKEQQQSAKDSGKDQEEEEIEDTLMDTEEQEEFKAADVEQLKPEEIKSGTTAPLGFDEMEVEIQTVKTEEDQDPRTDKAHKETENEKPERSRESTIHTAHQFLMDTIFQPFLKDVNELRQELERQLEMWQPRESGNPEEEKVAAEMWQSYLILTAPLSQRLCEELRLILEPTQAAKLKGDYRTGKRLNIRKVIPYIASQFRKDKIWLRRTKPSKRQYQICLAIDDSSSMVDNHTKQLAFESLAVIGNALTLLEVGQIAVCSFGESVKLLHPFHEQFSDYSGSQILRLCKFQQKKTKIAQFLESVANMFAAAQQLSQNISSETAQLLLVVSDGRGLFLEGKERVLAAVQAARNANIFVIFVVLDNPSSRDSILDIKVPIFKGPGEMPEIRSYMEEFPFPYYIILRDVNALPETLSDALRQWFELVTASDHP

SEQ ID NO: 51586 - protein, 1181 aa, Homo sapiens
  Payload ID: 10272
  Gene Symbol: MDN1
  Gene Name: midasin AAA ATPase 1
  ENSP ID: ENSP00000409664
MEHFLLEVAAAPLRLIAAKNEKSRSELGRFLAKQVWTPQDRQCVLSTLAQLLLDKDCTVLVGRQLRPLLLDLLERNAEAIKAGGQINHDLHERLCVSMSKLIGNHPDVLPFALRYFKDTSPVFQRLFLESSDANPVRYGRRRMKLRDLMEAAFKFLQQEQSVFRELWDWSVCVPLLRSHDTLVRWYTANCLALVTCMNEEHKLSFLKKIFNSDELIHFRLRLLEEAQLQDLEKALVLANPEVSLWRKQKELQYLQGHLVSSDLSPRVTAVCGVVLPGQLPAPGELGGNRSSSREQELALRSYVLVESVCKSLQTLAMAVASQNAVLLEGPIGCGKTSLVEYLAAVTGRTKPPQLLKVQLGDQTDSKMLLGMYRCTDVPGEFVWQPGTLTQAATMGHWILLEDIDYAPLDVVLQSRYPSLLAVVDHLLDIYIQLTGEKHHSWSDSSVGCEQAPEEVSEARRENKRPTLEGRELSLRDLLNWCNRIAHSFDSSSLSASLNIFQEALDCFTAMLSEHTSKLKMAEVIGSKLNISRKKAEFFCQLYKPEIVINELDLQVGRVRLLRKQSEAVHLQREKFTFAATRPSSVLIEQLAVCVSKGEPVLLVGETGTGKTSTIQYLAHITGHRLRVVNMNQQSDTADLLGGYKPVDHKLIWLPLREAFEELFAQTFSKKQNFTFLGHIQTCYRQKRWHDLLRLMQHVHKSAVNKDGKDSETGLLIKEKWEAFGLRLNHAQQQMKMTENTLLFAFVEGTLAQAVKKGEWILLDEINLAAPEILECLSGLLEGSSGSLVLLDRGDTEPLVRHPDFRLFACMNPATDVGKRNLPPGIRNRFTELYVEELESKEDLQVLIVDYLKGLSVNKNTVQGIINFYTALRKESGTKLVDGTGHRPHYSLRTLCRALRFAASNPCGNIQRSLYEGFCLGFLTQLDRASHPIVQKLICQHIVPGNVKSLLKQPIPEPKGGRLIQVEGYWIAVGDKEPTIDETYILTSSVKLNLRDIVRVVSAGTYPVLIQGETSVGKTSLIQWLAAATGNHCVRINNHEHTDIQEYIGCYTSDSSGKLVFKEGVLIDAMRKGYWIILDELNLAPTDVLEALNRLLDDNRELLVTETQEVVKAHPRFMLFATQNPPGLYGGRKVLSRAFRNRFVELHFDELPSSELETILHKRCSLPPSYCSKLVKVMLDLQ

SEQ ID NO: 51587 - protein, 62 aa, Homo sapiens
  Payload ID: 10272
  Gene Symbol: MDN1
  Gene Name: midasin AAA ATPase 1
  ENSP ID: ENSP00000469327
DSILDIKVPIFKGPGEMPEIRSYMEEFPFPYYIILRDVNALPETLSDALRQWFELVTASDHP

SEQ ID NO: 51588 - protein, 5596 aa, Homo sapiens; identical to SEQ ID NO: 51585
  Payload ID: 10272
  Gene Symbol: MDN1
  Gene Name: midasin AAA ATPase 1
  Uniprot ID: Q9NU22
  ENSP ID: ENSP00000486270

SEQ ID NO: 51589 - protein, 143 aa, Homo sapiens
  Payload ID: 10273
  Gene Symbol: MDK
  Gene Name: midkine (neurite growth-promoting factor 2)
  Uniprot ID: P21741
  ENSP ID: ENSP00000352852
MQHRGFLLLTLLALLALTSAVAKKKDKVKKGGPGSECAEWAWGPCTPSSKDCGVGFREGTCGAQTQRIRCRVPCNWKKEFGADCKYKFENWGACDGGTGTKVRQGTLKKARYNAQCQETIRVTKPCTPKTKAKAKAKKGKGKD

SEQ ID NO: 51590 - protein, 143 aa, Homo sapiens; identical to SEQ ID NO: 51589
  Payload ID: 10273
  Gene Symbol: MDK
  Gene Name: midkine (neurite growth-promoting factor 2)
  Uniprot ID: P21741
  ENSP ID: ENSP00000378932

SEQ ID NO: 51591 - protein, 143 aa, Homo sapiens; identical to SEQ ID NO: 51589
  Payload ID: 10273
  Gene Symbol: MDK
  Gene Name: midkine (neurite growth-promoting factor 2)
  Uniprot ID: P21741
  ENSP ID: ENSP00000378933

SEQ ID NO: 51592 - protein, 87 aa, Homo sapiens
  Payload ID: 10273
  Gene Symbol: MDK
  Gene Name: midkine (neurite growth-promoting factor 2)
  Uniprot ID: P21741
  ENSP ID: ENSP00000378936
MQHRGFLLLTLLALLALTSAVAKKKADCKYKFENWGACDGGTGTKVRQGTLKKARYNAQCQETIRVTKPCTPKTKAKAKAKKGKGKD

SEQ ID NO: 51593 - protein, 143 aa, Homo sapiens; identical to SEQ ID NO: 51589
  Payload ID: 10273
  Gene Symbol: MDK
  Gene Name: midkine (neurite growth-promoting factor 2)
  Uniprot ID: P21741
  ENSP ID: ENSP00000384034

SEQ ID NO: 51594 - protein, 143 aa, Homo sapiens; identical to SEQ ID NO: 51589
  Payload ID: 10273
  Gene Symbol: MDK
  Gene Name: midkine (neurite growth-promoting factor 2)
  Uniprot ID: P21741
  ENSP ID: ENSP00000385451

SEQ ID NO: 51595 - protein, 49 aa, Homo sapiens
  Payload ID: 10273
  Gene Symbol: MDK
  Gene Name: midkine (neurite growth-promoting factor 2)
  ENSP ID: ENSP00000416241
MQHRGFLLLTLLALLALTSAVAKKKDKVKKGGPGSECAEWAWGPCTPSS

SEQ ID NO: 51596 - protein, 131 aa, Homo sapiens
  Payload ID: 10273
  Gene Symbol: MDK
  Gene Name: midkine (neurite growth-promoting factor 2)
  ENSP ID: ENSP00000432649
MQHRGFLLLTLLALLALTSAVAKKKDKVKKGGPGSECAEWAWGPCTPSSKDCGVGFREGTCGAQTQRIRCRVPCNWKKEFGADCKYKFENWGACDGGTGTKVRQGTLKKARYNAQCQETIRVTKPCTPKTK

SEQ ID NO: 51597 - protein, 156 aa, Homo sapiens
  Payload ID: 10273
  Gene Symbol: MDK
  Gene Name: midkine (neurite growth-promoting factor 2)
  ENSP ID: ENSP00000433240
MQHRGFLLLTLLALLALTSAVAKKKDKVKKGGPGSECAEWAWGPCTPSSKDCGVGFREGTCGAQTQRIRCRVPCNWKKEFGADCKYKFENWGACDGGTGTKVRQGTLKKARYNAQCQETIRVTKPCTPKTKAKAKGQRKEKGVGLSRGAAPPPPRL

SEQ ID NO: 51598 - protein, 152 aa, Homo sapiens
  Payload ID: 10273
  Gene Symbol: MDK
  Gene Name: midkine (neurite growth-promoting factor 2)
  ENSP ID: ENSP00000480875
MQHRGFLLLTLLALLALTSAVAKKKEEGALQCSVPGDHPRHQALHPQDQSKGQSQEREGKGLDAKPGCQGAPGVTWGLAHALPLPGPRCDPPVPSVCSLALINHALPCPSHSPAPPLSAQSGEGQGILGSLSLPQSNVSPRARFCSSPQFHY

SEQ ID NO: 51599 - protein, 667 aa, Homo sapiens
  Payload ID: 10274
  Gene Symbol: MID1
  Gene Name: midline 1
  Uniprot ID: O15344
  ENSP ID: ENSP00000312678
METLESELTCPICLELFEDPLLLPCAHSLCFNCAHRILVSHCATNESVESITAFQCPTCRHVITLSQRGLDGLKRNVTLQNIIDRFQKASVSGPNSPSETRRERAFDANTMTSAEKVLCQFCDQDPAQDAVKTCVTCEVSYCDECLKATHPNKKPFTGHRLIEPIPDSHIRGLMCLEHEDEKVNMYCVTDDQLICALCKLVGRHRDHQVAALSERYDKLKQNLESNLTNLIKRNTELETLLAKLIQTCQHVEVNASRQEAKLTEECDLLIEIIQQRRQIIGTKIKEGKVMRLRKLAQQIANCKQCIERSASLISQAEHSLKENDHARFLQTAKNITERVSMATASSQVLIPEINLNDTFDTFALDFSREKKLLECLDYLTAPNPPTIREELCTASYDTITVHWTSDDEFSVVSYELQYTIFTGQANVVSLCNSADSWMIVPNIKQNHYTVHGLQSGTKYIFMVKAINQAGSRSSEPGKLKTNSQPFKLDPKSAHRKLKVSHDNLTVERDESSSKKSHTPERFTSQGSYGVAGNVFIDSGRHYWEVVISGSTWYAIGLAYKSAPKHEWIGKNSASWALCRCNNNWVVRHNSKEIPIEPAPHLRRVGILLDYDNGSIAFYDALNSIHLYTFDVAFAQPVCPTFTVWNKCLTIITGLPIPDHLDCTEQLP

SEQ ID NO: 51600 - protein, 667 aa, Homo sapiens; identical to SEQ ID NO: 51599
  Payload ID: 10274
  Gene Symbol: MID1
  Gene Name: midline 1
  Uniprot ID: O15344
  ENSP ID: ENSP00000370156

SEQ ID NO: 51601 - protein, 667 aa, Homo sapiens; identical to SEQ ID NO: 51599
  Payload ID: 10274
  Gene Symbol: MID1
  Gene Name: midline 1
  Uniprot ID: O15344
  ENSP ID: ENSP00000370157

SEQ ID NO: 51602 - protein, 552 aa, Homo sapiens
  Payload ID: 10274
  Gene Symbol: MID1
  Gene Name: midline 1
  Uniprot ID: O15344
  ENSP ID: ENSP00000370159
METLESELTCPICLELFEDPLLLPCAHSLCFNCAHRILVSHCATNESVESITAFQCPTCRHVITLSQRGLDGLKRNVTLQNIIDRFQKASVSGPNSPSETRRERAFDANTMTSAEKVLCQFCDQDPAQDAVKTCVTCEVSYCDECLKATHPNKKPFTGHRLIEPIPDSHIRGLMCLEHEDEKVNMYCVTDDQLICALCKLVGRHRDHQVAALSERYDKLKQNLESNLTNLIKRNTELETLLAKLIQTCQHVEVNASRQEAKLTEECDLLIEIIQQRRQIIGTKIKEGKVMRLRKLAQQIANCKQCIERSASLISQAEHSLKENDHARFLQTAKNITERVSMATASSQVLIPEINLNDTFDTFALDFSREKKLLECLDYLTAPNPPTIREELCTASYDTITVHWTSDDEFSVVSYELQYTIFTGQANVVSLCNSADSWMIVPNIKQNHYTVHGLQSGTKYIFMVKAINQAGSRSSEPGKLKTNSQPFKLDPKSAHRKLKVSHDNLTVERDESSSKKSHTPERFTSQGSYGVAGNVFIDSGRHYWEVVISGSTW

SEQ ID NO: 51603 - protein, 667 aa, Homo sapiens; identical to SEQ ID NO: 51599
  Payload ID: 10274
  Gene Symbol: MID1
  Gene Name: midline 1
  Uniprot ID: O15344
  ENSP ID: ENSP00000370162

SEQ ID NO: 51604 - protein, 667 aa, Homo sapiens; identical to SEQ ID NO: 51599
  Payload ID: 10274
  Gene Symbol: MID1
  Gene Name: midline 1
  Uniprot ID: O15344
  ENSP ID: ENSP00000370164

SEQ ID NO: 51605 - protein, 197 aa, Homo sapiens
  Payload ID: 10274
  Gene Symbol: MID1
  Gene Name: midline 1
  ENSP ID: ENSP00000387771
METLESELTCPICLELFEDPLLLPCAHSLCFNCAHRILVSHCATNESVESITAFQCPTCRHVITLSQRGLDGLKRNVTLQNIIDRFQKASVSGPNSPSETRRERAFDANTMTSAEKVLCQFCDQDPAQDAVKTCVTCEVSYCDECLKATHPNKKPFTGHRLIEPIPDSHIRGLMCLEHEDEKVNMYCVTDDQLICAL

SEQ ID NO: 51606 - protein, 483 aa, Homo sapiens
  Payload ID: 10274
  Gene Symbol: MID1
  Gene Name: midline 1
  ENSP ID: ENSP00000391154
METLESELTCPICLELFEDPLLLPCAHSLCFNCAHRILVSHCATNESVESITAFQCPTCRHVITLSQRGLDGLKRNVTLQNIIDRFQKASVSGPNSPSETRRERAFDANTMTSAEKVLCQFCDQDPAQDAVKTCVTCEVSYCDECLKATHPNKKPFTGHRLIEPIPDSHIRGLMCLEHEDEKVNMYCVTDDQLICALCKLVGRHRDHQVAALSERYDKLKQNLESNLTNLIKRNTELETLLAKLIQTCQHVEVNASRQEAKLTEECDLLIEIIQQRRQIIGTKIKEGKVMRLRKLAQQIANCKQCIERSASLISQAEHSLKENDHARFLQTAKNITERVSMATASSQVLIPEINLNDTFDTFALDFSREKKLLECLDYLTAPNPPTIREELCTASYDTITVHWTSDDEFSVVSYELQYTIFTGQANVVSLCNSADSWMIVPNIKQNHYTVHGLQSGTKYIFMVKAINQAGSRSSEPGKLKTNS

SEQ ID NO: 51607 - protein, 667 aa, Homo sapiens; identical to SEQ ID NO: 51599
  Payload ID: 10274
  Gene Symbol: MID1
  Gene Name: midline 1
  Uniprot ID: O15344
  ENSP ID: ENSP00000414521

SEQ ID NO: 51608 - protein, 228 aa, Homo sapiens
  Payload ID: 10274
  Gene Symbol: MID1
  Gene Name: midline 1
  ENSP ID: ENSP00000483707
METLESELTCPICLELFEDPLLLPCAHSLCFNCAHRILVSHCATNESVESITAFQCPTCRHVITLSQRGLDGLKRNVTLQNIIDRFQKASVSGPNSPSETRRERAFDANTMTSAEKVLCQFCDQDPAQDAVKTCVTCEVSYCDECLKATHPNKKPFTGHRLIEPIPDSHIRGLMCLEHEDEKQNLESNLTNLIKRNTELETLLAKLIQTCQHVELECSVLFPRVAQWG

SEQ ID NO: 51609 - protein, 540 aa, Homo sapiens
  Payload ID: 10274
  Gene Symbol: MID1
  Gene Name: midline 1
  ENSP ID: ENSP00000484712
METLESELTCPICLELFEDPLLLPCAHSLCFNCAHRILVSHCATNESVESITAFQCPTCRHVITLSQRGLDGLKRNVTLQNIIDRFQKASVSGPNSPSETRRERAFDANTMTSAEKVLCQFCDQDPAQDAVKTCVTCEVSYCDECLKATHPNKKPFTGHRLIEPIPDSHIRGLMCLEHEDEKVNMYCVTDDQLICALCKLVGRHRDHQVAALSERYDKLKQNLESNLTNLIKRNTELETLLAKLIQTCQHVETVKDQKVIGREKQQYYPRNRRKWVSNSLQARLMGRRCISRRERKLTLDVEKVNASRQEAKLTEECDLLIEIIQQRRQIIGTKIKEGKVMRLRKLAQQIANCKQCIERSASLISQAEHSLKENDHARFLQTAKNITERVSMATASSQVLIPEINLNDTFDTFALDFSREKKLLECLDYLTAPNPPTIREELCTASYDTITVHWTSDDEFSVVSYELQYTIFTGQANVVSEYLMAYLFLSLVAFFRLIAFLNLNFKGRQGRKEHTIFIDLSFLNKKVIALTCTTLVKTAG

SEQ ID NO: 51610 - protein, 735 aa, Homo sapiens
  Payload ID: 10275
  Gene Symbol: MID2
  Gene Name: midline 2
  Uniprot ID: Q9UJV3
  ENSP ID: ENSP00000262843
MGESPASVVLNASGGLFSLKMETLESELTCPICLELFEDPLLLPCAHSLCFSCAHRILVSSCSSGESIEPITAFQCPTCRYVISLNHRGLDGLKRNVTLQNIIDRFQKASVSGPNSPSESRRERTYRPTTAMSSERIACQFCEQDPPRDAVKTCITCEVSYCDRCLRATHPNKKPFTSHRLVEPVPDTHLRGITCLDHENEKVNMYCVSDDQLICALCKLVGRHRDHQVASLNDRFEKLKQTLEMNLTNLVKRNSELENQMAKLIQICQQVEVNTAMHEAKLMEECDELVEIIQQRKQMIAVKIKETKVMKLRKLAQQVANCRQCLERSTVLINQAEHILKENDQARFLQSAKNIAERVAMATASSQVLIPDINFNDAFENFALDFSREKKLLEGLDYLTAPNPPSIREELCTASHDTITVHWISDDEFSISSYELQYTIFTGQANFISKSWCSWGLWPEIRKCKEAVSCSRLAGAPRGLYNSVDSWMIVPNIKQNHYTVHGLQSGTRYIFIVKAINQAGSRNSEPTRLKTNSQPFKLDPKMTHKKLKISNDGLQMEKDESSLKKSHTPERFSGTGCYGAAGNIFIDSGCHYWEVVMGSSTWYAIGIAYKSAPKNEWIGKNASSWVFSRCNSNFVVRHNNKEMLVDVPPHLKRLGVLLDYDNNMLSFYDPANSLHLHTFDVTFILPVCPTFTIWNKSLMILSGLPAPDFIDYPERQECNCRPQESPYVSGMKTCH

SEQ ID NO: 51611 - protein, 218 aa, Homo sapiens
  Payload ID: 10275
  Gene Symbol: MID2
  Gene Name: midline 2
  ENSP ID: ENSP00000410730
METLESELTCPICLELFEDPLLLPCAHSLCFSCAHRILVSSCSSGESIEPITAFQCPTCRYVISLNHRGLDGLKRNVTLQNIIDRFQKASVSGPNSPSESRRERTYRPTTAMSSERIACQFCEQDPPRDAVKTCITCEVSYCDRCLRATHPNKKPFTSHRLVEPVPDTHLRGITCLDHENEKVNMYCVSDDQLICALCKLVGRHRDHQVASLNDRFEK

SEQ ID NO: 51612 - protein, 705 aa, Homo sapiens
  Payload ID: 10275
  Gene Symbol: MID2
  Gene Name: midline 2
  Uniprot ID: Q9UJV3
  ENSP ID: ENSP00000413976
MGESPASVVLNASGGLFSLKMETLESELTCPICLELFEDPLLLPCAHSLCFSCAHRILVSSCSSGESIEPITAFQCPTCRYVISLNHRGLDGLKRNVTLQNIIDRFQKASVSGPNSPSESRRERTYRPTTAMSSERIACQFCEQDPPRDAVKTCITCEVSYCDRCLRATHPNKKPFTSHRLVEPVPDTHLRGITCLDHENEKVNMYCVSDDQLICALCKLVGRHRDHQVASLNDRFEKLKQTLEMNLTNLVKRNSELENQMAKLIQICQQVEVNTAMHEAKLMEECDELVEIIQQRKQMIAVKIKETKVMKLRKLAQQVANCRQCLERSTVLINQAEHILKENDQARFLQSAKNIAERVAMATASSQVLIPDINFNDAFENFALDFSREKKLLEGLDYLTAPNPPSIREELCTASHDTITVHWISDDEFSISSYELQYTIFTGQANFISLYNSVDSWMIVPNIKQNHYTVHGLQSGTRYIFIVKAINQAGSRNSEPTRLKTNSQPFKLDPKMTHKKLKISNDGLQMEKDESSLKKSHTPERFSGTGCYGAAGNIFIDSGCHYWEVVMGSSTWYAIGIAYKSAPKNEWIGKNASSWVFSRCNSNFVVRHNNKEMLVDVPPHLKRLGVLLDYDNNMLSFYDPANSLHLHTFDVTFILPVCPTFTIWNKSLMILSGLPAPDFIDYPERQECNCRPQESPYVSGMKTCH

SEQ ID NO: 51613 - protein, 468 aa, Homo sapiens
  Payload ID: 10276
  Gene Symbol: MIDN
  Gene Name: midnolin
  Uniprot ID: Q504T8
  ENSP ID: ENSP00000300952
MEPQPGGARSCRRGAPGGACELGPAAEAAPMSLAIHSTTGTRYDLAVPPDETVEGLRKRLSQRLKVPKERLALLHKDTRLSSGKLQEFGVGDGSKLTLVPTVEAGLMSQASRPEQSVMQALESLTETQVSDFLSGRSPLTLALRVGDHMMFVQLQLAAQHAPLQHRHVLAAAAAAAAARGDPSIASPVSSPCRPVSSAARVPPVPTSPSPASPSPITAGSFRSHAASTTCPEQMDCSPTASSSASPGASTTSTPGASPAPRSRKPGAVIESFVNHAPGVFSGTFSGTLHPNCQDSSGRPRRDIGTILQILNDLLSATRHYQGMPPSLAQLRCHAQCSPASPAPDLAPRTTSCEKLTAAPSASLLQGQSQIRMCKPPGDRLRQTENRATRCKVERLQLLLQQKRLRRKARRDARGPYHWSPSRKAGRSDSSSSGGGGSPSEASGLGLDFEDSVWKPEVNPDIKSEFVVA

SEQ ID NO: 51614 - protein, 139 aa, Homo sapiens
  Payload ID: 10276
  Gene Symbol: MIDN
  Gene Name: midnolin
  ENSP ID: ENSP00000466835
  MOD_RES (1)..(1): Any amino acid
XRLSSGKLQEFGVGDGSKLTLVPTVEAGLMSQASRPEQSVMQALESLTETQPPAAPGPGRAGGGGFRKYRFILFKRPWHRQGPQSPERGGERPQVSDFLSGRSPLTLALRVGDHMMFVQLQLAAQHAPLQHRHVLAAAA

SEQ ID NO: 51615 - protein, 216 aa, Homo sapiens
  Payload ID: 10276
  Gene Symbol: MIDN
  Gene Name: midnolin
  ENSP ID: ENSP00000466895
MEPQPGGARSCRRGAPGGACELGPAAEAAPMSLAIHSTTGTRYDLAVPPDETVEGLRKRLSQRLKVPKERLALLHKDTRLSSGKLQEFGVGDGSKLTLVPTVEAGLMSQASRPEQSVMQALESLTETQVSDFLSGRSPLTLALRVGDHMMFVQLQLAAQHAPLQHRHVLAAAAAAAAARGDPSIASPVSSPCRPVSSAARVPPVPTSPSPASPSPI

SEQ ID NO: 51616 - protein, 468 aa, Homo sapiens; identical to SEQ ID NO: 51613
  Payload ID: 10276
  Gene Symbol: MIDN
  Gene Name: midnolin
  Uniprot ID: Q504T8
  ENSP ID: ENSP00000467679

SEQ ID NO: 51617 - protein, 256 aa, Homo sapiens
  Payload ID: 10277
  Gene Symbol: MIF4GD
  Gene Name: MIF4G domain containing
  Uniprot ID: A9UHW6
  ENSP ID: ENSP00000245551
MGEPSREEYKIQSFDAETQQLLKTALKVACFETEDGEYSVCQRSYSNCSRLMPSRCNTQYRDPGAVDLEKVANVIVDHSLQDCVFSKEAGRMCYAIIQAESKQAGQSVFRRGLLNRLQQEYQAREQLRARSLQGWVCYVTFICNIFDYLRVNNMPMMALVNPVYDCLFRLAQPDSLSKEEEVDCLVLQLHRVGEQLEKMNGQRMDELFVLIRDGFLLPTGLSSLAQLLLLEIIEFRAAGWKTTPAAHKYYYSEVSD

SEQ ID NO: 51618 - protein, 222 aa, Homo sapiens
  Payload ID: 10277
  Gene Symbol: MIF4GD
  Gene Name: MIF4G domain containing
  Uniprot ID: A9UHW6
  ENSP ID: ENSP00000321625
MGEPSREEYKIQSFDAETQQLLKTALKDPGAVDLEKVANVIVDHSLQDCVFSKEAGRMCYAIIQAESKQAGQSVFRRGLLNRLQQEYQAREQLRARSLQGWVCYVTFICNIFDYLRVNNMPMMALVNPVYDCLFRLAQPDSLSKEEEVDCLVLQLHRVGEQLEKMNGQRMDELFVLIRDGFLLPTGLSSLAQLLLLEIIEFRAAGWKTTPAAHKYYYSEVSD

SEQ ID NO: 51619 - protein, 170 aa, Homo sapiens
  Payload ID: 10277
  Gene Symbol: MIF4GD
  Gene Name: MIF4G domain containing
  ENSP ID: ENSP00000462412
MGEPSREEYKIQSFDAETQQLLKTALKDPGAVDLEKVANVIVDHSLQDCVFSKEAGRMCYAIIQVNNMPMMALVNPVYDCLFRLAQPDSLSKEEEVDCLVLQLHRVGEQLEKMNGQRMDELFVLIRDGFLLPTGLSSLAQLLLLEIIEFRAAGWKTTPAAHKYYYSEVSD

SEQ ID NO: 51620 - protein, 263 aa, Homo sapiens
  Payload ID: 10277
  Gene Symbol: MIF4GD
  Gene Name: MIF4G domain containing
  Uniprot ID: A9UHW6
  ENSP ID: ENSP00000462459
MGEPSREEYKIQSFDAETQQLLKTALKAPSLECTVACFETEDGEYSVCQRSYSNCSRLMPSRCNTQYRDPGAVDLEKVANVIVDHSLQDCVFSKEAGRMCYAIIQAESKQAGQSVFRRGLLNRLQQEYQAREQLRARSLQGWVCYVTFICNIFDYLRVNNMPMMALVNPVYDCLFRLAQPDSLSKEEEVDCLVLQLHRVGEQLEKMNGQRMDELFVLIRDGFLLPTGLSSLAQLLLLEIIEFRAAGWKTTPAAHKYYYSEVSD

SEQ ID NO: 51621 - protein, 155 aa, Homo sapiens
  Payload ID: 10277
  Gene Symbol: MIF4GD
  Gene Name: MIF4G domain containing
  ENSP ID: ENSP00000462655
MGEPSREEYKIQSFDAETQQLLKTALKAPSLECTVACFETEDGEYSVCQRSYSNCSRLMPSRCNTQYRDPGAVDLEKVANVIVDHSLQDCVFSKEAGRMCYAIIQAESKQAGQSVFRRGLLNRLQQEYQAREQLRARSLQGWVCYVTFICNIFDY

SEQ ID NO: 51622 - protein, 169 aa, Homo sapiens
  Payload ID: 10277
  Gene Symbol: MIF4GD
  Gene Name: MIF4G domain containing
  ENSP ID: ENSP00000463264
MGEPSREEYKIQSFDAETQQLLKTALKVACFETEDGEYSVCQRSYSNCSRLMPSRCNTQYRDPGAVDLEKVANVIVDHSLQDCVFSKEAGRMCYAIIQVNNMPMMALVNPVYDCLFRLAQPDSLSKEEEVGGPSPGTSTEGCRMDSPAQPCVSPLLTEVDCLVLQLHRV

SEQ ID NO: 51623 - protein, 263 aa, Homo sapiens; identical to SEQ ID NO: 51620
  Payload ID: 10277
  Gene Symbol: MIF4GD
  Gene Name: MIF4G domain containing
  Uniprot ID: A9UHW6
  ENSP ID: ENSP00000463334

SEQ ID NO: 51624 - protein, 90 aa, Homo sapiens
  Payload ID: 10277
  Gene Symbol: MIF4GD
  Gene Name: MIF4G domain containing
  ENSP ID: ENSP00000463493
MGEPSREEYKIQSFDAETQQLLKTALKDPGAVDLEKVANVIVDHSLQDCVFSKEAGRMCYAIIQAESKQAGQSVFRRGLLNRLQQEYQAR

SEQ ID NO: 51625 - protein, 251 aa, Homo sapiens
  Payload ID: 10277
  Gene Symbol: MIF4GD
  Gene Name: MIF4G domain containing
  ENSP ID: ENSP00000463579
MGEPSREEYKIQSFDAETQQLLKTALKDPGAVDLEKVANVIVDHSLQDCVFSKEAGRMCYAIIQAESKQAGQSVFRRGLLNRLQQEYQAREQLRARSLQGWVCYVTFICNIFDYLRVNNMPMMALVNPVYDCLFRLAQPDSLSKEEEVGGPSPGTSTEGCRMDSPAQPCVSPLLTEVDCLVLQLHRVGEQLEKMNGQRMDELFVLIRDGFLLPTGLSSLAQLLLLEIIEFRAAGWKTTPAAHKYYYSEVSD

SEQ ID NO: 51626 - protein, 41 aa, Homo sapiens
  Payload ID: 10277
  Gene Symbol: MIF4GD
  Gene Name: MIF4G domain containing
  ENSP ID: ENSP00000463629
MGEPSREEYKIQSFDAETQQLLKTALKGEQHAHDGPGEPCL

SEQ ID NO: 51627 - protein, 204 aa, Homo sapiens
  Payload ID: 10277
  Gene Symbol: MIF4GD
  Gene Name: MIF4G domain containing
  ENSP ID: ENSP00000464448
MGEPSREEYKIQSFDAETQQLLKTALKDPGAVDLEKVANVIVDHSLQDCVFSKEAGRMCYAIIQAESKQAGQSVFRRGLLNRLQQEYQAREQLRARSLQGWVCYVTFICNIFDYLRVNNMPMMALVNPVYDCLFRLAQPDSLSKEEEVDCLVLQLHRVGEQLEKMNGQRMDELFVLIRDGFLLPTGLSSLAQLLLLEIIEFRAA

SEQ ID NO: 51628 - protein, 222 aa, Homo sapiens; identical to SEQ ID NO: 51618
  Payload ID: 10277
  Gene Symbol: MIF4GD
  Gene Name: MIF4G domain containing
  Uniprot ID: A9UHW6
  ENSP ID: ENSP00000484245

SEQ ID NO: 51629 - protein, 115 aa, Homo sapiens
  Payload ID: 10278
  Gene Symbol: MIEN1
  Gene Name: migration and invasion enhancer 1
  Uniprot ID: Q9BRT3
  ENSP ID: ENSP00000377778
MSGEPGQTSVAPPPEEVEPGSGVRIVVEYCEPCGFEATYLELASAVKEQYPGIEIESRLGGTGAFEIEINGQLVFSKLENGGFPYEKDLIEAIRRASNGETLEKITNSRPPCVIL

SEQ ID NO: 51630 - protein, 116 aa, Homo sapiens
  Payload ID: 10278
  Gene Symbol: MIEN1
  Gene Name: migration and invasion enhancer 1
  ENSP ID: ENSP00000462998
MSGEPGQTSVAPPPEEVEPGSGVRIVVEYCEPCGFEATYLELASAVKEQYPGIEIESRLGGTGAFEIEINGQLVFSKLENGGFPYEKDVSIYSVGRTSWSPYPNSASSCHSTPLAH

SEQ ID NO: 51631 - protein, 388 aa, Homo sapiens
  Payload ID: 10279
  Gene Symbol: MIIP
  Gene Name: migration and invasion inhibitory protein
  Uniprot ID: Q5JXC2
  ENSP ID: ENSP00000235332
MVEAEELAQLRLLNLELLRQLWVGQDAVRRSVARAASESSLESSSSYNSETPSTPETSSTSLSTSCPRGRSSVWGPPDACRGDLRDVARSGVASLPPAKCQHQESLGRPRPHSAPSLGTSSLRDPEPSGRLGDPGPQEAQTPRSILAQQSKLSKPRVTFSEESAVPKRSWRLRPYLGYDWIAGSLDTSSSITSQPEAFFSKLQEFRETNKEECICSHPEPQLPGLRESSGSGVEEDHECVYCYRVNRRLFPVPVDPGTPCRLCRTPRDQQGPGTLAQPAHVRVSIPLSILEPPHRYHIHRRKSFDASDTLALPRHCLLGWDIFPPKSEKSSAPRNLDLWSSVSAEAQHQKLSGTSSPFHPASPMQMLPPTPTWSVPQVPRPHVPRQKP

SEQ ID NO: 51632 - protein, 387 aa, Homo sapiens
  Payload ID: 10280
  Gene Symbol: MFGE8
  Gene Name: milk fat globule-EGF factor 8 protein
  Uniprot ID: Q08431
  ENSP ID: ENSP00000268150
MPRPRLLAALCGALLCAPSLLVALDICSKNPCHNGGLCEEISQEVRGDVFPSYTCTCLKGYAGNHCETKCVEPLGLENGNIANSQIAASSVRVTFLGLQHWVPELARLNRAGMVNAWTPSSNDDNPWIQVNLLRRMWVTGVVTQGASRLASHEYLKAFKVAYSLNGHEFDFIHDVNKKHKEFVGNWNKNAVHVNLFETPVEAQYVRLYPTSCHTACTLRFELLGCELNGCANPLGLKNNSIPDKQITASSSYKTWGLHLFSWNPSYARLDKQGNFNAWVAGSYGNDQWLQVDLGSSKEVTGIITQGARNFGSVQFVASYKVAYSNDSANWTEYQDPRTGSSKIFPGNWDNHSHKKNLFETPILARYVRILPVAWHNRIALRLELLGC

SEQ ID NO: 51633 - protein, 335 aa, Homo sapiens
  Payload ID: 10280
  Gene Symbol: MFGE8
  Gene Name: milk fat globule-EGF factor 8 protein
  ENSP ID: ENSP00000268151
MPRPRLLAALCGALLCAPSLLVALDICSKNPCHNGGLCEEISQEVRGDVFPSYTCTCLKGYAGNHCETKCVEPLGLENGNIANSQIAASSVRVTFLGLQHWVPELARLNRAGMVNAWTPSSNDDNPWIQVNLLRRMWVTGVVTQGASRLASHEYLKAFKVAYSLNGHEFDFIHDVNKKHKEFVGNWNKNAVHVNLFETPVEAQYVRLYPTSCHTACTLRFELLGCELNGCANPLGLKNNSIPDKQITASSSYKTWGLHLFSWNPSYARLDKQGNFNAWVAGSYGNDQWLQIFPGNWDNHSHKKNLFETPILARYVRILPVAWHNRIALRLELLGC

SEQ ID NO: 51634 - protein, 343 aa, Homo sapiens
  Payload ID: 10280
  Gene Symbol: MFGE8
  Gene Name: milk fat globule-EGF factor 8 protein
  ENSP ID: ENSP00000444332
MPRPRLLAALCGALLCAPSLLVALECVEPLGLENGNIANSQIAASSVRVTFLGLQHWVPELARLNRAGMVNAWTPSSNDDNPWIQVNLLRRMWVTGVVTQGASRLASHEYLKAFKVAYSLNGHEFDFIHDVNKKHKEFVGNWNKNAVHVNLFETPVEAQYVRLYPTSCHTACTLRFELLGCELNGCANPLGLKNNSIPDKQITASSSYKTWGLHLFSWNPSYARLDKQGNFNAWVAGSYGNDQWLQVDLGSSKEVTGIITQGARNFGSVQFVASYKVAYSNDSANWTEYQDPRTGSSKIFPGNWDNHSHKKNLFETPILARYVRILPVAWHNRIALRLELLGC

SEQ ID NO: 51635 - protein, 25 aa, Homo sapiens
  Payload ID: 10280
  Gene Symbol: MFGE8
  Gene Name: milk fat globule-EGF factor 8 protein
  ENSP ID: ENSP00000452734
MPRPRLLAALCGALLCAPSLLVALG

SEQ ID NO: 51636 - protein, 268 aa, Homo sapiens
  Payload ID: 10280
  Gene Symbol: MFGE8
  Gene Name: milk fat globule-EGF factor 8 protein
  ENSP ID: ENSP00000452926
MPRPRLLAALCGALLCAPSLLVALDICSKNPCHNGGLCEEISQEVRGDVFPSYTCTCLKGYAGNHCETKCVEPLGLENGNIANSQIAASSVRVTFLGLQHWVPELARLNRAGMVNAWTPSSNDDNPWIQVNLLRRMWVTGVVTQGASRLASHEYLKAFKVAYSLNGHEFDFIHDVNKKHKEFVGNWNKNAVHVNLFETPVEAQYVRLYPTSCHTACTLRFELLGCELNAATRPGACISSAGTPPMHGWTSRATSTPGLRGATVTISGC

SEQ ID NO: 51637 - protein, 387 aa, Homo sapiens; identical to SEQ ID NO: 51632
  Payload ID: 10280
  Gene Symbol: MFGE8
  Gene Name: milk fat globule-EGF factor 8 protein
  Uniprot ID: Q08431
  ENSP ID: ENSP00000456281

SEQ ID NO: 51638 - protein, 75 aa, Homo sapiens
  Payload ID: 10280
  Gene Symbol: MFGE8
  Gene Name: milk fat globule-EGF factor 8 protein
  ENSP ID: ENSP00000478952
FDFIHDVNKKHKEFVGNWNKNAVHVNLFETPVEAQYVRLYPTSCHTACTLRFELLGCELNARKADLRRGADDREQ

SEQ ID NO: 51639 - protein, 1006 aa, Homo sapiens
  Payload ID: 10281
  Gene Symbol: MIB1
  Gene Name: mindbomb E3 ubiquitin protein ligase 1
  Uniprot ID: Q86YT6
  ENSP ID: ENSP00000261537
MSNSRNNRVMVEGVGARVVRGPDWKWGKQDGGEGHVGTVRSFESPEEVVVVWDNGTAANYRCSGAYDLRILDSAPTGIKHDGTMCDTCRQQPIIGIRWKCAECTNYDLCTVCYHGDKHHLRHRFYRITTPGSERVLLESRRKSKKITARGIFAGARVVRGVDWQWEDQDGGNGRRGKVTEIQDWSASSPHSAAYVLWDNGAKNLYRVGFEGMSDLKCVQDAKGGSFYRDHCPVLGEQNGNRNPGGLQIGDLVNIDLDLEIVQSLQHGHGGWTDGMFETLTTTGTVCGIDEDHDIVVQYPSGNRWTFNPAVLTKANIVRSGDAAQGAEGGTSQFQVGDLVQVCYDLERIKLLQRGHGEWAEAMLPTLGKVGRVQQIYSDSDLKVEVCGTSWTYNPAAVSKVASAGSAISNASGERLSQLLKKLFETQESGDLNEELVKAAANGDVAKVEDLLKRPDVDVNGQCAGHTAMQAASQNGHVDILKLLLKQNVDVEAEDKDGDRAVHHAAFGDEGAVIEVLHRGSADLNARNKRRQTPLHIAVNKGHLQVVKTLLDFGCHPSLQDSEGDTPLHDAISKKRDDILAVLLEAGADVTITNNNGFNALHHAALRGNPSAMRVLLSKLPRPWIVDEKKDDGYTALHLAALNNHVEVAELLVHQGNANLDIQNVNQQTALHLAVERQHTQIVRLLVRAGAKLDIQDKDGDTPLHEALRHHTLSQLRQLQDMQDVGKVDAAWEPSKNTLIMGLGTQGAEKKSAASIACFLAANGADLSIRNKKGQSPLDLCPDPNLCKALAKCHKEKVSGQVGSRSPSMISNDSETLEECMVCSDMKRDTLFGPCGHIATCSLCSPRVKKCLICKEQVQSRTKIEECVVCSDKKAAVLFQPCGHMCACENCANLMKKCVQCRAVVERRVPFIMCCGGKSSEDATDDISSGNIPVLQKDKDNTNVNADVQKLQQQLQDIKEQTMCPVCLDRLKNMIFLCGHGTCQLCGDRMSECPICRKAIERRILLY

SEQ ID NO: 51640 - protein, 1056 aa, Homo sapiens
  Payload ID: 10282
  Gene Symbol: MIB2
  Gene Name: mindbomb E3 ubiquitin protein ligase 2
  Uniprot ID: Q96AX9
  ENSP ID: ENSP00000348081
MAGALRRGRALGSRPSGPTVSSRRSPQCPVAQEGLGARSRPRVAPRSLARCGPSSRLMGWKPSEARGQSQSFQASGLQPRSLKAARRATGRPDRSRAAPPNMDPDPQAGVQVGMRVVRGVDWKWGQQDGGEGGVGTVVELGRHGSPSTPDRTVVVQWDQGTRTNYRAGYQGAHDLLLYDNAQIGVRHPNIICDCCKKHGLRGMRWKCRVCLDYDLCTQCYMHNKHELAHAFDRYETAHSRPVTLSPRQGLPRIPLRGIFQGAKVVRGPDWEWGSQDGGEGKPGRVVDIRGWDVETGRSVASVTWADGTTNVYRVGHKGKVDLKCVGEAAGGFYYKDHLPRLGKPAELQRRVSADSQPFQHGDKVKCLLDTDVLREMQEGHGGWNPRMAEFIGQTGTVHRITDRGDVRVQFNHETRWTFHPGALTKHHSFWVGDVVRVIGDLDTVKRLQAGHGEWTDDMAPALGRVGKVVKVFGDGNLRVAVAGQRWTFSPSCLVAYRPEEDANLDVAERARENKSSLSVALDKLRAQKSDPEHPGRLVVEVALGNAARALDLLRRRPEQVDTKNQGRTALQVAAYLGQVELIRLLLQARAGVDLPDDEGNTALHYAALGNQPEATRVLLSAGCRADAINSTQSTALHVAVQRGFLEVVRALCERGCDVNLPDAHSDTPLHSAISAGTGASGIVEVLTEVPNIDVTATNSQGFTLLHHASLKGHALAVRKILARARQLVDAKKEDGFTALHLAALNNHREVAQILIREGRCDVNVRNRKLQSPLHLAVQQAHVGLVPLLVDAGCSVNAEDEEGDTALHVALQRHQLLPLVADGAGGDPGPLQLLSRLQASGLPGSAELTVGAAVACFLALEGADVSYTNHRGRSPLDLAAEGRVLKALQGCAQRFRERQAGGGAAPGPRQTLGTPNTVTNLHVGAAPGPEAAECLVCSELALLVLFSPCQHRTVCEECARRMKKCIRCQVVVSKKLRPDGSEVASAAPAPGPPRQLVEELQSRYRQMEERITCPICIDSHIRLVFQCGHGACAPCGSALSACPICRQPIRDRIQIFV

SEQ ID NO: 51641 - protein, 919 aa, Homo sapiens
  Payload ID: 10282
  Gene Symbol: MIB2
  Gene Name: mindbomb E3 ubiquitin protein ligase 2
  ENSP ID: ENSP00000367980
MDPDPQAGVQVGMRVVRGVDWKWGQQDGGEGGVGTVVELGRHGSPSTPDRTVVVQWDQGTRTNYRAGYQGAHDLLLYDNAQIGVRHPNIICDCCKKHGLRGMRWKCRVCLDYDLCTQCYMHNKHELAHAFDRYETAHSRPVTLSPRQGLPRIPLRGIFQGAKVVRGPDWEWGSQDGGEGKPGRVVDIRGWDVETGRSVASVTWADGTTNVYRVGHKGKVDLKCVGEAAGGFYYKDHLPRLGKPAELQRRVSADSQPFQHGDKVKCLLDTDVLREMQEGHGGWNPRMAEHHSFWVGDVVRVIGDLDTVKRLQAGHGEWTDDMAPALGRVGKVVKVFGDGNLRVAVAGQRWTFSPSCLVAYRPEEDANLDVAERARENKSSLSVALDKLRAQKSDPEHPGRLVVEVALGNAARALDLLRRRPEQVDTKNQGRTALQVAAYLGQVELIRLLLQARAGVDLPDDEGNTALHYAALGNQPEATRVLLSAGCRADAINSTQSTALHVAVQRGFLEVVRALCERGCDVNLPDAHSDTPLHSAISAGTGASGIVEVLTEVPNIDVTATNSQGFTLLHHASLKGHALAVRKILARARQLVDAKKEDGFTALHLAALNNHREVAQILIREGRCDVNVRNRKLQSPLHLAVQQAHVGLVPLLVDAGCSVNAEDEEGDTALHVALQRHQLLPLVADGAGGDPGPLQLLSRLQASGLPGSAELTVGAAVACFLALEGADVSYTNHRGRSPLDLAAEGRVLKALQGCAQRFRERQAGGGAAPGPRQTLGTPNTVTNLHVGAAPGPEAAECLVCSELALLVLFSPCQHRTVCEECARRMKKCIRCQVVVSKKLRPDGSEVASAAPAPGPPRQLVEELQSRYRQMEERITCPICIDSHIRLVFQCGHGACAPCGSALSACPICRQPIRDRIQIFV

SEQ ID NO: 51642 - protein, 753 aa, Homo sapiens
  Payload ID: 10282
  Gene Symbol: MIB2
  Gene Name: mindbomb E3 ubiquitin protein ligase 2
  Uniprot ID: Q96AX9
  ENSP ID: ENSP00000367984
MDPDPQAGVQVGMRVVRGVDWKWGQQDGGEGGVGTVVELGRHGSPSTPDRTVVVQWDQGTRTNYRAGYQGAHDLLLYDNAQIGVRHPNIICDCCKKHGLRGMRWKCRVCLDYDLCTQCYMHNKHELAHAFDRYETAHSRPVTLSPRQGLPRIPLRGIFQGAKVVRGPDWEWGSQDGKPAELQRRVSADSQPFQHGDKVKCLLDTDVLREMQEGHGGWNPRMAEFIGQTGTVHRITDRGDVRVQFNHETRWTFHPGALTKHHSFWVGDVVRVIGDLDTVKRLQAGHGEWTDDMAPALGRVGKVVKVFGDGNLRVAVAGQRWTFSPSCLVAYRPEEDANLDVAERARENKSSLSVALDKLRAQKSDPEHPGRLVVEVALGNAARALDLLRRRPEQVDTKNQGRTALQVAAYLGQVELIRLLLQARAGVDLPDDEGNTALHYAALGNQPEATRVLLSAGCRADAINSTQSTALHVAVQRGFLEVVRALCERGCDVNLPDAHSDTPLHSAISAGTGASGIVEVLTEVPNIDVTATNSQGFTLLHHASLKGHALAVRKILARARQLVDAKKEDGFTALHLAALNNHREVAQILIREGRCDVNVRNRKLQSPLHLAVQQAHVGLVPLLVDAGCSVNAEDEEGDTALHVALQRHQLLPLVADGAGGDPGPLQLLSRLQASGLPGSAELTVGAAVACFLALEGADVSYTNHRGRSPLDLAAEGRVLKALQGCAQRFRVRAQDEEVHQVPGGRQQETAPRRL

SEQ ID NO: 51643 - protein, 114 aa, Homo sapiens
  Payload ID: 10282
  Gene Symbol: MIB2
  Gene Name: mindbomb E3 ubiquitin protein ligase 2
  ENSP ID: ENSP00000420935
MGWKPSEARGQSQSFQASGLQPRSLKAARRATGRPDRSRAAPPNMDPDPQAGVQASGTPTSSVTAARSTGCGGCAGSAVCAWTTTSARSATCTTSMSSPTPSTATRPLTRALSH

SEQ ID NO: 51644 - protein, 84 aa, Homo sapiens
  Payload ID: 10282
  Gene Symbol: MIB2
  Gene Name: mindbomb E3 ubiquitin protein ligase 2
  ENSP ID: ENSP00000423221
MDPDPQAGVQVGMRVVRGVDWKWGQQDGGEGGVGTVVELGRHGSPSTPDRTVVVQWDQGTRTNYRAGYQGAHDLLLRPAPQHHL

SEQ ID NO: 51645 - protein, 816 aa, Homo sapiens
  Payload ID: 10282
  Gene Symbol: MIB2
  Gene Name: mindbomb E3 ubiquitin protein ligase 2
  ENSP ID: ENSP00000424615
MDPSAHRSRAAPPNMDPDPQAGVQVGMRVVRGVDWKWGQQDGGEGGVGTVVELGRHGSPSTPDRTVVVQWDQGTRTNYRAGYQGAHDLLLYDNAQIGVRHPNIICDCCKKHGLRGMRWKCRVCLDYDLCTQCYMHNKHELAHAFDRYETAHSRPVTLSPRQGLPRIPLRGIFQGAKVVRGPDWEWGSQDGGEGKPGRVVDIRGWDVETGRSVASVTWADGTTNVYRVGHKGKVDLKCVGEAAGGFYYKDHLPRLGKPAELQRRVSADSQPFQHGDKVKCLLDTDVLREMQEGHGGWNPRMAEFIGQTGTVHRITDRGDVRVQFNHETRWTFHPGALTKHHSFWVGDVVRVIGDLDTVKRLQAGHGEWTDDMAPALGRVGKVVKVFGDGNLRVAVAGQRWTFSPSCLVAYRPEEDANLDVAERARENKSSLSVALDKLRAQKSDPEHPGRLVVEVALGNAARALDLLRRRPEQVDTKNQGRTALQVAAYLGQVELIRLLLQARAGVDLPDDEGNTALHYAALGNQPEATRVLLSAGCRADAINSTQSTALHVAVQRGFLEVVRALCERGCDVNLPDAHSDTPLHSAISAGTGASGIVEVLTEVPNIDVTATNSQGFTLLHHASLKGHALAVRKILARARQLVDAKKEDGFTALHLAALNNHREVAQILIREGRCDVNVRNRKLQSPLHLAVQQAHVGLVPLLVDAGCSVNAEDEEGDTALHVALQRHQLLPLVADGAGGDPGPLQLLSRLQASGLPGSAELTVGAAVACFLALEGADVSYTNHRGRSPLDLAAEGRVLKALQGCAQRFRERQAGGGR

SEQ ID NO: 51646 - protein, 395 aa, Homo sapiens
  Payload ID: 10282
  Gene Symbol: MIB2
  Gene Name: mindbomb E3 ubiquitin protein ligase 2
  ENSP ID: ENSP00000425032
MDPDPQAGVQVGMRVVRGVDWKWGQQDGGEGGVGTVVELGRHGSPSTPDRTVVVQWDQGTRTNYRAGYQGAHDLLLYDNAQIGVRHPNIICDCCKKHGLRGMRWKCRVCLDYDLCTQCYMHNKHELAHAFDRYETAHSRPVTLSPRQGLPRIPLRGIFQGAKVVRGPDWEWGSQDGGEGKPGRVVDIRGWDVETGRSVASVTWADGTTNVYRVGHKGKVDLKCVGEAAGGFYYKDHLPRLGKPAELQRRVSADSQPFQHGDKVKCLLDTDVLREMQEGHGGWNPRMAEHHSFWVGDVVRVIGDLDTVKRLQAGHGEWTDDMAPALGRVGKVVKVFGDGNLRVAVAGQRWTFSPSCLVAYRPEEDANLDVAERARENKSAAQLRRPVGGGAAPGHH

SEQ ID NO: 51647 - protein, 128 aa, Homo sapiens
  Payload ID: 10282
  Gene Symbol: MIB2
  Gene Name: mindbomb E3 ubiquitin protein ligase 2
  ENSP ID: ENSP00000426007
MGWKPSEARGQSQSFQASGLQPRSLKAARRATGRPDRSRAARPTMDPSAHRSRAAPPNMDPDPQAGVQASGTPTSSVTAARSTGCGGCAGSAVCAWTTTSARSATCTTSMSSPTPSTATRPLTRALSH

SEQ ID NO: 51648 - protein, 1070 aa, Homo sapiens
  Payload ID: 10282
  Gene Symbol: MIB2
  Gene Name: mindbomb E3 ubiquitin protein ligase 2
  Uniprot ID: Q96AX9
  ENSP ID: ENSP00000426103
MAGALRRGRALGSRPSGPTVSSRRSPQCPVAQEGLGARSRPRVAPRSLARCGPSSRLMGWKPSEARGQSQSFQASGLQPRSLKAARRATGRPDRSRAARPTMDPSAHRSRAAPPNMDPDPQAGVQVGMRVVRGVDWKWGQQDGGEGGVGTVVELGRHGSPSTPDRTVVVQWDQGTRTNYRAGYQGAHDLLLYDNAQIGVRHPNIICDCCKKHGLRGMRWKCRVCLDYDLCTQCYMHNKHELAHAFDRYETAHSRPVTLSPRQGLPRIPLRGIFQGAKVVRGPDWEWGSQDGGEGKPGRVVDIRGWDVETGRSVASVTWADGTTNVYRVGHKGKVDLKCVGEAAGGFYYKDHLPRLGKPAELQRRVSADSQPFQHGDKVKCLLDTDVLREMQEGHGGWNPRMAEFIGQTGTVHRITDRGDVRVQFNHETRWTFHPGALTKHHSFWVGDVVRVIGDLDTVKRLQAGHGEWTDDMAPALGRVGKVVKVFGDGNLRVAVAGQRWTFSPSCLVAYRPEEDANLDVAERARENKSSLSVALDKLRAQKSDPEHPGRLVVEVALGNAARALDLLRRRPEQVDTKNQGRTALQVAAYLGQVELIRLLLQARAGVDLPDDEGNTALHYAALGNQPEATRVLLSAGCRADAINSTQSTALHVAVQRGFLEVVRALCERGCDVNLPDAHSDTPLHSAISAGTGASGIVEVLTEVPNIDVTATNSQGFTLLHHASLKGHALAVRKILARARQLVDAKKEDGFTALHLAALNNHREVAQILIREGRCDVNVRNRKLQSPLHLAVQQAHVGLVPLLVDAGCSVNAEDEEGDTALHVALQRHQLLPLVADGAGGDPGPLQLLSRLQASGLPGSAELTVGAAVACFLALEGADVSYTNHRGRSPLDLAAEGRVLKALQGCAQRFRERQAGGGAAPGPRQTLGTPNTVTNLHVGAAPGPEAAECLVCSELALLVLFSPCQHRTVCEECARRMKKCIRCQVVVSKKLRPDGSEVASAAPAPGPPRQLVEELQSRYRQMEERITCPICIDSHIRLVFQCGHGACAPCGSALSACPICRQPIRDRIQIFV

SEQ ID NO: 51649 - protein, 969 aa, Homo sapiens
  Payload ID: 10282
  Gene Symbol: MIB2
  Gene Name: mindbomb E3 ubiquitin protein ligase 2
  ENSP ID: ENSP00000426128
MDPSAHRSRAAPPNMDPDPQAGVQVGMRVVRGVDWKWGQQDGGEGGVGTVVELGRHGSPSTPDRTVVVQWDQGTRTNYRAGYQGAHDLLLYDNAQIGVRHPNIICDCCKKHGLRGMRWKCRVCLDYDLCTQCYMHNKHELAHAFDRYETAHSRPVTLSPRQGLPRIPLRGIFQGAKVVRGPDWEWGSQDGGEGKPGRVVDIRGWDVETGRSVASVTWADGTTNVYRVGHKGKVDLKCVGEAAGGFYYKDHLPRLGKPAELQRRVSADSQPFQHGDKVKCLLDTDVLREMQEGHGGWNPRMAEFIGQTGTVHRITDRGDVRVQFNHETRWTFHPGALTKHHSFWVGDVVRVIGDLDTVKRLQAGHGEWTDDMAPALGRVGKVVKVFGDGNLRVAVAGQRWTFSPSCLVAYRPEEDANLDVAERARENKSSLSVALDKLRAQKSDPEHPGRLVVEVALGNAARALDLLRRRPEQVDTKNQGRTALQVAAYLGQVELIRLLLQARAGVDLPDDEGNTALHYAALGNQPEATRVLLSAGCRADAINSTQSTALHVAVQRGFLEVVRALCERGCDVNLPDAHSDTPLHSAISAGTGASGIVEVLTEVPNIDVTATNSQGFTLLHHASLKGHALAVRKILARARQLVDAKKEDGFTALHLAALNNHREVAQILIREGRCDVNVRNRKLQSPLHLAVQQAHVGLVPLLVDAGCSVNAEDEEGDTALHVALQRHQLLPLVADGAGGDPGPLQLLSRLQASGLPGSAELTVGAAVACFLALEGADVSYTNHRGRSPLDLAAEGRVLKALQGCAQRFRERQAGGGAAPGPRQTLGTPNTVTNLHVGAAPGPEAAECLVCSELALLVLFSPCQHRTVCEECARRMKKCIRCQVVVSKKLRPDGSEVASAAPAPGPPRQLVEELQSRYRQMEERITCPICIDSHIRLVFQCGHGACAPCGSALSACPICRQPIRDRIQIFV

SEQ ID NO: 51650 - protein, 148 aa, Homo sapiens
  Payload ID: 10282
  Gene Symbol: MIB2
  Gene Name: mindbomb E3 ubiquitin protein ligase 2
  ENSP ID: ENSP00000426603
MDPDPQAGVQVGMRVVRGVDWKWGQQDGGEGGVGTVVELGRHGSPSTPDRTVVVQWDQGTRTNYRAGYQGAHDLLLYDNAQIGVRHPNIICDCCKKHGLRGMRWKCRVCLDYDLCTQCYMHNKHELAHAFDRYETAHSRPVTLSPRQG

SEQ ID NO: 51651 - protein, 175 aa, Homo sapiens
  Payload ID: 10282
  Gene Symbol: MIB2
  Gene Name: mindbomb E3 ubiquitin protein ligase 2
  ENSP ID: ENSP00000426865
MDPDPQAGVQVGMRVVRGVDWKWGQQDGGEGGVGTVVELGRHGSPSTPDRTVVVQWDQGTRTNYRAGYQGAHDLLLYDNAQIGVRHPNIICDCCKKHGLRGMRWKCRVCLDYDLCTQCYMHNKHELAHAFDRYETAHSRPVTLSPRQGLPRIPLRGIFQGAKVVRGPDWEWGSQD

SEQ ID NO: 51652 - protein, 829 aa, Homo sapiens
  Payload ID: 10282
  Gene Symbol: MIB2
  Gene Name: mindbomb E3 ubiquitin protein ligase 2
  ENSP ID: ENSP00000427680
  MOD_RES (1)..(1): Any amino acid
XCCKKHGLRGMRWKCRVCLDYDLCTQCYMHNKHELAHAFDRYETAHSRPVTLSPRQGLPRIPLRGIFQGAKVVRGPDWEWGSQDGGEGKPGRVVDIRGWDVETGRSVASVTWADGTTNVYRVGHKGKVDLKCVGEAAGGFYYKDHLPRLGKPAELQRRVSADSQPFQHGDKVKCLLDTDVLREMQEGHGGWNPRMAEFIGQTGTVHRITDRGDVRVQFNHETRWTFHPGALTKALGRVGKVVKVFGDGNLRVAVAGQRWTFSPSCLVAYRPEEDANLDVAERARENKSSLSVALDKLRAQKSDPEHPGRLVVEVALGNAARALDLLRRRPEQVDTKNQGRTALQVAAYLGQVELIRLLLQARAGVDLPDDEGNTALHYAALGNQPEATRVLLSAGCRADAINSTQSTALHVAVQRGFLEVVRALCERGCDVNLPDAHSDTPLHSAISAGTGASGIVEVLTEVPNIDVTATNSQGFTLLHHASLKGHALAVRKILARARQLVDAKKEDGFTALHLAALNNHREVAQILIREGRCDVNVRNRKLQSPLHLAVQQAHVGLVPLLVDAGCSVNAEDEEGDTALHVALQRHQLLPLVADGAGGDPGPLQLLSRLQASGLPGSAELTVGAAVACFLALEGADVSYTNHRGRSPLDLAAEGRVLKALQGCAQRFRERQAGGGAAPGPRQTLGTPNTVTNLHVGAAPGPEAAECLVCSELALLVLFSPCQHRTVCEECARRMKKCIRCQVVVSKKLRPDGSEVASAAPAPGPPRQLVEELQSRYRQMEERITCPICIDSHIRLVFQCGHGACAPCGSALSACPICRQPIRDRIQIFV

SEQ ID NO: 51653 - protein, 1005 aa, Homo sapiens
  Payload ID: 10282
  Gene Symbol: MIB2
  Gene Name: mindbomb E3 ubiquitin protein ligase 2
  Uniprot ID: Q96AX9
  ENSP ID: ENSP00000428264
MAGALRRGRALGSRPSGPTVSSRRSPQCPVAQEGLGARSRPRVAPRSLARCGPSSRLMGWKPSEARGQSQSFQASGLQPRSLKAARRATGRPDRSRAARPTMDPSAHRSRAAPPNMDPDPQAGVQVGMRVVRGVDWKWGQQDGGEGGVGTVVELGRHGSPSTPDRTVVVQWDQGTRTNYRAGYQGAHDLLLYDNAQIGVRHPNIICDCCKKHGLRGMRWKCRVCLDYDLCTQCYMHNKHELAHAFDRYETAHSRPVTLSPRQGLPRIPLRGIFQGAKVVRGPDWEWGSQDGKPAELQRRVSADSQPFQHGDKVKCLLDTDVLREMQEGHGGWNPRMAEFIGQTGTVHRITDRGDVRVQFNHETRWTFHPGALTKHHSFWVGDVVRVIGDLDTVKRLQAGHGEWTDDMAPALGRVGKVVKVFGDGNLRVAVAGQRWTFSPSCLVAYRPEEDANLDVAERARENKSSLSVALDKLRAQKSDPEHPGRLVVEVALGNAARALDLLRRRPEQVDTKNQGRTALQVAAYLGQVELIRLLLQARAGVDLPDDEGNTALHYAALGNQPEATRVLLSAGCRADAINSTQSTALHVAVQRGFLEVVRALCERGCDVNLPDAHSDTPLHSAISAGTGASGIVEVLTEVPNIDVTATNSQGFTLLHHASLKGHALAVRKILARARQLVDAKKEDGFTALHLAALNNHREVAQILIREGRCDVNVRNRKLQSPLHLAVQQAHVGLVPLLVDAGCSVNAEDEEGDTALHVALQRHQLLPLVADGAGGDPGPLQLLSRLQASGLPGSAELTVGAAVACFLALEGADVSYTNHRGRSPLDLAAEGRVLKALQGCAQRFRERQAGGGAAPGPRQTLGTPNTVTNLHVGAAPGPEAAECLVCSELALLVLFSPCQHRTVCEECARRMKKCIRCQVVVSKKLRPDGSEVASAAPAPGPPRQLVEELQSRYRQMEERITCPICIDSHIRLVFQCGHGACAPCGSALSACPICRQPIRDRIQIFV

SEQ ID NO: 51654 - protein, 1066 aa, Homo sapiens
  Payload ID: 10282
  Gene Symbol: MIB2
  Gene Name: mindbomb E3 ubiquitin protein ligase 2
  Uniprot ID: Q96AX9
  ENSP ID: ENSP00000428660
MAGALRRGRALGSRPSGPTVSSRRSPQCPVAQEGLGARSRPRVAPRSLARCGPSSRLMGWKPSEARGQSQSFQASGLQPRSLKAARRATGRPDRSRAARPTMDPSAHRSRAAPPNMDPDPQAGVQVGMRVVRGVDWKWGQQDGGEGGVGTVVELGRHGSPSTPDRTVVVQWDQGTRTNYRAGYQGAHDLLLYDNAQIGVRHPNIICDCCKKHGLRGMRWKCRVCLDYDLCTQCYMHNKHELAHAFDRYETAHSRPVTLSPRQGLPRIPLRGIFQGAKVVRGPDWEWGSQDGGEGKPGRVVDIRGWDVETGRSVASVTWADGTTNVYRVGHKGKVDLKCVGEAAGGFYYKDHLPRLGKPAELQRRVSADSQPFQHGDKVKCLLDTDVLREMQEGHGGWNPRMAETGTVHRITDRGDVRVQFNHETRWTFHPGALTKHHSFWVGDVVRVIGDLDTVKRLQAGHGEWTDDMAPALGRVGKVVKVFGDGNLRVAVAGQRWTFSPSCLVAYRPEEDANLDVAERARENKSSLSVALDKLRAQKSDPEHPGRLVVEVALGNAARALDLLRRRPEQVDTKNQGRTALQVAAYLGQVELIRLLLQARAGVDLPDDEGNTALHYAALGNQPEATRVLLSAGCRADAINSTQSTALHVAVQRGFLEVVRALCERGCDVNLPDAHSDTPLHSAISAGTGASGIVEVLTEVPNIDVTATNSQGFTLLHHASLKGHALAVRKILARARQLVDAKKEDGFTALHLAALNNHREVAQILIREGRCDVNVRNRKLQSPLHLAVQQAHVGLVPLLVDAGCSVNAEDEEGDTALHVALQRHQLLPLVADGAGGDPGPLQLLSRLQASGLPGSAELTVGAAVACFLALEGADVSYTNHRGRSPLDLAAEGRVLKALQGCAQRFRERQAGGGAAPGPRQTLGTPNTVTNLHVGAAPGPEAAECLVCSELALLVLFSPCQHRTVCEECARRMKKCIRCQVVVSKKLRPDGSEVASAAPAPGPPRQLVEELQSRYRQMEERITCPICIDSHIRLVFQCGHGACAPCGSALSACPICRQPIRDRIQIFV

SEQ ID NO: 51655 - protein, 57 aa, Homo sapiens
  Payload ID: 10282
  Gene Symbol: MIB2
  Gene Name: mindbomb E3 ubiquitin protein ligase 2
  ENSP ID: ENSP00000463504
VHRITDRGDVRVQFNHETRWTFHPGALTKLPRASHLGFTPAQSWLLSAWTLLPWLWG

SEQ ID NO: 51656 - protein, 332 aa, Homo sapiens
  Payload ID: 10282
  Gene Symbol: MIB2
  Gene Name: mindbomb E3 ubiquitin protein ligase 2
  ENSP ID: ENSP00000464106
GRCDVNVRNRKLQSPLHLAVQQAHVGLVPLLVDAGCSVNAEDEEGDTALHVALQRHQLLPLVADGAGGDPGPLQLLSRTWGAGCWGCQVPGDASLGPAPAPALTGVCPAAQLQASGLPGSAELTVGAAVACFLALEGADVSYTNHRGRSPLDLAAEGRVLKALQGCAQRFRERQAGGGAAPGPRQTLGTPNTVTNLHVGAAPGPEAAECLVCSELALLVLFSPCQHRTVCEECARRMKKCIRCQVVVSKKLRPDGSEVASAAPAPGPPRQLVEELQSRYRQMEERITCPICIDSHIRLVFQCGHGACAPCGSALSACPICRQPIRDRIQIFV

SEQ ID NO: 51657 - protein, 855 aa, Homo sapiens
  Payload ID: 10283
  Gene Symbol: MCM10
  Gene Name: minichromosome maintenance 10 replication initiation factor
  ENSP ID: ENSP00000367966
MDEEEDNLSLLTALLEENESALDCNSEENNFLTRENGEPDAFDELFDADGDGESYTEEADDGETGETRDEKENLATLFGDMEDLTDEEEVPASQSTENRVLPAPAPRREKTNEELQEELRNLQEQMKALQEQLKVTTIKQTASPARLQKSPEKSPRPPLKERRVQRIQESTCFSAELDVPALPRTKRVARTPKASPPDPKSSSSRMTSAPSQPLQTISRNKPSGITRGQIVGTPGSSGETTQPICVEAFSGLRLRRPRVSSTEMNKKMTGRKLIRLSQIKEKMAREKLEEIDWVTFGVILKKVTPQSVNSGKTFSIWKLNDLRDLTQCVSLFLFGEVHKALWKTEQGTVVGILNANPMKPKDGSEEVCLSIDHPQKVLIMGEALDLGTCKAKKKNGEPCTQTVNLRDCEYCQYHVQAQYKKLSAKRADLQSTFSGGRIPKKFARRGTSLKERLCQDGFYYGGVSSASYAASIAAAVAPKKKIQTTLSNLVVKGTNLIIQETRQKLGIPQKSLSCSEEFKELMDLPTCGARNLKQHLAKATASGIMGSPKPAIKSISASALLKQQKQRMLEMRRRKSEEIQKRFLQSSSEVESPAVPSSSRQPPAQPPRTGSEFPRLEGAPATMTPKLGRGVLEGDDVLFYDESPPPRPKLSALAEAKKLAAITKLRAKGQVLTKTNPNSIKKKQKDPQDILEVKERVEKNTMFSSQAEDELEPARKKRREQLAYLESEEFQKILKAKSKHTGILKEAEAEMQERYFEPLVKKEQMEEKMRNIREVKCRVVTCKTCAYTHFKLLETCVSEQHEYHWHDGVKRFFKCPCGNRSISLDRLPNKHCSNCGLYKWERDGMLKVCHLRTNF

SEQ ID NO: 51658 - protein, 874 aa, Homo sapiens
  Payload ID: 10283
  Gene Symbol: MCM10
  Gene Name: minichromosome maintenance 10 replication initiation factor
  Uniprot ID: Q7L590
  ENSP ID: ENSP00000367986
MDEEEDNLSLLTALLEENESALDCNSEENNFLTRENGEPDAFDELFDADGDGESYTEEADDGETGETRDEKENLATLFGDMEDLTDEEEVPASQSTENRVLPAPAPRREKTNEELQEELRNLQEQMKALQEQLKVTTIKQTASPARLQKSPEKSPRPPLKERRVQRIQESTCFSAELDVPALPRTKRVARTPKASPPDPKSSSSRMTSAPSQPLQTISRNKPSGITRGQIVGTPGSSGETTQPICVEAFSGLRLRRPRVSSTEMNKKMTGRKLIRLSQIKEKMAREKLEEIDWVTFGVILKKVTPQSVNSGKTFSIWKLNDLRDLTQCVSLFLFGEVHKALWKTEQGTVVGILNANPMKPKDGSEEVCLSIDHPQKVLIMGEALDLGTCKAKKKNGEPCTQTVNLRDCEYCQYHVQAQYKKLSAKRADLQSTFSGGRIPKKFARRGTSLKERLCQDGFYYGGVSSASYAASIAAAVAPKKKIQTTLSNLVVKGTNLIIQETRQKLGIPQKSLSCSEEFKELMDLPTCGARNLKQHLAKATASGIMGSPKPAIKSISASALLKQQKQRMLEMRRRKSEEIQKRFLQSSSEVESPAVPSSSRQPPAQPPRTGSEFPRLEGAPATMTPKLGRGVLEGDDVLFYDESPPPRPKLSALAEAKKLAAITKLRAKGQVLTKTNPNSIKKKQKDPQDILEVKERVEKNTMFSSQAEDELEPARKKRREQLAYLESEEFQKILKAKSKHTGILKEAEAEMQERYFEPLVKKEQMEEKMRNIREVKCRVVTCKTCAYTHFKLLETCVSEQHEYHWHDGVKRFFKCPCGNRSISLDRLPNKHCSNCGLYKWERDGMLKEKTGPKIGGETLLPRGEEHAKFLNSLK

SEQ ID NO: 51659 - protein, 69 aa, Homo sapiens
  Payload ID: 10283
  Gene Symbol: MCM10
  Gene Name: minichromosome maintenance 10 replication initiation factor
  ENSP ID: ENSP00000417094
MEDLTDEEEVPASQSTENRVLPAPAPRREKTNEELQEELRNLQEQMKALQEQLKVTTIKQTASPARLQK

SEQ ID NO: 51660 - protein, 875 aa, Homo sapiens
  Payload ID: 10283
  Gene Symbol: MCM10
  Gene Name: minichromosome maintenance 10 replication initiation factor
  Uniprot ID: Q7L590
  ENSP ID: ENSP00000418268
MDEEEDNLSLLTALLEENESALDCNSEENNFLTRENGEPDAFDELFDADGDGESYTEEADDGETGETRDEKENLATLFGDMEDLTDEEEVPASQSTENRVLPAPAPRREKTNEELQEELRNLQEQMKALQEQLKVTTIKQTASPARLQKSPVEKSPRPPLKERRVQRIQESTCFSAELDVPALPRTKRVARTPKASPPDPKSSSSRMTSAPSQPLQTISRNKPSGITRGQIVGTPGSSGETTQPICVEAFSGLRLRRPRVSSTEMNKKMTGRKLIRLSQIKEKMAREKLEEIDWVTFGVILKKVTPQSVNSGKTFSIWKLNDLRDLTQCVSLFLFGEVHKALWKTEQGTVVGILNANPMKPKDGSEEVCLSIDHPQKVLIMGEALDLGTCKAKKKNGEPCTQTVNLRDCEYCQYHVQAQYKKLSAKRADLQSTFSGGRIPKKFARRGTSLKERLCQDGFYYGGVSSASYAASIAAAVAPKKKIQTTLSNLVVKGTNLIIQETRQKLGIPQKSLSCSEEFKELMDLPTCGARNLKQHLAKATASGIMGSPKPAIKSISASALLKQQKQRMLEMRRRKSEEIQKRFLQSSSEVESPAVPSSSRQPPAQPPRTGSEFPRLEGAPATMTPKLGRGVLEGDDVLFYDESPPPRPKLSALAEAKKLAAITKLRAKGQVLTKTNPNSIKKKQKDPQDILEVKERVEKNTMFSSQAEDELEPARKKRREQLAYLESEEFQKILKAKSKHTGILKEAEAEMQERYFEPLVKKEQMEEKMRNIREVKCRVVTCKTCAYTHFKLLETCVSEQHEYHWHDGVKRFFKCPCGNRSISLDRLPNKHCSNCGLYKWERDGMLKEKTGPKIGGETLLPRGEEHAKFLNSLK

SEQ ID NO: 51661 - protein, 824 aa, Homo sapiens
  Payload ID: 10284
  Gene Symbol: MCM8
  Gene Name: minichromosome maintenance 8 homologous recombination repair factor
  Uniprot ID: Q9UJA3
  ENSP ID: ENSP00000265187
MNGEYRGRGFGRGRFQSWKRGRGGGNFSGKWREREHRPDLSKTTGKRTSEQTPQFLLSTKTPQSMQSTLDRFIPYKGWKLYFSEVYSDSSPLIEKIQAFEKFFTRHIDLYDKDEIERKGSILVDFKELTEGGEVTNLIPDIATELRDAPEKTLACMGLAIHQVLTKDLERHAAELQAQEGLSNDGETMVNVPHIHARVYNYEPLTQLKNVRANYYGKYIALRGTVVRVSNIKPLCTKMAFLCAACGEIQSFPLPDGKYSLPTKCPVPVCRGRSFTALRSSPLTVTMDWQSIKIQELMSDDQREAGRIPRTIECELVHDLVDSCVPGDTVTITGIVKVSNAEEANSISNSKGQKTKSSEDGCKHGMLMEFSLKDLYAIQEIQAEENLFKLIVNSLCPVIFGHELVKAGLALALFGGSQKYADDKNRIPIRGDPHILVVGDPGLGKSQMLQAACNVAPRGVYVCGNTTTTSGLTVTLSKDSSSGDFALEAGALVLGDQGICGIDEFDKMGNQHQALLEAMEQQSISLAKAGVVCSLPARTSIIAAANPVGGHYNKAKTVSENLKMGSALLSRFDLVFILLDTPNEHHDHLLSEHVIAIRAGKQRTISSATVARMNSQDSNTSVLEVVSEKPLSERLKVVPGETIDPIPHQLLRKYIGYARQYVYPRLSTEAARVLQDFYLELRKQSQRLNSSPITTRQLESLIRLTEARARLELREEATKEDAEDIVEIMKYSMLGTYSDEFGNLDFERSQHGSGMSNRSTAKRFISALNNVAERTYNNIFQFHQLRQIAKELNIQVADFENFIGSLNDQGYLLKKGPKVYQLQTM

SEQ ID NO: 51662 - protein, 793 aa, Homo sapiens
  Payload ID: 10284
  Gene Symbol: MCM8
  Gene Name: minichromosome maintenance 8 homologous recombination repair factor
  Uniprot ID: Q9UJA3
  ENSP ID: ENSP00000368161
MNGEYRGRGFGRGRFQSWKRGRGGGNFSGKWREREHRPDLSKTTGKRTSEQTPQFLLSTKTPQSMQSTLDRFIPYKGWKLYFSEVYSDSSPLIEKIQAFEKFFTRHIDLYDKDEIERKGSILVDFKELTEGGEVTNLIPDIATELRDAPEKTLACMGLAIHQVLTKDLERHAAELQAQEGLSNDGETMVNVPHIHARVYNYEPLTQLKNVRANYYGKYIALRGTVVRVSNIKPLCTKMAFLCAACGEIQSFPLPDGKYSLPTKCPVPVCRGRSFTALRSSPLTVTMDWQSIKIQELMSDDQREAGRIPRTIECELVHDLVDSCVPGDTVTITGIVKVSNAEEGSRNKNDKCMFLLYIEANSISNSKGQKTKSSEDGCKHGMLMEFSLKDLYAIQEIQAEENLFKLIVNSLCPVIFGHEAACNVAPRGVYVCGNTTTTSGLTVTLSKDSSSGDFALEAGALVLGDQGICGIDEFDKMGNQHQALLEAMEQQSISLAKAGVVCSLPARTSIIAAANPVGGHYNKAKTVSENLKMGSALLSRFDLVFILLDTPNEHHDHLLSEHVIAIRAGKQRTISSATVARMNSQDSNTSVLEVVSEKPLSERLKVVPGETIDPIPHQLLRKYIGYARQYVYPRLSTEAARVLQDFYLELRKQSQRLNSSPITTRQLESLIRLTEARARLELREEATKEDAEDIVEIMKYSMLGTYSDEFGNLDFERSQHGSGMSNRSTAKRFISALNNVAERTYNNIFQFHQLRQIAKELNIQVADFENFIGSLNDQGYLLKKGPKVYQLQTM

SEQ ID NO: 51663 - protein, 880 aa, Homo sapiens
  Payload ID: 10284
  Gene Symbol: MCM8
  Gene Name: minichromosome maintenance 8 homologous recombination repair factor
  Uniprot ID: Q9UJA3
  ENSP ID: ENSP00000368164
MNGEYRGRGFGRGRFQSWKRGRGGGNFSGKWREREHRPDLSKTTGKRTSEQTPQFLLSTKTPQSMQSTLDRFIPYKGWKLYFSEVYSDSSPLIEKIQAFEKFFTRHIDLYDKDEIERKGSILVDFKELTEGGEVTNLIPDIATELRDAPEKTLACMGLAIHQVLTKDLERHAAELQAQEGLSNDGETMVNVPHIHARVYNYEPLTQLKNVRANYYGKYIALRGTVVRVSNIKPLCTKMAFLCAACGEIQSFPLPDGKYSLPTKCPVPVCRGRSFTALRSSPLTVTMDWQSIKIQELMSDDQREAGRIPRTIECELVHDLVDSCVPGDTVTITGIVKVSNAEEGSRNKNDKCMFLLYIEANSISNSKGQKTKSSEDGCKHGMLMEFSLKDLYAIQEIQAEENLFKLIVKWSLALSPRLEYSGAISAHCNLHLPSSNSSPTSACRVAGTTGMRHQTQLLLLVKAGLALALFGGSQKYADDKNRIPIRGDPHILVVGDPGLGKSQMLQAACNVAPRGVYVCGNTTTTSGLTVTLSKDSSSGDFALEAGALVLGDQGICGIDEFDKMGNQHQALLEAMEQQSISLAKAGVVCSLPARTSIIAAANPVGGHYNKAKTVSENLKMGSALLSRFDLVFILLDTPNEHHDHLLSEHVIAIRAGKQRTISSATVARMNSQDSNTSVLEVVSEKPLSERLKVVPGETIDPIPHQLLRKYIGYARQYVYPRLSTEAARVLQDFYLELRKQSQRLNSSPITTRQLESLIRLTEARARLELREEATKEDAEDIVEIMKYSMLGTYSDEFGNLDFERSQHGSGMSNRSTAKRFISALNNVAERTYNNIFQFHQLRQIAKELNIQVADFENFIGSLNDQGYLLKKGPKVYQLQTM

SEQ ID NO: 51664 - protein, 840 aa, Homo sapiens
  Payload ID: 10284
  Gene Symbol: MCM8
  Gene Name: minichromosome maintenance 8 homologous recombination repair factor
  Uniprot ID: Q9UJA3
  ENSP ID: ENSP00000368174
MNGEYRGRGFGRGRFQSWKRGRGGGNFSGKWREREHRPDLSKTTGKRTSEQTPQFLLSTKTPQSMQSTLDRFIPYKGWKLYFSEVYSDSSPLIEKIQAFEKFFTRHIDLYDKDEIERKGSILVDFKELTEGGEVTNLIPDIATELRDAPEKTLACMGLAIHQVLTKDLERHAAELQAQEGLSNDGETMVNVPHIHARVYNYEPLTQLKNVRANYYGKYIALRGTVVRVSNIKPLCTKMAFLCAACGEIQSFPLPDGKYSLPTKCPVPVCRGRSFTALRSSPLTVTMDWQSIKIQELMSDDQREAGRIPRTIECELVHDLVDSCVPGDTVTITGIVKVSNAEEGSRNKNDKCMFLLYIEANSISNSKGQKTKSSEDGCKHGMLMEFSLKDLYAIQEIQAEENLFKLIVNSLCPVIFGHELVKAGLALALFGGSQKYADDKNRIPIRGDPHILVVGDPGLGKSQMLQAACNVAPRGVYVCGNTTTTSGLTVTLSKDSSSGDFALEAGALVLGDQGICGIDEFDKMGNQHQALLEAMEQQSISLAKAGVVCSLPARTSIIAAANPVGGHYNKAKTVSENLKMGSALLSRFDLVFILLDTPNEHHDHLLSEHVIAIRAGKQRTISSATVARMNSQDSNTSVLEVVSEKPLSERLKVVPGETIDPIPHQLLRKYIGYARQYVYPRLSTEAARVLQDFYLELRKQSQRLNSSPITTRQLESLIRLTEARARLELREEATKEDAEDIVEIMKYSMLGTYSDEFGNLDFERSQHGSGMSNRSTAKRFISALNNVAERTYNNIFQFHQLRQIAKELNIQVADFENFIGSLNDQGYLLKKGPKVYQLQTM

SEQ ID NO: 51665 - protein, 840 aa, Homo sapiens; identical to SEQ ID NO: 51664
  Payload ID: 10284
  Gene Symbol: MCM8
  Gene Name: minichromosome maintenance 8 homologous recombination repair factor
  Uniprot ID: Q9UJA3
  ENSP ID: ENSP00000478141

SEQ ID NO: 51666 - protein, 391 aa, Homo sapiens
  Payload ID: 10285
  Gene Symbol: MCM9
  Gene Name: minichromosome maintenance 9 homologous recombination repair factor
  Uniprot ID: Q9NXL9
  ENSP ID: ENSP00000312870
MNSDQVTLVGQVFESYVSEYHKNDILLILKERDEDAHYPVVVNAMTLFETNMEIGEYFNMFPSEVLTIFDSALRRSALTILQSLSQPEAVSMKQNLHARISGLPVCPELVREHIPKTKDVGHFLSVTGTVIRTSLVKVLEFERDYMCNKCKHVFVIKADFEQYYTFCRPSSCPSLESCDSSKFTCLSGLSSSPTRCRDYQEIKIQEQVQRLSVGSIPRSMKVILEDDLVDSCKSGDDLTIYGIVMQRWKPFQQDVRCEVEIVLKANYIQVNNEQSSGIIMDEEVQKEFEDFWEYYKSDPFAGRNVILASLCPQVFGMYLVKLAVAMVLAGGIQRTDATGTRVRGESHLLLVGDPGTGKSQFLKYAAKITPRSVLTTGIGSTSAGIVCDNFK

SEQ ID NO: 51667 - protein, 1143 aa, Homo sapiens
  Payload ID: 10285
  Gene Symbol: MCM9
  Gene Name: minichromosome maintenance 9 homologous recombination repair factor
  Uniprot ID: Q9NXL9
  ENSP ID: ENSP00000314505
MNSDQVTLVGQVFESYVSEYHKNDILLILKERDEDAHYPVVVNAMTLFETNMEIGEYFNMFPSEVLTIFDSALRRSALTILQSLSQPEAVSMKQNLHARISGLPVCPELVREHIPKTKDVGHFLSVTGTVIRTSLVKVLEFERDYMCNKCKHVFVIKADFEQYYTFCRPSSCPSLESCDSSKFTCLSGLSSSPTRCRDYQEIKIQEQVQRLSVGSIPRSMKVILEDDLVDSCKSGDDLTIYGIVMQRWKPFQQDVRCEVEIVLKANYIQVNNEQSSGIIMDEEVQKEFEDFWEYYKSDPFAGRNVILASLCPQVFGMYLVKLAVAMVLAGGIQRTDATGTRVRGESHLLLVGDPGTGKSQFLKYAAKITPRSVLTTGIGSTSAGLTVTAVKDSGEWNLEAGALVLADAGLCCIDEFNSLKEHDRTSIHEAMEQQTISVAKAGLVCKLNTRTTILAATNPKGQYDPQESVSVNIALGSPLLSRFDLILVLLDTKNEDWDRIISSFILENKGYPSKSEKLWSMEKMKTYFCLIRNLQPTLSDVGNQVLLRYYQMQRQSDCRNAARTTIRLLESLIRLAEAHARLMFRDTVTLEDAITVVSVMESSMQGGALLGGVNALHTSFPENPGEQYQRQCELILEKLELQSLLSEELRRLERLQNQSVHQSQPRVLEVETTPGSLRNGPGEESNFRTSSQQEINYSTHIFSPGGSPEGSPVLDPPPHLEPNRSTSRKHSAQHKNNRDDSLDWFDFMATHQSEPKNTVVVSPHPKTSGENMASKISNSTSQGKEKSEPGQRSKVDIGLLPSPGETGVPWRADNVESNKKKRLALDSEAAVSADKPDSVLTHHVPRNLQKLCKERAQKLCRNSTRVPAQCTVPSHPQSTPVHSPDRMLDSPKRKRPKSLAQVEEPAIENVKPPGSPVAKLAKFTFKQKSKLIHSFEDHSHVSPGATKIAVHSPKISQRRTRRDAALPVKRPGKLTSTPGNQISSQPQGETKEVSQQPPEKHGPREKVMCAPEKRIIQPELELGNETGCAHLTCEGDKKEEVSGSNKSGKVHACTLARLANFCFTPPSESKSKSPPPERKNRGERGPSSPPTTTAPMRVSKRKSFQLRGSTEKLIVSKESLFTLPELGDEAFDCDWDEEMRKKS

SEQ ID NO: 51668 - protein, 156 aa, Homo sapiens
  Payload ID: 10285
  Gene Symbol: MCM9
  Gene Name: minichromosome maintenance 9 homologous recombination repair factor
  ENSP ID: ENSP00000394776
MNSDQVTLVGQVFESYVSEYHKNDILLILKERDEDAHYPVVVNAMTLFETNMEIGEYFNMFPSEVLTIFDSALRRSALTILQSLSQPEAVSMKQNLHARISGLPVCPELVREHIPKTKDVGHFLSVTGTVIRTSLVKVLEFERDYMCNKCKHVFVI

SEQ ID NO: 51669 - protein, 183 aa, Homo sapiens
  Payload ID: 10285
  Gene Symbol: MCM9
  Gene Name: minichromosome maintenance 9 homologous recombination repair factor
  ENSP ID: ENSP00000406576
  MOD_RES (1)..(1): Any amino acid
XSLVCKLNTRTTILAATNPKGQYDPQESVSVNIALGSPLLSRFDLILVLLDTKNEDWDRIISSFILENKAHARLMFRDTVTLEDAITVVSVMESSMQGGALLGGVNALHTSFPENPGEQYQRQCELILEKLELQSLLSEELRRLERLQNQSVHQSQPRVLEVETTPGSLRNGPGEESNFRTSS

SEQ ID NO: 51670 - protein, 78 aa, Homo sapiens
  Payload ID: 10285
  Gene Symbol: MCM9
  Gene Name: minichromosome maintenance 9 homologous recombination repair factor
  ENSP ID: ENSP00000426890
MNSDQVTLVGQVFESYVSEYHKNDILLILKERDEDAHYPVVVNAMTLFETNMEIGEYFNMFPSEVLTIFDSALRRSAL

SEQ ID NO: 51671 - protein, 1143 aa, Homo sapiens; identical to SEQ ID NO: 51667
  Payload ID: 10285
  Gene Symbol: MCM9
  Gene Name: minichromosome maintenance 9 homologous recombination repair factor
  Uniprot ID: Q9NXL9
  ENSP ID: ENSP00000480469

SEQ ID NO: 51672 - protein, 642 aa, Homo sapiens
  Payload ID: 10286
  Gene Symbol: MCMBP
  Gene Name: minichromosome maintenance complex binding protein
  Uniprot ID: Q9BTE3
  ENSP ID: ENSP00000353098
MPCGEDWLSHPLGIVQGFFAQNGVNPDWEKKVIEYFKEKLKENNAPKWVPSLNEVPLHYLKPNSFVKFRCMIQDMFDPEFYMGVYETVNQNTKAHVLHFGKYRDVAECGPQQELDLNSPRNTTLERQTFYCVPVPGESTWVKEAYVNANQARVSPSTSYTPSRHKRSYEDDDDMDLQPNKQKDQHAGARQAGSVGGLQWCGEPKRLETEASTGQQLNSLNLSSPFDLNFPLPGEKGPACLVKVYEDWDCFKVNDILELYGILSVDPVLSILNNDERDASALLDPMECTDTAEEQRVHSPPASLVPRIHVILAQKLQHINPLLPACLNKEESKTCKFVSSFMSELSPVRAELLGFLTHALLGDSLAAEYLILHLISTVYTRRDVLPLGKFTVNLSGCPRNSTFTEHLYRIIQHLVPASFRLQMTIENMNHLKFIPHKDYTANRLVSGLLQLPSNTSLVIDETLLEQGQLDTPGVHNVTALSNLITWQKVDYDFSYHQMEFPCNINVFITSEGRSLLPADCQIHLQPQLIPPNMEEYMNSLLSAVLPSVLNKFRIYLTLLRFLEYSISDEITKAVEDDFVEMRKNDPQSITADDLHQLLVVARCLSLSAGQTTLSRERWLRAKQLESLRRTRLQQQKCVNGNEL

SEQ ID NO: 51673 - protein, 640 aa, Homo sapiens
  Payload ID: 10286
  Gene Symbol: MCMBP
  Gene Name: minichromosome maintenance complex binding protein
  Uniprot ID: Q9BTE3
  ENSP ID: ENSP00000358073
MPCGEDWLSHPLGIVQGFFAQNGVNPDWEKKVIEYFKEKLKENNAPKWVPSLNEVPLHYLKPNSFVKFRCMIQDMFDPEFYMGVYETVNQNTKAHVLHFGKYRDVAECGPQQELDLNSPRNTTLERQTFYCVPVPGESTWVKEAYVNANQARVSPSTSYTPSRHKRSYEDDDDMDLQPNKQKDQHAGARQAGSVGGLQWCGEPKRLETEASTGQQLNSLNLSSPFDLNFPLPGEKGPACLVKVYEDWDCFKVNDILELYGILSVDPVLSILNNDERDASALLDPMECTDTAEEQRVHSPPASLVPRIHVILAQKLQHINPLLPACLNKEESKTFVSSFMSELSPVRAELLGFLTHALLGDSLAAEYLILHLISTVYTRRDVLPLGKFTVNLSGCPRNSTFTEHLYRIIQHLVPASFRLQMTIENMNHLKFIPHKDYTANRLVSGLLQLPSNTSLVIDETLLEQGQLDTPGVHNVTALSNLITWQKVDYDFSYHQMEFPCNINVFITSEGRSLLPADCQIHLQPQLIPPNMEEYMNSLLSAVLPSVLNKFRIYLTLLRFLEYSISDEITKAVEDDFVEMRKNDPQSITADDLHQLLVVARCLSLSAGQTTLSRERWLRAKQLESLRRTRLQQQKCVNGNEL

SEQ ID NO: 51674 - protein, 904 aa, Homo sapiens
  Payload ID: 10287
  Gene Symbol: MCM2
  Gene Name: minichromosome maintenance complex component 2
  Uniprot ID: P49736
  ENSP ID: ENSP00000265056
MAESSESFTMASSPAQRRRGNDPLTSSPGRSSRRTDALTSSPGRDLPPFEDESEGLLGTEGPLEEEEDGEELIGDGMERDYRAIPELDAYEAEGLALDDEDVEELTASQREAAERAMRQRDREAGRGLGRMRRGLLYDSDEEDEERPARKRRQVERATEDGEEDEEMIESIENLEDLKGHSVREWVSMAGPRLEIHHRFKNFLRTHVDSHGHNVFKERISDMCKENRESLVVNYEDLAAREHVLAYFLPEAPAELLQIFDEAALEVVLAMYPKYDRITNHIHVRISHLPLVEELRSLRQLHLNQLIRTSGVVTSCTGVLPQLSMVKYNCNKCNFVLGPFCQSQNQEVKPGSCPECQSAGPFEVNMEETIYQNYQRIRIQESPGKVAAGRLPRSKDAILLADLVDSCKPGDEIELTGIYHNNYDGSLNTANGFPVFATVILANHVAKKDNKVAVGELTDEDVKMITSLSKDQQIGEKIFASIAPSIYGHEDIKRGLALALFGGEPKNPGGKHKVRGDINVLLCGDPGTAKSQFLKYIEKVSSRAIFTTGQGASAVGLTAYVQRHPVSREWTLEAGALVLADRGVCLIDEFDKMNDQDRTSIHEAMEQQSISISKAGIVTSLQARCTVIAAANPIGGRYDPSLTFSENVDLTEPIISRFDILCVVRDTVDPVQDEMLARFVVGSHVRHHPSNKEEEGLANGSAAEPAMPNTYGVEPLPQEVLKKYIIYAKERVHPKLNQMDQDKVAKMYSDLRKESMATGSIPITVRHIESMIRMAEAHARIHLRDYVIEDDVNMAIRVMLESFIDTQKFSVMRSMRKTFARYLSFRRDNNELLLFILKQLVAEQVTYQRNRFGAQQDTIEVPEKDLVDKARQINIHNLSAFYDSELFRMNKFSHDLKRKMILQQF

SEQ ID NO: 51675 - protein, 91 aa, Homo sapiens
  Payload ID: 10287
  Gene Symbol: MCM2
  Gene Name: minichromosome maintenance complex component 2
  ENSP ID: ENSP00000417800
  MOD_RES (1)..(1): Any amino acid
XLGTEGPLEEEEDGEELIGDGMERDYRAIPELDAYEAEGLALDDEDVEELTASQREAAERAMRQRDREAGRGLGRMRRGLLYGVSCLPRQR

SEQ ID NO: 51676 - protein, 103 aa, Homo sapiens
  Payload ID: 10287
  Gene Symbol: MCM2
  Gene Name: minichromosome maintenance complex component 2
  ENSP ID: ENSP00000418930
MASSPAQRRRGNDPLTSSPGRSSRRTDALTSSPGRDLPPFEDESEGLLGTEGPLEEEEDGEELIGDGMERDYRAIPELDAYEAEGLALDDEDVEELTASQREA

SEQ ID NO: 51677 - protein, 128 aa, Homo sapiens
  Payload ID: 10287
  Gene Symbol: MCM2
  Gene Name: minichromosome maintenance complex component 2
  ENSP ID: ENSP00000419802
MASSPAQRRRGNDPLTSSPGRSSRRTDALTSSPGRDLPPFEDESEGLLGTEGPLEEEEDGEELIGDGMERDYRAIPELDAYEAEGLALDDEDVEELTASQREAAERAMRQRDREAGRGLGRMRRGLLY

SEQ ID NO: 51678 - protein, 146 aa, Homo sapiens
  Payload ID: 10287
  Gene Symbol: MCM2
  Gene Name: minichromosome maintenance complex component 2
  ENSP ID: ENSP00000420007
MAESSESFTMASSPAQRRRGNDPLTSSPGRSSRRTDALTSSPGRDLPPFEDESEGLLGTEGPLEEEEDGEELIGDGMERDYRAIPELDAYEAEGLALDDEDVEELTASQREAAERAMRQRDREAGRGLGRMRRGLLYGVSCLPRQR

SEQ ID NO: 51679 - protein, 836 aa, Homo sapiens
  Payload ID: 10287
  Gene Symbol: MCM2
  Gene Name: minichromosome maintenance complex component 2
  ENSP ID: ENSP00000420528
  MOD_RES (1)..(1): Any amino acid
XSDEEDEERPARKRRQVERATEDGEEDEEMIESIENLEDLKGHSVREWVSMAGPRLEIHHRFKNFLRTHVDSHGHNVFKERISDMCKENRESLVVNYEDLAAREHVLAYFLPEAPAELLQIFDEAALEVVLAMYPKYDRITNHIHVRISHLPLVEELRSLRQLHLNQLIRTSGVVTSCTGVLPQLSMVKYNCNKCNFVLGPFCQSQNQEVKPGSCPECQSAGPFEVNMEETIYQNYQRIRIQESPGKVAAGRLPRSKDAILLADLVDSCKPGDEIELTGIYHNNYDGSLNTANGFPVFATVILANHVAKKDNKVAVGELTDEDVKMITSLSKDQQIGEKESSRNASLAEAGIGAIPSQLLAIEPSLRRSGVPIGEVGVSQRQEARSFSSANTHWFLEDLLGPSCRDTMIFASIAPSIYGHEDIKRGLALALFGGEPKNPGGKHKVRGDINVLLCGDPGTAKSQFLKYIEKVSSRAIFTTGQGASAVGLTAYVQRHPVSREWTLEAGALVLADRGVCLIDEFDKMNDQDRTSIHEAMEQQSISISKAGIVTSLQARCTVIAAANPIGGRYDPSLTFSENVDLTEPIISRFDILCVVRDTVDPVQDEMLARFVVGSHVRHHPSNKEEEGLANGSAAEPAMPNTYGVEPLPQEVLKKYIIYAKERVHPKLNQMDQDKVAKMYSDLRKESMATGSIPITVRHIESMIRMAEAHARIHLRDYVIEDDVNMAIRVMLESFIDTQKFSVMRSMRKTFARYLSFRRDNNELLLFILKQLVAEQVTYQRNRFGAQQDTIEVPEKDLVDKARQINIHNLSAFYDSELFRMNKFSHDLKRKMILQQF

SEQ ID NO: 51680 - protein, 808 aa, Homo sapiens
  Payload ID: 10288
  Gene Symbol: MCM3
  Gene Name: minichromosome maintenance complex component 3
  Uniprot ID: P25205
  ENSP ID: ENSP00000229854
MAGTVVLDDVELREAQRDYLDFLDDEEDQGIYQSKVRELISDNQYRLIVNVNDLRRKNEKRANRLLNNAFEELVAFQRALKDFVASIDATYAKQYEEFYVGLEGSFGSKHVSPRTLTSCFLSCVVCVEGIVTKCSLVRPKVVRSVHYCPATKKTIERRYSDLTTLVAFPSSSVYPTKDEENNPLETEYGLSVYKDHQTITIQEMPEKAPAGQLPRSVDVILDDDLVDKAKPGDRVQVVGTYRCLPGKKGGYTSGTFRTVLIACNVKQMSKDAQPSFSAEDIAKIKKFSKTRSKDIFDQLAKSLAPSIHGHDYVKKAILCLLLGGVERDLENGSHIRGDINILLIGDPSVAKSQLLRYVLCTAPRAIPTTGRGSSGVGLTAAVTTDQETGERRLEAGAMVLADRGVVCIDEFDKMSDMDRTAIHEVMEQGRVTIAKAGIHARLNARCSVLAAANPVYGRYDQYKTPMENIGLQDSLLSRFDLLFIMLDQMDPEQDREISDHVLRMHRYRAPGEQDGDAMPLGSAVDILATDDPNFSQEDQQDTQIYEKHDNLLHGTKKKKEKMVSAAFMKKYIHVAKIIKPVLTQESATYIAEEYSRLRSQDSMSSDTARTSPVTARTLETLIRLATAHAKARMSKTVDLQDAEEAVELVQYAYFKKVLEKEKKRKKRSEDESETEDEEEKSQEDQEQKRKRRKTRQPDAKDGDSYDPYDFSDTEEEMPQVHTPKTADSQETKESQKVELSESRLKAFKVALLDVFREAHAQSIGMNRLTESINRDSEEPFSSVEIQAALSKMQDDNQVMVSEGIIFLI

SEQ ID NO: 51681 - protein, 818 aa, Homo sapiens
  Payload ID: 10288
  Gene Symbol: MCM3
  Gene Name: minichromosome maintenance complex component 3
  ENSP ID: ENSP00000388647
MLICSQGPRLFLEVTFGGGKSSEVFAPGWSHPGNLHATLVEVVLWQRAWRVPWCWTMWSCGRLREITWTSWTTRLLNNAFEELVAFQRALKDFVASIDATYAKQYEEFYVGLEGSFGSKHVSPRTLTSCFLSCVVCVEGIVTKCSLVRPKVVRSVHYCPATKKTIERRYSDLTTLVAFPSSSVYPTKDEENNPLETEYGLSVYKDHQTITIQEMPEKAPAGQLPRSVDVILDDDLVDKAKPGDRVQVVGTYRCLPGKKGGYTSGTFRTVLIACNVKQMSKDAQPSFSAEDIAKIKKFSKTRSKDIFDQLAKSLAPSIHGHDYVKKAILCLLLGGVERDLENGSHIRGDINILLIGDPSVAKSQLLRYVLCTAPRAIPTTGRGSSGVGLTAAVTTDQETGERRLEAGAMVLADRGVVCIDEFDKMSDMDRTAIHEVMEQGRVTIAKAGIHARLNARCSVLAAANPVYGRYDQYKTPMENIGLQDSLLSRFDLLFIMLDQMDPEQDREISDHVLRMHRYRAPGEQDGDAMPLGSAVDILATDDPNFSQEDQQDTQIYEKHDNLLHGTKKKKEKMVSAAFMKKYIHVAKIIKPVLTQESATYIAEEYSRLRSQDSMSSDTARTSPVTARTLETLIRLATAHAKARMSKTVDLQDAEEAVELVQYAYFKKVLEKEKKRKKRSEDESETEDEEEKSQEDQEQKRKRRKTRQPDAKDGDSYDPYDFSDTEEEMPQVHTPKTADSQETKESQKVELSESRLKAFKVALLDVFREAHAQSIGMNRLTESINRDSEEPFSSVEIQAALSKMQDDNQVMVSEGIIFLI

SEQ ID NO: 51682 - protein, 328 aa, Homo sapiens
  Payload ID: 10288
  Gene Symbol: MCM3
  Gene Name: minichromosome maintenance complex component 3
  ENSP ID: ENSP00000407651
RYRAPGEQDGDAMPLGSAVDILATDDPNFSQEDQQDTQIYEKHDNLLHGTKKKKEKMVSAAFMKKYIHVAKIIKPVLTQESATYIAEEYSRLRSQDSMSSDTARTSPVTARTLETLIRLATAHAKARMSKTVDLQDAEEAVELVQYAYFKKVLEKEKKRKKRSEDESETEDEEEKSQEDQEQKRKRRKTRQPDAKDGDSYDPYDFSDTEEEMPQVHTPKTADSQETKESQKVELSESRDGISPCCPGWSWTPGLKQSFYLSLPKGWDYRHKPLCLFDLILFNDCRVSMVEGIQGGPLGCVPGSSCAVNRHESPHRIHQPGQRRALLFS

SEQ ID NO: 51683 - protein, 77 aa, Homo sapiens
  Payload ID: 10288
  Gene Symbol: MCM3
  Gene Name: minichromosome maintenance complex component 3
  ENSP ID: ENSP00000470057
MLPRSPPLPRGNLWWREEFGSFRAGVESSWEPPRDFGGGSSLAAGMAGTVVLDDVELREAQRDYLDFLDDEASEQCL

SEQ ID NO: 51684 - protein, 853 aa, Homo sapiens
  Payload ID: 10288
  Gene Symbol: MCM3
  Gene Name: minichromosome maintenance complex component 3
  Uniprot ID: P25205
  ENSP ID: ENSP00000472940
MLPRSPPLPRGNLWWREEFGSFRAGVESSWEPPRDFGGGSSLAAGMAGTVVLDDVELREAQRDYLDFLDDEEDQGIYQSKVRELISDNQYRLIVNVNDLRRKNEKRANRLLNNAFEELVAFQRALKDFVASIDATYAKQYEEFYVGLEGSFGSKHVSPRTLTSCFLSCVVCVEGIVTKCSLVRPKVVRSVHYCPATKKTIERRYSDLTTLVAFPSSSVYPTKDEENNPLETEYGLSVYKDHQTITIQEMPEKAPAGQLPRSVDVILDDDLVDKAKPGDRVQVVGTYRCLPGKKGGYTSGTFRTVLIACNVKQMSKDAQPSFSAEDIAKIKKFSKTRSKDIFDQLAKSLAPSIHGHDYVKKAILCLLLGGVERDLENGSHIRGDINILLIGDPSVAKSQLLRYVLCTAPRAIPTTGRGSSGVGLTAAVTTDQETGERRLEAGAMVLADRGVVCIDEFDKMSDMDRTAIHEVMEQGRVTIAKAGIHARLNARCSVLAAANPVYGRYDQYKTPMENIGLQDSLLSRFDLLFIMLDQMDPEQDREISDHVLRMHRYRAPGEQDGDAMPLGSAVDILATDDPNFSQEDQQDTQIYEKHDNLLHGTKKKKEKMVSAAFMKKYIHVAKIIKPVLTQESATYIAEEYSRLRSQDSMSSDTARTSPVTARTLETLIRLATAHAKARMSKTVDLQDAEEAVELVQYAYFKKVLEKEKKRKKRSEDESETEDEEEKSQEDQEQKRKRRKTRQPDAKDGDSYDPYDFSDTEEEMPQVHTPKTADSQETKESQKVELSESRLKAFKVALLDVFREAHAQSIGMNRLTESINRDSEEPFSSVEIQAALSKMQDDNQVMVSEGIIFLI

SEQ ID NO: 51685 - protein, 853 aa, Homo sapiens; identical to SEQ ID NO: 51684
  Payload ID: 10288
  Gene Symbol: MCM3
  Gene Name: minichromosome maintenance complex component 3
  Uniprot ID: P25205
  ENSP ID: ENSP00000480987

SEQ ID NO: 51686 - protein, 1980 aa, Homo sapiens
  Payload ID: 10289
  Gene Symbol: MCM3AP
  Gene Name: minichromosome maintenance complex component 3 associated protein
  Uniprot ID: O60318
  ENSP ID: ENSP00000291688
MNPTNPFSGQQPSAFSASSSNVGTLPSKPPFRFGQPSLFGQNSTLSGKSSGFSQVSSFPASSGVSHSSSVQTLGFTQTSSVGPFSGLEHTSTFVATSGPSSSSVLGNTGFSFKSPTSVGAFPSTSAFGQEAGEIVNSGFGKTEFSFKPLENAVFKPILGAESEPEKTQSQIASGFFTFSHPISSAPGGLAPFSFPQVTSSSATTSNFTFSKPVSSNNSLSAFTPALSNQNVEEEKRGPKSIFGSSNNSFSSFPVSSAVLGEPFQASKAGVRQGCEEAVSQVEPLPSLMKGLKRKEDQDRSPRRHGHEPAEDSDPLSRGDHPPDKRPVRLNRPRGGTLFGRTIQDVFKSNKEVGRLGNKEAKKETGFVESAESDHMAIPGGNQSVLAPSRIPGVNKEEETESREKKEDSLRGTPARQSNRSESTDSLGGLSPSEVTAIQCKNIPDYLNDRTILENHFGKIAKVQRIFTRRSKKLAVVHFFDHASAALARKKGKSLHKDMAIFWHRKKISPNKKPFSLKEKKPGDGEVSPSTEDAPFQHSPLGKAAGRTGASSLLNKSSPVKKPSLLKAHQFEGDSFDSASEGSEGLGPCVLSLSTLIGTVAETSKEKYRLLDQRDRIMRQARVKRTDLDKARTFVGTCLDMCPEKERYMRETRSQLSVFEVVPGTDQVDHAAAVKEYSRSSADQEEPLPHELRPLPVLSRTMDYLVTQIMDQKEGSLRDWYDFVWNRTRGIRKDITQQHLCDPLTVSLIEKCTRFHIHCAHFMCEEPMSSFDAKINNENMTKCLQSLKEMYQDLRNKGVFCASEAEFQGYNVLLSLNKGDILREVQQFHPAVRNSSEVKFAVQAFAALNSNNFVRFFKLVQSASYLNACLLHCYFSQIRKDALRALNFAYTVSTQRSTIFPLDGVVRMLLFRDCEEATDFLTCHGLTVSDGCVELNRSAFLEPEGLSKTRKSVFITRKLTVSVGEIVNGGPLPPVPRHTPVCSFNSQNKYIGESLAAELPVSTQRPGSDTVGGGRGEECGVEPDAPLSSLPQSLPAPAPSPVPLPPVLALTPSVAPSLFQLSVQPEPPPPEPVPMYSDEDLAQVVDELIQEALQRDCEEVGSAGAAYAAAALGVSNAAMEDLLTAATTGILRHIAAEEVSKERERREQERQRAEEERLKQERELVLSELSQGLAVELMERVMMEFVRETCSQELKNAVETDQRVRVARCCEDVCAHLVDLFLVEEIFQTAKETLQELQCFCKYLQRWREAVTARKKLRRQMRAFPAAPCCVDVSDRLRALAPSAECPIAEENLARGLLDLGHAGRLGISCTRLRRLRNKTAHQMKVQHFYQQLLSDVAWASLDLPSLVAEHLPGRQEHVFWKLVLVLPDVEEQSPESCGRILANWLKVKFMGDEGSVDDTSSDAGGIQTLSLFNSLSSKGDQMISVNVCIKVAHGALSDGAIDAVETQKDLLGASGLMLLLPPKMKSEDMAEEDVYWLSALLQLKQLLQAKPFQPALPLVVLVPSPGGDAVEKEVEDGLMLQDLVSAKLISDYTVTEIPDTINDLQGSTKVLQAVQWLVSHCPHSLDLCCQTLIQYVEDGIGHEFSGRFFHDRRERRLGGLASQEPGAIIELFNSVLQFLASVVSSEQLCDLSWPVTEFAEAGGSRLLPHLHWNAPEHLAWLKQAVLGFQLPQMDLPPLGAPWLPVCSMVVQYASQIPSSRQTQPVLQSQVENLLHRTYCRWKSKSPSPVHGAGPSVMEIPWDDLIALCINHKLRDWTPPRLPVTSEALSEDGQICVYFFKNDLKKYDVPLSWEQARLQTQKELQLREGRLAIKPFHPSANNFPIPLLHMHRNWKRSTECAQEGRIPSTEDLMRGASAEELLAQCLSSSLLLEKEENKRFEDQLQQWLSEDSGAFTDLTSLPLYLPQTLVSLSHTIEPVMKTSVTTSPQSDMMREQLQLSEATGTCLGERLKHLERLIRSSREEEVASELHLSALLDMVDI

SEQ ID NO: 51687 - protein, 1980 aa, Homo sapiens; identical to SEQ ID NO: 51686
  Payload ID: 10289
  Gene Symbol: MCM3AP
  Gene Name: minichromosome maintenance complex component 3 associated protein
  Uniprot ID: O60318
  ENSP ID: ENSP00000380820

SEQ ID NO: 51688 - protein, 94 aa, Homo sapiens
  Payload ID: 10289
  Gene Symbol: MCM3AP
  Gene Name: minichromosome maintenance complex component 3 associated protein
  ENSP ID: ENSP00000408934
MNPTNPFSGQQPSAFSASSSNVGTLPSKPPFRFGQPSLFGQNSTLSGKSSGFSQVSSFPASSGVSHSSSVQTLGFTQTSSVGPFSGLEHTSTFV

SEQ ID NO: 51689 - protein, 863 aa, Homo sapiens
  Payload ID: 10290
  Gene Symbol: MCM4
  Gene Name: minichromosome maintenance complex component 4
  Uniprot ID: P33991
  ENSP ID: ENSP00000262105
MSSPASTPSRRGSRRGRATPAQTPRSEDARSSPSQRRRGEDSTSTGELQPMPTSPGVDLQSPAAQDVLFSSPPQMHSSAIPLDFDVSSPLTYGTPSSRVEGTPRSGVRGTPVRQRPDLGSAQKGLQVDLQSDGAAAEDIVASEQSLGQKLVIWGTDVNVAACKENFQRFLQRFIDPLAKEEENVGIDITEPLYMQRLGEINVIGEPFLNVNCEHIKSFDKNLYRQLISYPQEVIPTFDMAVNEIFFDRYPDSILEHQIQVRPFNALKTKNMRNLNPEDIDQLITISGMVIRTSQLIPEMQEAFFQCQVCAHTTRVEMDRGRIAEPSVCGRCHTTHSMALIHNRSLFSDKQMIKLQESPEDMPAGQTPHTVILFAHNDLVDKVQPGDRVNVTGIYRAVPIRVNPRVSNVKSVYKTHIDVIHYRKTDAKRLHGLDEEAEQKLFSEKRVELLKELSRKPDIYERLASALAPSIYEHEDIKKGILLQLFGGTRKDFSHTGRGKFRAEINILLCGDPGTSKSQLLQYVYNLVPRGQYTSGKGSSAVGLTAYVMKDPETRQLVLQTGALVLSDNGICCIDEFDKMNESTRSVLHEVMEQQTLSIAKAGIICQLNARTSVLAAANPIESQWNPKKTTIENIQLPHTLLSRFDLIFLLLDPQDEAYDRRLAHHLVALYYQSEEQAEEELLDMAVLKDYIAYAHSTIMPRLSEEASQALIEAYVDMRKIGSSRGMVSAYPRQLESLIRLAEAHAKVRLSNKVEAIDVEEAKRLHREALKQSATDPRTGIVDISILTTGMSATSRKRKEELAEALKKLILSKGKTPALKYQQLFEDIRGQSDIAITKDMFEEALRALADDDFLTVTGKTVRLL

SEQ ID NO: 51690 - protein, 81 aa, Homo sapiens
  Payload ID: 10290
  Gene Symbol: MCM4
  Gene Name: minichromosome maintenance complex component 4
  ENSP ID: ENSP00000427829
MSSPASTPSRRGSRRGRATPAQTPRSEDARSSPSQRRRGEDSTSTGELQPMPTSPGVDLQSPAAQDVLFSSPPQMHSSVHH

SEQ ID NO: 51691 - protein, 278 aa, Homo sapiens
  Payload ID: 10290
  Gene Symbol: MCM4
  Gene Name: minichromosome maintenance complex component 4
  ENSP ID: ENSP00000427875
MAVNEIFFDRYPDSILEHQIQVRPFNALKTKNMRNLNPEDIDQLITISGMVIRTSQLIPEMQEAFFQCQIKLQESPEDMPAGQTPHTVILFAHNDLVDKVQPGDRVNVTGIYRAVPIRVNPRVSNVKSVYKTHIDVIHYRKTDAKRLHGLDEEAEQKLFSEKRVELLKELSRKPDIYERLASALAPSIYEHEDIKKGILLQLFGGTRKDFSHTGRGKFRAEINILLCGDPGTSKSQLLQYVYNLVPRGQYTSGKGSSAVGLTAYVMKDPETRQLVLQT

SEQ ID NO: 51692 - protein, 211 aa, Homo sapiens
  Payload ID: 10290
  Gene Symbol: MCM4
  Gene Name: minichromosome maintenance complex component 4
  ENSP ID: ENSP00000428833
MPTSPGVDLQSPAAQDVLFSSPPQMHSSAIPLDFDVSSPLTYGTPSSRVEGTPRSGVRGTPVRQRPDLGSAQKGLQVDLQSDGAAAEDIVASEQSLGQKLVIWGTDVNVAACKENFQRFLQRFIDPLAKEEENVGIDITEPLYMQRLGEINVIGEPFLNVNCEHIKSFDKNLYRQLISYPQEVIPTFDMAVNEIFFDRYPDSILEHQIQVR

SEQ ID NO: 51693 - protein, 863 aa, Homo sapiens; identical to SEQ ID NO: 51689
  Payload ID: 10290
  Gene Symbol: MCM4
  Gene Name: minichromosome maintenance complex component 4
  Uniprot ID: P33991
  ENSP ID: ENSP00000430194

SEQ ID NO: 51694 - protein, 140 aa, Homo sapiens
  Payload ID: 10290
  Gene Symbol: MCM4
  Gene Name: minichromosome maintenance complex component 4
  ENSP ID: ENSP00000430329
MSSPASTPSRRGSRRGRATPAQTPRSEDARSSPSQRRRGEDSTSTGELQPMPTSPGVDLQSPAAQDVLFSSPPQMHSSAIPLDFDVSSPLTYGTPSSRVEGTPRSGVRGTPVRQRPDLGSAQKGLQVDLQSDGAAAEDIV

SEQ ID NO: 51695 - protein, 27 aa, Homo sapiens
  Payload ID: 10290
  Gene Symbol: MCM4
  Gene Name: minichromosome maintenance complex component 4
  ENSP ID: ENSP00000430864
  MOD_RES (1)..(1): Any amino acid
XENIQLPHTLLSRLAVAGEWFLHTLDS

SEQ ID NO: 51696 - protein, 734 aa, Homo sapiens
  Payload ID: 10291
  Gene Symbol: MCM5
  Gene Name: minichromosome maintenance complex component 5
  Uniprot ID: P33992
  ENSP ID: ENSP00000216122
MSGFDDPGIFYSDSFGGDAQADEGQARKSQLQRRFKEFLRQYRVGTDRTGFTFKYRDELKRHYNLGEYWIEVEMEDLASFDEDLADYLYKQPAEHLQLLEEAAKEVADEVTRPRPSGEEVLQDIQVMLKSDASPSSIRSLKSDMMSHLVKIPGIIIAASAVRAKATRISIQCRSCRNTLTNIAMRPGLEGYALPRKCNTDQAGRPKCPLDPYFIMPDKCKCVDFQTLKLQELPDAVPHGEMPRHMQLYCDRYLCDKVVPGNRVTIMGIYSIKKFGLTTSRGRDRVGVGIRSSYIRVLGIQVDTDGSGRSFAGAVSPQEEEEFRRLAALPNVYEVISKSIAPSIFGGTDMKKAIACLLFGGSRKRLPDGLTRRGDINLLMLGDPGTAKSQLLKFVEKCSPIGVYTSGKGSSAAGLTASVMRDPSSRNFIMEGGAMVLADGGVVCIDEFDKMREDDRVAIHEAMEQQTISIAKAGITTTLNSRCSVLAAANSVFGRWDETKGEDNIDFMPTILSRFDMIFIVKDEHNEERDVMLAKHVITLHVSALTQTQAVEGEIDLAKLKKFIAYCRVKCGPRLSAEAAEKLKNRYIIMRSGARQHERDSDRRSSIPITVRQLEAIVRIAEALSKMKLQPFATEADVEEALRLFQVSTLDAALSGTLSGVEGFTSQEDQEMLSRIEKQLKRRFAIGSQVSEHSIIKDFTKQKYPEHAIHKVLQLMLRRGEIQHRMQRKVLYRLK

SEQ ID NO: 51697 - protein, 691 aa, Homo sapiens
  Payload ID: 10291
  Gene Symbol: MCM5
  Gene Name: minichromosome maintenance complex component 5
  ENSP ID: ENSP00000371441
MSGFDDPGIFYSDSFGGDAQADEGQARKSQLQRRFKEFLRQYRVGTDRTGFTFKYRDELKRHYNLGEYWIEVEMEDLASFDEDLADYLYKQPAEHLQLSDMMSHLVKIPGIIIAASAVRAKATRISIQCRSCRNTLTNIAMRPGLEGYALPRKCNTDQAGRPKCPLDPYFIMPDKCKCVDFQTLKLQELPDAVPHGEMPRHMQLYCDRYLCDKVVPGNRVTIMGIYSIKKFGLTTSRGRDRVGVGIRSSYIRVLGIQVDTDGSGRSFAGAVSPQEEEEFRRLAALPNVYEVISKSIAPSIFGGTDMKKAIACLLFGGSRKRLPDGLTRRGDINLLMLGDPGTAKSQLLKFVEKCSPIGVYTSGKGSSAAGLTASVMRDPSSRNFIMEGGAMVLADGGVVCIDEFDKMREDDRVAIHEAMEQQTISIAKAGITTTLNSRCSVLAAANSVFGRWDETKGEDNIDFMPTILSRFDMIFIVKDEHNEERDVMLAKHVITLHVSALTQTQAVEGEIDLAKLKKFIAYCRVKCGPRLSAEAAEKLKNRYIIMRSGARQHERDSDRRSSIPITVRQLEAIVRIAEALSKMKLQPFATEADVEEALRLFQVSTLDAALSGTLSGVEGFTSQEDQEMLSRIEKQLKRRFAIGSQVSEHSIIKDFTKQKYPEHAIHKVLQLMLRRGEIQHRMQRKVLYRLK

SEQ ID NO: 51698 - protein, 230 aa, Homo sapiens
  Payload ID: 10291
  Gene Symbol: MCM5
  Gene Name: minichromosome maintenance complex component 5
  ENSP ID: ENSP00000393977
MSGFDDPGIFYSDSFGGDAQADEGQARKSQLQRRFKEFLRQYRVGTDRTGFTFKYSLAPSLIEHLLPARYCSGCWAAALKLDLAPASRDELKRHYNLGEYWIEVEMEDLASFDEDLADYLYKQPAEHLQLLEEAAKEVADEVTRPRPSGEEVLQDIQVMLKSDASPSSIRSLKSDMMSHLVKIPGIIIAASAVRAKATRISIQCRSCRNTLTNIAMRPGLEGYALPRKCN

SEQ ID NO: 51699 - protein, 150 aa, Homo sapiens
  Payload ID: 10291
  Gene Symbol: MCM5
  Gene Name: minichromosome maintenance complex component 5
  ENSP ID: ENSP00000408705
MMSHLVKIPGIIIAASAVRAKATRISIQCRSCRNTLTNIAMRPGLEGYALPRKCNTDQAGRPKCPLDPYFIMPDKCKCVDFQTLKLQELPDAVPHGEMPRHMQLYCDRYLCDKVVPGNRVTIMGIYSIKKFGLTTSRGRDRVGVGIRSSY

SEQ ID NO: 51700 - protein, 57 aa, Homo sapiens
  Payload ID: 10291
  Gene Symbol: MCM5
  Gene Name: minichromosome maintenance complex component 5
  ENSP ID: ENSP00000412847
MSGFDDPGIFYSDSFGGDAQADEGQARKSQLQRRFKEFLRQYRVGTDRTGFTFKYSS

SEQ ID NO: 51701 - protein, 821 aa, Homo sapiens
  Payload ID: 10292
  Gene Symbol: MCM6
  Gene Name: minichromosome maintenance complex component 6
  Uniprot ID: Q14566
  ENSP ID: ENSP00000264156
MDLAAAAEPGAGSQHLEVRDEVAEKCQKLFLDFLEEFQSSDGEIKYLQLAEELIRPERNTLVVSFVDLEQFNQQLSTTIQEEFYRVYPYLCRALKTFVKDRKEIPLAKDFYVAFQDLPTRHKIRELTSSRIGLLTRISGQVVRTHPVHPELVSGTFLCLDCQTVIRDVEQQFKYTQPNICRNPVCANRRRFLLDTNKSRFVDFQKVRIQETQAELPRGSIPRSLEVILRAEAVESAQAGDKCDFTGTLIVVPDVSKLSTPGARAETNSRVSGVDGYETEGIRGLRALGVRDLSYRLVFLACCVAPTNPRFGGKELRDEEQTAESIKNQMTVKEWEKVFEMSQDKNLYHNLCTSLFPTIHGNDEVKRGVLLMLFGGVPKTTGEGTSLRGDINVCIVGDPSTAKSQFLKHVEEFSPRAVYTSGKASSAAGLTAAVVRDEESHEFVIEAGALMLADNGVCCIDEFDKMDVRDQVAIHEAMEQQTISITKAGVKATLNARTSILAAANPISGHYDRSKSLKQNINLSAPIMSRFDLFFILVDECNEVTDYAIARRIVDLHSRIEESIDRVYSLDDIRRYLLFARQFKPKISKESEDFIVEQYKHLRQRDGSGVTKSSWRITVRQLESMIRLSEAMARMHCCDEVQPKHVKEAFRLLNKSIIRVETPDVNLDQEEEIQMEVDEGAGGINGHADSPAPVNGINGYNEDINQESAPKASLRLGFSEYCRISNLIVLHLRKVEEEEDESALKRSELVNWYLKEIESEIDSEEELINKKRIIEKVIHRLTHYDHVLIELTQAGLKGSTEGSESYEEDPYLVVNPNYLLED

SEQ ID NO: 51702 - protein, 719 aa, Homo sapiens
  Payload ID: 10293
  Gene Symbol: MCM7
  Gene Name: minichromosome maintenance complex component 7
  Uniprot ID: P33993
  ENSP ID: ENSP00000307288
MALKDYALEKEKVKKFLQEFYQDDELGKKQFKYGNQLVRLAHREQVALYVDLDDVAEDDPELVDSICENARRYAKLFADAVQELLPQYKEREVVNKDVLDVYIEHRLMMEQRSRDPGMVRSPQNQYPAELMRRFELYFQGPSSNKPRVIREVRADSVGKLVTVRGIVTRVSEVKPKMVVATYTCDQCGAETYQPIQSPTFMPLIMCPSQECQTNRSGGRLYLQTRGSRFIKFQEMKMQEHSDQVPVGNIPRSITVLVEGENTRIAQPGDHVSVTGIFLPILRTGFRQVVQGLLSETYLEAHRIVKMNKSEDDESGAGELTREELRQIAEEDFYEKLAASIAPEIYGHEDVKKALLLLLVGGVDQSPRGMKIRGNINICLMGDPGVAKSQLLSYIDRLAPRSQYTTGRGSSGVGLTAAVLRDSVSGELTLEGGALVLADQGVCCIDEFDKMAEADRTAIHEVMEQQTISIAKAGILTTLNARCSILAAANPAYGRYNPRRSLEQNIQLPAALLSRFDLLWLIQDRPDRDNDLRLAQHITYVHQHSRQPPSQFEPLDMKLMRRYIAMCREKQPMVPESLADYITAAYVEMRREAWASKDATYTSARTLLAILRLSTALARLRMVDVVEKEDVNEAIRLMEMSKDSLLGDKGQTARTQRPADVIFATVRELVSGGRSVRFSEAEQRCVSRGFTPAQFQAALDEYEELNVWQVNASRTRITFV

SEQ ID NO: 51703 - protein, 389 aa, Homo sapiens
  Payload ID: 10293
  Gene Symbol: MCM7
  Gene Name: minichromosome maintenance complex component 7
  Uniprot ID: P33993
  ENSP ID: ENSP00000344006
MALKDYALEKEKVKKFLQEFYQDDELGKKQFKYGNQLVRLAHREQVALYVDLDDVAEDDPELVDSICENARRYAKLFADAVQELLPQYKEREVVNKDVLDVYIEHRLMMEQRSRDPGMVRSPQNQYPAELMRRFELYFQGPSSNKPRVIREVRADSVGKLVTVRGIVTRVSEVKPKMVVATYTCDQCGAETYQPIQSPTFMPLIMCPSQECQTNRSGGRLYLQTRGSRFIKFQEMKMQEHSDQVPVGNIPRSITVLVEGENTRIAQPGDHVSVTGIFLPILRTGFRQVVQGLLSETYLEAHRIVKMNKSEDDESGAGELTREELRQIADVIFATVRELVSGGRSVRFSEAEQRCVSRGFTPAQFQAALDEYEELNVWQVNASRTRITFV

SEQ ID NO: 51704 - protein, 543 aa, Homo sapiens
  Payload ID: 10293
  Gene Symbol: MCM7
  Gene Name: minichromosome maintenance complex component 7
  Uniprot ID: P33993
  ENSP ID: ENSP00000346171
MVVATYTCDQCGAETYQPIQSPTFMPLIMCPSQECQTNRSGGRLYLQTRGSRFIKFQEMKMQEHSDQVPVGNIPRSITVLVEGENTRIAQPGDHVSVTGIFLPILRTGFRQVVQGLLSETYLEAHRIVKMNKSEDDESGAGELTREELRQIAEEDFYEKLAASIAPEIYGHEDVKKALLLLLVGGVDQSPRGMKIRGNINICLMGDPGVAKSQLLSYIDRLAPRSQYTTGRGSSGVGLTAAVLRDSVSGELTLEGGALVLADQGVCCIDEFDKMAEADRTAIHEVMEQQTISIAKAGILTTLNARCSILAAANPAYGRYNPRRSLEQNIQLPAALLSRFDLLWLIQDRPDRDNDLRLAQHITYVHQHSRQPPSQFEPLDMKLMRRYIAMCREKQPMVPESLADYITAAYVEMRREAWASKDATYTSARTLLAILRLSTALARLRMVDVVEKEDVNEAIRLMEMSKDSLLGDKGQTARTQRPADVIFATVRELVSGGRSVRFSEAEQRCVSRGFTPAQFQAALDEYEELNVWQVNASRTRITFV

SEQ ID NO: 51705 - protein, 183 aa, Homo sapiens
  Payload ID: 10293
  Gene Symbol: MCM7
  Gene Name: minichromosome maintenance complex component 7
  ENSP ID: ENSP00000411295
MMEQRSRDPGMVRSPQNQYPAELMRRFELYFQGPSSNKPRVIREVRADSVGKLVTVRGIVTRVSEVKPKMVVATYTCDQCGAETYQPIQSPTFMPLIMCPSQECQTNRSGGRLYLQTRGSRFIKFQEMKMQEHSDQVPVGNIPRSITVLVEGENTRIAQPGDHVSVTGIFLPILRTGFRQVVQ

SEQ ID NO: 51706 - protein, 83 aa, Homo sapiens
  Payload ID: 10293
  Gene Symbol: MCM7
  Gene Name: minichromosome maintenance complex component 7
  ENSP ID: ENSP00000445904
  MOD_RES (1)..(1): Any amino acid
XEQVALYVDLDDVAEDDPELVDSICENARPSPLPRPAFSPHSMPAAPSWLPPTLPTGATTLAAAWSRTYSYLLHCSPGLTSSG

SEQ ID NO: 51707 - protein, 543 aa, Homo sapiens; identical to SEQ ID NO: 51704
  Payload ID: 10293
  Gene Symbol: MCM7
  Gene Name: minichromosome maintenance complex component 7
  Uniprot ID: P33993
  ENSP ID: ENSP00000483795

SEQ ID NO: 51708 - protein, 632 aa, Homo sapiens
  Payload ID: 10294
  Gene Symbol: MCMDC2
  Gene Name: minichromosome maintenance domain containing 2
  ENSP ID: ENSP00000317234
MSNLKMKEAALIYLDRSGGLQKFIDDCKYYNDSKQSYAVYRFKILINPSDVVELDAELGNHILHQPLKAAEVFQSVCFIAVKTLSLIGQLQTETQINIVLKLTHLPPLPSYGLDLCEFPLDYTSQRFYMMQGIVIAMTTITKYTQGARFLCSDEACPLSKGFQYIRVHVPGATESATIRNDFLCNLCASSLQEDRKFRVLGDKQIVEIIATKALRAFQGYSNNQPFRFQSLTIFLRDESVNKMNIGNEYKIIGIPTCVKTSQTAVCIEANSITFCNSKVPSGISDNFRCLLSLTSSSCWKFTAILANIFASQITPPGTYNLLKLCLLMSLVQTTDRNKELEDCLDILIITSDTLLIDRLLNFSINLVPRGIRHLVSTEIFPTLSRNKYGTGAVSIQAGSALLAKGGICFIGDLASHKKDKLEQLQTVLESRSITVYIPGKKFGEDIDQQMTFPVQCSFWSFVDVDSSSRRNAQKINTLIGQMDCSLIPANLVEAFGLLINCNESSPCHPFLPTVQHTLNKAINPEGLFYAASRQFTTEDFEKLLAFAKNLNVEFSLEAERMTHGYYLASRRIRTGSVCGSKLSASALKYLVFLSEAHARLNLRNKVLKEDVLIAALLFETSLTLKYGNELNY

SEQ ID NO: 51709 - protein, 590 aa, Homo sapiens
  Payload ID: 10294
  Gene Symbol: MCMDC2
  Gene Name: minichromosome maintenance domain containing 2
  Uniprot ID: Q4G0Z9
  ENSP ID: ENSP00000379837
MSNLKMKEAALIYLDRSGGLQKFIDDCKYYNDSKQSYAVYRFKILINPSDVVELDAELGNHILHQPLKAAEVFQSVCFIAVKTLSLIGQLQTETQINIVLKLTHLPPLPSYGLDLCEFPLDYTSQRFYMMQGIVIAMTTITKYTQGARFLCSDEACPLSKGFQYIRVHVPGATESATIRNDFLCNLCASSLQEDRKFRVLGDKQIVEIIATKALRAFQGYSNNQPFRFQSLTIFLRDESVNKMNIGNEYKIIGIPTCVKTSQTAVCIEANSITFCNSKVPSGISDNFRCLLSLTSSSCWKFTAILANIFASQITPPGTYNLLKLCLLMSLVQTTDRNKELEDCLDILIITSDTLLIDRLLNFSINLVPRGIRHLVSTEIFPTLSRNKYGTGAVSIQAGSALLAKGGICFIGDLASHKKDKLEQLQTVLESRSITVYIPGKKFGEDIDQQMTFPVQCSFWSFVDVDSSSRRNAQKINTLIGQMDCSLIPANLVEAFGLLINCNESSPCHPFLPTVQHTLNKAINPEGLFYAASRQFTTEDFEKLLAFAKNLNVEFSLEAERMTHGYYLASRRIRTGSVCGSKLSASALKYL

SEQ ID NO: 51710 - protein, 63 aa, Homo sapiens
  Payload ID: 10294
  Gene Symbol: MCMDC2
  Gene Name: minichromosome maintenance domain containing 2
  ENSP ID: ENSP00000395867
MSNLKMKEAALIYLDRSGGLQKFIDDCKYYNGTFSKDAELGNHILHQPLKAAEVFQSVSQKKK

SEQ ID NO: 51711 - protein, 681 aa, Homo sapiens
  Payload ID: 10294
  Gene Symbol: MCMDC2
  Gene Name: minichromosome maintenance domain containing 2
  Uniprot ID: Q4G0Z9
  ENSP ID: ENSP00000413632
MSNLKMKEAALIYLDRSGGLQKFIDDCKYYNDSKQSYAVYRFKILINPSDVVELDAELGNHILHQPLKAAEVFQSVCFIAVKTLSLIGQLQTETQINIVLKLTHLPPLPSYGLDLCEFPLDYTSQRFYMMQGIVIAMTTITKYTQGARFLCSDEACPLSKGFQYIRVHVPGATESATIRNDFLCNLCASSLQEDRKFRVLGDKQIVEIIATKALRAFQGYSNNQPFRFQSLTIFLRDESVNKMNIGNEYKIIGIPTCVKTSQTAVCIEANSITFCNSKVPSGISDNFRCLLSLTSSSCWKFTAILANIFASQITPPGTYNLLKLCLLMSLVQTTDRNKELEDCLDILIITSDTLLIDRLLNFSINLVPRGIRHLVSTEIFPTLSRNKYGTGAVSIQAGSALLAKGGICFIGDLASHKKDKLEQLQTVLESRSITVYIPGKKFGEDIDQQMTFPVQCSFWSFVDVDSSSRRNAQKINTLIGQMDCSLIPANLVEAFGLLINCNESSPCHPFLPTVQHTLNKAINPEGLFYAASRQFTTEDFEKLLAFAKNLNVEFSLEAERMTHGYYLASRRIRTGSVCGSKLSASALKYLVFLSEAHARLNLRNKVLKEDVLIAALLFETSLTLKYGATVFCVAPNAVFPFELYNEEYLEQRDLYLTQCQQQLEQFIATYGPGTTIFSSDE

SEQ ID NO: 51712 - protein, 42 aa, Homo sapiens
  Payload ID: 10294
  Gene Symbol: MCMDC2
  Gene Name: minichromosome maintenance domain containing 2
  ENSP ID: ENSP00000416848
MSNLKMKEAALIYLDRSGGLQKFIDDCKYYNGTFSKGLFYCC

SEQ ID NO: 51713 - protein, 368 aa, Homo sapiens
  Payload ID: 10294
  Gene Symbol: MCMDC2
  Gene Name: minichromosome maintenance domain containing 2
  ENSP ID: ENSP00000428037
MSNLKMKEAALIYLDRSGGLQKFIDDCKYYNDSKQSYAVYRFKILINPSDVVELDAELGNHILHQPLKAAEVFQSVCFIAVKTLSLIGQLQTETQINIVLKLTHLPPLPSYGLDLCEFPLDYTSQRFYMMQGIVIAMTTITKYTQGARFLCSDEACPLSKGFQYIRVHVPGATESATIRNDFLCNLCASSLQEDRKFRVLGDKQIVEIIATKALRAFQGYSNNQPFRFQSLTIFLRDESVNKMNIGNEYKIIGIPTCVKTSQTAVCIEANSITFCNSKVPSGISDNFRCLLSLTSSSCWKFTAILANIFASQITPPGTYNLLKLCLLMSLVQTTDRNKELEDCLDILIITSDTLLIDRYICDMNFYKY

SEQ ID NO: 51714 - protein, 46 aa, Homo sapiens
  Payload ID: 10295
  Gene Symbol: MINOS1-NBL1
  Gene Name: MINOS1-NBL1 readthrough
  ENSP ID: ENSP00000473256
  MOD_RES (1)..(1): Any amino acid
XKWDRCLADAVVKIEMGFHHVAQAGLELRVQTIHLPWPPNVPGLQA

SEQ ID NO: 51715 - protein, 70 aa, Homo sapiens
  Payload ID: 10295
  Gene Symbol: MINOS1-NBL1
  Gene Name: MINOS1-NBL1 readthrough
  ENSP ID: ENSP00000473403
MFQPLSSPDSHRKGTGFGLGIVFSLTFFKRRMWPLAFGSGMGLGMAYSNCQHDFQAPYLLHGKYVKEQEQ

SEQ ID NO: 51716 - protein, 181 aa, Homo sapiens
  Payload ID: 10295
  Gene Symbol: MINOS1-NBL1
  Gene Name: MINOS1-NBL1 readthrough
  ENSP ID: ENSP00000473411
MMLRVLVGAVLPAMLLAAPPPINKLALFPDKSAWCEAKNITQIVGHSGCEAKSIQNRACLGQCFSYSVPNTFPQSTESLVHCDSCMPAQSMWEIVTLECPGHEEVPRVDKLVEKILHCSCQACGKEPSHEGLSVYVQGEDGPGSQPGTHPHPHPHPHPGGQTPEPEDPPGAPHTEEEGAED

SEQ ID NO: 51717 - protein, 71 aa, Homo sapiens
  Payload ID: 10295
  Gene Symbol: MINOS1-NBL1
  Gene Name: MINOS1-NBL1 readthrough
  ENSP ID: ENSP00000473550
RKWDRCLADAVVKIGTGFGLGIVFSLTFFKRRMWPLAFGSGMGLGMAYSNCQHDFQAPYLLHGKYVKEQEQ

SEQ ID NO: 51718 - protein, 442 aa, Homo sapiens
  Payload ID: 10296
  Gene Symbol: MIPOL1
  Gene Name: mirror-image polydactyly 1
  Uniprot ID: Q8TD10
  ENSP ID: ENSP00000333539
MENWSKDITHSYLEQETTGINKSTQPDEQLTMNSEKSMHRKSTELVNEITCENTEWPGQRSTNFQIISSYPDDESVYCTTEKYNVMEHRHNDMHYECMTPCQVTSDSDKEKTIAFLLKELDILRTSNKKLQQKLAKEDKEQRKLKFKLELQEKETEAKIAEKTAALVEEVYFAQKERDEAVMSRLQLAIEERDEAIARAKHMEMSLKVLENINPEENDMTLQELLNRINNADTGIAIQKNGAIIVDRIYKTKECKMRITAEEMSALIEERDAALSKCKRLEQELHHVKEQNQTSANNMRHLTAENNQERALKAKLLSMQQARETAVQQYKKLEEEIQTLRVYYSLHKSLSQEENLKDQFNYTLSTYEEALKNRENIVSITQQQNEELATQLQQALTERANMELQLQHAREASQVANEKVQKLERLVDVLRKKVGTGTMRTVI

SEQ ID NO: 51719 - protein, 442 aa, Homo sapiens; identical to SEQ ID NO: 51718
  Payload ID: 10296
  Gene Symbol: MIPOL1
  Gene Name: mirror-image polydactyly 1
  Uniprot ID: Q8TD10
  ENSP ID: ENSP00000379589

SEQ ID NO: 51720 - protein, 411 aa, Homo sapiens
  Payload ID: 10296
  Gene Symbol: MIPOL1
  Gene Name: mirror-image polydactyly 1
  ENSP ID: ENSP00000438319
MNSEKSMHRKSTELVNEITCENTEWPGQRSTNFQIISSYPDDESVYCTTEKYNVMEHRHNDMHYECMTPCQVTSDSDKEKTIAFLLKELDILRTSNKKLQQKLAKEDKEQRKLKFKLELQEKETEAKIAEKTAALVEEVYFAQKERDEAVMSRLQLAIEERDEAIARAKHMEMSLKVLENINPEENDMTLQELLNRINNADTGIAIQKNGAIIVDRIYKTKECKMRITAEEMSALIEERDAALSKCKRLEQELHHVKEQNQTSANNMRHLTAENNQERALKAKLLSMQQARETAVQQYKKLEEEIQTLRVYYSLHKSLSQEENLKDQFNYTLSTYEEALKNRENIVSITQQQNEELATQLQQALTERANMELQLQHAREASQVANEKVQKLERLVDVLRKKVGTGTMRTVI

SEQ ID NO: 51721 - protein, 424 aa, Homo sapiens
  Payload ID: 10296
  Gene Symbol: MIPOL1
  Gene Name: mirror-image polydactyly 1
  ENSP ID: ENSP00000442529
MNSEKSMHRKSTELVNEITCENTEWPGQRSTNFQIISSYPDDESVYCTTEKYNVMEHRHNDMHYECMTPCQVTSDSDKEKTIAFLLKELDILRTSNKKLQQKLAKEDKEQRKLKFKLELQEKETEAKIAEKTAALVEEVYFAQKERDEAVMSRLQLAIEERDEAIARAKHMEMSLKVLENINPEENDMTLQELLNRINNADTGIAIQKNGAIIVDRIYKTKECKMRITAEEMSALIEERDAALSKCKRLEQELHHVKEQNQTSANNMRHLTAENNQERALKAKLLSMQQARETAVQQYKKLEEEIQTLRVYYSLHKSLSQEENLKDQFNYTLSTYEEALKNRENIVSITQQQNEELATQLQQALTERANMELQLQHAREASQVANEKVQKSQIQIYFIPNKKDEREKFLMDKRRKIVAHSKQNS

SEQ ID NO: 51722 - protein, 442 aa, Homo sapiens; identical to SEQ ID NO: 51718
  Payload ID: 10296
  Gene Symbol: MIPOL1
  Gene Name: mirror-image polydactyly 1
  Uniprot ID: Q8TD10
  ENSP ID: ENSP00000444254

SEQ ID NO: 51723 - protein, 424 aa, Homo sapiens; identical to SEQ ID NO: 51721
  Payload ID: 10296
  Gene Symbol: MIPOL1
  Gene Name: mirror-image polydactyly 1
  ENSP ID: ENSP00000450479

SEQ ID NO: 51724 - protein, 128 aa, Homo sapiens
  Payload ID: 10296
  Gene Symbol: MIPOL1
  Gene Name: mirror-image polydactyly 1
  ENSP ID: ENSP00000450575
MENWSKDITHSYLEQETTGINKSTQPDEQLTMNSEKSMHRKSTELVNEITCENTEWPGQRSTNFQIISSYPDDESVYCTTEKYNVMEHRHNDMHYECMTPCQVTSDSDKEKTIAFLLKELDILRTSNK

SEQ ID NO: 51725 - protein, 104 aa, Homo sapiens
  Payload ID: 10296
  Gene Symbol: MIPOL1
  Gene Name: mirror-image polydactyly 1
  ENSP ID: ENSP00000451297
MENWSKDITHSYLEQETTGINKSTQPDEQLTMNSEKSMHRKSTELVNEITCENTEWPGQRSTNFQIISSYPDDESVYCTTEKYNVMEHRHNDMHYECMTPCQVT

SEQ ID NO: 51726 - protein, 180 aa, Homo sapiens
  Payload ID: 10296
  Gene Symbol: MIPOL1
  Gene Name: mirror-image polydactyly 1
  ENSP ID: ENSP00000452478
MNSEKSMHRKSTELVNEITCENTEWPGQRSTNFQIISSYPDDESVYCTTEKYNVMEHRHNDMHYECMTPCQVTSDSDKEKTIAFLLKELDILRTSNKKLQQKLAKEDKEQRKLKFKLELQEKETEAKIAEKTAGKVVIYATSQRNCSSTVQKTGRGNPDPSSLLQFTQIFISRRKSEGSV

SEQ ID NO: 51727 - protein, 205 aa, Homo sapiens
  Payload ID: 10297
  Gene Symbol: MIS12
  Gene Name: MIS12 kinetochore complex component
  Uniprot ID: Q9H081
  ENSP ID: ENSP00000370557
MSVDPMTYEAQFFGFTPQTCMLRIYIAFQDYLFEVMQAVEQVILKKLDGIPDCDISPVQIRKCTEKFLCFMKGHFDNLFSKMEQLFLQLILRIPSNILLPEDKCKETPYSEEDFQHLQKEIEQLQEKYKTELCTKQALLAELEEQKIVQAKLKQTLTFFDELHNVGRDHGTSDFRESLVSLVQNSRKLQNIRDNVEKESKRLKIS

SEQ ID NO: 51728 - protein, 24 aa, Homo sapiens
  Payload ID: 10297
  Gene Symbol: MIS12
  Gene Name: MIS12 kinetochore complex component
  ENSP ID: ENSP00000459366
MSVDPMTYEAQFFGFTPQTCMLRI

SEQ ID NO: 51729 - protein, 205 aa, Homo sapiens; identical to SEQ ID NO: 51727
  Payload ID: 10297
  Gene Symbol: MIS12
  Gene Name: MIS12 kinetochore complex component
  Uniprot ID: Q9H081
  ENSP ID: ENSP00000461252

SEQ ID NO: 51730 - protein, 125 aa, Homo sapiens
  Payload ID: 10297
  Gene Symbol: MIS12
  Gene Name: MIS12 kinetochore complex component
  ENSP ID: ENSP00000461333
MSVDPMTYEAQFFGFTPQTCMLRIYIAFQDYLFEVMQAVEQVILKKLDGIPDCDISPVQIRKCTEKFLCFMKGHFDNLFSKMEQLFLQLILRIPSNILLPEDKCKETPYSEEDFQHLQKEIEQLQ

SEQ ID NO: 51731 - protein, 205 aa, Homo sapiens; identical to SEQ ID NO: 51727
  Payload ID: 10297
  Gene Symbol: MIS12
  Gene Name: MIS12 kinetochore complex component
  Uniprot ID: Q9H081
  ENSP ID: ENSP00000484532

SEQ ID NO: 51732 - protein, 1132 aa, Homo sapiens
  Payload ID: 10298
  Gene Symbol: MIS18BP1
  Gene Name: MIS18 binding protein 1
  Uniprot ID: Q6P0N0
  ENSP ID: ENSP00000309790
MIATPLKHSRIYLPPEASSQRRNLPMDAIFFDSIPSGTLTPVKDLVKYQNSSLKLNDHKKNQFLKMTTFNNKNIFQSTMLTEATTSNSSLDISAIKPNKDGLKNKANYESPGKIFLRMKEKVLRDKQEQPSRNSSLLEPQKSGNNETFTPNRVEKKKLQHTYLCEEKENNKSFQSDDSSLRASVQGVPLESSNNDIFLPVKQKIQCQQEKKAPLHNLTYELPTLNQEQENFLAVEARNKTLTRAQLAKQIFHSKESIVATTKSKKDTFVLESVDSADEQFQNTNAETLSTNCIPIKNGSLLMVSDSERTTEGTSQQKVKEGNGKTVPGETGLPGSMKDTCKIVLATPRLHITIPRRSKRNISKLSPPRIFQTVTNGLKKNQVVQLQEWMIKSINNNTAICVEGKLIDVTNIYWHSNVIIERIEHNKLRTISGNVYILKGMIDQISMKEAGYPNYLIRKFMFGFPENWKEHIDNFLEQLRAGEKNREKTKQKQKTGRSVRDIRKSMKNDARENQTDTAQRATTTYDFDCDNLELKSNKHSESPGATELNMCHSNCQNKPTLRFPDDQVNNTIQNGGGDDLSNQELIGKKEYKMSSKKLKIGERTNERIIKSQKQETTEELDVSIDILTSREQFFSDEERKYMAINQKKAYILVTPLKSRKVIEQRCMRYNLSAGTIKAVTDFVIPECQKKSPISKSMGTLENTFEGHKSKNKEDCDERDLLTVNRKIKISNLEKEQMLTSDFKKNTRLLPKLKKIENQVAMSFYKHQSSPDLSSEESETEKEIKRKAEVKKTKAGNTKEAVVHLRKSTRNTSNIPVILEPETEESENEFYIKQKKARPSVKETLQKSGVRKEFPITEAVGSDKTNRHPLECLPGLIQDKEWNEKELQKLHCAFASLPKHKPGFWSEVAAAVGSRSPEECQRKYMENPRGKGSQKHVTKKKPANSKGQNGKRGDADQKQTIKITAKVGTLKRKQQMREFLEQLPKDDHDDFFSTTPLQHQRILLPSFQDSEDDDDILPNMDKNPTTPSSVIFPLVKTPQCQHVSPGMLGSINRNDCDKYVFRMQKYHKSNGGIVWGNIKKKLVETDFSTPTPRRKTPFNTDLGENSGIGKLFTNAVESLDEEEKDYYFSNSDSA

SEQ ID NO: 51733 - protein, 155 aa, Homo sapiens
  Payload ID: 10298
  Gene Symbol: MIS18BP1
  Gene Name: MIS18 binding protein 1
  ENSP ID: ENSP00000397184
MIATPLKHSRIYLPPEASSQRRNLPMDAIFFDSIPSGTLTPVKDLVKYQNSSLKLNDHKKNQFLKMTTFNNKNIFQSTMLTEATTSNSSLDISAIKPNKDGLKNKANYESPGKIFLRMKEKVLRDKQEQPSRNSSLLEPQKSGNNETFTPNRVEK

SEQ ID NO: 51734 - protein, 496 aa, Homo sapiens
  Payload ID: 10298
  Gene Symbol: MIS18BP1
  Gene Name: MIS18 binding protein 1
  ENSP ID: ENSP00000398902
MIATPLKHSRIYLPPEASSQRRNLPMDAIFFDSIPSGTLTPVKDLVKYQNSSLKLNDHKKNQFLKMTTFNNKNIFQSTMLTEATTSNSSLDISAIKPNKDGLKNKANYESPGKIFLRMKEKVLRDKQEQPSRNSSLLEPQKSGNNETFTPNRVEKKKLQHTYLCEEKENNKSFQSDDSSLRASVQGVPLESSNNDIFLPVKQKIQCQQEKKAPLHNLTYELPTLNQEQENFLAVEARNKTLTRAQLAKQIFHSKESIVATTKSKKDTFVLESVDSADEQFQNTNAETLSTNCIPIKNGSLLMVSDSERTTEGTSQQKVKEGNGKTVPGETGLPGSMKDTCKIVLATPRLHITIPRRSKRNISKLSPPRIFQTVTNGLKKNQVVQLQEWMIKSINNNTAICVEGKLIDVTNIYWHSNVIIERIEHNKLRTISGNVYILKGMIDQISMKEAGYPNYLIRKFMFGFPENWKEHIDNFLEQLRDGVSSCWPDWSRTPGYK

SEQ ID NO: 51735 - protein, 195 aa, Homo sapiens
  Payload ID: 10298
  Gene Symbol: MIS18BP1
  Gene Name: MIS18 binding protein 1
  ENSP ID: ENSP00000402011
AVEARNKTLTRAQLAKQIFHSKESIVATTKSKKDTFVLESVDSADEQFQNTNAETLSTNCIPIKNGSLLMVSDSERTTEGTSQQKVKEGNGKTVPGETGLPGSMKDTCKIVLATPRLHITIPRRSKRNISKLSPPRIFQTVTNGLKKNQVVQLQEWMIKSINNNTAICVEGKLMISKLSHKEIYVWISRKLERAH

SEQ ID NO: 51736 - protein, 78 aa, Homo sapiens
  Payload ID: 10298
  Gene Symbol: MIS18BP1
  Gene Name: MIS18 binding protein 1
  ENSP ID: ENSP00000451783
  MOD_RES (1)..(1): Any amino acid
XEESENEFYIKQKKARPSVKETLQKSGVRKEFPITEAVGSDKTNRHPLECLPGLIQDKEWNEKELQKLHCTNLVSGQR

SEQ ID NO: 51737 - protein, 496 aa, Homo sapiens; identical to SEQ ID NO: 51734
  Payload ID: 10298
  Gene Symbol: MIS18BP1
  Gene Name: MIS18 binding protein 1
  ENSP ID: ENSP00000487102

SEQ ID NO: 51738 - protein, 233 aa, Homo sapiens
  Payload ID: 10299
  Gene Symbol: MIS18A
  Gene Name: MIS18 kinetochore protein A
  Uniprot ID: Q9NYP9
  ENSP ID: ENSP00000290130
MAGVRSLRCSRGCAGGCECGDKGKCSDSSLLGKRLSEDSSRHQLLQKWASMWSSMSEDASVADMERAQLEEEAAAAEERPLVFLCSGCRRPLGDSLSWVASQEDTNCILLRCVSCNVSVDKEQKLSKREKENGCVLETLCCAGCSLNLGYVYRCTPKNLDYKRDLFCLSVEAIESYVLGSSEKQIVSEDKELFNLESRVEIEKSLTQMEDVLKALQMKLWEAESKLSFATCKS

SEQ ID NO: 51739 - protein, 570 aa, Homo sapiens
  Payload ID: 10300
  Gene Symbol: MSTO1
  Gene Name: misato 1, mitochondrial distribution and morphology regulator
  Uniprot ID: Q9BUK6
  ENSP ID: ENSP00000245564
MAGGAREVLTLQLGHFAGFVGAHWWNQQDAALGRATDSKEPPGELCPDVLYRTGRTLHGQETYTPRLILMDLKGSLSSLKEEGGLYRDKQLDAAIAWQGKLTTHKEELYPKNPYLQDFLSAEGVLSSDGVWRVKSIPNGKGSSPLPTATTPKPLIPTEASIRVWSDFLRVHLHPRSICMIQKYNHDGEAGRLEAFGQGESVLKEPKYQEELEDRLHFYVEECDYLQGFQILCDLHDGFSGVGAKAAELLQDEYSGRGIITWGLLPGPYHRGEAQRNIYRLLNTAFGLVHLTAHSSLVCPLSLGGSLGLRPEPPVSFPYLHYDATLPFHCSAILATALDTVTVPYRLCSSPVSMVHLADMLSFCGKKVVTAGAIIPFPLAPGQSLPDSLMQFGGATPWTPLSACGEPSGTRCFAQSVVLRGIDRACHTSQLTPGTPPPSALHACTTGEEILAQYLQQQQPGVMSSSHLLLTPCRVAPPYPHLFSSCSPPGMVLDGSPKGAAVESIPVFGALCSSSSLHQTLEALARDLTKLDLRRWASFMDAGVEHDDVAELLQELQSLAQCYQGGDSLVD

SEQ ID NO: 51740 - protein, 524 aa, Homo sapiens
  Payload ID: 10300
  Gene Symbol: MSTO1
  Gene Name: misato 1, mitochondrial distribution and morphology regulator
  Uniprot ID: Q9BUK6
  ENSP ID: ENSP00000357325
MAGGAREVLTLQLGHFAGFVGAHWWNQQDAALGRATDSKEPPGELCPDVLYRTGRTLHGQETYTPRLILMDLKGSLSSLKEEGGLYRDKQLDAAIAWQGKLTTHKGSSPLPTATTPKPLIPTEASIRVWSDFLRVHLHPRSICMIQKYNHDGEAGRLEAFGQGESVLKEPKYQEELEDRLHFYVEECDYLQGFQILCDLHDGFSGVGAKAAELLQDEYSGRGIITWGLLPGPYHRGEAQRNIYRLLNTAFGLVHLTAHSSLVCPLSLGGSLGLRPEPPVSFPYLHYDATLPFHCSAILATALDTVTVPYRLCSSPVSMVHLADMLSFCGKKVVTAGAIIPFPLAPGQSLPDSLMQFGGATPWTPLSACGEPSGTRCFAQSVVLRGIDRACHTSQLTPGTPPPSALHACTTGEEILAQYLQQQQPGVMSSSHLLLTPCRVAPPYPHLFSSCSPPAVESIPVFGALCSSSSLHQTLEALARDLTKLDLRRWASFMDAGVEHDDVAELLQELQSLAQCYQGGDSLVD

SEQ ID NO: 51741 - protein, 99 aa, Homo sapiens
  Payload ID: 10300
  Gene Symbol: MSTO1
  Gene Name: misato 1, mitochondrial distribution and morphology regulator
  Uniprot ID: Q9BUK6
  ENSP ID: ENSP00000476353
MAGGAREVLTLQLGHFAGFVGAHWWNQQDAALGRATDSKEPPGELCPDVLYRTGRTLHGQETYTPRLILMDLKGSLSSLKEEGGLYRDKQLDAAIAWEC

SEQ ID NO: 51742 - protein, 78 aa, Homo sapiens
  Payload ID: 10300
  Gene Symbol: MSTO1
  Gene Name: misato 1, mitochondrial distribution and morphology regulator
  ENSP ID: ENSP00000476693
  MOD_RES (1)..(1): Any amino acid
XCHTSQLTPGTPPPSALHACTTGEEILAQYLQQQQPGVMSSSHLLLTPCRVAPPYPHLFSSCSPPGMVLDGSPKGAGM

SEQ ID NO: 51743 - protein, 1303 aa, Homo sapiens
  Payload ID: 10301
  Gene Symbol: MINK1
  Gene Name: misshapen-like kinase 1
  Uniprot ID: Q8N4C8
  ENSP ID: ENSP00000269296
MGDPAPARSLDDIDLSALRDPAGIFELVEVVGNGTYGQVYKGRHVKTGQLAAIKVMDVTEDEEEEIKQEINMLKKYSHHRNIATYYGAFIKKSPPGNDDQLWLVMEFCGAGSVTDLVKNTKGNALKEDCIAYICREILRGLAHLHAHKVIHRDIKGQNVLLTENAEVKLVDFGVSAQLDRTVGRRNTFIGTPYWMAPEVIACDENPDATYDYRSDIWSLGITAIEMAEGAPPLCDMHPMRALFLIPRNPPPRLKSKKWSKKFIDFIDTCLIKTYLSRPPTEQLLKFPFIRDQPTERQVRIQLKDHIDRSRKKRGEKEETEYEYSGSEEEDDSHGEEGEPSSIMNVPGESTLRREFLRLQQENKSNSEALKQQQQLQQQQQRDPEAHIKHLLHQRQRRIEEQKEERRRVEEQQRREREQRKLQEKEQQRRLEDMQALRREEERRQAEREQEYKRKQLEEQRQSERLQRQLQQEHAYLKSLQQQQQQQQLQKQQQQQLLPGDRKPLYHYGRGMNPADKPAWAREVEERTRMNKQQNSPLAKSKPGSTGPEPPIPQASPGPPGPLSQTPPMQRPVEPQEGPHKSLVAHRVPLKPYAAPVPRSQSLQDQPTRNLAAFPASHDPDPAIPAPTATPSARGAVIRQNSDPTSEGPGPSPNPPAWVRPDNEAPPKVPQRTSSIATALNTSGAGGSRPAQAVRASNPDLRRSDPGWERSDSVLPASHGHLPQAGSLERNRVGVSSKPDSSPVLSPGNKAKPDDHRSRPGRPASYKRAIGEDFVLLKERTLDEAPRPPKKAMDYSSSSEEVESSEDDEEEGEGGPAEGSRDTPGGRSDGDTDSVSTMVVHDVEEITGTQPPYGGGTMVVQRTPEEERNLLHADSNGYTNLPDVVQPSHSPTENSKGQSPPSKDGSGDYQSRGLVKAPGKSSFTMFVDLGIYQPGGSGDSIPITALVGGEGTRLDQLQYDVRKGSVVNVNPTNTRAHSETPEIRKYKKRFNSEILCAALWGVNLLVGTENGLMLLDRSGQGKVYGLIGRRRFQQMDVLEGLNLLITISGKRNKLRVYYLSWLRNKILHNDPEVEKKQGWTTVGDMEGCGHYRVVKYERIKFLVIALKSSVEVYAWAPKPYHKFMAFKSFADLPHRPLLVDLTVEEGQRLKVIYGSSAGFHAVDVDSGNSYDIYIPVHIQSQITPHAIIFLPNTDGMEMLLCYEDEGVYVNTYGRIIKDVVLQWGEMPTSVAYICSNQIMGWGEKAIEIRSVETGHLDGVFMHKRAQRLKFLCERNDKVFFASVRSGGSSQVYFMTLNRNCIMNW

SEQ ID NO: 51744 - protein, 1332 aa, Homo sapiens
  Payload ID: 10301
  Gene Symbol: MINK1
  Gene Name: misshapen-like kinase 1
  Uniprot ID: Q8N4C8
  ENSP ID: ENSP00000347427
MGDPAPARSLDDIDLSALRDPAGIFELVEVVGNGTYGQVYKGRHVKTGQLAAIKVMDVTEDEEEEIKQEINMLKKYSHHRNIATYYGAFIKKSPPGNDDQLWLVMEFCGAGSVTDLVKNTKGNALKEDCIAYICREILRGLAHLHAHKVIHRDIKGQNVLLTENAEVKLVDFGVSAQLDRTVGRRNTFIGTPYWMAPEVIACDENPDATYDYRSDIWSLGITAIEMAEGAPPLCDMHPMRALFLIPRNPPPRLKSKKWSKKFIDFIDTCLIKTYLSRPPTEQLLKFPFIRDQPTERQVRIQLKDHIDRSRKKRGEKEETEYEYSGSEEEDDSHGEEGEPSSIMNVPGESTLRREFLRLQQENKSNSEALKQQQQLQQQQQRDPEAHIKHLLHQRQRRIEEQKEERRRVEEQQRREREQRKLQEKEQQRRLEDMQALRREEERRQAEREQEYKRKQLEEQRQSERLQRQLQQEHAYLKSLQQQQQQQQLQKQQQQQLLPGDRKPLYHYGRGMNPADKPAWAREVEERTRMNKQQNSPLAKSKPGSTGPEPPIPQASPGPPGPLSQTPPMQRPVEPQEGPHKSLVAHRVPLKPYAAPVPRSQSLQDQPTRNLAAFPASHDPDPAIPAPTATPSARGAVIRQNSDPTSEGPGPSPNPPAWVRPDNEAPPKVPQRTSSIATALNTSGAGGSRPAQAVRARPRSNSAWQIYLQRRAERGTPKPPGPPAQPPGPPNASSNPDLRRSDPGWERSDSVLPASHGHLPQAGSLERNRVGVSSKPDSSPVLSPGNKAKPDDHRSRPGRPADFVLLKERTLDEAPRPPKKAMDYSSSSEEVESSEDDEEEGEGGPAEGSRDTPGGRSDGDTDSVSTMVVHDVEEITGTQPPYGGGTMVVQRTPEEERNLLHADSNGYTNLPDVVQPSHSPTENSKGQSPPSKDGSGDYQSRGLVKAPGKSSFTMFVDLGIYQPGGSGDSIPITALVGGEGTRLDQLQYDVRKGSVVNVNPTNTRAHSETPEIRKYKKRFNSEILCAALWGVNLLVGTENGLMLLDRSGQGKVYGLIGRRRFQQMDVLEGLNLLITISGKRNKLRVYYLSWLRNKILHNDPEVEKKQGWTTVGDMEGCGHYRVVKYERIKFLVIALKSSVEVYAWAPKPYHKFMAFKSFADLPHRPLLVDLTVEEGQRLKVIYGSSAGFHAVDVDSGNSYDIYIPVHIQSQITPHAIIFLPNTDGMEMLLCYEDEGVYVNTYGRIIKDVVLQWGEMPTSVAYICSNQIMGWGEKAIEIRSVETGHLDGVFMHKRAQRLKFLCERNDKVFFASVRSGGSSQVYFMTLNRNCIMNW

SEQ ID NO: 51745 - protein, 1312 aa, Homo sapiens
  Payload ID: 10301
  Gene Symbol: MINK1
  Gene Name: misshapen-like kinase 1
  Uniprot ID: Q8N4C8
  ENSP ID: ENSP00000406487
MGDPAPARSLDDIDLSALRDPAGIFELVEVVGNGTYGQVYKGRHVKTGQLAAIKVMDVTEDEEEEIKQEINMLKKYSHHRNIATYYGAFIKKSPPGNDDQLWLVMEFCGAGSVTDLVKNTKGNALKEDCIAYICREILRGLAHLHAHKVIHRDIKGQNVLLTENAEVKLVDFGVSAQLDRTVGRRNTFIGTPYWMAPEVIACDENPDATYDYRSDIWSLGITAIEMAEGAPPLCDMHPMRALFLIPRNPPPRLKSKKWSKKFIDFIDTCLIKTYLSRPPTEQLLKFPFIRDQPTERQVRIQLKDHIDRSRKKRGEKEETEYEYSGSEEEDDSHGEEGEPSSIMNVPGESTLRREFLRLQQENKSNSEALKQQQQLQQQQQRDPEAHIKHLLHQRQRRIEEQKEERRRVEEQQRREREQRKLQEKEQQRRLEDMQALRREEERRQAEREQEYKRKQLEEQRQSERLQRQLQQEHAYLKSLQQQQQQQQLQKQQQQQLLPGDRKPLYHYGRGMNPADKPAWAREVEERTRMNKQQNSPLAKSKPGSTGPEPPIPQASPGPPGPLSQTPPMQRPVEPQEGPHKSLQDQPTRNLAAFPASHDPDPAIPAPTATPSARGAVIRQNSDPTSEGPGPSPNPPAWVRPDNEAPPKVPQRTSSIATALNTSGAGGSRPAQAVRARPRSNSAWQIYLQRRAERGTPKPPGPPAQPPGPPNASSNPDLRRSDPGWERSDSVLPASHGHLPQAGSLERNRVGVSSKPDSSPVLSPGNKAKPDDHRSRPGRPADFVLLKERTLDEAPRPPKKAMDYSSSSEEVESSEDDEEEGEGGPAEGSRDTPGGRSDGDTDSVSTMVVHDVEEITGTQPPYGGGTMVVQRTPEEERNLLHADSNGYTNLPDVVQPSHSPTENSKGQSPPSKDGSGDYQSRGLVKAPGKSSFTMFVDLGIYQPGGSGDSIPITALVGGEGTRLDQLQYDVRKGSVVNVNPTNTRAHSETPEIRKYKKRFNSEILCAALWGVNLLVGTENGLMLLDRSGQGKVYGLIGRRRFQQMDVLEGLNLLITISGKRNKLRVYYLSWLRNKILHNDPEVEKKQGWTTVGDMEGCGHYRVVKYERIKFLVIALKSSVEVYAWAPKPYHKFMAFKSFADLPHRPLLVDLTVEEGQRLKVIYGSSAGFHAVDVDSGNSYDIYIPVHIQSQITPHAIIFLPNTDGMEMLLCYEDEGVYVNTYGRIIKDVVLQWGEMPTSVAYICSNQIMGWGEKAIEIRSVETGHLDGVFMHKRAQRLKFLCERNDKVFFASVRSGGSSQVYFMTLNRNCIMNW

SEQ ID NO: 51746 - protein, 161 aa, Homo sapiens
  Payload ID: 10301
  Gene Symbol: MINK1
  Gene Name: misshapen-like kinase 1
  ENSP ID: ENSP00000459102
LPHRPLLVDLTVEEGQRLKVIYGSSAGFHAVDVDSGNSYDIYIPVHIQSQITPHAIIFLPNTDGMEMLLCYEDEGVYVNTYGRIIKDVVLQWGEMPTSVAYICSNQIMGWGEKAIEIRSVETGHLDGVFMHKRAQRLKFLCERNDKVGGSFPLKALLSRLP

SEQ ID NO: 51747 - protein, 53 aa, Homo sapiens
  Payload ID: 10301
  Gene Symbol: MINK1
  Gene Name: misshapen-like kinase 1
  ENSP ID: ENSP00000459269
  MOD_RES (1)..(1): Any amino acid
XDLSALRDPAGIFELVEVVGNGTYGQVYKGRHVKTGQLAAIKVMDVTELLPSA

SEQ ID NO: 51748 - protein, 381 aa, Homo sapiens
  Payload ID: 10301
  Gene Symbol: MINK1
  Gene Name: misshapen-like kinase 1
  ENSP ID: ENSP00000459699
  MOD_RES (1)..(1): Any amino acid
XRGLAHLHAHKVIHRDIKGQNVLLTENAEVKLVDFGVSAQLDRTVGRRNTFIGTPYWMAPEVIACDENPDATYDYRSDIWSLGITAIEMAEGAPPLCDMHPMRALFLIPRNPPPRLKSKKWSKKFIDFIDTCLIKTYLSRPPTEQLLKFPFIRDQPTERQVRIQLKDHIDRSRKKRGEKEETEYEYSGSEEEDDSHGEEGEPSSIMNVPGESTLRREFLRLQQENKSNSEALKQQQQLQQQQQRDPEAHIKHLLHQRQRRIEEQKEERRRVEEQQRREREQRKLQEKEQQRRLEDMQALRREEERRQAEREQEYIRHRLEEEQRQLEILQQQLLQEQALLLVTGPSASSGKMLFRASLLERDGNTSREGIHPGHQGNTSPL

SEQ ID NO: 51749 - protein, 111 aa, Homo sapiens
  Payload ID: 10301
  Gene Symbol: MINK1
  Gene Name: misshapen-like kinase 1
  ENSP ID: ENSP00000461500
MGDPAPARSLDDIDLSALRALWFQFFYHSGSSLESPGMLNGPFQHRNSRIMTHRSAEKTLLGSLSLWRWSAMEPTDRCTRVGMSRRGSWLPSRSWMSRRTRRKRSNRRSTC

SEQ ID NO: 51750 - protein, 875 aa, Homo sapiens
  Payload ID: 10302
  Gene Symbol: MIOS
  Gene Name: missing oocyte, meiosis regulator, homolog (Drosophila)
  Uniprot ID: Q9NXC5
  ENSP ID: ENSP00000339881
MSGTKPDILWAPHHVDRFVVCDSELSLYHVESTVNSELKAGSLRLSEDSAATLLSINSDTPYMKCVAWYLNYDPECLLAVGQANGRVVLTSLGQDHNSKFKDLIGKEFVPKHARQCNTLAWNPLDSNWLAAGLDKHRADFSVLIWDICSKYTPDIVPMEKVKLSAGETETTLLVTKPLYELGQNDACLSLCWLPRDQKLLLAGMHRNLAIFDLRNTSQKMFVNTKAVQGVTVDPYFHDRVASFYEGQVAIWDLRKFEKPVLTLTEQPKPLTKVAWCPTRTGLLATLTRDSNIIRLYDMQHTPTPIGDETEPTIIERSVQPCDNYIASFAWHPTSQNRMIVVTPNRTMSDFTVFERISLAWSPITSLMWACGRHLYECTEEENDNSLEKDIATKMRLRALSRYGLDTEQVWRNHILAGNEDPQLKSLWYTLHFMKQYTEDMDQKSPGNKGSLVYAGIKSIVKSSLGMVESSRHNWSGLDKQSDIQNLNEERILALQLCGWIKKGTDVDVGPFLNSLVQEGEWERAAAVALFNLDIRRAIQILNEGASSEKGDLNLNVVAMALSGYTDEKNSLWREMCSTLRLQLNNPYLCVMFAFLTSETGSYDGVLYENKVAVRDRVAFACKFLSDTQLNRYIEKLTNEMKEAGNLEGILLTGLTKDGVDLMESYVDRTGDVQTASYCMLQGSPLDVLKDERVQYWIENYRNLLDAWRFWHKRAEFDIHRSKLDPSSKPLAQVFVSCNFCGKSISYSCSAVPHQGRGFSQYGVSGSPTKSKVTSCPGCRKPLPRCALCLINMGTPVSSCPGGTKSDEKVDLSKDKKLAQFNNWFTWCHNCRHGGHAGHMLSWFRDHAECPVSACTCKCMQLDTTGNLVPAETVQP

SEQ ID NO: 51751 - protein, 875 aa, Homo sapiens; identical to SEQ ID NO: 51750
  Payload ID: 10302
  Gene Symbol: MIOS
  Gene Name: missing oocyte, meiosis regulator, homolog (Drosophila)
  Uniprot ID: Q9NXC5
  ENSP ID: ENSP00000384088

SEQ ID NO: 51752 - protein, 64 aa, Homo sapiens
  Payload ID: 10302
  Gene Symbol: MIOS
  Gene Name: missing oocyte, meiosis regulator, homolog (Drosophila)
  ENSP ID: ENSP00000407518
MSGTKPDILWAPHHVDRFVVCDSELSLYHVESTVNSELKAGSLRLSEDSAATLLSINSDTPYMK

SEQ ID NO: 51753 - protein, 179 aa, Homo sapiens
  Payload ID: 10302
  Gene Symbol: MIOS
  Gene Name: missing oocyte, meiosis regulator, homolog (Drosophila)
  ENSP ID: ENSP00000410752
MSGTKPDILWAPHHVDRFVVCDSELSLYHVESTVNSELKAGSLRLSEDSAATLLSINSDTPYMKCVAWYLNYDPECLLAVGQANGRVVLTSLGQDHNSKFKDLIGKEFVPKHARQCNTLAWNPLDSNWLAAGLDKHRADFSVLIWDICSKYTPDIVPMEKVKLSAGETETTLLVTKPLY

SEQ ID NO: 51754 - protein, 150 aa, Homo sapiens
  Payload ID: 10302
  Gene Symbol: MIOS
  Gene Name: missing oocyte, meiosis regulator, homolog (Drosophila)
  ENSP ID: ENSP00000413050
MSGTKPDILWAPHHVDRFVVCDSELSLYHVESTVNSELKAGSLRLSEDSAATLLSINSDTPYMKCVAWYLNYDPECLLAVGQANGRVVLTSLGQDHNSKFKDLIGKEFVPKHARQCNTLAWNPLDSNWLAAGLDKHRADFSVLIWDICSK

SEQ ID NO: 51755 - protein, 64 aa, Homo sapiens; identical to SEQ ID NO: 51752
  Payload ID: 10302
  Gene Symbol: MIOS
  Gene Name: missing oocyte, meiosis regulator, homolog (Drosophila)
  ENSP ID: ENSP00000413489

SEQ ID NO: 51756 - protein, 249 aa, Homo sapiens
  Payload ID: 10303
  Gene Symbol: MITD1
  Gene Name: MIT, microtubule interacting and transport, domain containing 1
  Uniprot ID: Q8WV92
  ENSP ID: ENSP00000289359
MAKSGLRQDPQSTAAATVLKRAVELDSESRYPQALVCYQEGIDLLLQVLKGTKDNTKRCNLREKISKYMDRAENIKKYLDQEKEDGKYHKQIKIEENATGFSYESLFREYLNETVTEVWIEDPYIRHTHQLYNFLRFCEMLIKRPCKVKTIHLLTSLDEGIEQVQQSRGLQEIEESLRSHGVLLEVQYSSSIHDREIRFNNGWMIKIGRGLDYFKKPQSRFSLGYCDFDLRPCHETTVDIFHKKHTKNI

SEQ ID NO: 51757 - protein, 197 aa, Homo sapiens
  Payload ID: 10303
  Gene Symbol: MITD1
  Gene Name: MIT, microtubule interacting and transport, domain containing 1
  ENSP ID: ENSP00000387316
MAKSGLRQDPQSTAAATVLKRAVELDSESRYPQALVCYQEGIDLLLQVLKGTKDNTKRCNLREKISKYMDRAENIKKYLDQEKEDGKYHKQIKIEENATGFSYESLFREYLNETVTEVWIEDPYIRHTHQGIEQVQQSRGLQEIEESLRSHGVLLEVQYSSSIHDREIRFNNGWMIKIGRGLDYFKKPQSRFSLGYC

SEQ ID NO: 51758 - protein, 53 aa, Homo sapiens
  Payload ID: 10303
  Gene Symbol: MITD1
  Gene Name: MIT, microtubule interacting and transport, domain containing 1
  ENSP ID: ENSP00000408117
MAKSGLRQDPQSTAAATVLKRAVELDSESRYPQALVCYQEGIDLLLQVLKGEQ

SEQ ID NO: 51759 - protein, 231 aa, Homo sapiens
  Payload ID: 10303
  Gene Symbol: MITD1
  Gene Name: MIT, microtubule interacting and transport, domain containing 1
  ENSP ID: ENSP00000413371
LKRAVELDSESRYPQALVCYQEGIDLLLQVLKGTKDNTKRCNLREKISKYMDRAENIKKYLDQEKEDGKYHKQIKIEENATGFSYESLFREYLNETVTEVWIEDPYIRHTHQLYNFLRFCEMLIKRPCKVKTIHLLTSLDEGIEQVQQSRGLQEIEESLRSHGVLLEVQYSSSIHDREIRFNNGWMIKIGRGLDYFKKPQSRFSLGYCDFDLRPCHETTVDIFHKKHTKNI

SEQ ID NO: 51760 - protein, 337 aa, Homo sapiens
  Payload ID: 10304
  Gene Symbol: MARC1
  Gene Name: mitochondrial amidoxime reducing component 1
  Uniprot ID: Q5VT66
  ENSP ID: ENSP00000355877
MGAAGSSALARFVLLAQSRPGWLGVAALGLTAVALGAVAWRRAWPTRRRRLLQQVGTVAQLWIYPVKSCKGVPVSEAECTAMGLRSGNLRDRFWLVINQEGNMVTARQEPRLVLISLTCDGDTLTLSAAYTKDLLLPIKTPTTNAVHKCRVHGLEIEGRDCGEATAQWITSFLKSQPYRLVHFEPHMRPRRPHQIADLFRPKDQIAYSDTSPFLILSEASLADLNSRLEKKVKATNFRPNIVISGCDVYAEDSWDELLIGDVELKRVMACSRCILTTVDPDTGVMSRKEPLETLKSYRQCDPSERKLYGKSPLFGQYFVLENPGTIKVGDPVYLLGQ

SEQ ID NO: 51761 - protein, 263 aa, Homo sapiens
  Payload ID: 10304
  Gene Symbol: MARC1
  Gene Name: mitochondrial amidoxime reducing component 1
  ENSP ID: ENSP00000385327
  MOD_RES (1)..(1): Any amino acid
XFWLVINQEGNMVTARQEPRLVLISLTCDGDTLTLSAAYTKDLLLPIKTPTTNAVHKCRVHGLEIEGRDCGEATAQWITSFLKSQPYRLVHFEPHMRPRRPHQIADLFRPKDQIAYSDTSPFLILSEASLADLNSRLEKKVKATNFRPNIVISGCDVYAEVTLCPFGSFLGFDFFFKDSWDELLIGDVELKRVMACSRCILTTVDPDTGVMSRKEPLETLKSYRQCDPSERKLYGKSPLFGQYFVLENPGTIKVGDPVYLLGQ

SEQ ID NO: 51762 - protein, 119 aa, Homo sapiens
  Payload ID: 10304
  Gene Symbol: MARC1
  Gene Name: mitochondrial amidoxime reducing component 1
  ENSP ID: ENSP00000409634
RPRRPHQIADLFRPKDQIAYSDTSPFLILSEASLADLNSRLEKKVKATNFRPNIVISGCDVYAEDSWDELLIGDVELKRVMACSRCILTTVDPDTGVMSRKEPLETLKRESDVHTDPHG

SEQ ID NO: 51763 - protein, 99 aa, Homo sapiens
  Payload ID: 10304
  Gene Symbol: MARC1
  Gene Name: mitochondrial amidoxime reducing component 1
  ENSP ID: ENSP00000434522
  MOD_RES (1)..(1): Any amino acid
XRPRRPHQIADLFRPKDQIAYSDTSPFLILSEASLADLNSRLEKKVKATNFRPNIVISGCDVYAEVTLCPFGSFLGFDFFFKIYSALNKCRLLCGGYKC

SEQ ID NO: 51764 - protein, 257 aa, Homo sapiens
  Payload ID: 10305
  Gene Symbol: MARC2
  Gene Name: mitochondrial amidoxime reducing component 2
  Uniprot ID: Q969Z3
  ENSP ID: ENSP00000352266
MGASSSSALARLGLPARPWPRWLGVAALGLAAVALGTVAWRRAWPRRRRRLQQVGTVAKLWIYPVKSCKGVPVSEAECTAMGLRSGNLRDRFWLVIKEDGHMVTARQEPRLVLISIIYENNCLIFRAPDMDQLVLPSKQPSSNKLHNCRIFGLDIKGRDCGNEAAKWFTNFLKTEAYRLVQFETNMKGRTSRKLLPTLDQNFQVAYPDYCPLLIMTDASLVDLNTRMEKKMKMENFRPNIVVTGCDAFEEASATRRD

SEQ ID NO: 51765 - protein, 335 aa, Homo sapiens
  Payload ID: 10305
  Gene Symbol: MARC2
  Gene Name: mitochondrial amidoxime reducing component 2
  Uniprot ID: Q969Z3
  ENSP ID: ENSP00000355880
MGASSSSALARLGLPARPWPRWLGVAALGLAAVALGTVAWRRAWPRRRRRLQQVGTVAKLWIYPVKSCKGVPVSEAECTAMGLRSGNLRDRFWLVIKEDGHMVTARQEPRLVLISIIYENNCLIFRAPDMDQLVLPSKQPSSNKLHNCRIFGLDIKGRDCGNEAAKWFTNFLKTEAYRLVQFETNMKGRTSRKLLPTLDQNFQVAYPDYCPLLIMTDASLVDLNTRMEKKMKMENFRPNIVVTGCDAFEEDTWDELLIGSVEVKKVMACPRCILTTVDPDTGVIDRKQPLDTLKSYRLCDPSERELYKLSPLFGIYYSVEKIGSLRVGDPVYRMV

SEQ ID NO: 51766 - protein, 172 aa, Homo sapiens
  Payload ID: 10305
  Gene Symbol: MARC2
  Gene Name: mitochondrial amidoxime reducing component 2
  ENSP ID: ENSP00000416442
GHMVTARQEPRLVLISIIYENNCLIFRAPDMDQLVLPSKQPSSNKLHNCRIFGLDIKGRDCGNEAAKWFTNFLKTEAYRLVQFETNMKGRTSRKLLPTLDQNFQVAYPDYCPLLIMTDASLVDLNTRMEKKMKMENFRPNIVVTGCDAFEEDTWDELLIGSVEVKKVMACPR

SEQ ID NO: 51767 - protein, 94 aa, Homo sapiens
  Payload ID: 10305
  Gene Symbol: MARC2
  Gene Name: mitochondrial amidoxime reducing component 2
  ENSP ID: ENSP00000435450
MGASSSSALARLGLPARPWPRWLGVAALGLAAVALGTVAWRRAWPRRRRRLQQVGTVAKLWIYPVKSCKGVPVSEAECTAMGLRSGNLRDRMCA

SEQ ID NO: 51768 - protein, 540 aa, Homo sapiens
  Payload ID: 10306
  Gene Symbol: MAVS
  Gene Name: mitochondrial antiviral signaling protein
  Uniprot ID: Q7Z434
  ENSP ID: ENSP00000401980
MPFAEDKTYKYICRNFSNFCNVDVVEILPYLPCLTARDQDRLRATCTLSGNRDTLWHLFNTLQRRPGWVEYFIAALRGCELVDLADEVASVYQSYQPRTSDRPPDPLEPPSLPAERPGPPTPAAAHSIPYNSCREKEPSYPMPVQETQAPESPGENSEQALQTLSPRAIPRNPDGGPLESSSDLAALSPLTSSGHQEQDTELGSTHTAGATSSLTPSRGPVSPSVSFQPLARSTPRASRLPGPTGSVVSTGTSFSSSSPGLASAGAAEGKQGAESDQAEPIICSSGAEAPANSLPSKVPTTLMPVNTVALKVPANPASVSTVPSKLPTSSKPPGAVPSNALTNPAPSKLPINSTRAGMVPSKVPTSMVLTKVSASTVPTDGSSRNEETPAAPTPAGATGGSSAWLDSSSENRGLGSELSKPGVLASQVDSPFSGCFEDLAISASTSLGMGPCHGPEENEYKSEGTFGIHVAENPSIQLLEGNPGPPADPDGGPRPQADRKFQEREVPCHRPSPGALWLQVAVTGVLVVTLLVVLYRRRLH

SEQ ID NO: 51769 - protein, 399 aa, Homo sapiens
  Payload ID: 10306
  Gene Symbol: MAVS
  Gene Name: mitochondrial antiviral signaling protein
  Uniprot ID: Q7Z434
  ENSP ID: ENSP00000413749
MPVQETQAPESPGENSEQALQTLSPRAIPRNPDGGPLESSSDLAALSPLTSSGHQEQDTELGSTHTAGATSSLTPSRGPVSPSVSFQPLARSTPRASRLPGPTGSVVSTGTSFSSSSPGLASAGAAEGKQGAESDQAEPIICSSGAEAPANSLPSKVPTTLMPVNTVALKVPANPASVSTVPSKLPTSSKPPGAVPSNALTNPAPSKLPINSTRAGMVPSKVPTSMVLTKVSASTVPTDGSSRNEETPAAPTPAGATGGSSAWLDSSSENRGLGSELSKPGVLASQVDSPFSGCFEDLAISASTSLGMGPCHGPEENEYKSEGTFGIHVAENPSIQLLEGNPGPPADPDGGPRPQADRKFQEREVPCHRPSPGALWLQVAVTGVLVVTLLVVLYRRRLH

SEQ ID NO: 51770 - protein, 234 aa, Homo sapiens
  Payload ID: 10307
  Gene Symbol: MALSU1
  Gene Name: mitochondrial assembly of ribosomal large subunit 1
  Uniprot ID: Q96EH3
  ENSP ID: ENSP00000419370
MGPGGRVARLLAPLMWRRAVSSVAGSAVGAEPGLRLLAVQRLPVGAAFCRACQTPNFVRGLHSEPGLEERAEGTVNEGRPESDAADHTGPKFDIDMMVSLLRQENARDICVIQVPPEMRYTDYFVIVSGTSTRHLHAMAFYVVKMYKHLKCKRDPHVKIEGKDTDDWLCVDFGSMVIHLMLPETREIYELEKLWTLRSYDDQLAQIAPETVPEDFILGIEDDTSSVTPVELKCE

SEQ ID NO: 51771 - protein, 330 aa, Homo sapiens
  Payload ID: 10308
  Gene Symbol: MCU
  Gene Name: mitochondrial calcium uniporter
  Uniprot ID: Q8NE86
  ENSP ID: ENSP00000349680
MAAAAGRSLLLLLSSRGGGGGGAGGCGALTAGCFPGLGVSRHRQQQHHRTVHQRIASWQNLGAVYCSTVVPSDDVTVVYQNGLPVISVRLPSRRERCQFTLKPISDSVGVFLRQLQEEDRGIDRVAIYSPDGVRVAASTGIDLLLLDDFKLVINDLTYHVRPPKRVEMGFCHVGQNGFELLTSSYLPASASQSAEIIAVRIEISRKAEKRTTLVLWGGLAYMATQFGILARLTWWEYSWDIMEPVTYFITYGSAMAMYAYFVMTRQEYVYPEARDRQYLLFFHKGAKKSRFDLEKYNQLKDAIAQAEMDLKRLRDPLQVHLPLRQIGEKD

SEQ ID NO: 51772 - protein, 351 aa, Homo sapiens
  Payload ID: 10308
  Gene Symbol: MCU
  Gene Name: mitochondrial calcium uniporter
  Uniprot ID: Q8NE86
  ENSP ID: ENSP00000362144
MAAAAGRSLLLLLSSRGGGGGGAGGCGALTAGCFPGLGVSRHRQQQHHRTVHQRIASWQNLGAVYCSTVVPSDDVTVVYQNGLPVISVRLPSRRERCQFTLKPISDSVGVFLRQLQEEDRGIDRVAIYSPDGVRVAASTGIDLLLLDDFKLVINDLTYHVRPPKRDLLSHENAATLNDVKTLVQQLYTTLCIEQHQLNKERELIERLEDLKEQLAPLEKVRIEISRKAEKRTTLVLWGGLAYMATQFGILARLTWWEYSWDIMEPVTYFITYGSAMAMYAYFVMTRQEYVYPEARDRQYLLFFHKGAKKSRFDLEKYNQLKDAIAQAEMDLKRLRDPLQVHLPLRQIGEKD

SEQ ID NO: 51773 - protein, 302 aa, Homo sapiens
  Payload ID: 10308
  Gene Symbol: MCU
  Gene Name: mitochondrial calcium uniporter
  Uniprot ID: Q8NE86
  ENSP ID: ENSP00000440913
MVHQRIASWQNLGAVYCSTVVPSDDVTVVYQNGLPVISVRLPSRRERCQFTLKPISDSVGVFLRQLQEEDRGIDRVAIYSPDGVRVAASTGIDLLLLDDFKLVINDLTYHVRPPKRDLLSHENAATLNDVKTLVQQLYTTLCIEQHQLNKERELIERLEDLKEQLAPLEKVRIEISRKAEKRTTLVLWGGLAYMATQFGILARLTWWEYSWDIMEPVTYFITYGSAMAMYAYFVMTRQEYVYPEARDRQYLLFFHKGAKKSRFDLEKYNQLKDAIAQAEMDLKRLRDPLQVHLPLRQIGEKD

SEQ ID NO: 51774 - protein, 101 aa, Homo sapiens
  Payload ID: 10308
  Gene Symbol: MCU
  Gene Name: mitochondrial calcium uniporter
  ENSP ID: ENSP00000473857
MAAAAGRSLLLLLSSRGGGGGGAGGCGALTAGCFPGLGVSRHRQQQHHRTGVEEEVKMWKAQRVGELREGRKQLRSFTTIPTVIGKIPFLPHSPCTMPVTS

SEQ ID NO: 51775 - protein, 88 aa, Homo sapiens
  Payload ID: 10308
  Gene Symbol: MCU
  Gene Name: mitochondrial calcium uniporter
  ENSP ID: ENSP00000473892
MLLGAAPESSPGPRRGRPSSSLVPEGSGRKENQTLFPSVTSSVCVHGEPAPSRWMLHCFRRQASSSWVLKGAFGGPFEGYCISVFTRA

SEQ ID NO: 51776 - protein, 91 aa, Homo sapiens
  Payload ID: 10308
  Gene Symbol: MCU
  Gene Name: mitochondrial calcium uniporter
  ENSP ID: ENSP00000474265
MAAAAGRSLLLLLSSRGGGGGGAGGCGALTAGCFPGLGVSRHRQQQHHRTVFHYHSYSDWQDTVSTSLSMYHASDILAARVWSWPVGVKYW

SEQ ID NO: 51777 - protein, 54 aa, Homo sapiens
  Payload ID: 10308
  Gene Symbol: MCU
  Gene Name: mitochondrial calcium uniporter
  ENSP ID: ENSP00000474820
MAAAAGRSLLLLLSSRGGGGGGAGGCGALTAGCFPGLGVSRHRQQQHHRTVLVM

SEQ ID NO: 51778 - protein, 167 aa, Homo sapiens
  Payload ID: 10308
  Gene Symbol: MCU
  Gene Name: mitochondrial calcium uniporter
  ENSP ID: ENSP00000475141
MSCTRYRAASATKQYTRGSLPGRIWELFIAALLCPLMVNVTVVYQNGLPVISVRLPSRRERCQFTLKPISDSVGVFLRQLQEEDRGIDRVAIYSPDGVRVAASTGIDLLLLDDFKLVINDLTYHVRPPKRDLLSHENAATLNDVKTLVQQLYTTLCIEQHQLNKERE

SEQ ID NO: 51779 - protein, 359 aa, Homo sapiens
  Payload ID: 10309
  Gene Symbol: MCUR1
  Gene Name: mitochondrial calcium uniporter regulator 1
  Uniprot ID: Q96AQ8
  ENSP ID: ENSP00000368468
MDCGSVGGQRTQRLPGRQRLLFLPVGLSGRPGGSETSARRCLSALSDGLGALRPRAPAARGGVSRASPLLLLLLVPSPRLAAAAPRRQLGDWERSRLGYAAPPAGRSSAWRCSPGVAAAAGALPQYHGPAPALVSCRRELSLSAGSLQLERKRRDFTSSGSRKLYFDTHALVCLLEDNGFATQQAEIIVSALVKILEANMDIVYKDMVTKMQQEITFQQVMSQIANVKKDMIILEKSEFSALRAENEKIKLELHQLKQQVMDEVIKVRTDTKLDFNLEKSRVKELYSLNEKKLLELRTEIVALHAQQDRALTQTDRKIETEVAGLKTMLESHKLDNIKYLAGSIFTCLTVALGFYRLWI

SEQ ID NO: 51780 - protein, 124 aa, Homo sapiens
  Payload ID: 10309
  Gene Symbol: MCUR1
  Gene Name: mitochondrial calcium uniporter regulator 1
  ENSP ID: ENSP00000476106
  MOD_RES (1)..(1): Any amino acid
XKDMIILEKSEFSALRAENEKIKLELHQLKQQVMDEVIKVRTDTKLDFNLEKSRVKELYSLNEKKLLELRTEIVALHAQQDRALTQTDRKIETEVAGLKTMLESHKLDNIKYLAERSPQKRQHT

SEQ ID NO: 51781 - protein, 257 aa, Homo sapiens
  Payload ID: 10309
  Gene Symbol: MCUR1
  Gene Name: mitochondrial calcium uniporter regulator 1
  Uniprot ID: Q96AQ8
  ENSP ID: ENSP00000476162
MDCGSVGGQRTQRLPGRQRLLFLPVGLSGRPGGSETSARRCLSALSDGLGALRPRAPAARGGVSRASPLLLLLLVPSPRLAAAAPRRQLGDWERSRLGYAAPPAGRSSAWRCSPGVAAAAGALPQYHGPAPALVSCRRELSLSAGSLQLERKRRDFTSSGSRKLYFDTHALVCLLEDNESHSFIQAGVQWHSLGLLQPPPPGFKRSSHLILLSSWDYRHAPPHLDNFSVFLLETGFHHVGQAGLKLLTSSDPPTLAS

SEQ ID NO: 51782 - protein, 476 aa, Homo sapiens
  Payload ID: 10310
  Gene Symbol: MICU1
  Gene Name: mitochondrial calcium uptake 1
  Uniprot ID: Q9BPX6
  ENSP ID: ENSP00000354415
MFRLNSLSALAELAVGSRWYHGGSQPIQIRRRLMMVAFLGASAVTASTGLLWKRAHAESPPCVDNLKSDIGDKGKNKDEGDVCNHEKKTADLAPHPEEKKKKRSGFRDRKVMEYENRIRAYSTPDKIFRYFATLKVISEPGEAEVFMTPEDFVRSITPNEKQPEHLGLDQYIIKRFDGKKISQEREKFADEGSIFYTLGECGLISFSDYIFLTTVLSTPQRNFEIAFKMFDLNGDGEVDMEEFEQVQSIIRSQTSMGMRHRDRPTTGNTLKSGLCSALTTYFFGADLKGKLTIKNFLEFQRKLQHDVLKLEFERHDPVDGRITERQFGGMLLAYSGVQSKKLTAMQRQLKKHFKEGKGLTFQEVENFFTFLKNINDVDTALSFYHMAGASLDKVTMQQVARTVAKVELSDHVCDVVFALFDCDGNGELSNKEFVSIMKQRLMRGLEKPKDMGFTRLMQAMWKCAQETAWDFALPKQ

SEQ ID NO: 51783 - protein, 478 aa, Homo sapiens [sequence omitted]

SEQ ID NO: 51784 - protein, 278 aa, Homo sapiens
  Payload ID: 10310
  Gene Symbol: MICU1
  Gene Name: mitochondrial calcium uptake 1
  Uniprot ID: Q9BPX6
  ENSP ID: ENSP00000381747
MVSLKAKLNHLRQSMLKQKAPQRNFEIAFKMFDLNGDGEVDMEEFEQVQSIIRSQTSMGMRHRDRPTTGNTLKSGLCSALTTYFFGADLKGKLTIKNFLEFQRKLQHDVLKLEFERHDPVDGRITERQFGGMLLAYSGVQSKKLTAMQRQLKKHFKEGKGLTFQEVENFFTFLKNINDVDTALSFYHMAGASLDKVTMQQVARTVAKVELSDHVCDVVFALFDCDGNGELSNKEFVSIMKQRLMRGLEKPKDMGFTRLMQAMWKCAQETAWDFALPKQ

SEQ ID NO: 51785 - protein, 278 aa, Homo sapiens
  Payload ID: 10310
  Gene Symbol: MICU1
  Gene Name: mitochondrial calcium uptake 1
  Uniprot ID: Q9BPX6
  ENSP ID: ENSP00000402470
MKRIYTYRRAKEIFKDTPKAPQRNFEIAFKMFDLNGDGEVDMEEFEQVQSIIRSQTSMGMRHRDRPTTGNTLKSGLCSALTTYFFGADLKGKLTIKNFLEFQRKLQHDVLKLEFERHDPVDGRITERQFGGMLLAYSGVQSKKLTAMQRQLKKHFKEGKGLTFQEVENFFTFLKNINDVDTALSFYHMAGASLDKVTMQQVARTVAKVELSDHVCDVVFALFDCDGNGELSNKEFVSIMKQRLMRGLEKPKDMGFTRLMQAMWKCAQETAWDFALPKQ

SEQ ID NO: 51786 - protein, 246 aa, Homo sapiens
  Payload ID: 10310
  Gene Symbol: MICU1
  Gene Name: mitochondrial calcium uptake 1
  ENSP ID: ENSP00000432492
  MOD_RES (1)..(1): Any amino acid
XNEKQPEHLGLDQYIIKRFDGKKISQEREKFADEGSIFYTLGECGLISFSDYIFLTTVLSTPQRNFEIAFKMFDLNGDGEVDMEEFEQVQSIIRSQTSMGMRHRDRPTTGNTLKSGLCSALTTYFFGADLKGKLTIKNFLEFQRKLQHDVLKLEFERHDPVDGRITERQFGGMLLAYSGVQSKKLTAMQRQLKKHFKEGKGLTFQEVENFFTFLKNINDVDTALSFYHMAGASLDKGKGTIFMGRR

SEQ ID NO: 51787 - protein, 212 aa, Homo sapiens
  Payload ID: 10310
  Gene Symbol: MICU1
  Gene Name: mitochondrial calcium uptake 1
  ENSP ID: ENSP00000474192
MVAFLGASAVTASTGLLWKRAHAESPPCVDNLKSDIGDKGKNKDEGDVCNHEKKTADLAPHPEEKKKKRSGFRDRKVMEYENRIRAYSTPDKIFRYFATLKVISEPGEAEVFMTPEDFVRSITPNEKQPEHLGLDQYIIKRFDGKKISQEREKFADEGSIFYTLGECGLISFSDYIFLTTVLSTPQRNFEIAFKMFDLNGDGEVDMEEFEQA

SEQ ID NO: 51788 - protein, 388 aa, Homo sapiens
  Payload ID: 10310
  Gene Symbol: MICU1
  Gene Name: mitochondrial calcium uptake 1
  ENSP ID: ENSP00000474775
MFRLNSLSALAELAVGSRWYHGGSQPIQIRRRLMMVAFLGASAVTASTGLLWKRAHAESPPCVDNLKSDIGDKGKNKDEGDVCNHEKKTADLAPHPEEKKKKRSGFRDRKVMEYENRIRAYSTPDKIFRYFATLKVISEPGEAEVFMTPEDFVRSITPNEKQPEHLGLDQYIIKRFDGKARFSKKKILHRVRKKSKGSILQRRKKALQKEERTRHGSTKHNEQEVRRTIMEWLEKAGVQWHHLSSLQPPTPWFKRFFCLSLLSSWDYRHTPPCPANFFIFSRDRVSPCWPGWSRYPDLMIRPPWLRKVLGLQKISQEREKFADEGSIFYTLGECGLISFSDYIFLTTVLSTPQRNFEIAFKMFDLNGDGEVDMEEFEQVQSIIRSQTS

SEQ ID NO: 51789 - protein, 154 aa, Homo sapiens
  Payload ID: 10310
  Gene Symbol: MICU1
  Gene Name: mitochondrial calcium uptake 1
  ENSP ID: ENSP00000474809
MKRIYTYRRAKEIFKDTPKAPQRNFEIAFKMFDLNGDGEVDMEEFEQVQSIIRSQTSMGMRHRDRPTTGNTLKSGLCSALTTYFFGADLKGKLTIKNFLEFQRKLQHDVLKLEFERHDPVDGRITERQFGGMLLAYSGVQSKKLTAMQRQLKKH

SEQ ID NO: 51790 - protein, 480 aa, Homo sapiens
  Payload ID: 10310
  Gene Symbol: MICU1
  Gene Name: mitochondrial calcium uptake 1
  ENSP ID: ENSP00000489563
MFRLNSLSALAELAVGSRWYHGGSQPIQIRRRLMMVAFLGASAVTASTGLLWKRAHAESPPCVDNLKSDIGDKGKNKDEGDVCNHEKKTADLAPHPEEKKKKRSGFRDRKVMEYENRIRAYSTPDKIFRYFATLKVISEPGEAEVFMTPEDFVRSITPNEKQPEHLGLDQYIIKRFDGKDFWQKISQEREKFADEGSIFYTLGECGLISFSDYIFLTTVLSTPQRNFEIAFKMFDLNGDGEVDMEEFEQVQSIIRSQTSMGMRHRDRPTTGNTLKSGLCSALTTYFFGADLKGKLTIKNFLEFQRKLQHDVLKLEFERHDPVDGRITERQFGGMLLAYSGVQSKKLTAMQRQLKKHFKEGKGLTFQEVENFFTFLKNINDVDTALSFYHMAGASLDKVTMQQVARTVAKVELSDHVCDVVFALFDCDGNGELSNKEFVSIMKQRLMRGLEKPKDMGFTRLMQAMWKCAQETAWDFALPKQ

SEQ ID NO: 51791 - protein, 434 aa, Homo sapiens
  Payload ID: 10311
  Gene Symbol: MICU2
  Gene Name: mitochondrial calcium uptake 2
  Uniprot ID: Q8IYU8
  ENSP ID: ENSP00000371811
MAAAAGSCARVAAWGGKLRRGLAVSRQAVRSPGPLAAAVAGAALAGAGAAWHHSRVSVAARDGSFTVSAQKNVEHGIIYIGKPSLRKQRFMQFSSLEHEGEYYMTPRDFLFSVMFEQMERKTSVKKLTKKDIEDTLSGIQTAGCGSTFFRDLGDKGLISYTEYLFLLTILTKPHSGFHVAFKMLDTDGNEMIEKREFFKLQKIISKQDDLMTVKTNETGYQEAIVKEPEINTTLQMRFFGKRGQRKLHYKEFRRFMENLQTEIQEMEFLQFSKGLSFMRKEDFAEWLLFFTNTENKDIYWKNVREKLSAGESISLDEFKSFCHFTTHLEDFAIAMQMFSLAHRPVRLAEFKRAVKVATGQELSNNILDTVFKIFDLDGDECLSHEEFLGVLKNRMHRGLWVPQHQSIQEYWKCVKKESIKGVKEVWKQAGKGLF

SEQ ID NO: 51792 - protein, 236 aa, Homo sapiens
  Payload ID: 10311
  Gene Symbol: MICU2
  Gene Name: mitochondrial calcium uptake 2
  ENSP ID: ENSP00000431792
MAAAAGSCARVAAWGGKLRRGLAVSRQAVRSPGPLAAAVAGAALAGAGAAWHHSRVSVAARDGSFTVSAQKNVEHGIIYIGKPSLRKQRFMQFSSLEHEGEYYMTPRDFLFSVMFEQMERKTSVKKLTKKDIEDTLSGIQTAGCGSTFFRDLGDKGLISYTEYLFLLTILTKPHSGFHVAFKMLDTDGNEMIEKREFFKIDTIDSERQLQKIISKQDDLMTVKTNETGYQEAIVKE

SEQ ID NO: 51793 - protein, 530 aa, Homo sapiens
  Payload ID: 10312
  Gene Symbol: MICU3
  Gene Name: mitochondrial calcium uptake family, member 3
  Uniprot ID: Q86XE3
  ENSP ID: ENSP00000321455
MAALRRLLWPPPRVSPPLCAHQPLLGPWGRPAVTTLGLPGRPFSSREDEERAVAEAAWRRRRRWGELSVAAAAGGGLVGLVCYQLYGDPRAGSPATGRPSKSAATEPEDPPRGRGMLPIPVAAAKETVAIGRTDIEDLDLYATSRERRFRLFASIECEGQLFMTPYDFILAVTTDEPKVAKTWKSLSKQELNQMLAETPPVWKGSSKLFRNLKEKGVISYTEYLFLLCILTKPHAGFRIAFNMFDTDGNEMVDKKEFLVLQEIFRKKNEKREIKGDEEKRAMLRLQLYGYHSPTNSVLKTDAEELVSRSYWDTLRRNTSQALFSDLAERADDITSLVTDTTLLVHFFGKKGKAELNFEDFYRFMDNLQTEVLEIEFLSYSNGMNTISEEDFAHILLRYTNVENTSVFLENVRYSIPEEKGITFDEFRSFFQFLNNLEDFAIALNMYNFASRSIGQDEFKRAVYVATGLKFSPHLVNTVFKIFDVDKDDQLSYKEFIGIMKDRLHRGFRGYKTVQKYPTFKSCLKKELHSR

SEQ ID NO: 51794 - protein, 375 aa, Homo sapiens
  Payload ID: 10312
  Gene Symbol: MICU3
  Gene Name: mitochondrial calcium uptake family, member 3
  ENSP ID: ENSP00000427765
  MOD_RES (1)..(1): Any amino acid
XSRERRFRLFASIECEGQLFMTPYDFILAVTTDEPKVAKTWKSLSKQELNQMLAETPPVWKGSSKLFRNLKEKGVISYTEYLFLLCILTKPHAGFRIAFNMFDTDGNEMVDKKEFLVLQEIFRKKNEKREIKGDEEKRAMLVLKTDAEELVSRSYWDTLRRNTSQALFSDLAERADDITSLVTDTTLLVHFFGKKGKAELNFEDFYRFMDNLQTEVLEIEFLSYSNGMNTISEEDFAHILLRYTNVENTSVFLENVRYSIPEEKGITFDEFRSFFQFLNNLEDFAIALNMYNFASRSIGQDEFKRAVYVATGLKFSPHLVNTVFKIFDVDKDDQLSYKEFIGIMKDRLHRGFRGYKTVQKYPTFKSCLKKELHSR

SEQ ID NO: 51795 - protein, 100 aa, Homo sapiens
  Payload ID: 10312
  Gene Symbol: MICU3
  Gene Name: mitochondrial calcium uptake family, member 3
  ENSP ID: ENSP00000428890
  MOD_RES (1)..(1): Any amino acid
XFMTPYDFILAVTTDEPKVAKTWKSLSKQELNQMLAETPPVWKGSSKLFRNLKEKGVISYTEYLFLLCILTSKYTYCFYFWMQLYFLNESWKADLRFSYS

SEQ ID NO: 51796 - protein, 372 aa, Homo sapiens
  Payload ID: 10313
  Gene Symbol: MTCH1
  Gene Name: mitochondrial carrier 1
  Uniprot ID: Q9NZJ7
  ENSP ID: ENSP00000362718
MGASDPEVAPWARGGAAGMAGAGAGAGARGGAAAGVEARARDPPPAHRAHPRHPRPAAQPSARRMDGGSGGLGSGDNAPTTEALFVALGAGVTALSHPLLYVKLLIQVGHEPMPPTLGTNVLGRKVLYLPSFFTYAKYIVQVDGKIGLFRGLSPRLMSNALSTVTRGSMKKVFPPDEIEQVSNKDDMKTSLKKVVKETSYEMMMQCVSRMLAHPLHVISMRCMVQFVGREAKYSGVLSSIGKIFKEEGLLGFFVGLIPHLLGDVVFLWGCNLLAHFINAYLVDDSFSQALAIRSYTKFVMGIAVSMLTYPFLLVGDLMAVNNCGLQAGLPPYSPVFKSWIHCWKYLSVQGQLFRGSSLLFRRVSSGSCFALE

SEQ ID NO: 51797 - protein, 389 aa, Homo sapiens
  Payload ID: 10313
  Gene Symbol: MTCH1
  Gene Name: mitochondrial carrier 1
  Uniprot ID: Q9NZJ7
  ENSP ID: ENSP00000362730
MGASDPEVAPWARGGAAGMAGAGAGAGARGGAAAGVEARARDPPPAHRAHPRHPRPAAQPSARRMDGGSGGLGSGDNAPTTEALFVALGAGVTALSHPLLYVKLLIQVGHEPMPPTLGTNVLGRKVLYLPSFFTYAKYIVQVDGKIGLFRGLSPRLMSNALSTVTRGSMKKVFPPDEIEQVSNKDDMKTSLKKVVKETSYEMMMQCVSRMLAHPLHVISMRCMVQFVGREAKYSGVLSSIGKIFKEEGLLGFFVGLIPHLLGDVVFLWGCNLLAHFINAYLVDDSVSDTPGGLGNDQNPGSQFSQALAIRSYTKFVMGIAVSMLTYPFLLVGDLMAVNNCGLQAGLPPYSPVFKSWIHCWKYLSVQGQLFRGSSLLFRRVSSGSCFALE

SEQ ID NO: 51798 - protein, 201 aa, Homo sapiens
  Payload ID: 10313
  Gene Symbol: MTCH1
  Gene Name: mitochondrial carrier 1
  ENSP ID: ENSP00000399187
  MOD_RES (1)..(1): Any amino acid
XAVCVPHVGPPPACHLNALHGPVCGTGGQVQLSCGATIPGSSAAMVPHFGVINGKLAHSPRLIMSGVLSSIGKIFKEEGLLGFFVGLIPHLLGDVVFLWGCNLLAHFINAYLVDDSFSQALAIRSYTKFVMGIAVSMLTYPFLLVGDLMAVNNCGLQAGLPPYSPVFKSWIHCWKYLSVQGQLFRGSSLLFRRVSSGSCFA

SEQ ID NO: 51799 - protein, 394 aa, Homo sapiens
  Payload ID: 10313
  Gene Symbol: MTCH1
  Gene Name: mitochondrial carrier 1
  ENSP ID: ENSP00000419739
AGMAGAGAGAGARGGAAAGVEARARDPPPAHRAHPRHPRPAAQPSARRMDGGSGGLGSGDNAPTTEALFVALGAGVTALSHPLLYVKLLIQVGHEPMPPTLGTNVLGRKVLYLPSFFTYAKYIVQVDGKIGLFRGLSPRLMSNALSTVTRGSMKKVFPPDEIEQVSNKDDMKTSLKKVVKETSYEMMMQCVSRMLAHPLHVISMRCMVQFVGREAKYSGVLSSIGKIFKEEGLLGFFVGLIPHLLGDVVFLWGCNLLAHFINAYLVDDSFSQALAIRSYTKFVMGIAVSMLTYPFLLVGDLMAVNNCGLQAGLPPYSPVFKSWIHCWKYLSVQVSKHWTAEAFPVLCYILQLKWFCGCFIACKDKWFHGIQYCEEILGIYKAFKFSSYIISERI

SEQ ID NO: 51800 - protein, 363 aa, Homo sapiens
  Payload ID: 10313
  Gene Symbol: MTCH1
  Gene Name: mitochondrial carrier 1
  ENSP ID: ENSP00000437660
MDGGSGGLGSGDNAPTTEALFVALGAGVTALSHPLLYVKLLIQVGHEPMPPTLGTNVLGRKVLYLPSFFTYAKYIVQVDGKIGLFRGLSPRLMSNALSTVTRGSMKKVFPPDEIEQVSNKDDMKTSLKKVVKETSYEMMMQCVSRMLAHPLHVISMRCMVQFVGREAKYSGVLSSIGKIFKEEGLLGFFVGLIPHLLGDVVFLWGCNLLAHFINAYLVDDSFSQALAIRSYTKFVMGIAVSMLTYPFLLVGDLMAVNNCGLQAGLPPYSPVFKSWIHCWKYLSVQGQLFRGSSCFSAGCHQDHALPWSNLNHLKNTVSTWPPWVRPDHLGTPARRLQPNNNQMCSSPAGLQFHICHVSVQMWG

SEQ ID NO: 51801 - protein, 303 aa, Homo sapiens
  Payload ID: 10314
  Gene Symbol: MTCH2
  Gene Name: mitochondrial carrier 2
  Uniprot ID: Q9Y6C9
  ENSP ID: ENSP00000303222
MADAASQVLLGSGLTILSQPLMYVKVLIQVGYEPLPPTIGRNIFGRQVCQLPGLFSYAQHIASIDGRRGLFTGLTPRLCSGVLGTVVHGKVLQHYQESDKGEELGPGNVQKEVSSSFDHVIKETTREMIARSAATLITHPFHVITLRSMVQFIGRESKYCGLCDSIITIYREEGILGFFAGLVPRLLGDILSLWLCNSLAYLVNTYALDSGVSTMNEMKSYSQAVTGFFASMLTYPFVLVSNLMAVNNCGLAGGCPPYSPIYTSWIDCWCMLQKEGNMSRGNSLFFRKVPFGKTYCCDLKMLI

SEQ ID NO: 51802 - protein, 262 aa, Homo sapiens
  Payload ID: 10314
  Gene Symbol: MTCH2
  Gene Name: mitochondrial carrier 2
  ENSP ID: ENSP00000432043
MADAASQVLLGSGLTILSQPLMYVKVLIQVGYEPLPPTIGRNIFGRQVCQLPGLFSYAQHIASIDGRRGLFTGLTPRLCSGVLGTVVHGKVLQELGPGNVQKEVSSSFDHVIKETTREMIARSAATLITHPFHVITLRSMVQFIGRESKYCGLCDSIITIYREEGILGFFAGLVPRLLGDILSLWLCNSLAYLVNTYALDSGVSTMNEMKSYSQAVTGFFASMLTYPFVLVSNLMAVNNCGLAGGCPPYSPIYTSWIDCWCM

SEQ ID NO: 51803 - protein, 119 aa, Homo sapiens
  Payload ID: 10315
  Gene Symbol: MCCD1
  Gene Name: mitochondrial coiled-coil domain 1
  Uniprot ID: P59942
  ENSP ID: ENSP00000365362
MVLPLPWLSRYHFLRLLLPSWSLAPQGSHGCCSQNPKASMEEQTSSRGNGKMTSPPRGPGTHRTAELARAEELLEQQLELYQALLEGQEGAWEAQALVLKIQKLKEQMRRHQESLGGGA

SEQ ID NO: 51804 - protein, 119 aa, Homo sapiens
  Payload ID: 10315
  Gene Symbol: MCCD1
  Gene Name: mitochondrial coiled-coil domain 1
  Uniprot ID: P59942
  ENSP ID: ENSP00000373004
MVLPLPWLSRYHFLRLLLPSWSLAPQGSHGCCSQNPKASMEEQTNSRGNGKMTSPPRGPGTHRTAELARAEELLEQQLELYQALLEGQEGAWEAQALVLKIQKLKEQMRRHQESLGGGA

SEQ ID NO: 51805 - protein, 119 aa, Homo sapiens; identical to SEQ ID NO: 51804
  Payload ID: 10315
  Gene Symbol: MCCD1
  Gene Name: mitochondrial coiled-coil domain 1
  Uniprot ID: P59942
  ENSP ID: ENSP00000389666

SEQ ID NO: 51806 - protein, 119 aa, Homo sapiens; identical to SEQ ID NO: 51804
  Payload ID: 10315
  Gene Symbol: MCCD1
  Gene Name: mitochondrial coiled-coil domain 1
  Uniprot ID: P59942
  ENSP ID: ENSP00000392250

SEQ ID NO: 51807 - protein, 119 aa, Homo sapiens; identical to SEQ ID NO: 51803
  Payload ID: 10315
  Gene Symbol: MCCD1
  Gene Name: mitochondrial coiled-coil domain 1
  Uniprot ID: P59942
  ENSP ID: ENSP00000399197

SEQ ID NO: 51808 - protein, 119 aa, Homo sapiens; identical to SEQ ID NO: 51804
  Payload ID: 10315
  Gene Symbol: MCCD1
  Gene Name: mitochondrial coiled-coil domain 1
  Uniprot ID: P59942
  ENSP ID: ENSP00000402555

SEQ ID NO: 51809 - protein, 119 aa, Homo sapiens; identical to SEQ ID NO: 51803
  Payload ID: 10315
  Gene Symbol: MCCD1
  Gene Name: mitochondrial coiled-coil domain 1
  Uniprot ID: P59942
  ENSP ID: ENSP00000407020

SEQ ID NO: 51810 - protein, 119 aa, Homo sapiens [sequence omitted]

SEQ ID NO: 51811 - protein, 352 aa, Homo sapiens
  Payload ID: 10316
  Gene Symbol: MUL1
  Gene Name: mitochondrial E3 ubiquitin protein ligase 1
  Uniprot ID: Q969V5
  ENSP ID: ENSP00000264198
MESGGRPSLCQFILLGTTSVVTAALYSVYRQKARVSQELKGAKKVHLGEDLKSILSEAPGKCVPYAVIEGAVRSVKETLNSQFVENCKGVIQRLTLQEHKMVWNRTTHLWNDCSKIIHQRTNTVPFDLVPHEDGVDVAVRVLKPLDSVDLGLETVYEKFHPSIQSFTDVIGHYISGERPKGIQETEEMLKVGATLTGVGELVLDNNSVRLQPPKQGMQYYLSSQDFDSLLQRQESSVRLWKVLALVFGFATCATLFFILRKQYLQRQERLRLKQMQEEFQEHEAQLLSRAKPEDRESLKSACVVCLSSFKSCVFLECGHVCSCTECYRALPEPKKCPICRQAITRVIPLYNS

SEQ ID NO: 51812 - protein, 463 aa, Homo sapiens
  Payload ID: 10317
  Gene Symbol: MIEF1
  Gene Name: mitochondrial elongation factor 1
  Uniprot ID: Q9NQG6
  ENSP ID: ENSP00000327124
MAGAGERKGKKDDNGIGTAIDFVLSNARLVLGVGGAAMLGIATLAVKRMYDRAISAPTSPTRLSHSGKRSWEEPNWMGSPRLLNRDMKTGLSRSLQTLPTDSSTFDTDTFCPPRPKPVARKGQVDLKKSRLRMSLQEKLLTYYRNRAAIPAGEQARAKQAAVDICAELRSFLRAKLPDMPLRDMYLSGSLYDDLQVVTADHIQLIVPLVLEQNLWSCIPGEDTIMNVPGFFLVRRENPEYFPRGSSYWDRCVVGGYLSPKTVADTFEKVVAGSINWPAIGSLLDYVIRPAPPPEALTLEVQYERDKHLFIDFLPSVTLGDTVLVAKPHRLAQYDNLWRLSLRPAETARLRALDQADSGCRSLCLKILKAICKSTPALGHLTASQLTNVILHLAQEEADWSPDMLADRFLQALRGLISYLEAGVLPSALNPKVNLFAELTPEEIDELGYTLYCSLSEPEVLLQT

SEQ ID NO: 51813 - protein, 478 aa, Homo sapiens
  Payload ID: 10317
  Gene Symbol: MIEF1
  Gene Name: mitochondrial elongation factor 1
  ENSP ID: ENSP00000385110
MAGAGERKGKKDDNGIGTAIDFVLSNARLVLGVGGAAMLGIATLAVKRMYDRAISAPTSPTRLSHSGKRSWEEPNWMGSPRLLNRDMKTGLSRSLQTLPTDSSTFDTDTFCPPRPKPVARKGQVDLKKSRLRMSLQEKLLTYYRNRAAIPAGEQARAKQAAVDICAELRSFLRAKLPDMPLRDMYLSGSLYDDLQVVTADHIQLIVPLVLEQNLWSCIPGEDTIMNVPGFFLVRRENPEYFPRGSSYWDRCVVGGYLSPKTVADTFEKVVAGSINWPAIGSLLDYVIRPAPPPEALTLEVQYERDKHLFIDFLPSVTLGDTVLVAKPHRLAQYDNLWRLSLRPAETARLRALDQADSGCRSLCLKILKAICKSTPALGHLTASQLTNVILHLAQEEADWSPDMLADRFLQALRGLISYLEAGVLPSALNPKDKALKERSLRHQVRMMEVDSRLNVSWKIQSLVGVWWPCFLPRQALLF

SEQ ID NO: 51814 - protein, 463 aa, Homo sapiens; identical to SEQ ID NO: 51812
  Payload ID: 10317
  Gene Symbol: MIEF1
  Gene Name: mitochondrial elongation factor 1
  Uniprot ID: Q9NQG6
  ENSP ID: ENSP00000385191

SEQ ID NO: 51815 - protein, 42 aa, Homo sapiens
  Payload ID: 10317
  Gene Symbol: MIEF1
  Gene Name: mitochondrial elongation factor 1
  ENSP ID: ENSP00000390029
MAGAGERKGKKDDNGIGTAIDFVLSNARLVLGVGGAAMLGIA

SEQ ID NO: 51816 - protein, 148 aa, Homo sapiens
  Payload ID: 10317
  Gene Symbol: MIEF1
  Gene Name: mitochondrial elongation factor 1
  Uniprot ID: Q9NQG6
  ENSP ID: ENSP00000404096
MAGAGERKGKKDDNGIGTAIDFVLSNARLVLGVGGAAMLGIATLAVKRMYDRAISAPTSPTRLSHSGKRSWEEPNWMGSPRLLNRDMKTGLSRSLQTLPTDSSTFDTGETSYLLPEPGSHPCWRAGSGQASCCGHMCRAPELPAGQVA

SEQ ID NO: 51817 - protein, 148 aa, Homo sapiens; identical to SEQ ID NO: 51816
  Payload ID: 10317
  Gene Symbol: MIEF1
  Gene Name: mitochondrial elongation factor 1
  Uniprot ID: Q9NQG6
  ENSP ID: ENSP00000413730

SEQ ID NO: 51818 - protein, 454 aa, Homo sapiens
  Payload ID: 10318
  Gene Symbol: MIEF2
  Gene Name: mitochondrial elongation factor 2
  Uniprot ID: Q96C03
  ENSP ID: ENSP00000323591
MAEFSQKRGKRRSDEGLGSMVDFLLANARLVLGVGGAAVLGIATLAVKRFIDRATSPRDEDDTKADSWKELSLLKATPHLQPRPPPAALSQPVLPLAPSSSAPEGPAETDPEVTPQLSSPAPLCLTLQERLLAFERDRVTIPAAQVALAKQLAGDIALELQAYFRSKFPELPFGAFVPGGPLYDGLQAGAADHVRLLVPLVLEPGLWSLVPGVDTVARDPRCWAVRRTQLEFCPRGSSPWDRFLVGGYLSSRVLLELLRKALAASVNWPAIGSLLGCLIRPSMASEELLLEVQHERLELTVAVLVAVPGVDADDRLLLAWPLEGLAGNLWLQDLYPVEAARLRALDDHDAGTRRRLLLLLCAVCRGCSALGQLGRGHLTQVVLRLGEDNVDWTEEALGERFLQALELLIGSLEQASLPCHFNPSVNLFSSLREEEIDDIGYALYSGLQEPEGLL

SEQ ID NO: 51819 - protein, 163 aa, Homo sapiens
  Payload ID: 10318
  Gene Symbol: MIEF2
  Gene Name: mitochondrial elongation factor 2
  ENSP ID: ENSP00000379055
MAEFSQKRGKRRSDEGLGSMVDFLLANARLVLGVGGAAVLGIATLAVKRFIDRATSPRDEDDTKADSWKELSLLKATPHLQPRPPPAALSQPVLPLAPSSSAPGEWHSFPSFGVTFKRRSPGFALTDCVTLRESLLLSRLWAPQIFNGGGVSLPCSWSKVVAL

SEQ ID NO: 51820 - protein, 205 aa, Homo sapiens
  Payload ID: 10318
  Gene Symbol: MIEF2
  Gene Name: mitochondrial elongation factor 2
  Uniprot ID: Q96C03
  ENSP ID: ENSP00000379056
MAEFSQKRGKRRSDEGLGSMVDFLLANARLVLGVGGAAVLGIATLAVKRFIDRATSPRDEDDTKADSWKELSLLKATPHLQPRPPPAALSQPVLPLAPSSSAPGEAAGLRAGPCDHPSSPGGFGQTAGWRHRPGAAGLLSEQVPGTALWGIRAWGAALRRAAGGGCGPCASPGATGAGAGPVEPGAGRGHCGEGPSLLGRAQDAA

SEQ ID NO: 51821 - protein, 465 aa, Homo sapiens
  Payload ID: 10318
  Gene Symbol: MIEF2
  Gene Name: mitochondrial elongation factor 2
  Uniprot ID: Q96C03
  ENSP ID: ENSP00000379057
MGLSPNLDRQTMAEFSQKRGKRRSDEGLGSMVDFLLANARLVLGVGGAAVLGIATLAVKRFIDRATSPRDEDDTKADSWKELSLLKATPHLQPRPPPAALSQPVLPLAPSSSAPEGPAETDPEVTPQLSSPAPLCLTLQERLLAFERDRVTIPAAQVALAKQLAGDIALELQAYFRSKFPELPFGAFVPGGPLYDGLQAGAADHVRLLVPLVLEPGLWSLVPGVDTVARDPRCWAVRRTQLEFCPRGSSPWDRFLVGGYLSSRVLLELLRKALAASVNWPAIGSLLGCLIRPSMASEELLLEVQHERLELTVAVLVAVPGVDADDRLLLAWPLEGLAGNLWLQDLYPVEAARLRALDDHDAGTRRRLLLLLCAVCRGCSALGQLGRGHLTQVVLRLGEDNVDWTEEALGERFLQALELLIGSLEQASLPCHFNPSVNLFSSLREEEIDDIGYALYSGLQEPEGLL

SEQ ID NO: 51822 - protein, 117 aa, Homo sapiens
  Payload ID: 10318
  Gene Symbol: MIEF2
  Gene Name: mitochondrial elongation factor 2
  ENSP ID: ENSP00000463015
MAEFSQKRGKRRSDEGLGSMVDFLLANARLVLGVGGAAVLGIATLAVKRFIDRATSPRDEDDTKADSWKELSLLKATPHLQPRPPPAALSQPVLPLAPSSSAPGGSVVMVGSFRWGN

SEQ ID NO: 51823 - protein, 121 aa, Homo sapiens
  Payload ID: 10318
  Gene Symbol: MIEF2
  Gene Name: mitochondrial elongation factor 2
  ENSP ID: ENSP00000464017
MAEFSQKRGKRRSDEGLGSMVDFLLANARLVLGVGGAAVLGIATLAVKRFIDRATSPRDEDDTKADSWKELSLLKATPHLQPRPPPAALSQPVLPLAPSSSAPGCSDMFPAPSLCRRACRN

SEQ ID NO: 51824 - protein, 159 aa, Homo sapiens
  Payload ID: 10318
  Gene Symbol: MIEF2
  Gene Name: mitochondrial elongation factor 2
  ENSP ID: ENSP00000465801
MAEFSQKRGKRRSDEGLGSMVDFLLANARLVLGVGGAAVLGIATLAVKRFIDRATSPRDEDDTKADSWKELSLLKATPHLQPRPPPAALSQPVLPLAPSSSAPGPAETDPEVTPQLSSPAPLCLTLQERLLAFERDRVTIPAAQVALAKQLAGDIALEL

SEQ ID NO: 51825 - protein, 342 aa, Homo sapiens
  Payload ID: 10319
  Gene Symbol: MFF
  Gene Name: mitochondrial fission factor
  Uniprot ID: Q9GZY8
  ENSP ID: ENSP00000302037
MSKGTSSDTSLGRVSRAAFPSPTAAEMAEISRIQYEMEYTEGISQRMRVPEKLKVAPPNADLEQGFQEGVPNASVIMQVPERIVVAGNNEDVSFSRPADLDLIQSTPFKPLALKTPPRVLTLSERPLDFLDLERPPTTPQNEEIRAVGRLKRERSMSENAVRQNGQLVRNDSLWHRSDSAPRNKISRFQAPISAPEYTVTPSPQQARVCPPHMLPEDGANLSSARGILSLIQSSTRRAYQQILDVLDENRRPVLRGGSAAATSNPHHDNVRYGISNIDTTIEGTSDDLTVVDAASLRRQIIKLNRRLQLLEEENKERAKREMVMYSITVAFWLLNSWLWFRR

SEQ ID NO: 51826 - protein, 238 aa, Homo sapiens
  Payload ID: 10319
  Gene Symbol: MFF
  Gene Name: mitochondrial fission factor
  Uniprot ID: Q9GZY8
  ENSP ID: ENSP00000304134
MAEISRIQYEMEYTEGISQRMRVPEKLKVAPPNADLEQGFQEGVPNASVIMQVPERIVVAGNNEDVSFSRPADLDLIQSTPFKPLALKTPPRVLTLSERPLDFLDLERPPTTPQNEEIRAVGRLKRERSMSENAVRQNGQLVRNDSLPVLRGGSAAATSNPHHDNVRYGISNIDTTIEGTSDDLTVVDAASLRRQIIKLNRRLQLLEEENKERAKREMVMYSITVAFWLLNSWLWFRR

SEQ ID NO: 51827 - protein, 291 aa, Homo sapiens
  Payload ID: 10319
  Gene Symbol: MFF
  Gene Name: mitochondrial fission factor
  Uniprot ID: Q9GZY8
  ENSP ID: ENSP00000304898
MAEISRIQYEMEYTEGISQRMRVPEKLKVAPPNADLEQGFQEGVPNASVIMQVPERIVVAGNNEDVSFSRPADLDLIQSTPFKPLALKTPPRVLTLSERPLDFLDLERPPTTPQNEEIRAVGRLKRERSMSENAVRQNGQLVRNDSLVTPSPQQARVCPPHMLPEDGANLSSARGILSLIQSSTRRAYQQILDVLDENRRPVLRGGSAAATSNPHHDNVRYGISNIDTTIEGTSDDLTVVDAASLRRQIIKLNRRLQLLEEENKERAKREMVMYSITVAFWLLNSWLWFRR

SEQ ID NO: 51828 - protein, 243 aa, Homo sapiens
  Payload ID: 10319
  Gene Symbol: MFF
  Gene Name: mitochondrial fission factor
  Uniprot ID: Q9GZY8
  ENSP ID: ENSP00000338412
MAEISRIQYEMEYTEGISQRMRVPEKLKVAPPNADLEQGFQEGVPNASVIMQVPERIVVAGNNEDVSFSRPADLDLIQSTPFKPLALKTPPRVLTLSERPLDFLDLERPPTTPQNEEIRAVGRLKRERSMSENAVRQNGQLVRNDSLWHRSDSAPRNKISRFQAPISAPEYTYGISNIDTTIEGTSDDLTVVDAASLRRQIIKLNRRLQLLEEENKERAKREMVMYSITVAFWLLNSWLWFRR

SEQ ID NO: 51829 - protein, 218 aa, Homo sapiens
  Payload ID: 10319
  Gene Symbol: MFF
  Gene Name: mitochondrial fission factor
  Uniprot ID: Q9GZY8
  ENSP ID: ENSP00000346498
MAEISRIQYEMEYTEGISQRMRVPEKLKVAPPNADLEQGFQEGVPNASVIMQVPERIVVAGNNEDVSFSRPADLDLIQSTPFKPLALKTPPRVLTLSERPLDFLDLERPPTTPQNEEIRAVGRLKRERSMSENAVRQNGQLVRNDSLYGISNIDTTIEGTSDDLTVVDAASLRRQIIKLNRRLQLLEEENKERAKREMVMYSITVAFWLLNSWLWFRR

SEQ ID NO: 51830 - protein, 221 aa, Homo sapiens
  Payload ID: 10319
  Gene Symbol: MFF
  Gene Name: mitochondrial fission factor
  ENSP ID: ENSP00000375912
MQVPERIVVAGNNEDVSFSRPADLDLIQSTPFKPLALKTPPRVLTLSERPLDFLDLERPPTTPQNEEIRAVGRLKRERSMSENAVRQNGQLVRNDSLVTPSPQQARVCPPHMLPEDGANLSSARGILSLIQSSTRRAYQQILDVLDENRRYGISNIDTTIEGTSDDLTVVDAASLRRQIIKLNRRLQLLEEENKERAKREMVMYSITVAFWLLNSWLWFRR

SEQ ID NO: 51831 - protein, 238 aa, Homo sapiens; identical to SEQ ID NO: 51826
  Payload ID: 10319
  Gene Symbol: MFF
  Gene Name: mitochondrial fission factor
  Uniprot ID: Q9GZY8
  ENSP ID: ENSP00000386641

SEQ ID NO: 51832 - protein, 218 aa, Homo sapiens; identical to SEQ ID NO: 51829
  Payload ID: 10319
  Gene Symbol: MFF
  Gene Name: mitochondrial fission factor
  Uniprot ID: Q9GZY8
  ENSP ID: ENSP00000386964

SEQ ID NO: 51833 - protein, 32 aa, Homo sapiens
  Payload ID: 10319
  Gene Symbol: MFF
  Gene Name: mitochondrial fission factor
  ENSP ID: ENSP00000390165
MAEISRIQYEMEYTEGISQRMRVPEKLKVAPP

SEQ ID NO: 51834 - protein, 71 aa, Homo sapiens
  Payload ID: 10319
  Gene Symbol: MFF
  Gene Name: mitochondrial fission factor
  ENSP ID: ENSP00000391829
MSKGTSSDTSLGRVSRAAFPSPTAAEMAEISRIQYEMEYTEGISQRMRVPEKLKVAPPNADLEQGFQEGVP

SEQ ID NO: 51835 - protein, 60 aa, Homo sapiens
  Payload ID: 10319
  Gene Symbol: MFF
  Gene Name: mitochondrial fission factor
  ENSP ID: ENSP00000407547
MAEISRIQYEMEYTEGISQRMRVPEKLKVAPPNADLEQGFQEGVPNASVIMQVPERIVVA

SEQ ID NO: 51836 - protein, 34 aa, Homo sapiens
  Payload ID: 10319
  Gene Symbol: MFF
  Gene Name: mitochondrial fission factor
  ENSP ID: ENSP00000411386
MSKGTSSDTSLGRVSRAAFPSPTAAEMAEISRIQ

SEQ ID NO: 51837 - protein, 154 aa, Homo sapiens
  Payload ID: 10319
  Gene Symbol: MFF
  Gene Name: mitochondrial fission factor
  ENSP ID: ENSP00000415313
IRAVGRLKRERSMSENAVRQNGQLVRNDSLVTPSPQQARVCPPHMLPEDGANLSSARGILSLIQSSTRRAYQQILDVLDENRRYGISNIDTTIEGTSDDLTVVDAASLRRQIIKLNRRLQLLEEENKERAKREMVMYSITVAFWLLNSWLWFRR

SEQ ID NO: 51838 - protein, 138 aa, Homo sapiens
  Payload ID: 10319
  Gene Symbol: MFF
  Gene Name: mitochondrial fission factor
  ENSP ID: ENSP00000415996
MAEISRIQYEMEYTEGISQRMRVPEKLKVAPPNADLEQGFQEGVPNASVIMQVPERIVVAGNNEDVSFSRPADLDLIQSTPFKPLALKTPPRVLTLSERPLDFLDLERPPTTPQNEEIRAVGRLKRERSMSENAVRQN

SEQ ID NO: 51839 - protein, 59 aa, Homo sapiens
  Payload ID: 10319
  Gene Symbol: MFF
  Gene Name: mitochondrial fission factor
  ENSP ID: ENSP00000431725
MSENAVRQNGQLVRNDSLWHRSDSAPRNKISRFQAPISAPEYTVTPSPQQARVCPPHML

SEQ ID NO: 51840 - protein, 69 aa, Homo sapiens
  Payload ID: 10319
  Gene Symbol: MFF
  Gene Name: mitochondrial fission factor
  ENSP ID: ENSP00000432447
MSENAVRQNGQLVRNDSLVTPSPQQARVCPPHMLPEDGANLSSARGILSLIQSSTRRAYQQILDVLDEN

SEQ ID NO: 51841 - protein, 71 aa, Homo sapiens
  Payload ID: 10319
  Gene Symbol: MFF
  Gene Name: mitochondrial fission factor
  ENSP ID: ENSP00000435354
MSENAVRQNGQLVRNDSLWHRSDSAPRNKISRFQAPISAPEYTYGISNIDTTIEGTSDDLTVVDAASLRRQ

SEQ ID NO: 51842 - protein, 89 aa, Homo sapiens
  Payload ID: 10319
  Gene Symbol: MFF
  Gene Name: mitochondrial fission factor
  ENSP ID: ENSP00000436289
MSENAVRQNGQLVRNDSLYGISNIDTTIEGTSDDLTVVDAASLRRQIIKLNRRLQLLEEENKERAKREMVMYSITVAFWLLNSWLWFRR

SEQ ID NO: 51843 - protein, 52 aa, Homo sapiens
  Payload ID: 10319
  Gene Symbol: MFF
  Gene Name: mitochondrial fission factor
  ENSP ID: ENSP00000436920
MAEISRIQYEMEYTEGISQRMRVPEKLKVAPPNADLEQGFQEGVPNASVIMQ

SEQ ID NO: 51844 - protein, 166 aa, Homo sapiens
  Payload ID: 10320
  Gene Symbol: MTFP1
  Gene Name: mitochondrial fission process 1
  Uniprot ID: Q9UDX5
  ENSP ID: ENSP00000266263
MSEPQPRGAERDLYRDTWVRYLGYANEVGEAFRSLVPAAVVWLSYGVASSYVLADAIDKGKKAGEVPSPEAGRSARVTVAVVDTFVWQALASVAIPGFTINRVCAASLYVLGTATRWPLAVRKWTTTALGLLTIPIIIHPIDRSVDFLLDSSLRKLYPTVGKPSSS

SEQ ID NO: 51845 - protein, 135 aa, Homo sapiens
  Payload ID: 10320
  Gene Symbol: MTFP1
  Gene Name: mitochondrial fission process 1
  Uniprot ID: Q9UDX5
  ENSP ID: ENSP00000347267
MSEPQPRGAERDLYRDTWVRYLGYANEVGEAFRSLVPAAVVWLSYGVASSYVLADAIDKGKKAGEVGGFPPGLQPAQALPNSGEAQLLLIILWYLACASASCFMSTSYSCQGMWTPGSLVSKDPGTWVGLSWTEA

SEQ ID NO: 51846 - protein, 143 aa, Homo sapiens
  Payload ID: 10320
  Gene Symbol: MTFP1
  Gene Name: mitochondrial fission process 1
  ENSP ID: ENSP00000383926
MSEPQPRGAERDLYRDTWVRYLGYANEVGEAFRSLVPAAVVWLSYGVASSYVLADAIDKGKKAGEALASVAIPGFTINRVCAASLYVLGTATRWPLAVRKWTTTALGLLTIPIIIHPIDRSVDFLLDSSLRKLYPTVGKPSSS

SEQ ID NO: 51847 - protein, 74 aa, Homo sapiens
  Payload ID: 10320
  Gene Symbol: MTFP1
  Gene Name: mitochondrial fission process 1
  ENSP ID: ENSP00000393954
MSEPQPRGAERDLYRDTWVRYLGYANEVGEAFRSLVPAAVVWLSYGVASSYVLADAIDKGKKAGEDFLPLPQLD

SEQ ID NO: 51848 - protein, 74 aa, Homo sapiens; identical to SEQ ID NO: 51847
  Payload ID: 10320
  Gene Symbol: MTFP1
  Gene Name: mitochondrial fission process 1
  ENSP ID: ENSP00000487369

SEQ ID NO: 51849 - protein, 333 aa, Homo sapiens
  Payload ID: 10321
  Gene Symbol: MTFR1
  Gene Name: mitochondrial fission regulator 1
  Uniprot ID: Q15390
  ENSP ID: ENSP00000262146
MLGWIKRLIRMVFQQVGVSMQSVLWSRKPYGSSRSIVRKIGTNLSLIQCPRVQFQINSHATEWSPSHPGEDAVASFADVGWVAKEEGECSARLRTEVRSRPPLQDDLLFFEKAPSRQISLPDLSQEEPQLKTPALANEEALQKICALENELAALRAQIAKIVTQQEQQNLTAGDLDSTTFGTIPPHPPPPPPPLPPPALGLHQSTSAVDLIKERREKRANAGKTLVKNNPKKPEMPNMLEILKEMNSVKLRSVKRSEQDVKPKPVDATDPAALIAEALKKKFAYRYRSDSQDEVEKGIPKSESEATSERVLFGPHMLKPTGKMKALIENVSDS

SEQ ID NO: 51850 - protein, 300 aa, Homo sapiens
  Payload ID: 10321
  Gene Symbol: MTFR1
  Gene Name: mitochondrial fission regulator 1
  Uniprot ID: Q15390
  ENSP ID: ENSP00000391502
MLGWIKRLIRMVFQQVGVSMQSINSHATEWSPSHPGEDAVASFADVGWVAKEEGECSARLRTEVRSRPPLQDDLLFFEKAPSRQISLPDLSQEEPQLKTPALANEEALQKICALENELAALRAQIAKIVTQQEQQNLTAGDLDSTTFGTIPPHPPPPPPPLPPPALGLHQSTSAVDLIKERREKRANAGKTLVKNNPKKPEMPNMLEILKEMNSVKLRSVKRSEQDVKPKPVDATDPAALIAEALKKKFAYRYRSDSQDEVEKGIPKSESEATSERVLFGPHMLKPTGKMKALIENVSDS

SEQ ID NO: 51851 - protein, 144 aa, Homo sapiens
  Payload ID: 10321
  Gene Symbol: MTFR1
  Gene Name: mitochondrial fission regulator 1
  ENSP ID: ENSP00000429253
PHPPPPPPPLPPPALGLHQSTSAVDLIKERREKRANAGKTLVKNNPKKPEMPNMLEILKEMNSVKLRSVKRSEQDVKPKPVDATDPAALIAEALKKKFAYRYRSDSQDEVEKGIPKSESEATSERVLSLPAGFIQPHVSKHCLG

SEQ ID NO: 51852 - protein, 56 aa, Homo sapiens
  Payload ID: 10321
  Gene Symbol: MTFR1
  Gene Name: mitochondrial fission regulator 1
  ENSP ID: ENSP00000429450
MLGWIKRLIRMVFQQVGVSMQSVLWSRKPYGSSRSIVRKIGTNLSLIQCPRVQFQL

SEQ ID NO: 51853 - protein, 291 aa, Homo sapiens
  Payload ID: 10321
  Gene Symbol: MTFR1
  Gene Name: mitochondrial fission regulator 1
  ENSP ID: ENSP00000430621
  MOD_RES (1)..(1): Any amino acid
XMVFQQVGVSMQSINSHATEWSPSHPGEDAVASFADVGWVAKEEGECSARLRTEVRSRPPLQDDLLFFEKAPSRQISLPDLSQEEPQLKTPALANEEALQKICALENELAALRAQIAKIVTQQEQQNLTAGDLDSTTFGTIPPHPPPPPPPLPPPALGLHQSTSAVDLIKERREKRANAGKTLVKNNPKKPEMPNMLEILKEMNSVKLRSVKRSEQDVKPKPVDATDPAALIAEALKKKFAYRYRSDSQDEVEKGIPKSESEATSERVLFGPHMLKPTGKMKALIENVSDS

SEQ ID NO: 51854 - protein, 185 aa, Homo sapiens
  Payload ID: 10321
  Gene Symbol: MTFR1
  Gene Name: mitochondrial fission regulator 1
  ENSP ID: ENSP00000436928
  MOD_RES (1)..(1): Any amino acid
XPPPPPPLPPPALGLHQSTSAVDLIKERREKRANAGKTLVKNNPKKPEMPNMLEILKEMNSVKLRSVKRSEQDVKPKPVDATDPAALIAEALKKKFAYRYRSDSQDEVEKGIPKSESEATSERVLKRLVKVRTCWTRRPMANPTEDKFISLKRIRTMTKTIQTTIIHGRKYCGIYIIKWLRSFFC

SEQ ID NO: 51855 - protein, 292 aa, Homo sapiens
  Payload ID: 10322
  Gene Symbol: MTFR1L
  Gene Name: mitochondrial fission regulator 1-like
  Uniprot ID: Q9H019
  ENSP ID: ENSP00000363418
MSGMEATVTIPIWQNKPHGAARSVVRRIGTNLPLKPCARASFETLPNISDLCLRDVPPVPTLADIAWIAADEEETYARVRSDTRPLRHTWKPSPLIVMQRNASVPNLRGSEERLLALKKPALPALSRTTELQDELSHLRSQIAKIVAADAASASLTPDFLSPGSSNVSSPLPCFGSSFHSTTSFVISDITEETEVEVPELPSVPLLCSASPECCKPEHKAACSSSEEDDCVSLSKASSFADMMGILKDFHRMKQSQDLNRSLLKEEDPAVLISEVLRRKFALKEEDISRKGN

SEQ ID NO: 51856 - protein, 292 aa, Homo sapiens; identical to SEQ ID NO: 51855
  Payload ID: 10322
  Gene Symbol: MTFR1L
  Gene Name: mitochondrial fission regulator 1-like
  Uniprot ID: Q9H019
  ENSP ID: ENSP00000363419

SEQ ID NO: 51857 - protein, 292 aa, Homo sapiens; identical to SEQ ID NO: 51855
  Payload ID: 10322
  Gene Symbol: MTFR1L
  Gene Name: mitochondrial fission regulator 1-like
  Uniprot ID: Q9H019
  ENSP ID: ENSP00000363421

SEQ ID NO: 51858 - protein, 280 aa, Homo sapiens
  Payload ID: 10322
  Gene Symbol: MTFR1L
  Gene Name: mitochondrial fission regulator 1-like
  Uniprot ID: Q9H019
  ENSP ID: ENSP00000363426
MSGMEATVTIPIWQNKPHGAARSVVRRIGTNLPLKPCARASFETLPNISDLCLRDVPPVPTLADIAWIAADEEETYARVRSDTRPLRHTWKPSPLIVMQRNASVPNLRGSEERLLALKKPALPALSRTTELQDELSHLRSQIAKIVAADAGSSNVSSPLPCFGSSFHSTTSFVISDITEETEVEVPELPSVPLLCSASPECCKPEHKAACSSSEEDDCVSLSKASSFADMMGILKDFHRMKQSQDLNRSLLKEEDPAVLISEVLRRKFALKEEDISRKGN

SEQ ID NO: 51859 - protein, 152 aa, Homo sapiens
  Payload ID: 10322
  Gene Symbol: MTFR1L
  Gene Name: mitochondrial fission regulator 1-like
  ENSP ID: ENSP00000390841
MSGMEATVTIPIWQNKPHGAARSVVRRIGTNLPLKPCARASFETLPNISDLCLRDVPPVPTLADIAWIAADEEETYARVRSDTRPLRHTWKPSPLIVMQRNASVPNLRGSEERLLALKKPALPALSRTTELQDELSHLRSQIAKIVAADAAS

SEQ ID NO: 51860 - protein, 170 aa, Homo sapiens
  Payload ID: 10322
  Gene Symbol: MTFR1L
  Gene Name: mitochondrial fission regulator 1-like
  ENSP ID: ENSP00000431278
MSGMEATVTIPIWQNKPHGAARSVVRRIGTNLPLKPCARASFETLPNISDLCLRDVPPVPTLADIAWIAADEEETYARVRSDTRPLRHTWKPSPLIVMQRNASVPNLRGSEERLLALKKPALPALSRTTELQDELSHLRSQIAKIVAADAASASLTPDFLSPGSSNVSSP

SEQ ID NO: 51861 - protein, 52 aa, Homo sapiens
  Payload ID: 10322
  Gene Symbol: MTFR1L
  Gene Name: mitochondrial fission regulator 1-like
  ENSP ID: ENSP00000432014
MSGMEATVRPGIGARPPFHSLPLRRTNYDPGALQESVPSQSGKTSHMGLLEV

SEQ ID NO: 51862 - protein, 182 aa, Homo sapiens
  Payload ID: 10322
  Gene Symbol: MTFR1L
  Gene Name: mitochondrial fission regulator 1-like
  ENSP ID: ENSP00000432227
MSGMEATVTIPIWQNKPHGAARSVVRRIGTNLPLKPCARASFETLPNISDLCLRDVPPVPTLADIAWIAADEEETYARVRSDTRPLRHTWKPSPLIVMQRNASVPNLRGSEERLLALKKPALPALSRTTELQDELSHLRSQIAKIVAADAALNVANQNTKLPAVRLKRMTASLCPRPAALQT

SEQ ID NO: 51863 - protein, 160 aa, Homo sapiens
  Payload ID: 10322
  Gene Symbol: MTFR1L
  Gene Name: mitochondrial fission regulator 1-like
  ENSP ID: ENSP00000432719
MQRNASVPNLRGSEERLLALKKPALPALSRTTELQDELSHLRSQIAKIVAADAASASLTPDFLSPGSSNVSSPLPCFGSSFHSTTSFVISDITEETEVEVPELPSVPLLCSASPECCKPEHKAACSSSEEDDCVSLSKASSFADMMGILKDFHRMKQSQD

SEQ ID NO: 51864 - protein, 115 aa, Homo sapiens
  Payload ID: 10322
  Gene Symbol: MTFR1L
  Gene Name: mitochondrial fission regulator 1-like
  ENSP ID: ENSP00000434038
MSGMEATVTIPIWQNKPHGAARSVVRRIGTNLPLKPCARASFETLPNISDLCLRDVPPVPTLADIAWIAADEEETYARVRSDTRPLRHTWKPSPLIVMQRNASVPNLRGSEERLL

SEQ ID NO: 51865 - protein, 110 aa, Homo sapiens
  Payload ID: 10322
  Gene Symbol: MTFR1L
  Gene Name: mitochondrial fission regulator 1-like
  ENSP ID: ENSP00000434120
MSGMEATVTIPIWQNKPHGAARSVVRRIGTNLPLKPCARASFETLPNISDLCLRDVPPVPTLADIAWIAADEEETYARVRSDTRPLRHTWKPSPLIVMQRNASVPNLRGS

SEQ ID NO: 51866 - protein, 52 aa, Homo sapiens; identical to SEQ ID NO: 51861
  Payload ID: 10322
  Gene Symbol: MTFR1L
  Gene Name: mitochondrial fission regulator 1-like
  ENSP ID: ENSP00000434157

SEQ ID NO: 51867 - protein, 205 aa, Homo sapiens
  Payload ID: 10322
  Gene Symbol: MTFR1L
  Gene Name: mitochondrial fission regulator 1-like
  Uniprot ID: Q9H019
  ENSP ID: ENSP00000434751
MSGMEATVTIPIWQNKPHGAARSVVRRIGTNLPLKPCARASFETLPNISDLCLRDVPPVPTLADIAWIAADEEETYARVRSDTRPLRHTWKPSPLIVMQRNASVPNLRGSEERLLALKKPALPALSRTTELQDELSHLRSQIAKIVAADAVTSPRRQRWRSLSFHQSPCFVLPALNVANQNTKLPAVRLKRMTASLCPRPAALQT

SEQ ID NO: 51868 - protein, 13 aa, Homo sapiens
  Payload ID: 10322
  Gene Symbol: MTFR1L
  Gene Name: mitochondrial fission regulator 1-like
  ENSP ID: ENSP00000434773
MQRNASVPNLRGS

SEQ ID NO: 51869 - protein, 195 aa, Homo sapiens
  Payload ID: 10322
  Gene Symbol: MTFR1L
  Gene Name: mitochondrial fission regulator 1-like
  ENSP ID: ENSP00000435193
MQRNASVPNLRGSEERLLALKKPALPALSRTTELQDELSHLRSQIAKIVAADAASASLTPDFLSPGSSNVSSPLPCFGSSFHSTTSFVISDITEETEVEVPELPSVPLLCSASPECCKPEHKAACSSSEEDDCVSLSKASSFADMMGILKDFHRMKQSQDLNRSLLKEEDPAVLISEVLRRKFALKEEDISRKGN

SEQ ID NO: 51870 - protein, 205 aa, Homo sapiens; identical to SEQ ID NO: 51867
  Payload ID: 10322
  Gene Symbol: MTFR1L
  Gene Name: mitochondrial fission regulator 1-like
  Uniprot ID: Q9H019
  ENSP ID: ENSP00000435461

SEQ ID NO: 51871 - protein, 73 aa, Homo sapiens
  Payload ID: 10322
  Gene Symbol: MTFR1L
  Gene Name: mitochondrial fission regulator 1-like
  ENSP ID: ENSP00000435553
MSGMEATVRTGRKAWIISTLSYFLSPSLTLPTLTALAAADHPNLAKQATWGCSKCSKKNWDQPTLEAVCPGVL

SEQ ID NO: 51872 - protein, 52 aa, Homo sapiens; identical to SEQ ID NO: 51861
  Payload ID: 10322
  Gene Symbol: MTFR1L
  Gene Name: mitochondrial fission regulator 1-like
  ENSP ID: ENSP00000435745

SEQ ID NO: 51873 - protein, 53 aa, Homo sapiens
  Payload ID: 10322
  Gene Symbol: MTFR1L
  Gene Name: mitochondrial fission regulator 1-like
  ENSP ID: ENSP00000436954
MQRNASVPNLRGSEERLLALKKPALPALSRTTELQDELSHLRSQIAKIVAADA

SEQ ID NO: 51874 - protein, 44 aa, Homo sapiens
  Payload ID: 10323
  Gene Symbol: MTFR2
  Gene Name: mitochondrial fission regulator 2
  Uniprot ID: Q6P444
  ENSP ID: ENSP00000356758
MSLILNILREMLEYFGVPVEQLEVTSAYLSSLWKKQTGRNLRST

SEQ ID NO: 51875 - protein, 385 aa, Homo sapiens
  Payload ID: 10323
  Gene Symbol: MTFR2
  Gene Name: mitochondrial fission regulator 2
  Uniprot ID: Q6P444
  ENSP ID: ENSP00000395232
MSLILNILREMLEYFGVPVEQVLLIWENKDYGSTRSIVRIIGKMLPLEPCRRPNFELIPLLNSVDSDNCGSMVPSFADILYVANDEEASYLRFRNSIWKNEEEKVEIFHPLRLVRDPLSPAVRQKETVKNDLPVNEAAIRKIAALENELTFLRSQIAAIVEMQELKNSTNSSSFGLSDERISLGQLSSSRAAHLSVDPDQLPGSVLSPPPPPPLPPQFSSLQPPCFPPVQPGSNNICDSDNPATEMSKQNPAANKTNYSHHSKSQRNKDIPNMLDVLKDMNKVKLRAIERSPGGRPIHKRKRQNSHWDPVSLISHALKQKFAFQEDDSFEKENRSWESSPFSSPETSRFGHHISQSEGQRTKEEMVNTKAVDQGISNTSLLNSRI

SEQ ID NO: 51876 - protein, 385 aa, Homo sapiens; identical to SEQ ID NO: 51875
  Payload ID: 10323
  Gene Symbol: MTFR2
  Gene Name: mitochondrial fission regulator 2
  Uniprot ID: Q6P444
  ENSP ID: ENSP00000407010

SEQ ID NO: 51877 - protein, 245 aa, Homo sapiens
  Payload ID: 10323
  Gene Symbol: MTFR2
  Gene Name: mitochondrial fission regulator 2
  ENSP ID: ENSP00000410861
MLPLEPCRRPNFELIPLLNSVDSDNCGSMVPSFADILYVANDEEASYLRFRNSIWKNEEEKVEIFHPLRLVRDPLSPAVRQKETVKNDLPVNEAAIRKIAALENELTFLRSQIAAIVEMQELKNSTNSSSFGLSDERISLGQLSSSRAAHLSVDPDQLPGSVLSPPPPPPLPPQFSSLQPPCFPPVQPGSNNICDSDNPATEMSKQNPAANKTNYSHHSKSQRNKDIPNMLDVLKDMNKVKLRAI

SEQ ID NO: 51878 - protein, 115 aa, Homo sapiens
  Payload ID: 10323
  Gene Symbol: MTFR2
  Gene Name: mitochondrial fission regulator 2
  ENSP ID: ENSP00000435348
  MOD_RES (1)..(1): Any amino acid
XSQRNKDIPNMLDVLKDMNKVKLRAIERSPGGRPIHKRKRQNSHWDPVSLISHALKQKFAFQEDDSFEKENRSWESSPFSSPETSRVSYTNVKLIFQFFSDVLFMLQLCVQVLLK

SEQ ID NO: 51879 - protein, 252 aa, Homo sapiens
  Payload ID: 10324
  Gene Symbol: MGME1
  Gene Name: mitochondrial genome maintenance exonuclease 1
  ENSP ID: ENSP00000366933
MKMKLFQTICRQLRSSKFSVESAALVAFSTSSYSCGRKKKVNPYEEVDQEKYSNLVQSVLSSRGVAQTPGSVEEDALLCGPVSKHKLPNQGEDRRVPQNWFPIFNPERSDKPNASDPSVPLKIPLQRNVIPSVTRVLQQTMTKQQVFLLERWKQRMILELGEDGFKEYTSSSMWLNCGGLQRWITCPPTFHGCRALFPVLDQVASSTRRIYGKEKEPEYSETRIFRIGSKLLFGNIQHLLTVWEHILLFTPV

SEQ ID NO: 51880 - protein, 264 aa, Homo sapiens
  Payload ID: 10324
  Gene Symbol: MGME1
  Gene Name: mitochondrial genome maintenance exonuclease 1
  ENSP ID: ENSP00000366938
MKMKLFQTICRQLRSSKFSVESAALVAFSTSSYSCGRKKKVNPYEEVDQEKYSNLVQSVLSSRGVAQTPGSVEEDALLCGPVSKHKLPNQDVFLQGKRFHEALESILSPQETLKERDENLLKSGYIESVQHILKDVSGVRALESAVQHETLNYIGLLDCVAEYQGKLCVIDWKTSEKPKPFIQSTFDNPLQVVAYMGAMNHDTNYSFQVQCGLIVVAYKDGSPAHPHFMDAELCSQYWTKWLLRLEEYTEKKKNQNIQKPEYSE

SEQ ID NO: 51881 - protein, 344 aa, Homo sapiens
  Payload ID: 10324
  Gene Symbol: MGME1
  Gene Name: mitochondrial genome maintenance exonuclease 1
  Uniprot ID: Q9BQP7
  ENSP ID: ENSP00000366939
MKMKLFQTICRQLRSSKFSVESAALVAFSTSSYSCGRKKKVNPYEEVDQEKYSNLVQSVLSSRGVAQTPGSVEEDALLCGPVSKHKLPNQGEDRRVPQNWFPIFNPERSDKPNASDPSVPLKIPLQRNVIPSVTRVLQQTMTKQQVFLLERWKQRMILELGEDGFKEYTSNVFLQGKRFHEALESILSPQETLKERDENLLKSGYIESVQHILKDVSGVRALESAVQHETLNYIGLLDCVAEYQGKLCVIDWKTSEKPKPFIQSTFDNPLQVVAYMGAMNHDTNYSFQVQCGLIVVAYKDGSPAHPHFMDAELCSQYWTKWLLRLEEYTEKKKNQNIQKPEYSE

SEQ ID NO: 51882 - protein, 71 aa, Homo sapiens
  Payload ID: 10325
  Gene Symbol:
  Gene Name: Mitochondrial import inner membrane translocase subunit Tim10 B  [Source:UniProtKB/Swiss-Prot
  Acc:Q9Y5J6]
  ENSP ID: ENSP00000419490
MERQQQQQQQLRNEACLHSCAGKLIHSNHRLMAAYVQLMPALVQRRIADYEAASAVPGVAAEQPGVSPSGS

SEQ ID NO: 51883 - protein, 103 aa, Homo sapiens
  Payload ID: 10325
  Gene Symbol:
  Gene Name: Mitochondrial import inner membrane translocase subunit Tim10 B  [Source:UniProtKB/Swiss-Prot
  Acc:Q9Y5J6]
  Uniprot ID: Q9Y5J6
  ENSP ID: ENSP00000419704
MERQQQQQQQLRNLRDFLLVYNRMTELCFQRCVPSLHHRALDAEEEACLHSCAGKLIHSNHRLMAAYVQLMPALVQRRIADYEAASAVPGVAAEQPGVSPSGS

SEQ ID NO: 51884 - protein, 78 aa, Homo sapiens
  Payload ID: 10326
  Gene Symbol: MINOS1
  Gene Name: mitochondrial inner membrane organizing system 1
  Uniprot ID: Q5TGZ0
  ENSP ID: ENSP00000325562
MSESELGRKWDRCLADAVVKIGTGFGLGIVFSLTFFKRRMWPLAFGSGMGLGMAYSNCQHDFQAPYLLHGKYVKEQEQ

SEQ ID NO: 51885 - protein, 62 aa, Homo sapiens
  Payload ID: 10326
  Gene Symbol: MINOS1
  Gene Name: mitochondrial inner membrane organizing system 1
  ENSP ID: ENSP00000478278
MSESELGRKWDRCLADAVVKIGRMWPLAFGSGMGLGMAYSNCQHDFQAPYLLHGKYVKEQEQ

SEQ ID NO: 51886 - protein, 713 aa, Homo sapiens
  Payload ID: 10327
  Gene Symbol: MIPEP
  Gene Name: mitochondrial intermediate peptidase
  Uniprot ID: Q99797
  ENSP ID: ENSP00000371607
MLCVGRLGGLGARAAALPPRRAGRGSLEAGIRARRVSTSWSPVGAAFNVKPQGSRLDLFGERRGLFGVPELSAPEGFHIAQEKALRKTELLVDRACSTPPGPQTVLIFDELSDSLCRVADLADFVKIAHPEPAFREAAEEACRSIGTMVEKLNTNVDLYQSLQKLLADKKLVDSLDPETRRVAELFMFDFEISGIHLDKEKRKRAVDLNVKILDLSSTFLMGTNFPNKIEKHLLPEHIRRNFTSAGDHIIIDGLHAESPDDLVREAAYKIFLYPNAGQLKCLEELLSSRDLLAKLVGYSTFSHRALQGTIAKNPETVMQFLEKLSDKLSERTLKDFEMIRGMKMKLNPQNSEVMPWDPPYYSGVIRAERYNIEPSLYCPFFSLGACMEGLNILLNRLLGISLYAEQPAKGEVWSEDVRKLAVVHESEGLLGYIYCDFFQRADKPHQDCHFTIRGGRLKEDGDYQLPVVVLMLNLPRSSRSSPTLLTPSMMENLFHEMGHAMHSMLGRTRYQHVTGTRCPTDFAEVPSILMEYFANDYRVVNQFARHYQTGQPLPKNMVSRLCESKKVCAAADMQLQVFYATLDQIYHGKHPLRNSTTDILKETQEKFYGLPYVPNTAWQLRFSHLVGYGARYYSYLMSRAVASMVWKECFLQDPFNRAAGERYRREMLAHGGGREPMLMVEGMLQKCPSVDDFVSALVSDLDLDFETFLMDSE

SEQ ID NO: 51887 - protein, 389 aa, Homo sapiens
  Payload ID: 10328
  Gene Symbol: MTFMT
  Gene Name: mitochondrial methionyl-tRNA formyltransferase
  Uniprot ID: Q96DP5
  ENSP ID: ENSP00000220058
MRVLVRRCWGPPLAHGARRGRPSPQWRALARLGWEDCRDSRVREKPPWRVLFFGTDQFAREALRALHAARENKEEELIDKLEVVTMPSPSPKGLPVKQYAVQSQLPVYEWPDVGSGEYDVGVVASFGRLLNEALILKFPYGILNVHPSCLPRWRGPAPVIHTVLHGDTVTGVTIMQIRPKRFDVGPILKQETVPVPPKSTAKELEAVLSRLGANMLISVLKNLPESLSNGRQQPMEGATYAPKISAGTSCIKWEEQTSEQIFRLYRAIGNIIPLQTLWMANTIKLLDLVEVNSSVLADPKLTGQALIPGSVIYHKQSQILLVYCKDGWIGVRSVMLKKSLTATDFYNGYLHPWYQKNSQAQPSQCRFQTLRLPTKKKQKKTVAMQQCIE

SEQ ID NO: 51888 - protein, 144 aa, Homo sapiens
  Payload ID: 10328
  Gene Symbol: MTFMT
  Gene Name: mitochondrial methionyl-tRNA formyltransferase
  Uniprot ID: Q96DP5
  ENSP ID: ENSP00000443754
MRVLVRRCWGPPLAHGARRGRPSPQWRALARLGWEDCRDSRVREKPPWRVLFFGTDQFAREALRALHAARENKEEELIDKLEVVTMPSPSPKGLPVKQYAVQSQLPVYEWPDVGSGEYDVGVVASFGRLLNEALILKFPYSFQF

SEQ ID NO: 51889 - protein, 389 aa, Homo sapiens; identical to SEQ ID NO: 51887
  Payload ID: 10328
  Gene Symbol: MTFMT
  Gene Name: mitochondrial methionyl-tRNA formyltransferase
  Uniprot ID: Q96DP5
  ENSP ID: ENSP00000452646

SEQ ID NO: 51890 - protein, 134 aa, Homo sapiens
  Payload ID: 10328
  Gene Symbol: MTFMT
  Gene Name: mitochondrial methionyl-tRNA formyltransferase
  ENSP ID: ENSP00000457257
RRCWGPPLAHGARRGRPSPQWRALARLGWEDCRDSRVREKPPWRVLFFGTDQFAREALRALHAARENKEEELIDKLEVVTMPSPSPKGLPVKQYAVQSQLPVYEWPDVGSGEYDVGVVASFGRLLNEALILKFP

SEQ ID NO: 51891 - protein, 582 aa, Homo sapiens
  Payload ID: 10329
  Gene Symbol: MTPAP
  Gene Name: mitochondrial poly(A) polymerase
  Uniprot ID: Q9NVV4
  ENSP ID: ENSP00000263063
MAVPGVGLLTRLNLCARRRTRVQRPIVRLLSCPGTVAKDLRRDEQPSGSVETGFEDKIPKRRFSEMQNERREQAQRTVLIHCPEKISENKFLKYLSQFGPINNHFFYESFGLYAVVEFCQKESIGSLQNGTHTPSTAMETAIPFRSRFFNLKLKNQTSERSRVRSSNQLPRSNKQLFELLCYAESIDDQLNTLLKEFQLTEENTKLRYLTCSLIEDMAAAYFPDCIVRPFGSSVNTFGKLGCDLDMFLDLDETRNLSAHKISGNFLMEFQVKNVPSERIATQKILSVLGECLDHFGPGCVGVQKILNARCPLVRFSHQASGFQCDLTTNNRIALTSSELLYIYGALDSRVRALVFSVRCWARAHSLTSSIPGAWITNFSLTMMVIFFLQRRSPPILPTLDSLKTLADAEDKCVIEGNNCTFVRDLSRIKPSQNTETLELLLKEFFEYFGNFAFDKNSINIRQGREQNKPDSSPLYIQNPFETSLNISKNVSQSQLQKFVDLARESAWILQQEDTDRPSISSNRPWGLVSLLLPSAPNRKSFTKKKSNKFAIETVKNLLESLKGNRTENFTKTSGKRTISTQT

SEQ ID NO: 51892 - protein, 150 aa, Homo sapiens
  Payload ID: 10329
  Gene Symbol: MTPAP
  Gene Name: mitochondrial poly(A) polymerase
  ENSP ID: ENSP00000394118
DLRRDEQPSGSVETGFEDKIPKRRFSEMQNERREQAQRTVLIHCPEKISENKFLKYLSQFGPINNHFFYESFGLYAVVEFCQKESIGSLQNGTHTPSTAMETAIPFRSRFFNLKLKNQTSERSRVRSSNQLPRSNKQLFELLCYAESVSF

SEQ ID NO: 51893 - protein, 219 aa, Homo sapiens
  Payload ID: 10329
  Gene Symbol: MTPAP
  Gene Name: mitochondrial poly(A) polymerase
  ENSP ID: ENSP00000404392
MQNERREQAQRTVLIHCPEKISENKFLKYLSQFGPINNHFFYESFGLYAVVEFCQKESIGSLQNGTHTPSTAMETAIPFRSRFFNLKLKNQTSERSRVRSSNQLPRSNKQLFELLCYAESIDDQLNTLLKEFQLTEENTKLRYLTCSLIEDMAAAYFPDCIVRPFGSSVNTFGKLGCDLDMFLDLDETRNLSAHKISGNFLMEFQVKNVPSERIATQKI

SEQ ID NO: 51894 - protein, 66 aa, Homo sapiens
  Payload ID: 10330
  Gene Symbol: MPC1
  Gene Name: mitochondrial pyruvate carrier 1
  ENSP ID: ENSP00000340784
MKKSPEIISGRMTFALCCYSLTFMRFAYKVQPRNWLLFACHATNEVAQLIQGGRLIKHEMTKTASA

SEQ ID NO: 51895 - protein, 109 aa, Homo sapiens
  Payload ID: 10330
  Gene Symbol: MPC1
  Gene Name: mitochondrial pyruvate carrier 1
  Uniprot ID: Q9Y5U8
  ENSP ID: ENSP00000354223
MAGALVRKAADYVRSKDFRDYLMSTHFWGPVANWGLPIAAINDMKKSPEIISGRMTFALCCYSLTFMRFAYKVQPRNWLLFACHATNEVAQLIQGGRLIKHEMTKTASA

SEQ ID NO: 51896 - protein, 66 aa, Homo sapiens; identical to SEQ ID NO: 51894
  Payload ID: 10330
  Gene Symbol: MPC1
  Gene Name: mitochondrial pyruvate carrier 1
  ENSP ID: ENSP00000477853

SEQ ID NO: 51897 - protein, 109 aa, Homo sapiens
  Payload ID: 10330
  Gene Symbol: MPC1
  Gene Name: mitochondrial pyruvate carrier 1
  ENSP ID: ENSP00000479789
MAGALVRKAADYVRSKDFRDYLMRTHFWGPVANWGLPIAAINDMKKSPEIISGRMTFALCCYSLTFMRFAYKVQPRNWLLFACHATNEVAQLIQGGRLIKHEMTKTASA

SEQ ID NO: 51898 - protein, 127 aa, Homo sapiens [sequence omitted]

SEQ ID NO: 51899 - protein, 127 aa, Homo sapiens [sequence omitted]

SEQ ID NO: 51900 - protein, 105 aa, Homo sapiens
  Payload ID: 10331
  Gene Symbol: MPC2
  Gene Name: mitochondrial pyruvate carrier 2
  ENSP ID: ENSP00000392874
MSAAGARGLRATYHRLLDKVELMLPEKLRPLYNHPAGPRTVFFWAPIMKWGLVCAGLADMARPAEKLSTAQSAVLMATGFIWSRYSLVIIPKNWSLFAVNFFVGA

SEQ ID NO: 51901 - protein, 325 aa, Homo sapiens
  Payload ID: 10332
  Gene Symbol: MRPL1
  Gene Name: mitochondrial ribosomal protein L1
  Uniprot ID: Q9BYD6
  ENSP ID: ENSP00000315017
MAAAVRCMGRALIHHQRHSLSKMVYQTSLCSCSVNIRVPNRHFAAATKSAKKTKKGAKEKTPDEKKDEIEKIKAYPYMEGEPEDDVYLKRLYPRQIYEVEKAVHLLKKFQILDFTSPKQSVYLDLTLDMALGKKKNVEPFTSVLSLPYPFASEINKVAVFTENASEVKIAEENGAAFAGGTSLIQKIWDDEIVADFYVAVPEIMPELNRLRKKLNKKYPKLSRNSIGRDIPKMLELFKNGHEIKVDEERENFLQTKIATLDMSSDQIAANLQAVINEVCRHRPLNLGPFVVRAFLRSSTSEGLLLKIDPLLPKEVKNEESEKEDA

SEQ ID NO: 51902 - protein, 231 aa, Homo sapiens
  Payload ID: 10332
  Gene Symbol: MRPL1
  Gene Name: mitochondrial ribosomal protein L1
  ENSP ID: ENSP00000421616
  MOD_RES (1)..(1): Any amino acid
XRSAKKTKKGAKEKTPDEKKDEIEKIKAYPYMEGEPEDDVYLKRLYPRQIYEVEKAVHLLKKFQILDFTSPKQSVYLDLTLDMALGKKKNVEPFTSVLSLPYPFASEINKVAVFTENASEVKIAEENGAAFAGGTSLIQKIWDDEIVADFYVAVPEIMPELNRLRKKLNKKYPKLSRNSIGRDIPKMLELFKNGHEIKVDEERENFLQTKIATVPLWYVLSFVVQQVKVYY

SEQ ID NO: 51903 - protein, 271 aa, Homo sapiens
  Payload ID: 10333
  Gene Symbol: MRPL10
  Gene Name: mitochondrial ribosomal protein L10
  Uniprot ID: Q7Z7H8
  ENSP ID: ENSP00000290208
MISAHCNLHLPGSSDSPASASQVAGITGRLPTLQTVRYGSKAVTRHRRVMHFQRQKLMAVTEYIPPKPAIHPSCLPSPPSPPQEEIGLIRLLRREIAAVFQDNRMIAVCQNVALSAEDKLLMRHQLRKHKILMKVFPNQVLKPFLEDSKYQNLLPLFVGHNMLLVSEEPKVKEMVRILRTVPFLPLLGGCIDDTILSRQGFINYSKLPSLPLVQGELVGGLTCLTAQTHSLLQHQPLQLTTLLDQYIREQREKDSVMSANGKPDPDTVPDS

SEQ ID NO: 51904 - protein, 261 aa, Homo sapiens [sequence omitted]

SEQ ID NO: 51905 - protein, 48 aa, Homo sapiens
  Payload ID: 10333
  Gene Symbol: MRPL10
  Gene Name: mitochondrial ribosomal protein L10
  ENSP ID: ENSP00000390624
MAAAVAGMLRGGLLPQAGKEWPRSSRRVLRPLSSPHLPSSTTDSSHNL

SEQ ID NO: 51906 - protein, 271 aa, Homo sapiens; identical to SEQ ID NO: 51903
  Payload ID: 10333
  Gene Symbol: MRPL10
  Gene Name: mitochondrial ribosomal protein L10
  Uniprot ID: Q7Z7H8
  ENSP ID: ENSP00000395870

SEQ ID NO: 51907 - protein, 48 aa, Homo sapiens; identical to SEQ ID NO: 51905
  Payload ID: 10333
  Gene Symbol: MRPL10
  Gene Name: mitochondrial ribosomal protein L10
  ENSP ID: ENSP00000404039

SEQ ID NO: 51908 - protein, 192 aa, Homo sapiens [sequence omitted]

SEQ ID NO: 51909 - protein, 181 aa, Homo sapiens
  Payload ID: 10334
  Gene Symbol: MRPL11
  Gene Name: mitochondrial ribosomal protein L11
  Uniprot ID: Q9Y3B7
  ENSP ID: ENSP00000329630
MSKLGRAARGLRKPEVGGVIRAIVRAGLAMPGPPLGPVLGQRGVSINQFCKEFNERTKDIKEGIPLPTKILVKPDRTFEIKIGQPTVSYFLKAAAGIEKGARQTGKEVAGLVTLKHVYEIARIKAQDEAFALQDVPLSSVVRSIIGSARSLGIRVVKERCSANVLRNGKISMKDPSGRSSV

SEQ ID NO: 51910 - protein, 166 aa, Homo sapiens
  Payload ID: 10334
  Gene Symbol: MRPL11
  Gene Name: mitochondrial ribosomal protein L11
  Uniprot ID: Q9Y3B7
  ENSP ID: ENSP00000415356
MSKLGRAARGLRKPERGVSINQFCKEFNERTKDIKEGIPLPTKILVKPDRTFEIKIGQPTVSYFLKAAAGIEKGARQTGKEVAGLVTLKHVYEIARIKAQDEAFALQDVPLSSVVRSIIGSARSLGIRVVKDLSSEELAAFQKERAIFLAAQKEADLAAQEEAAKK

SEQ ID NO: 51911 - protein, 63 aa, Homo sapiens
  Payload ID: 10334
  Gene Symbol: MRPL11
  Gene Name: mitochondrial ribosomal protein L11
  ENSP ID: ENSP00000431405
EIARIKAQDEAFALQDVPLSSVVRSIIGSARSLGIRVVKERCSANVLRNGKISMKDPSGRSSV

SEQ ID NO: 51912 - protein, 75 aa, Homo sapiens
  Payload ID: 10334
  Gene Symbol: MRPL11
  Gene Name: mitochondrial ribosomal protein L11
  ENSP ID: ENSP00000436904
MSKLGRAARGLRKPEVGGVIRAIVRAGLAMPGPPLGPVLGQRGVSINQFCKEFNERTKDIKEGIPLPTKILVKDI

SEQ ID NO: 51913 - protein, 198 aa, Homo sapiens [sequence omitted]

SEQ ID NO: 51914 - protein, 178 aa, Homo sapiens
  Payload ID: 10335
  Gene Symbol: MRPL12
  Gene Name: mitochondrial ribosomal protein L12
  ENSP ID: ENSP00000439565
MLPAAARPLWGPCLGLRAAAFRLARRQVPCVCAVRHMRSSGHQRCEALAGAPLDNAPKEYPPKIQQLVQDIASLTLLEISDLNELLKKTLKIQDVGLVPMGGVMSGAVPAAAAQEAVEEDIPIAKERTHFTVRLTEAKPVDKVKLIKEIKNYIKASTSSRQRSWWSPCPGNQSQCRQS

SEQ ID NO: 51915 - protein, 178 aa, Homo sapiens
  Payload ID: 10336
  Gene Symbol: MRPL13
  Gene Name: mitochondrial ribosomal protein L13
  Uniprot ID: Q9BYD1
  ENSP ID: ENSP00000306548
MSSFSRAPQQWATFARIWYLLDGKMQPPGKLAAMASIRLQGLHKPVYHALSDCGDHVVIMNTRHIAFSGNKWEQKVYSSHTGYPGGFRQVTAAQLHLRDPVAIVKLAIYGMLPKNLHRRTMMERLHLFPDEYIPEDILKNLVEELPQPRKIPKRLDEYTQEEIDAFPRLWTPPEDYRL

SEQ ID NO: 51916 - protein, 47 aa, Homo sapiens
  Payload ID: 10336
  Gene Symbol: MRPL13
  Gene Name: mitochondrial ribosomal protein L13
  ENSP ID: ENSP00000428229
YIPEDILKNLVEELPQPRKIPKRLDEYTQEEIDAFPRLWTPPEDYRL

SEQ ID NO: 51917 - protein, 58 aa, Homo sapiens
  Payload ID: 10336
  Gene Symbol: MRPL13
  Gene Name: mitochondrial ribosomal protein L13
  ENSP ID: ENSP00000428867
MSSFSRAPQQWATFARIWYLLDGKMQPPGKLAAMASIRLQGLHKPVYHALTTQVDLDK

SEQ ID NO: 51918 - protein, 147 aa, Homo sapiens
  Payload ID: 10336
  Gene Symbol: MRPL13
  Gene Name: mitochondrial ribosomal protein L13
  ENSP ID: ENSP00000430545
MQPPGKLAAMASIRLQGLHKPVYHALSDCGDHVVIMNTRHIAFSGNKWEQKVYSSHTGYPGGFRQVTAAQLHLRDPVAIVKLAIYGMLPKNLHRRTMMERLHLFPDEYIPEDILKNLVEELPQPRKIPKRLDEYTQEEIDAFPRLWT

SEQ ID NO: 51919 - protein, 145 aa, Homo sapiens [sequence omitted]

SEQ ID NO: 51920 - protein, 296 aa, Homo sapiens [sequence omitted]

SEQ ID NO: 51921 - protein, 198 aa, Homo sapiens
  Payload ID: 10338
  Gene Symbol: MRPL15
  Gene Name: mitochondrial ribosomal protein L15
  ENSP ID: ENSP00000428581
MAGPLQGGGARALDLLRGLPRVSLANLKPNPGSKKPERRPRGRRRGRKCGRGHKGERQRGTRPRLGFEGGQTPFYIRIPKYGFNEGHSFRRQYKPLSLNRLQYLIDLGRVDPSQPIDLTQLVNGRGVTIQPLKRDYGVQLVEEGADTFTAKVNIEVQLASELAIAAIEKNGGVVTTAFYDPRSLGKFVPRSFSSFSLC

SEQ ID NO: 51922 - protein, 237 aa, Homo sapiens
  Payload ID: 10338
  Gene Symbol: MRPL15
  Gene Name: mitochondrial ribosomal protein L15
  ENSP ID: ENSP00000429252
QERRPRGRRRGQTPFYIRIPKYGFNEGHSFRRQYKPLSLNRLQYLIDLGRVDPSQPIDLTQLVNGRGVTIQPLKRDYGVQLVEEGADTFTAKVNIEVQLASELAIAAIEKNGGVVTTAFYDPRSLDIVCKPVPFFLRGQPIPKRMLPPEELVPYYTDAKNRGYLADPAKFPEARLELARKYGYILPDITKDELFKMLCTRKDPRQIFFGLAPGWVVNMADKKILKPTDENLLKYYTS

SEQ ID NO: 51923 - protein, 251 aa, Homo sapiens [sequence omitted]

SEQ ID NO: 51924 - protein, 86 aa, Homo sapiens
  Payload ID: 10339
  Gene Symbol: MRPL16
  Gene Name: mitochondrial ribosomal protein L16
  ENSP ID: ENSP00000436592
MMRLTINRSMDPKNMFAIWRVPAPFKPITRKSVGHRMGGGKGAIDHYVTPVKAGRLVVEMGGRCEFEEVQGFLDQVAHKLPFAAKA

SEQ ID NO: 51925 - protein, 175 aa, Homo sapiens [sequence omitted]

SEQ ID NO: 51926 - protein, 142 aa, Homo sapiens
  Payload ID: 10340
  Gene Symbol: MRPL17
  Gene Name: mitochondrial ribosomal protein L17
  ENSP ID: ENSP00000435294
MRLSVAAAISHGRVFRRMGLGPESRIHLLRNLLTGLVRHERIEAPWARVDEMRGYAEKEKDLIPKLFQVLAPRYKDQTGGYTRMLQIPNRSLDRAKMAVIEYKGNCLPPLPLPRRDSHLTLLNQLLQGLRQDLRQSQEASNH

SEQ ID NO: 51927 - protein, 180 aa, Homo sapiens [sequence omitted]

SEQ ID NO: 51928 - protein, 173 aa, Homo sapiens
  Payload ID: 10342
  Gene Symbol: MRPL19
  Gene Name: mitochondrial ribosomal protein L19
  ENSP ID: ENSP00000351639
MAACIAAGHWAAMGLGRSFQAARTLLPPPASIACRVHAGPVRQQSTGPSEPGAFQPPPKPVIVDKHRPVEPERRFLSPEFIPRRGRTDPLKFQIERKDMLERRKVLHIPEFYVGSILRVTTADPYASGKISQFLGICIQRSGRGLGATFILRNVIEGQGPVYIHNPERWLPGP

SEQ ID NO: 51929 - protein, 292 aa, Homo sapiens [sequence omitted]

SEQ ID NO: 51930 - protein, 292 aa, Homo sapiens [sequence omitted]

SEQ ID NO: 51931 - protein, 79 aa, Homo sapiens
  Payload ID: 10342
  Gene Symbol: MRPL19
  Gene Name: mitochondrial ribosomal protein L19
  ENSP ID: ENSP00000406267
KVPVNELKVKMKPKPWSKRWERPNFNIKGIRFDLCLTEQQMKEAQKWNQPWLEFDMMREYDTSKIEAAIWKEIEASKRS

SEQ ID NO: 51932 - protein, 143 aa, Homo sapiens
  Payload ID: 10342
  Gene Symbol: MRPL19
  Gene Name: mitochondrial ribosomal protein L19
  ENSP ID: ENSP00000474821
MLERRKVLHIPEFYVGSILRVTTADPYASGKISQFLGICIQRSGRGLGATFILRNVIEGQGVEICFELYNPRVQEIQVVKLEKRLDDSLLYLRDALPEYSTFDVNMKPVVQEPNQKVPVNELKVKMKPKPWSKRWERPNFNIK

SEQ ID NO: 51933 - protein, 58 aa, Homo sapiens
  Payload ID: 10342
  Gene Symbol: MRPL19
  Gene Name: mitochondrial ribosomal protein L19
  ENSP ID: ENSP00000475090
  MOD_RES (1)..(1): Any amino acid
XVKLEKRLDDSLLYLRDALPEYSTFDVNMKPVVQEPNQKVPVNEPGAIKYKTTGPRDS

SEQ ID NO: 51934 - protein, 225 aa, Homo sapiens
  Payload ID: 10343
  Gene Symbol: MRPL2
  Gene Name: mitochondrial ribosomal protein L2
  ENSP ID: ENSP00000230413
MALCALTRALRSLNLAPPTVAAPAPSLFPAAQMMNNGLLQQPSALMLLPCRPVLTSVALNANFVSWKSRTKYTITPVKMRKSGGRDHTGRIRVHGIGGGHKQRYRMIDFLRFRPEETKSGPFEEKVIQVRYDPCRSADIALVAGGSRKRWIIATENMQAGDTILNSNHIGRMAVAAREGDAHPLGALPVGTLINNVESEPGRGAQYIRAAGAGNVRSNSRPSIQR

SEQ ID NO: 51935 - protein, 305 aa, Homo sapiens [sequence omitted]

SEQ ID NO: 51936 - protein, 94 aa, Homo sapiens
  Payload ID: 10343
  Gene Symbol: MRPL2
  Gene Name: mitochondrial ribosomal protein L2
  ENSP ID: ENSP00000417101
MALCALTRALRSLNLAPPTVAAPAPSLFPAAQVIHLTREEGCFHSGCRRWGLRACEAGVASLVRSHADDEQWPPPTALCLDVAPLPPSSYFCGP

SEQ ID NO: 51937 - protein, 96 aa, Homo sapiens
  Payload ID: 10343
  Gene Symbol: MRPL2
  Gene Name: mitochondrial ribosomal protein L2
  ENSP ID: ENSP00000419710
MALCALTRALRSLNLAPPTVAAPAPSLFPAAQMMNNGLLQQPSALMLLPCRPVLTSVALNANFVSWKSRTKYTITPVKMRKSGGRDHTGGNKDRGI

SEQ ID NO: 51938 - protein, 103 aa, Homo sapiens
  Payload ID: 10343
  Gene Symbol: MRPL2
  Gene Name: mitochondrial ribosomal protein L2
  ENSP ID: ENSP00000419753
MALCALTRALRSLNLAPPTVAAPAPSLFPAAQMMNNGLLQQPSALMLLPCRPVLTSVALNANFVSWKSRTKYTITPVKMRKSGGRDHTGAGNVRSNSRPSIQR

SEQ ID NO: 51939 - protein, 149 aa, Homo sapiens
  Payload ID: 10344
  Gene Symbol: MRPL20
  Gene Name: mitochondrial ribosomal protein L20
  Uniprot ID: Q9BYC9
  ENSP ID: ENSP00000341082
MVFLTAQLWLRNRVTDRYFRIQEVLKHARHFRGRKNRCYRLAVRTVIRAFVKCTKARYLKKKNMRTLWINRITAASQEHGLKYPALIGNLVKCQVELNRKVLADLAIYEPKTFKSLAALASRRRHEGFAAALGDGKEPEGIFSRVVQYH

SEQ ID NO: 51940 - protein, 66 aa, Homo sapiens
  Payload ID: 10344
  Gene Symbol: MRPL20
  Gene Name: mitochondrial ribosomal protein L20
  ENSP ID: ENSP00000459994
RCYRLAVRTVIRAFVKCTKARYLKKKNMRTLWINRITAASQEHGLKYPALIGNLVKALPGWLKGLP

SEQ ID NO: 51941 - protein, 155 aa, Homo sapiens
  Payload ID: 10344
  Gene Symbol: MRPL20
  Gene Name: mitochondrial ribosomal protein L20
  Uniprot ID: Q9BYC9
  ENSP ID: ENSP00000460924
MVFLTAQLWLRNRVTDRYFRIQEVLKHARHFRGRKNRCYRLAVRTVIRAFVKCTKARYLKKKNMRTLWINRITAASQEHGLKYPALIGNLVKVWVSMWVPLKFWTSAETIMRGVVVLPVVPANQEAEARGSLETDFWAVVCYADGVSMLSVVSIW

SEQ ID NO: 51942 - protein, 205 aa, Homo sapiens
  Payload ID: 10345
  Gene Symbol: MRPL21
  Gene Name: mitochondrial ribosomal protein L21
  Uniprot ID: Q7Z2W9
  ENSP ID: ENSP00000354580
MAASSLTVTLGRLASACSHSILRPSGPGAASLWSASRRFNSQSTSYLPGYVPKTSLSSPPWPEVVLPDPVEETRHHAEVVKKVNEMIVTGQYGRLFAVVHFASRQWKVTSEDLILIGNELDLACGERIRLEKVLLVGADNFTLLGKPLLGKDLVRVEATVIEKTESWPRIIMRFRKRKNFKKKRIVTTPQTVLRINSIEIAPCLL

SEQ ID NO: 51943 - protein, 120 aa, Homo sapiens
  Payload ID: 10345
  Gene Symbol: MRPL21
  Gene Name: mitochondrial ribosomal protein L21
  Uniprot ID: Q7Z2W9
  ENSP ID: ENSP00000389400
MIVTGQYGRLFAVVHFASRQWKVTSEDLILIGNELDLACGERIRLEKVLLVGADNFTLLGKPLLGKDLVRVEATVIEKTESWPRIIMRFRKRKNFKKKRIVTTPQTVLRINSIEIAPCLL

SEQ ID NO: 51944 - protein, 36 aa, Homo sapiens
  Payload ID: 10345
  Gene Symbol: MRPL21
  Gene Name: mitochondrial ribosomal protein L21
  ENSP ID: ENSP00000438837
MAASSLTVTLGRLASACSHSILRPSGPGADMFLKHP

SEQ ID NO: 51945 - protein, 150 aa, Homo sapiens
  Payload ID: 10345
  Gene Symbol: MRPL21
  Gene Name: mitochondrial ribosomal protein L21
  ENSP ID: ENSP00000442243
MAASSLTVTLGRLASACSHSILRPSGPGAASLWSASRRFNSQSTSYLPGYVPKTSLSSPPWPEVVLPDPVEETRHHAEVVKKVNEMIVTGQYGRLFAVVHFASRQWKVTSEDLILIGNELDLACGERIRLEKVLLVGADNFTLLGKPLLG

SEQ ID NO: 51946 - protein, 49 aa, Homo sapiens
  Payload ID: 10345
  Gene Symbol: MRPL21
  Gene Name: mitochondrial ribosomal protein L21
  ENSP ID: ENSP00000445009
MAASSLTVTLGRLASACSHSILRPSGPGAASLWSASRRFNSQSTSYLPG

SEQ ID NO: 51947 - protein, 49 aa, Homo sapiens; identical to SEQ ID NO: 51946
  Payload ID: 10345
  Gene Symbol: MRPL21
  Gene Name: mitochondrial ribosomal protein L21
  ENSP ID: ENSP00000456520

SEQ ID NO: 51948 - protein, 195 aa, Homo sapiens
  Payload ID: 10345
  Gene Symbol: MRPL21
  Gene Name: mitochondrial ribosomal protein L21
  ENSP ID: ENSP00000457859
MIVTGQYGRLFAVVHFASRQWKVTSEDLILIGNELDLACGERIRLEKVLLVGADNFTLLGKPLLGKDLVRVEATVIEKTESWPRIIMRFRKRKNFKKKRSKLEKVPLGPVARCWLPRRMRTEGVGHVGLGTGSPGRSQPGCHCPLATLILEGAPRGSSLAPLLLHAPRVTPPRSPSPPRSARDPTSLPFSSTLRA

SEQ ID NO: 51949 - protein, 126 aa, Homo sapiens
  Payload ID: 10346
  Gene Symbol: MRPL22
  Gene Name: mitochondrial ribosomal protein L22
  Uniprot ID: Q9NWU5
  ENSP ID: ENSP00000265229
MWYLAKLIRGMSIDQALAQLEFNDKKGAKIIKEVLLEAQDMAVRDHNVEFRSNLYIAESTSGRGQCLKRIRYHGRGRFGIMEKVYCHYFVKLVEGPPPPPEPPKTAVAHAKEYIQQLRSRTIVHTL

SEQ ID NO: 51950 - protein, 232 aa, Homo sapiens
  Payload ID: 10346
  Gene Symbol: MRPL22
  Gene Name: mitochondrial ribosomal protein L22
  ENSP ID: ENSP00000411177
MAAAVLGQLGKDFLVVKRQKGVEMESELTACVDVAGALWIHNLRSRGKLALGVLPQSYIHTSASLDISRKWEKKNKIVYPPQLPGEPRRPAEIYHCRRQIKYSKDKMWYLAKLIRGMSIDQALAQLEFNDKKGAKIIKEVLLEAQDMAVRDHNVEFRSNLYIAESTSGRGQCLKRIRYHGRGRFGIMEKVYCHYFVKLVEGPPPPPEPPKTAVAHAKEYIQQLRSRTIVHTL

SEQ ID NO: 51951 - protein, 212 aa, Homo sapiens
  Payload ID: 10346
  Gene Symbol: MRPL22
  Gene Name: mitochondrial ribosomal protein L22
  ENSP ID: ENSP00000429039
MAAAVLGQLGALWIHNLRSRGKLALGLLSFHSVLPQSYIHTSASLDISRKWEKKNKIVYPPQLPGEPRRPAEIYHCRRQIKYSKDKMWYLAKLIRGMSIDQALAQLEFNDKKGAKIIKEVLLEAQDMAVRDHNVEFRSNLYIAESTSGRGQCLKRIRYHGRGRFGIMEKVYCHYFVKLVEGPPPPPEPPKTAVAHAKEYIQQLRSRTIVHTL

SEQ ID NO: 51952 - protein, 38 aa, Homo sapiens
  Payload ID: 10346
  Gene Symbol: MRPL22
  Gene Name: mitochondrial ribosomal protein L22
  ENSP ID: ENSP00000430648
EMESELTACVDVAGALWIHNLRSRGKLALGKSTTVEDK

SEQ ID NO: 51953 - protein, 206 aa, Homo sapiens
  Payload ID: 10346
  Gene Symbol: MRPL22
  Gene Name: mitochondrial ribosomal protein L22
  Uniprot ID: Q9NWU5
  ENSP ID: ENSP00000431040
MAAAVLGQLGALWIHNLRSRGKLALGVLPQSYIHTSASLDISRKWEKKNKIVYPPQLPGEPRRPAEIYHCRRQIKYSKDKMWYLAKLIRGMSIDQALAQLEFNDKKGAKIIKEVLLEAQDMAVRDHNVEFRSNLYIAESTSGRGQCLKRIRYHGRGRFGIMEKVYCHYFVKLVEGPPPPPEPPKTAVAHAKEYIQQLRSRTIVHTL

SEQ ID NO: 51954 - protein, 228 aa, Homo sapiens
  Payload ID: 10346
  Gene Symbol: MRPL22
  Gene Name: mitochondrial ribosomal protein L22
  ENSP ID: ENSP00000481879
MAAAVLGQLGALWIHNLRSRGKLALGVLPQSYIHTSASLDISRKWEKKNKIVYPPQLPGEPRRPAEIYHCRRQIKYSKDKMWYLAKLIRGMSIDQALAQLEFNDKKGAKIIKEVLLEAQDMAVRDHNVEFRSNLYIAESTSGRGQCLKRIRYHGRGRFGIMEKVYCHYFVKLVEGPPPPPEPPKTAVAHAKEYIQQFAAGPSFTLYDEEIQTPQCIYFAIYFLKINKN

SEQ ID NO: 51955 - protein, 163 aa, Homo sapiens
  Payload ID: 10347
  Gene Symbol: MRPL23
  Gene Name: mitochondrial ribosomal protein L23
  ENSP ID: ENSP00000370925
MARNVVYPLYRLGGPQLRVFRTNFFIQLVRPGVAQPEDTVQFRIPMEMTRVDLRNYLEGIYNVPVAAVRTRVQHGSNKRRDHRNVRIKKPDYKVAYVQLVPHPRSLPLCLQHRSQLRTPRIPCIVAFASWGPGSKHDACSALCVVARAWAAVYVSARLISVAG

SEQ ID NO: 51956 - protein, 153 aa, Homo sapiens
  Payload ID: 10347
  Gene Symbol: MRPL23
  Gene Name: mitochondrial ribosomal protein L23
  Uniprot ID: Q16540
  ENSP ID: ENSP00000370930
MARNVVYPLYRLGGPQLRVFRTNFFIQLVRPGVAQPEDTVQFRIPMEMTRVDLRNYLEGIYNVPVAAVRTRVQHGSNKRRDHRNVRIKKPDYKVAYVQLAHGQTFTFPDLFPEKDESPEGSAADDLYSMLEEERQQRQSSDPRRGGVPSWFGL

SEQ ID NO: 51957 - protein, 166 aa, Homo sapiens
  Payload ID: 10347
  Gene Symbol: MRPL23
  Gene Name: mitochondrial ribosomal protein L23
  ENSP ID: ENSP00000380462
MARNVVYPLYRLGGPQLRVFRTNFFIQLVRPGVAQPEDTVQFRIPMEMTRVDLRNYLEGIYNVPVAAVRTRVQHGSNKRRDHRNVRIKKPDYKVAYVQLPSQTPSKEQNGQGSTLCFRSSCSKGWSTWGTRDPRPAWSPVGGRIPRKAGSGGPANRIAQDGRLLLK

SEQ ID NO: 51958 - protein, 191 aa, Homo sapiens
  Payload ID: 10347
  Gene Symbol: MRPL23
  Gene Name: mitochondrial ribosomal protein L23
  ENSP ID: ENSP00000380465
MARNVVYPLYRLGGPQLRVFRTNFFIQLVRPGVAQPEDTVQFRIPMEMTRVDLRNYLEGIYNVPVAAVRTRVQHGSNKRRDHRNVRIKKPDYKVAYVQLPSQTPSKEQNGQGSTLCFRSSCSKGWSTWGTRDPRPAWSPVGGRIPRKAGSGGPANRIAQDGRLLLKNLRPRVPRREQPATRFPLWRRGVLA

SEQ ID NO: 51959 - protein, 153 aa, Homo sapiens; identical to SEQ ID NO: 51956
  Payload ID: 10347
  Gene Symbol: MRPL23
  Gene Name: mitochondrial ribosomal protein L23
  Uniprot ID: Q16540
  ENSP ID: ENSP00000380466

SEQ ID NO: 51960 - protein, 118 aa, Homo sapiens
  Payload ID: 10347
  Gene Symbol: MRPL23
  Gene Name: mitochondrial ribosomal protein L23
  ENSP ID: ENSP00000407156
  MOD_RES (1)..(1): Any amino acid
XYPLYRLGGPQLRVFRTNFFIQLVRPGVAQPEDTVQFRIPMEMTRVDLRNYLEGIYNVPVAAVRTRVQHGSNKRRDHRNVRIKKPDYKVAYVQLVPKEQYPLLLVNPSHMLWPGLGLG

SEQ ID NO: 51961 - protein, 216 aa, Homo sapiens
  Payload ID: 10348
  Gene Symbol: MRPL24
  Gene Name: mitochondrial ribosomal protein L24
  Uniprot ID: Q96A35
  ENSP ID: ENSP00000354525
MRLSALLALASKVTLPPHYRYGMSPPGSVADKRKNPPWIRRRPVVVEPISDEDWYLFCGDTVEILEGKDAGKQGKVVQVIRQRNWVVVGGLNTHYRYIGKTMDYRGTMIPSEAPLLHRQVKLVDPMDRKPTEIEWRFTEAGERVRVSTRSGRIIPKPEFPRADGIVPETWIDGPKDTSVEDALERTYVPCLKTLQEEVMEAMGIKETRKYKKVYWY

SEQ ID NO: 51962 - protein, 216 aa, Homo sapiens; identical to SEQ ID NO: 51961
  Payload ID: 10348
  Gene Symbol: MRPL24
  Gene Name: mitochondrial ribosomal protein L24
  Uniprot ID: Q96A35
  ENSP ID: ENSP00000357194

SEQ ID NO: 51963 - protein, 98 aa, Homo sapiens
  Payload ID: 10348
  Gene Symbol: MRPL24
  Gene Name: mitochondrial ribosomal protein L24
  ENSP ID: ENSP00000406681
MRLSALLALASKVTLPPHYRYGMSPPGSVADKRKNPPWIRRRPVVVEPISDEDWYLFCGDTVEILEGKDAGKQGKVVQVIRQRNWVVVGGLNTHYRYI

SEQ ID NO: 51964 - protein, 68 aa, Homo sapiens
  Payload ID: 10348
  Gene Symbol: MRPL24
  Gene Name: mitochondrial ribosomal protein L24
  ENSP ID: ENSP00000409803
MRLSALLALASKVTLPPHYRYGMSPPGSVADKRKNPPWIRRRPVVVEPISDEDWYLFCGDTVEILEGK

SEQ ID NO: 51965 - protein, 173 aa, Homo sapiens
  Payload ID: 10348
  Gene Symbol: MRPL24
  Gene Name: mitochondrial ribosomal protein L24
  ENSP ID: ENSP00000411369
MRLSALLALASKVTLPPHYRYGMSPPGSVADKRKNPPWIRRRPVVVEPISDEDWYLFCGDTVEILEGKDAGKQGKVVQVIRQRNWVVVGGLNTHYRYIGKTMDYRGTMIPSEAPLLHRQVKLVDPMDRKPTEIEWRFTEAGERVRVSTRSGRIIPKPEFPRADGIVPETWIDG

SEQ ID NO: 51966 - protein, 148 aa, Homo sapiens
  Payload ID: 10349
  Gene Symbol: MRPL27
  Gene Name: mitochondrial ribosomal protein L27
  Uniprot ID: Q9P0M9
  ENSP ID: ENSP00000225969
MASVVLALRTRTAVTSLLSPTPATALAVRYASKKSGGSSKNLGGKSSGRRQGIKKMEGHYVHAGNIIATQRHFRWHPGAHVGVGKNKCLYALEEGIVRYTKEVYVPHPRNTEAVDLITRLPKGAVLYKTFVHVVPAKPEGTFKLVAML

SEQ ID NO: 51967 - protein, 94 aa, Homo sapiens
  Payload ID: 10349
  Gene Symbol: MRPL27
  Gene Name: mitochondrial ribosomal protein L27
  ENSP ID: ENSP00000388915
MASVVLALRTRTAVTSLLSPTPATALAVRYASKKSGGSSKNLGGKSSGRRQGIKKMEGHYVHAGNIIATQRHFRWHPGAHVSCSVAAPLFPFLG

SEQ ID NO: 51968 - protein, 93 aa, Homo sapiens
  Payload ID: 10349
  Gene Symbol: MRPL27
  Gene Name: mitochondrial ribosomal protein L27
  ENSP ID: ENSP00000421865
MEGHYVHAGNIIATQRHFRWHPGAHVGVGKNKCLYALEEGIVRYTKEVYVPHPRNTEAVDLITRLPKGAVLYKTFVHVVPAKPEGTFKLVAML

SEQ ID NO: 51969 - protein, 136 aa, Homo sapiens
  Payload ID: 10349
  Gene Symbol: MRPL27
  Gene Name: mitochondrial ribosomal protein L27
  ENSP ID: ENSP00000424321
  MOD_RES (1)..(1): Any amino acid
XSPTPATALAVRYASKKSGGSSKNLGGKSSGRRQGIKKMEGHYVHAGNIIATQRHFRWHPGAHVCVLQVGVGKNKCLYALEEGIVRYTKEVYVPHPRNTEAVDLITRLPKGAVLYKTFVHVVPAKPEGTFKLVAML

SEQ ID NO: 51970 - protein, 84 aa, Homo sapiens
  Payload ID: 10349
  Gene Symbol: MRPL27
  Gene Name: mitochondrial ribosomal protein L27
  ENSP ID: ENSP00000425126
MASVVLALRTRTAVTSLLSPTPATALAVRYASKKSGGSSKNLGGKSSGRRQGIKKMEGHYVHAGNIIATQRHFRWHPGAHWRWK

SEQ ID NO: 51971 - protein, 93 aa, Homo sapiens; identical to SEQ ID NO: 51968
  Payload ID: 10349
  Gene Symbol: MRPL27
  Gene Name: mitochondrial ribosomal protein L27
  ENSP ID: ENSP00000426037

SEQ ID NO: 51972 - protein, 256 aa, Homo sapiens
  Payload ID: 10350
  Gene Symbol: MRPL28
  Gene Name: mitochondrial ribosomal protein L28
  Uniprot ID: Q13084
  ENSP ID: ENSP00000199706
MPLHKYPVWLWKRLQLREGICSRLPGHYLRSLEEERTPTPVHYRPHGAKFKINPKNGQRERVEDVPIPIYFPPESQRGLWGGEGWILGQIYANNDKLSKRLKKVWKPQLFEREFYSEILDKKFTVTVTMRTLDLIDEAYGLDFYILKTPKEDLCSKFGMDLKRGMLLRLARQDPQLHPEDPERRAAIYDKYKEFAIPEEEAEWVGLTLEEAIEKQRLLEEKDPVPLFKIYVAELIQQLQQQALSEPAVVQKRASGQ

SEQ ID NO: 51973 - protein, 256 aa, Homo sapiens; identical to SEQ ID NO: 51972
  Payload ID: 10350
  Gene Symbol: MRPL28
  Gene Name: mitochondrial ribosomal protein L28
  Uniprot ID: Q13084
  ENSP ID: ENSP00000374326

SEQ ID NO: 51974 - protein, 218 aa, Homo sapiens
  Payload ID: 10350
  Gene Symbol: MRPL28
  Gene Name: mitochondrial ribosomal protein L28
  ENSP ID: ENSP00000390399
MPLHKYPVWLWKRLQLREGICSRLPGHYLRSLEEERTPTPVHYRPHGAKFKINPKNGQRERVEDVPIPIYFPPESQRGLWGGEGWILGQIYANNDKLSKRLKKVWKPQLFEREFYSEILDKKFTVTVTMRTLDLIDEAYGLDFYILKTPKEDLCSKFGMDLKRGMLLRLARQDPQLHPEDPERRAAIYDKYKEFAIPEEEAEWVGLTLEEAIEKQRLL

SEQ ID NO: 51975 - protein, 194 aa, Homo sapiens
  Payload ID: 10350
  Gene Symbol: MRPL28
  Gene Name: mitochondrial ribosomal protein L28
  ENSP ID: ENSP00000395305
MPLHKYPVWLWKRLQLREGICSRLPGHYLRSLEEERTPTPVHYRPHGAKFKINPKNGQRERVEDVPIPIYFPPESQRGLWGGEGWILGQIYANNDKLSKRLKKVWKPQLFEREFYSEILDKKFTVTVTMRTLDLIDEAYGLDFYILKTPKEDLCSKFGMDLKRGMLLRLARQDPQLHPEDPERRAAIYDKYKEF

SEQ ID NO: 51976 - protein, 240 aa, Homo sapiens
  Payload ID: 10350
  Gene Symbol: MRPL28
  Gene Name: mitochondrial ribosomal protein L28
  ENSP ID: ENSP00000398684
MPLHKYPVWLWKRLQLREGICSRLPGHYLRSLEEERTPTPVHYRPHGAKFKINPKNGQRERVEDVPIPIYFPPESQRGLWGGEGWILGQIYANNDKLSKRLKKVWKPQLFEREFYSEILDKKFTVTVTMRTLDLIDEAYGLDFYILKTPKEDLCSKFGMDLKRGMLLRLARQDPQLHPEDPERRAAIYDKYKEFAIPEEEAEWVGLTLEEAIEKQRLLEEKDPVPLFKIYVAELIQQLQQ

SEQ ID NO: 51977 - protein, 48 aa, Homo sapiens
  Payload ID: 10350
  Gene Symbol: MRPL28
  Gene Name: mitochondrial ribosomal protein L28
  ENSP ID: ENSP00000414038
MSRAGGRGEQSRWGRRAELRGLGRPEAPLRLGPDVCGSVPCARGAGSE

SEQ ID NO: 51978 - protein, 348 aa, Homo sapiens [sequence omitted]

SEQ ID NO: 51979 - protein, 375 aa, Homo sapiens
  Payload ID: 10351
  Gene Symbol: MRPL3
  Gene Name: mitochondrial ribosomal protein L3
  ENSP ID: ENSP00000398536
MPGWRLLTQVGAQVLGRLGDGLGAALGPGNRVTTNSLNVSLIRRNVGSEEKVGDLKKRTHIWLFVRGLHGKSGTWWDEHLSEENVPFIKQLVSDEDKAQLASKLCPLKDEPWPIHPWEPGSFRVGLIALKLGMMPLWTKDGQKHVVTLLQVQDCHVLKYTSKENCNGKMATLSVGGKTVSRFRKATSILEFYRELGLPPKQTVKIFNITDNAAIKPGTPLYAAHFRPGQYVDVTAKTIGKGFQGVMKRWGFKGQPATHGQTKTHRRPGAVATGDIGRVWPGTKMPGKMGNIYRTEYGLKVWRINTKHNIIYVNGSVPGHKNCLVKVKDSKLPAYKDLGKNLPFPTYFPDGDEEELPEDLYDENVCQPGAPSITFA

SEQ ID NO: 51980 - protein, 176 aa, Homo sapiens
  Payload ID: 10351
  Gene Symbol: MRPL3
  Gene Name: mitochondrial ribosomal protein L3
  ENSP ID: ENSP00000422035
MPGWRLLTQVGAQVLGRLGDGLGAALGPGNRTHIWLFVRGLHGKSGTWWDEHLSEENVPFIKQLVSDEDKAQLASKLCPLKDEPWPIHPWEPGSFRVGLIALKLGMMPLWTKDGQKHVVTLLQKATSILEFYRELGLPPKQTVKIFNITDNAAIKPGTPLYAAHFRPGQYVDVTAK

SEQ ID NO: 51981 - protein, 155 aa, Homo sapiens
  Payload ID: 10351
  Gene Symbol: MRPL3
  Gene Name: mitochondrial ribosomal protein L3
  ENSP ID: ENSP00000422419
MMPLWTKDGQKHVVTLLQVQDCHVLKYTSKENCNGKMATLSVGGKTVSRFRKATSILEFYRELGLPPKQTVKIFNITDNAAIKPGTPLYAAHFRPGQYVDVTAKTIGKGFQGVMKRWGFKGQPATHGQTKTHRRPGAVATGDIGRVWPGTKMPGK

SEQ ID NO: 51982 - protein, 28 aa, Homo sapiens
  Payload ID: 10351
  Gene Symbol: MRPL3
  Gene Name: mitochondrial ribosomal protein L3
  ENSP ID: ENSP00000422622
MMPLWTKDGQKHVVTLLQVQDCHVLKYT

SEQ ID NO: 51983 - protein, 363 aa, Homo sapiens
  Payload ID: 10351
  Gene Symbol: MRPL3
  Gene Name: mitochondrial ribosomal protein L3
  ENSP ID: ENSP00000424107
  MOD_RES (1)..(1): Any amino acid
XFFPSQRASAGDRSGGHCENFPTATASTWRWRGDSLKAERQGARKSTHIWLFVRGLHGKSGTWWDEHLSEENVPFIKQLVSDEDKAQLASKLCPLKDEPWPIHPWEPGSFRVGLIALKLGMMPLWTKDGQKHVVTLLQVQDCHVLKYTSKENCNGKMATLSVGGKTVSRFRKATSILEFYRELGLPPKQTVKIFNITDNAAIKPGTPLYAAHFRPGQYVDVTAKTIGKGFQGVMKRWGFKGQPATHGQTKTHRRPGAVATGDIGRVWPGTKMPGKMGNIYRTEYGLKVWRINTKHNIIYVNGSVPGHKNCLVKVKDSKLPAYKDLGKNLPFPTYFPDGDEEELPEDLYDENVCQPGAPSITFA

SEQ ID NO: 51984 - protein, 161 aa, Homo sapiens
  Payload ID: 10352
  Gene Symbol: MRPL30
  Gene Name: mitochondrial ribosomal protein L30
  Uniprot ID: Q8TCC3
  ENSP ID: ENSP00000338057
MAGILRLVVQWPPGRLQTVTKGVESLICTDWIRHKFTRSRIPEKVFQASPEDHEKYGGDPQNPHKLHIVTRIKSTRRRPYWEKDIIKMLGLEKAHTPQVHKNIPSVNAKLKVVKHLIRIKPLKLPQGLPAEENMSNTCLKSTGELVVQWHLKPVEQKAHES

SEQ ID NO: 51985 - protein, 161 aa, Homo sapiens; identical to SEQ ID NO: 51984
  Payload ID: 10352
  Gene Symbol: MRPL30
  Gene Name: mitochondrial ribosomal protein L30
  Uniprot ID: Q8TCC3
  ENSP ID: ENSP00000386752

SEQ ID NO: 51986 - protein, 101 aa, Homo sapiens
  Payload ID: 10352
  Gene Symbol: MRPL30
  Gene Name: mitochondrial ribosomal protein L30
  ENSP ID: ENSP00000386970
MAGILRLVVQWPPGRLQTVTKGVESLICTDWIRHKFTRSRIPEKVFQASPEDHEKYGGDPQNPHKLHIVTRIKSTRRRPYWEKDIIKMLGLEKVCNYFNHL

SEQ ID NO: 51987 - protein, 188 aa, Homo sapiens [sequence omitted]

SEQ ID NO: 51988 - protein, 42 aa, Homo sapiens
  Payload ID: 10353
  Gene Symbol: MRPL32
  Gene Name: mitochondrial ribosomal protein L32
  ENSP ID: ENSP00000391562
  MOD_RES (1)..(1): Any amino acid
XENSSLLDSIFWMAAPKNRRTIEVNRCRRRNPQKLIKVKSSC

SEQ ID NO: 51989 - protein, 107 aa, Homo sapiens
  Payload ID: 10353
  Gene Symbol: MRPL32
  Gene Name: mitochondrial ribosomal protein L32
  ENSP ID: ENSP00000415581
MALAMLVLVVSPWSAARGVLRNYWERLLRKLPQSRPGFPSPPWGPALAVQGPAMFTEPANDTSGSKENSSLLDSIFWMAAPKNRRTIEVNRCRRRNPQKLIKVKVMH

SEQ ID NO: 51990 - protein, 65 aa, Homo sapiens [sequence omitted]

SEQ ID NO: 51991 - protein, 54 aa, Homo sapiens
  Payload ID: 10354
  Gene Symbol: MRPL33
  Gene Name: mitochondrial ribosomal protein L33
  Uniprot ID: O75394
  ENSP ID: ENSP00000368988
MFLSAVFFAKSKSNETKSPLRGKEKNTLPLNGGLKMTLIYKEKTEGGDTDSEIL

SEQ ID NO: 51992 - protein, 69 aa, Homo sapiens
  Payload ID: 10354
  Gene Symbol: MRPL33
  Gene Name: mitochondrial ribosomal protein L33
  ENSP ID: ENSP00000407385
MFLSAVFFAKSKSKLWLWFLEDHRGEMSFSSHHIKGTYDQHDFLLMVLTLVTWLSGDLQVKLKCPQKWP

SEQ ID NO: 51993 - protein, 92 aa, Homo sapiens [sequence omitted]

SEQ ID NO: 51994 - protein, 92 aa, Homo sapiens [sequence omitted]

SEQ ID NO: 51995 - protein, 36 aa, Homo sapiens
  Payload ID: 10355
  Gene Symbol: MRPL34
  Gene Name: mitochondrial ribosomal protein L34
  ENSP ID: ENSP00000471089
MAVLAGSLLGPTSRLAGMSISRATSNARTSTAGSGA

SEQ ID NO: 51996 - protein, 92 aa, Homo sapiens [sequence omitted]

SEQ ID NO: 51997 - protein, 184 aa, Homo sapiens
  Payload ID: 10355
  Gene Symbol: MRPL34
  Gene Name: mitochondrial ribosomal protein L34
  ENSP ID: ENSP00000472266
MPRRPSGYFLSSGGAGSGSGRALGEGSGSQSRNSWSSVLTVSGHSSITMWLPSSMSFRNARSRICRRRRAQGLERLWAPESPAAGTAGPTADMAVLAGSLLGPTSRSAALLGGRWLQPRAWLGFPDAWGLPTPQQARGKARGNEYQPSNIKRKNKHGWVRRLSTPAGVQVILRRMLKGRKSLSH

SEQ ID NO: 51998 - protein, 170 aa, Homo sapiens
  Payload ID: 10356
  Gene Symbol: MRPL35
  Gene Name: mitochondrial ribosomal protein L35
  Uniprot ID: Q9NZE8
  ENSP ID: ENSP00000254644
MAASAFAGAVRAASGILRPLNILASSTYRNCVKNASLISALSTGRFSHIQTPVVSSTPRLTTSERNLTCGHTSVILNRMAPVLPSVLKLPVRSLTYFSARKGKRKTVKAVIDRFLRLHCGLWVRRKAGYKKKLWKKTPARKKRLREFVFCNKTQSKLLDKMTTSFWKRRN

SEQ ID NO: 51999 - protein, 188 aa, Homo sapiens [sequence omitted]

SEQ ID NO: 52000 - protein, 177 aa, Homo sapiens
  Payload ID: 10356
  Gene Symbol: MRPL35
  Gene Name: mitochondrial ribosomal protein L35
  ENSP ID: ENSP00000386255
MAASAFAGAVRAASGILRPLNILASSTYRNCVKNASLISALSTGRFSHIQTPVVSSTPRLTTSERNLTCGHTSVILNRMAPVLPSVLKLPVRSLTYFSARKGKRKTVKAVIDRFLRLHCGLWVRRKAGYKKKLWKKTPARKKRLREFVFCNKTQSKLLDKMTTSFWKRRNWHSPICR

SEQ ID NO: 52001 - protein, 95 aa, Homo sapiens
  Payload ID: 10356
  Gene Symbol: MRPL35
  Gene Name: mitochondrial ribosomal protein L35
  ENSP ID: ENSP00000473925
MAASAFAGAVRAASGILRPLNILASSTYRNCVKNASLISALSTGRFSHIQTPVVSSTPRLTTSERNLTCGHTSVILNRLAIRKNYGKRHLQGRSD

SEQ ID NO: 52002 - protein, 103 aa, Homo sapiens [sequence omitted]

SEQ ID NO: 52003 - protein, 103 aa, Homo sapiens [sequence omitted]

SEQ ID NO: 52004 - protein, 103 aa, Homo sapiens [sequence omitted]

SEQ ID NO: 52005 - protein, 35 aa, Homo sapiens
  Payload ID: 10357
  Gene Symbol: MRPL36
  Gene Name: mitochondrial ribosomal protein L36
  ENSP ID: ENSP00000424366
MANLFIRKMVNPLLYLSRHTVKPRALSTFLFGSIR

SEQ ID NO: 52006 - protein, 103 aa, Homo sapiens [sequence omitted]

SEQ ID NO: 52007 - protein, 292 aa, Homo sapiens
  Payload ID: 10358
  Gene Symbol: MRPL37
  Gene Name: mitochondrial ribosomal protein L37
  ENSP ID: ENSP00000338526
MSGACAPRGSRSLLPWIGCTRSLDWSPSPLRGRCTSCPGWRGRSFRPGTAATRTQGSTARPLFTSIRCTKTRPAISFTTVAAFSRSLLLQVRGSGGARLSTKDPLPTIASREEIEATKNHVLETFYPISPIIDLHECNIYDVKNDTGFQEGYPYPYPHTLYLLDKANLRPHRLQPDQLRAKMILFAFGSALAQARLLYGNDAKVLEQPVVVQSVGTDGRVFHFLVFQLNTTDLDCNEGVKNLAWVDSDQLLYQHFWCLPVIKKRVVVEPVGPVGFKPETFRKFLALYLHGAA

SEQ ID NO: 52008 - protein, 423 aa, Homo sapiens [sequence omitted]

SEQ ID NO: 52009 - protein, 264 aa, Homo sapiens
  Payload ID: 10358
  Gene Symbol: MRPL37
  Gene Name: mitochondrial ribosomal protein L37
  ENSP ID: ENSP00000392216
  MOD_RES (1)..(1): Any amino acid
XSLLLQVRGSGGARLSTKDPLPTIASREEIEATKNHVLETFYPISPIIDLHECNIYDVKNDTGFQEGYPYPYPHTLYLLDKANLRPHRLQPDQLRAKMILFAFGSALAQARLLYGNDAKVLEQPVVVQSVGTDGRVFHFLVFQLNTTDLDCNEGVKNLAWVDSDQLLYQHFWCLPVIKKRVVVTGPCFSKSQMSTSFVLTPSFNAGEEVMQRNLRASASLPPSTGSPASELVKEQEHAAGRVLRRVMLDSETPREELPAADFWK

SEQ ID NO: 52010 - protein, 483 aa, Homo sapiens
  Payload ID: 10358
  Gene Symbol: MRPL37
  Gene Name: mitochondrial ribosomal protein L37
  ENSP ID: ENSP00000473980
MALASGPARRALAGSGQLGLGGFGAPRRGAYEWGVRSTRKSEPPPLDRVYEIPGLEPITFAGKMHFVPWLARPIFPPWDRGYKDPRFYRSPPLHEHPLYKDQACYIFHHRCRLLEGVKQALWLTKTKLIEGLPEKVLSLVDDPRNHIENQDECVLNVISHARLWQTTEEIPKRETYCPVIVDNLIQLCKSQILKHPSLARRICVQNSTFSATWNRESLLLQVRGSGGARLSTKDPLPTIASREEIEATKNHVLETFYPISPIIDLHECNIYDVKNDTGFQEGYPYPYPHTLYLLDKANLRPHRLQPDQLRAKMILFAFGSALAQARLLYGNDAKVLEQPVVVQSVGTDGRVFHFLVFQLNTTDLDCNEGVKNLAWVDSDQLLYQHFWCLPVIKKRVVVKNKRHSSGPKCVCKTRNGKWLLDGPQIFKVRWIPSLPTHLPPRPSRLHKNTEFAGPGKEGRRLKHKTSCYAPGTKTVPKKSPCIL

SEQ ID NO: 52011 - protein, 380 aa, Homo sapiens [sequence omitted]

SEQ ID NO: 52012 - protein, 338 aa, Homo sapiens [sequence omitted]

SEQ ID NO: 52013 - protein, 353 aa, Homo sapiens
  Payload ID: 10360
  Gene Symbol: MRPL39
  Gene Name: mitochondrial ribosomal protein L39
  Uniprot ID: Q9NYK5
  ENSP ID: ENSP00000305682
MEALAMGSRALRLWLVAPGGGIKWRFIATSSASQLSPTELTEMRNDLFNKEKARQLSLTPRTEKIEVKHVGKTDPGTVFVMNKNISTPYSCAMHLSEWYCRKSILALVDGQPWDMYKPLTKSCEIKFLTFKDCDPGEVNKAYWRSCAMMMGCVIERAFKDEYMVNLVRAPEVPVISGAFCYDVVLDSKLDEWMPTKENLRSFTKDAHALIYKDLPFETLEVEAKVALEIFQHSKYKVDFIEEKASQNPERIVKLHRIGDFIDVSEGPLIPRTSICFQYEVSAVHNLQPTQPSLIRRFQGVSLPVHLRAHFTIWDKLLERSRKMTPFPILLLFTTQSFFTTSPESYLLHGTVSE

SEQ ID NO: 52014 - protein, 297 aa, Homo sapiens
  Payload ID: 10360
  Gene Symbol: MRPL39
  Gene Name: mitochondrial ribosomal protein L39
  ENSP ID: ENSP00000404426
MEALAMGSRALRLWLVAPGGGIKWRFIATSSASQLSPTELTEMRNDLFNKEKARQLSLTPRTEKIEVKHVGKTDPGTVFVMNKNISTPYSCAMHLSEWYCRKSILALVDGQPWDMYKPLTKSCEIKFLTFKDCDPGEVNKAYWRSCAMMMGCVIERAFKDEYMVNLVRAPEVPVLDSKLDEWMPTKENLRSFTKDAHALIYKDLPFETLEVEAKVALEIFQHSKYKVDFIEEKASQNPERIVKLHRIGDFIDVSEGPLIPRTSICFQYEVSAVHNLQPTQPSLIRRFQGVSLPVHLR

SEQ ID NO: 52015 - protein, 311 aa, Homo sapiens [sequence omitted]

SEQ ID NO: 52016 - protein, 311 aa, Homo sapiens [sequence omitted]

SEQ ID NO: 52017 - protein, 357 aa, Homo sapiens
  Payload ID: 10361
  Gene Symbol: MRPL4
  Gene Name: mitochondrial ribosomal protein L4
  ENSP ID: ENSP00000377334
MLQFVRAGARAWLRPTGSQGLSSLAEEAARATENPEQVASEGLPEPVLRKVELPVPTHRRPVQAWVESLRGFEQERVGLADLHPDVFATAPRLDILHQVAMWQKNFKRISYAKTKTRAEVRGGGRKPWPQKGTGRARHGSIRSPLWRGGGVAHGPRGPTSYYYMLPMKVRALGLKVALTVKLAQDDLHIMDSLELPTGDPQYLTELAHYRRWGDSVLLVDLTHEEMPQSIVEATSRLKTFNLIPAVATRWRHEPKSSPVPQPTPLAGFPTSLRMKAQVIRVARQALHDVPRHLPALPSFALGLPHQNGSQESQPGTGPSLALGQQVMSWEQLLGQRLTGNKRPGRVWPRAAGLTKSH

SEQ ID NO: 52018 - protein, 119 aa, Homo sapiens
  Payload ID: 10361
  Gene Symbol: MRPL4
  Gene Name: mitochondrial ribosomal protein L4
  ENSP ID: ENSP00000465050
QKNFKRISYAKTKTRAEVRGGGRKPWPQKGTGRARHGSIRSPLWRGGGVAHGPRGPTSYYYMLPMKVRALGLKVALTVKLAQDDLHIMDSLELPTGDPQYLTELAHYRRWGDSVLLVDL

SEQ ID NO: 52019 - protein, 263 aa, Homo sapiens
  Payload ID: 10361
  Gene Symbol: MRPL4
  Gene Name: mitochondrial ribosomal protein L4
  Uniprot ID: Q9BYD3
  ENSP ID: ENSP00000465143
MLQFVRAGARAWLRPTGSQGLSSLAEEAARATENPEQVASEGLPEPVLRKVELPVPTHRRPVQAWVESLRGFEQERVGLADLHPDVFATAPRLDILHQVAMWQKNFKRISYAKTKTRAEVRGGGRKPWPQKGTGRARHGSIRSPLWRGGGVAHGPRGPTSYYYMLPMKVRALGLKVALTVKLAQDDLHIMDSLELPTGDPQYLTELAHYRRWGDSVLLVDLTHEEMPQSIVEATSRLKTFNLIPAVGEQRAQAPRVRMCRLRC

SEQ ID NO: 52020 - protein, 127 aa, Homo sapiens
  Payload ID: 10361
  Gene Symbol: MRPL4
  Gene Name: mitochondrial ribosomal protein L4
  ENSP ID: ENSP00000465635
MLQFVRAGARAWLRPTGSQGLSSLAEEAARATENPEQVASEGLPEPVLRKVELPVPTHRRPVQAWVESLRGFEQERVGLADLHPDVFATAPRLDILHQVAMWQKNFKRIEVLPMAPGAPQVTTTCCP

SEQ ID NO: 52021 - protein, 163 aa, Homo sapiens
  Payload ID: 10361
  Gene Symbol: MRPL4
  Gene Name: mitochondrial ribosomal protein L4
  ENSP ID: ENSP00000466050
MLQFVRAGARAWLRPTGSQGSSLTFAQPLQGLSSLAEEAARATENPEQVASEGLPEPVLRKVELPVPTHRRPVQAWVESLRGFEQERVGLADLHPDVFATAPRLDILHQVAMWQKNFKRISYAKTKTRAEVRGGGRKPWPQKGTGRARHGSIRSPLWRGGGVA

SEQ ID NO: 52022 - protein, 220 aa, Homo sapiens
  Payload ID: 10361
  Gene Symbol: MRPL4
  Gene Name: mitochondrial ribosomal protein L4
  ENSP ID: ENSP00000466169
MKFGGVQGSSLTFAQPLQGLSSLAEEAARATENPEQVASEGLPEPVLRKVELPVPTHRRPVQAWVESLRGFEQERVGLADLHPDVFATAPRLDILHQVAMWQKNFKRISYAKTKTRAEVRGGGRKPWPQKGTGRARHGSIRSPLWRGGGVAHGPRGPTSYYYMLPMKVRALGLKVALTVKLAQDDLHIMDSLELPTGDPQYLTELAHYRRWGDSVLLVDL

SEQ ID NO: 52023 - protein, 300 aa, Homo sapiens
  Payload ID: 10361
  Gene Symbol: MRPL4
  Gene Name: mitochondrial ribosomal protein L4
  ENSP ID: ENSP00000468569
MLQFVRAGARAWLRPTGSQGLSSLAEEAARATENPEQVASEGLPEPVLRKVELPVPTHRRPVQAWVESLRGFEQERVGLADLHPDVFATAPRLDILHQVAMWQKNFKRISYAKTKTRAEVRGGGRKPWPQKGTGRARHGSIRSPLWRGGGVAHGPRGPTSYYYMLPMKVRALGLKVALTVKLAQDDLHIMDSLELPTGDPQYLTELAHYRRWGDSVLLVDLTHEEMPQSIVEATSRLKTFNLIPAVGLNVHSMLKHQTLVLTLPTVAFLEDKLLWQDSRYRPLYPFSLPYSDFPRPLPHA

SEQ ID NO: 52024 - protein, 206 aa, Homo sapiens [sequence omitted]

SEQ ID NO: 52025 - protein, 137 aa, Homo sapiens [sequence omitted]

SEQ ID NO: 52026 - protein, 51 aa, Homo sapiens
  Payload ID: 10364
  Gene Symbol: MRPL42
  Gene Name: mitochondrial ribosomal protein L42
  ENSP ID: ENSP00000351506
MAVAAVKWVMSKRTILKHLFPVQNSGVHVQVCYVDVLHILRFGLQLNPSPK

SEQ ID NO: 52027 - protein, 139 aa, Homo sapiens
  Payload ID: 10364
  Gene Symbol: MRPL42
  Gene Name: mitochondrial ribosomal protein L42
  ENSP ID: ENSP00000376836
MAVAAVKWVMSKRTILKHLFPVQNGALYCVCHKSTYSPLPDDYNCNVELALTSDGRTIVCYHPSVDIPYEHTKPIPRPDPVHNNEETHDQVLKTRLEEKVEHLEEGPMIEQLSKMFFTTKHRWYPHGRCRKNLNPPKDR

SEQ ID NO: 52028 - protein, 142 aa, Homo sapiens
  Payload ID: 10364
  Gene Symbol: MRPL42
  Gene Name: mitochondrial ribosomal protein L42
  Uniprot ID: Q9Y6G3
  ENSP ID: ENSP00000447547
MAVAAVKWVMSKRTILKHLFPVQNGALYCVCHKSTYSPLPDDYNCNVELALTSDGRTIVCYHPSVDIPYEHTKPIPRPDPVHNNEETHDQVLKTRLEEKVEHLEEGPMIEQLSKMFFTTKHRWYPHGRYHRCRKNLNPPKDR

SEQ ID NO: 52029 - protein, 142 aa, Homo sapiens; identical to SEQ ID NO: 52028
  Payload ID: 10364
  Gene Symbol: MRPL42
  Gene Name: mitochondrial ribosomal protein L42
  Uniprot ID: Q9Y6G3
  ENSP ID: ENSP00000449392

SEQ ID NO: 52030 - protein, 142 aa, Homo sapiens; identical to SEQ ID NO: 52028
  Payload ID: 10364
  Gene Symbol: MRPL42
  Gene Name: mitochondrial ribosomal protein L42
  Uniprot ID: Q9Y6G3
  ENSP ID: ENSP00000449884

SEQ ID NO: 52031 - protein, 53 aa, Homo sapiens
  Payload ID: 10364
  Gene Symbol: MRPL42
  Gene Name: mitochondrial ribosomal protein L42
  ENSP ID: ENSP00000449886
MAVAAVKWVMSKRTILKHLFPVQNSGVHVQMELYIVFVINLRILLYQMTIIAT

SEQ ID NO: 52032 - protein, 155 aa, Homo sapiens
  Payload ID: 10364
  Gene Symbol: MRPL42
  Gene Name: mitochondrial ribosomal protein L42
  ENSP ID: ENSP00000473798
MAVAAVKWVMSKRTILKHLFPVQNGALYCVCHKSTYSPLPDDYNCNVELALTSDGRTIVCYHPSVDIPYEHTKPIPRPDPVHNNEETHDQVLKTRLEEKVEHLEEGPMIEQLSKMFFTTKHRWYPHGRGKVSLTVLRRLILNSWTQVILLPQLGL

SEQ ID NO: 52033 - protein, 128 aa, Homo sapiens
  Payload ID: 10364
  Gene Symbol: MRPL42
  Gene Name: mitochondrial ribosomal protein L42
  ENSP ID: ENSP00000473958
MAVAAVKWVMSKRTILKHLFPVQNGALYCVCHKSTYSPLPDDYNCNVELALTSDGRTIVCYHPSVDIPYEHTKPIPRPDPVHNNEETHDQVLKTRLEEKVEHLEEGPMIEQLSKMFFTTKHRWYPHGR

SEQ ID NO: 52034 - protein, 202 aa, Homo sapiens
  Payload ID: 10365
  Gene Symbol: MRPL43
  Gene Name: mitochondrial ribosomal protein L43
  Uniprot ID: Q8N983
  ENSP ID: ENSP00000299179
MTARGTPSRFLASVLHNGLGRYVQQLQRLSFSVSRDGASSRGAREFVEREVIDFARRNPGVVIYVNSRPCCVPRVVAEYLNGAVREESIHCKSVEEISTLVQKLADQSGLDVIRIRKPFHTDNPSIQGQWHPFTNKPTTFRGLRPREVQDPAPAQDTGLRLSAVAPQILLPGWPDPISVQSSDLPWGNTHYRPEPLSSTTWL

SEQ ID NO: 52035 - protein, 215 aa, Homo sapiens
  Payload ID: 10365
  Gene Symbol: MRPL43
  Gene Name: mitochondrial ribosomal protein L43
  Uniprot ID: Q8N983
  ENSP ID: ENSP00000315364
MTARGTPSRFLASVLHNGLGRYVQQLQRLSFSVSRDGASSRGAREFVEREVIDFARRNPGVVIYVNSRPCCVPRVVAEYLNGAVREESIHCKSVEEISTLVQKLADQSGLDVIRIRKPFHTDNPSIQGQWHPFTNKPTTFRGLRPREVQDPAPAQDTGLRLSAVAPQILLPGWPDPPDLPTVDPISSSLTSAPAPMLSAVSCLPIVPALTTVCSA

SEQ ID NO: 52036 - protein, 159 aa, Homo sapiens
  Payload ID: 10365
  Gene Symbol: MRPL43
  Gene Name: mitochondrial ribosomal protein L43
  Uniprot ID: Q8N983
  ENSP ID: ENSP00000315948
MTARGTPSRFLASVLHNGLGRYVQQLQRLSFSVSRDGASSRGAREFVEREVIDFARRNPGVVIYVNSRPCCVPRVVAEYLNGAVREESIHCKSVEEISTLVQKLADQSGLDVIRIRKPFHTDNPSIQGQWHPFTNKPTTFRGLRPREVQDPAPAQVQAQ

SEQ ID NO: 52037 - protein, 235 aa, Homo sapiens
  Payload ID: 10365
  Gene Symbol: MRPL43
  Gene Name: mitochondrial ribosomal protein L43
  Uniprot ID: Q8N983
  ENSP ID: ENSP00000339844
MTARGTPSRFLASVLHNGLGRYVQQLQRLSFSVSRDGASSRGAREFVEREVIDFARRNPGVVIYVNSRPCCVPRVVAEYLNGAVREESIHCKSVEEISTLVQKLADQSGLDVIRIRKPFHTDNPSIQGQWHPFTNKPTTFRGLRPREVQDPAPAQDAAEFLGEGAGPCWYSIVALPQKHIAIAIHPPQPAGQCHQAIGHWPETVCSCTADPPARLARPNISSVIRSSLGKYPLPS

SEQ ID NO: 52038 - protein, 164 aa, Homo sapiens
  Payload ID: 10365
  Gene Symbol: MRPL43
  Gene Name: mitochondrial ribosomal protein L43
  Uniprot ID: Q8N983
  ENSP ID: ENSP00000359254
MTARGTPSRFLASVLHNGLGRYVQQLQRLSFSVSRDGASSRGAREFVEREVIDFARRNPGVVIYVNSRPCCVPRVVAEYLNGAVREESIHCKSVEEISTLVQKLADQSGLDVIRIRKPFHTDNPSIQGQWHPFTNKPTTFRGLRPREVQDPAPAQCLLLGAVTL

SEQ ID NO: 52039 - protein, 159 aa, Homo sapiens; identical to SEQ ID NO: 52036
  Payload ID: 10365
  Gene Symbol: MRPL43
  Gene Name: mitochondrial ribosomal protein L43
  Uniprot ID: Q8N983
  ENSP ID: ENSP00000359256

SEQ ID NO: 52040 - protein, 184 aa, Homo sapiens
  Payload ID: 10365
  Gene Symbol: MRPL43
  Gene Name: mitochondrial ribosomal protein L43
  ENSP ID: ENSP00000359261
MTARGTPSRFLASVLHNGLGRYVQQLQRLSFSVSRDGASSRGAREFVEREVIDFARRNPGVVIYVNSRPCCVPRVVAEYLNGAVREESIHCKSVEEISTLVQKLADQSGLDVIRIRKPFHTDNPSIQGQWHPFTNKPTTFRGLRPREVQDPAPAQDTGLRLSAVAPQILLPGWPDPTRATRATR

SEQ ID NO: 52041 - protein, 261 aa, Homo sapiens
  Payload ID: 10365
  Gene Symbol: MRPL43
  Gene Name: mitochondrial ribosomal protein L43
  Uniprot ID: Q8N983
  ENSP ID: ENSP00000359262
MTARGTPSRFLASVLHNGLGRYVQQLQRLSFSVSRDGASSRGAREFVEREVIDFARRNPGVVIYVNSRPCCVPRVVAEYLNGAVREESIHCKSVEEISTLVQKLADQSGLDVIRIRKPFHTDNPSIQGQWHPFTNKPTTFRGLRPREVQDPAPAQDAAEFLGEGAGPCWYSIVALPQKHIAIAIHPPQPAGQCHQAIGHWPETVCSCTADPPARLARPTRPPHSGSYLILIDLCSSPYAVRSFLPPDCPCTDHCVLSVKAA

SEQ ID NO: 52042 - protein, 169 aa, Homo sapiens
  Payload ID: 10365
  Gene Symbol: MRPL43
  Gene Name: mitochondrial ribosomal protein L43
  ENSP ID: ENSP00000408806
  MOD_RES (1)..(1): Any amino acid
XGTPSRFLASVLHNGLGRYVQQLQRLSFSVSRDGASSRGAREFVEREVIDFARRNPGVVIYVNSRPCCVPRVVAEYLNGAVREESIHCKSVEEISTLVQKLADQSGLDVIRIRKPFHTDNPSIQGQWHPFTNKPTTFRGLRPREVQDPAPAQDAAEFLGEGAGPCWTLA

SEQ ID NO: 52043 - protein, 148 aa, Homo sapiens
  Payload ID: 10365
  Gene Symbol: MRPL43
  Gene Name: mitochondrial ribosomal protein L43
  ENSP ID: ENSP00000430369
  MOD_RES (1)..(1): Any amino acid
XEFVEREVIDFARRNPGVVIYVNSRPCCVPRVVAEYLNGAVREESIHCKSVEEISTLVQKLADQSGLDVIRIRKPFHTDNPSIQGQWHPFTNKPTTFRGLRPREVQDPAPAQDTGLRLSAVAPQILLPGWPDPLEDKLSFDPAGRRET

SEQ ID NO: 52044 - protein, 44 aa, Homo sapiens
  Payload ID: 10365
  Gene Symbol: MRPL43
  Gene Name: mitochondrial ribosomal protein L43
  ENSP ID: ENSP00000471004
MTARGTPSRFLASVLHNGLGRYVQQLQRLSFSVSRDGASSRGAS

SEQ ID NO: 52045 - protein, 332 aa, Homo sapiens
  Payload ID: 10366
  Gene Symbol: MRPL44
  Gene Name: mitochondrial ribosomal protein L44
  Uniprot ID: Q9H9J2
  ENSP ID: ENSP00000258383
MASGLVRLLQQGHRCLLAPVAPKLVPPVRGVKKGFRAAFRFQKELERQRLLRCPPPPVRRSEKPNWDYHAEIQAFGHRLQENFSLDLLKTAFVNSCYIKSEEAKRQQLGIEKEAVLLNLKSNQELSEQGTSFSQTCLTQFLEDEYPDMPTEGIKNLVDFLTGEEVVCHVARNLAVEQLTLSEEFPVPPAVLQQTFFAVIGALLQSSGPERTALFIRDFLITQMTGKELFEMWKIINPMGLLVEELKKRNVSAPESRLTRQSGGTTALPLYFVGLYCDKKLIAEGPGETVLVAEEEAARVALRKLYGFTENRRPWNYSKPKETLRAEKSITAS

SEQ ID NO: 52046 - protein, 256 aa, Homo sapiens
  Payload ID: 10367
  Gene Symbol: MRPL45
  Gene Name: mitochondrial ribosomal protein L45
  ENSP ID: ENSP00000478397
MAAPIPQGFSCLSRFLGWWSRQPVLVTQSAAIVPVRTKKRFTPPIYQPKFKTEKEFMQHARKAGLVIPPEKSDRSIHLACTAGIFDAYVPPEGDARISSLSKEGLIERTERMKKTMASQVSIRRIKDYDANFKIKDFPEKAKDIFIEAHLCLNNSDHDRLHTLVTEHCFPTLAIYDRFGRLMYGQEDVPKDVLEYVVFEKQLTNPYGSWRMHTKIVPPWAPPKQPILKTVMIPGPQLKPEEEYEEAQGEAQKPQLA

SEQ ID NO: 52047 - protein, 256 aa, Homo sapiens
  Payload ID: 10367
  Gene Symbol: MRPL45
  Gene Name: mitochondrial ribosomal protein L45
  ENSP ID: ENSP00000479891
MAAPIPQGFSCLSRFLGWWFRQPVLVTQSAAIVPVRTKKRFTPPIYQPKFKTEKEFMQHARKAGLVIPPEKSDRSIHLACTAGIFDAYVPPEGDARISSLSKEGLIERTERMKKTMASQVSIRRIKDYDANFKIKDFPEKAKDIFIEAHLCLNNSDHDRLHTLVTEHCFPTLAIYDRFGRLMYGQEDVPKDVLEYVVFEKQLTNPYGSWRMHTKIVPPWAPPKQPILKTVMIPGPQLKPEEEYEEAQGEAQKPQLA

SEQ ID NO: 52048 - protein, 306 aa, Homo sapiens [sequence omitted]

SEQ ID NO: 52049 - protein, 306 aa, Homo sapiens
  Payload ID: 10367
  Gene Symbol: MRPL45
  Gene Name: mitochondrial ribosomal protein L45
  ENSP ID: ENSP00000484903
MAAPIPQGFSCLSRFLGWWSRQPVLVTQSAAIVPVRTKKRFTPPIYQPKFKTEKEFMQHARKAGLVIPPEKSDRSIHLACTAGIFDAYVPPEGDARISSLSKEGLIERTERMKKTMASQVSIRRIKDYDANFKIKDFPEKAKDIFIEAHLCLNNSDHDRLHTLVTEHCFPDMTWDIKYKTVRWSFVESLEPSHVVQVRCSSMMNQGNVYGQITVRMHTRQTLAIYDRFGRLMYGQEDVPKDVLEYVVFEKQLTNPYGSWRMHTKIVPPWAPPKQPILKTVMIPGPQLKPEEEYEEAQGEAQKPQLA

SEQ ID NO: 52050 - protein, 279 aa, Homo sapiens [sequence omitted]

SEQ ID NO: 52051 - protein, 86 aa, Homo sapiens
  Payload ID: 10368
  Gene Symbol: MRPL46
  Gene Name: mitochondrial ribosomal protein L46
  ENSP ID: ENSP00000453881
MAAPVRRTLLGVAGGWRRFERLWAGSLSSRSLALAAAPSSNGSPWRLLGALCLQRPPVVSKPLTPLQEEMASLLQQKLMKRMTEHP

SEQ ID NO: 52052 - protein, 45 aa, Homo sapiens
  Payload ID: 10368
  Gene Symbol: MRPL46
  Gene Name: mitochondrial ribosomal protein L46
  ENSP ID: ENSP00000477583
  MOD_RES (1)..(1): Any amino acid
XVREKFGDQDVWILPQAEWQPGETLRGTAERTLATLSGDTHFKGG

SEQ ID NO: 52053 - protein, 169 aa, Homo sapiens
  Payload ID: 10368
  Gene Symbol: MRPL46
  Gene Name: mitochondrial ribosomal protein L46
  ENSP ID: ENSP00000477676
MAAPVRRTLLGVAGGWRRFERLWAGSLSSRSLALAAAPSSNGSPWRLLGALCLQRPPVVSKPLTPLQEEMASLLQQIEIERSLYSDHELRALDENQRLAKKKADLHDEEDEQDILLAQDLEDMWEQKFLQFKLGARITGCDPFRPARRKGKGVFGFPNKRQLLGPCFVF

SEQ ID NO: 52054 - protein, 230 aa, Homo sapiens
  Payload ID: 10369
  Gene Symbol: MRPL47
  Gene Name: mitochondrial ribosomal protein L47
  Uniprot ID: Q9HD33
  ENSP ID: ENSP00000259038
MAAAGLALLCRRVSSALKSSRSLITPQVPACTGLLHTTLSRKGLEEFFDDPKNWGQEKVKSGAAWTCQQLRNKSNEDLHKLWYVLLKERNMLLTLEQEAKRQRLPMPSPERLDKVVDSMDALDKVVQEREDALRLLQTGQERARPGAWRRDIFGRIIWHKFKQWVIPWHLNKRYNRKRFFALPYVDHFLRLEREKRARIKARKENLERKKAKILLKKFPHLAEAQKSSLV

SEQ ID NO: 52055 - protein, 140 aa, Homo sapiens
  Payload ID: 10369
  Gene Symbol: MRPL47
  Gene Name: mitochondrial ribosomal protein L47
  Uniprot ID: Q9HD33
  ENSP ID: ENSP00000376427
MLLTLEQEAKRQRLPMPSPERLDKVVDSMDALDKVVQEREDALRLLQTGQERARPGAWRRDIFGRIIWHKFKQWVIPWHLNKRYNRKRFFALPYVDHFLRLEREKRARIKARKENLERKKAKILLKKFPHLAEAQKSSLV

SEQ ID NO: 52056 - protein, 250 aa, Homo sapiens
  Payload ID: 10369
  Gene Symbol: MRPL47
  Gene Name: mitochondrial ribosomal protein L47
  Uniprot ID: Q9HD33
  ENSP ID: ENSP00000417602
MAAAGLALLCRRVSSALKSSRSLITPQVPACTGFFLSLLPKSTPNVTSFHQYRLLHTTLSRKGLEEFFDDPKNWGQEKVKSGAAWTCQQLRNKSNEDLHKLWYVLLKERNMLLTLEQEAKRQRLPMPSPERLDKVVDSMDALDKVVQEREDALRLLQTGQERARPGAWRRDIFGRIIWHKFKQWVIPWHLNKRYNRKRFFALPYVDHFLRLEREKRARIKARKENLERKKAKILLKKFPHLAEAQKSSLV

SEQ ID NO: 52057 - protein, 212 aa, Homo sapiens [sequence omitted]

SEQ ID NO: 52058 - protein, 113 aa, Homo sapiens
  Payload ID: 10370
  Gene Symbol: MRPL48
  Gene Name: mitochondrial ribosomal protein L48
  ENSP ID: ENSP00000321539
MTLAESYAQYVHNLCNSLSIKVEESYAMPTKTIEVLQLQDQGSKMLLDSVLTTHERVVQISGLSATFAEIFLEIIQSSLPEGVRLSVKEHTEEDFKGRFKARPELEELLAKLK

SEQ ID NO: 52059 - protein, 113 aa, Homo sapiens; identical to SEQ ID NO: 52058
  Payload ID: 10370
  Gene Symbol: MRPL48
  Gene Name: mitochondrial ribosomal protein L48
  ENSP ID: ENSP00000381497

SEQ ID NO: 52060 - protein, 113 aa, Homo sapiens; identical to SEQ ID NO: 52058
  Payload ID: 10370
  Gene Symbol: MRPL48
  Gene Name: mitochondrial ribosomal protein L48
  ENSP ID: ENSP00000399076

SEQ ID NO: 52061 - protein, 26 aa, Homo sapiens
  Payload ID: 10370
  Gene Symbol: MRPL48
  Gene Name: mitochondrial ribosomal protein L48
  ENSP ID: ENSP00000439573
MTLAESYAQYVHNLCNSLSIKVEERY

SEQ ID NO: 52062 - protein, 10 aa, Homo sapiens
  Payload ID: 10370
  Gene Symbol: MRPL48
  Gene Name: mitochondrial ribosomal protein L48
  ENSP ID: ENSP00000439632
MTLAESYAQY

SEQ ID NO: 52063 - protein, 52 aa, Homo sapiens
  Payload ID: 10370
  Gene Symbol: MRPL48
  Gene Name: mitochondrial ribosomal protein L48
  ENSP ID: ENSP00000441925
MSGTLEKVLCLRNNTIFKQAFSLLRFRTSGEKPIYSVERDGLACGPGLSTVA

SEQ ID NO: 52064 - protein, 50 aa, Homo sapiens
  Payload ID: 10370
  Gene Symbol: MRPL48
  Gene Name: mitochondrial ribosomal protein L48
  ENSP ID: ENSP00000442146
MSGTLEKVLCLRNNTIFKQAFSLLRWNSTKYQSALQDKAHPRHWKVQALN

SEQ ID NO: 52065 - protein, 50 aa, Homo sapiens
  Payload ID: 10370
  Gene Symbol: MRPL48
  Gene Name: mitochondrial ribosomal protein L48
  ENSP ID: ENSP00000442878
MSGTLEKVLCLRNNTIFKQAFSLLRFRTSGEKPIYSVAQEEEGKSGSESH

SEQ ID NO: 52066 - protein, 121 aa, Homo sapiens
  Payload ID: 10370
  Gene Symbol: MRPL48
  Gene Name: mitochondrial ribosomal protein L48
  ENSP ID: ENSP00000443685
MSGTLEKVLCLRNNTIFKQAFSLLRFRTSGEKPIYSVGGILLSISRPYKTKPTHGIGKYKHLIKAEEISGLSATFAEIFLEIIQSSLPEGVRLSVKEHTEEDFKGRFKARPELEELLAKLK

SEQ ID NO: 52067 - protein, 50 aa, Homo sapiens; identical to SEQ ID NO: 52064
  Payload ID: 10370
  Gene Symbol: MRPL48
  Gene Name: mitochondrial ribosomal protein L48
  ENSP ID: ENSP00000444441

SEQ ID NO: 52068 - protein, 41 aa, Homo sapiens
  Payload ID: 10370
  Gene Symbol: MRPL48
  Gene Name: mitochondrial ribosomal protein L48
  ENSP ID: ENSP00000445111
MSGTLEKVLCLRNNTIFKQAFSLLRFRTSGEKPIYSVDGTV

SEQ ID NO: 52069 - protein, 13 aa, Homo sapiens
  Payload ID: 10370
  Gene Symbol: MRPL48
  Gene Name: mitochondrial ribosomal protein L48
  ENSP ID: ENSP00000446144
MTLAESYAQYVHN

SEQ ID NO: 52070 - protein, 166 aa, Homo sapiens
  Payload ID: 10371
  Gene Symbol: MRPL49
  Gene Name: mitochondrial ribosomal protein L49
  Uniprot ID: Q13405
  ENSP ID: ENSP00000279242
MAATMFRATLRGWRTGVQRGCGLRLLSQTQGPPDYPRFVESVDEYQFVERLLPATRIPDPPKHEHYPTPSGWQPPRDPPPNLPYFVRRSRMHNIPVYKDITHGNRQMTVIRKVEGDIWALQKDVEDFLSPLLGKTPVTQVNEVTGTLRIKGYFDQELKAWLLEKGF

SEQ ID NO: 52071 - protein, 127 aa, Homo sapiens
  Payload ID: 10371
  Gene Symbol: MRPL49
  Gene Name: mitochondrial ribosomal protein L49
  ENSP ID: ENSP00000434052
  MOD_RES (1)..(1): Any amino acid
XTMFRATLRGWRTGVQRGCGLRLLVRALSEELRASRGYPPPNLPYFVRRSRMHNIPVYKDITHGNRQMTVIRKVEGDIWALQKDVEDFLSPLLGKTPVTQVNEVTGTLRIKGYFDQELKAWLLEKGF

SEQ ID NO: 52072 - protein, 166 aa, Homo sapiens; identical to SEQ ID NO: 52070
  Payload ID: 10371
  Gene Symbol: MRPL49
  Gene Name: mitochondrial ribosomal protein L49
  Uniprot ID: Q13405
  ENSP ID: ENSP00000434190

SEQ ID NO: 52073 - protein, 56 aa, Homo sapiens
  Payload ID: 10371
  Gene Symbol: MRPL49
  Gene Name: mitochondrial ribosomal protein L49
  ENSP ID: ENSP00000434222
MAATMFRATLRGWRTGVQRGCGLRLLTPHPTCLTLYDALGCTTSPSTRTSRMATGR

SEQ ID NO: 52074 - protein, 99 aa, Homo sapiens
  Payload ID: 10371
  Gene Symbol: MRPL49
  Gene Name: mitochondrial ribosomal protein L49
  ENSP ID: ENSP00000436740
MAATMFRATLRGWRTGVQRGCGLRLLSQTQGPPDYPRFVESVDEYQFVERLLPATRIPDPPKHEHYPTPSGWQPPRDPTLPPNWLRQLSVPDSPTWSLP

SEQ ID NO: 52075 - protein, 140 aa, Homo sapiens
  Payload ID: 10371
  Gene Symbol: MRPL49
  Gene Name: mitochondrial ribosomal protein L49
  ENSP ID: ENSP00000437177
MAATMFRATLRGWRTGVQRGCGLRLLSQTQGPPDYPRFVESVDEYQFVERLLPATRIPDPPKHEHYPTPSGWQPPRDPPPNLPYFVRRSRMHNIPVYKDITHGNRQMTVIRKVEGDIWVSGWVGLGLGLTLSGLKGQESF

SEQ ID NO: 52076 - protein, 158 aa, Homo sapiens
  Payload ID: 10372
  Gene Symbol: MRPL50
  Gene Name: mitochondrial ribosomal protein L50
  Uniprot ID: Q8N5N7
  ENSP ID: ENSP00000363999
MAARSVSGITRRVFMWTVSGTPCREFWSRFRKEKEPVVVETVEEKKEPILVCPPLRSRAYTPPEDLQSRLESYVKEVFGSSLPSNWQDISLEDSRLKFNLLAHLADDLGHVVPNSRLHQMCRVRDVLDFYNVPIQDRSKFDELSASNLPPNLKITWSY

SEQ ID NO: 52077 - protein, 128 aa, Homo sapiens
  Payload ID: 10373
  Gene Symbol: MRPL51
  Gene Name: mitochondrial ribosomal protein L51
  Uniprot ID: Q4U2R6
  ENSP ID: ENSP00000229238
MAGNLLSGAGRRLWDWVPLACRSFSLGVPRLIGIRLTLPPPKVVDRWNEKRAMFGVYDNIGILGNFEKHPKELIRGPIWLRGWKGNELQRCIRKRKMVGSRMFADDLHNLNKRIRYLYKHFNRHGKFR

SEQ ID NO: 52078 - protein, 32 aa, Homo sapiens
  Payload ID: 10373
  Gene Symbol: MRPL51
  Gene Name: mitochondrial ribosomal protein L51
  ENSP ID: ENSP00000471687
MVGSRMFADDLHNLNKRIRYLYKHFNRHGKFR

SEQ ID NO: 52079 - protein, 76 aa, Homo sapiens
  Payload ID: 10373
  Gene Symbol: MRPL51
  Gene Name: mitochondrial ribosomal protein L51
  ENSP ID: ENSP00000477598
MFGVYDNIGILGNFEKHPKELIRGPIWLRGWKGNELQRCIRKRKMVGSRMFADDLHNLNKRIRYLYKHFNRHGKFR

SEQ ID NO: 52080 - protein, 76 aa, Homo sapiens; identical to SEQ ID NO: 52079
  Payload ID: 10373
  Gene Symbol: MRPL51
  Gene Name: mitochondrial ribosomal protein L51
  ENSP ID: ENSP00000478132

SEQ ID NO: 52081 - protein, 73 aa, Homo sapiens
  Payload ID: 10373
  Gene Symbol: MRPL51
  Gene Name: mitochondrial ribosomal protein L51
  ENSP ID: ENSP00000478326
MFGVYDNIGILGNFEKHPKELIRGPIWLRGWKGNELQRCIRKRKMVGSRMFADDLHNLNKRIRYLYKHFNRHG

SEQ ID NO: 52082 - protein, 76 aa, Homo sapiens; identical to SEQ ID NO: 52079
  Payload ID: 10373
  Gene Symbol: MRPL51
  Gene Name: mitochondrial ribosomal protein L51
  ENSP ID: ENSP00000480329

SEQ ID NO: 52083 - protein, 76 aa, Homo sapiens; identical to SEQ ID NO: 52079
  Payload ID: 10373
  Gene Symbol: MRPL51
  Gene Name: mitochondrial ribosomal protein L51
  ENSP ID: ENSP00000482353

SEQ ID NO: 52084 - protein, 52 aa, Homo sapiens
  Payload ID: 10374
  Gene Symbol: MRPL52
  Gene Name: mitochondrial ribosomal protein L52
  ENSP ID: ENSP00000310762
MVKIFSTCYLLDELYCCHRKWTLDYKHGSSGSRSCRKNKGSRKMLLNPKGLH

SEQ ID NO: 52085 - protein, 123 aa, Homo sapiens
  Payload ID: 10374
  Gene Symbol: MRPL52
  Gene Name: mitochondrial ribosomal protein L52
  Uniprot ID: Q86TS9
  ENSP ID: ENSP00000347277
MAALGTVLFTGVRRLHCSVAAWAGGQWRLQQGLAANPSGYGPLTELPDWSYADGRPAPPMKGQLRRKAERETFARRVVLLSQEMDAGLQAWQLRQQKLQEEQRKQENALKPKGASLKSPLPSQ

SEQ ID NO: 52086 - protein, 122 aa, Homo sapiens
  Payload ID: 10374
  Gene Symbol: MRPL52
  Gene Name: mitochondrial ribosomal protein L52
  Uniprot ID: Q86TS9
  ENSP ID: ENSP00000380633
MAALGTVLFSVRRLHCSVAAWAGGQWRLQQGLAANPSGYGPLTELPDWSYADGRPAPPMKGQLRRKAERETFARRVVLLSQEMDAGLQAWQLRQQKLQEEQRKQENALKPKGASLKSPLPSQ

SEQ ID NO: 52087 - protein, 87 aa, Homo sapiens
  Payload ID: 10374
  Gene Symbol: MRPL52
  Gene Name: mitochondrial ribosomal protein L52
  Uniprot ID: Q86TS9
  ENSP ID: ENSP00000380642
MAALGTVLFTGVRRLHCSVAAWAGGQWRLQQGLAANPSGYGPLTELPDWSYAETSCTAVTGNGRWITSMAAQAAEVAGRTKEAGKCS

SEQ ID NO: 52088 - protein, 110 aa, Homo sapiens
  Payload ID: 10374
  Gene Symbol: MRPL52
  Gene Name: mitochondrial ribosomal protein L52
  ENSP ID: ENSP00000406655
MAALGTVLFSVRRLHCSVAAWAGGQWRLQQGLAANPSGYGPLTELPDWSYADGRPAPPMKGQLRRKAERETFAVSETSCTAVTGNGRWITSMAAQAAEVAGRTKEAGKCS

SEQ ID NO: 52089 - protein, 64 aa, Homo sapiens
  Payload ID: 10374
  Gene Symbol: MRPL52
  Gene Name: mitochondrial ribosomal protein L52
  Uniprot ID: Q86TS9
  ENSP ID: ENSP00000451081
MKGQLRRKAERETFARRVVLLSQEMDAGLQAWQLRQQKLQEEQRKQENALKPKGASLKSPLPSQ

SEQ ID NO: 52090 - protein, 64 aa, Homo sapiens; identical to SEQ ID NO: 52089
  Payload ID: 10374
  Gene Symbol: MRPL52
  Gene Name: mitochondrial ribosomal protein L52
  Uniprot ID: Q86TS9
  ENSP ID: ENSP00000451303

SEQ ID NO: 52091 - protein, 51 aa, Homo sapiens
  Payload ID: 10374
  Gene Symbol: MRPL52
  Gene Name: mitochondrial ribosomal protein L52
  ENSP ID: ENSP00000451436
MRRRVVLLSQEMDAGLQAWQLRQQKLQEEQRKQENALKPKGASLKSPLPSQ

SEQ ID NO: 52092 - protein, 64 aa, Homo sapiens; identical to SEQ ID NO: 52089
  Payload ID: 10374
  Gene Symbol: MRPL52
  Gene Name: mitochondrial ribosomal protein L52
  Uniprot ID: Q86TS9
  ENSP ID: ENSP00000451481

SEQ ID NO: 52093 - protein, 52 aa, Homo sapiens
  Payload ID: 10374
  Gene Symbol: MRPL52
  Gene Name: mitochondrial ribosomal protein L52
  ENSP ID: ENSP00000451809
MKGQLRRKAERETFAVSETSCTAVTGNGRWITSMAAQAAEVAGRTKEAGKCS

SEQ ID NO: 52094 - protein, 72 aa, Homo sapiens
  Payload ID: 10374
  Gene Symbol: MRPL52
  Gene Name: mitochondrial ribosomal protein L52
  ENSP ID: ENSP00000451832
MAALGTVLFSVRRLHCSVAAWAGGQWRLQQGLAANPSGYGPLTELPDWSYAETSCTAVTGNGRWITSMAAQA

SEQ ID NO: 52095 - protein, 112 aa, Homo sapiens
  Payload ID: 10375
  Gene Symbol: MRPL53
  Gene Name: mitochondrial ribosomal protein L53
  Uniprot ID: Q96EL3
  ENSP ID: ENSP00000258105
MAAALARLGLRPVKQVRVQFCPFEKNVESTRTFLQTVSSEKVRSTNLNCSVIADVRHDGSEPCVDVLFGDGHRLIMRGAHLTALEMLTAFASHIRARDAAGSGDKPGADTGR

SEQ ID NO: 52096 - protein, 70 aa, Homo sapiens
  Payload ID: 10375
  Gene Symbol: MRPL53
  Gene Name: mitochondrial ribosomal protein L53
  ENSP ID: ENSP00000386920
MAAALARLGLRPVKQVRVQFCPFEKNVESTRRRASPDYARRSSHRSGNAHRLRLPHPGQGRGGQRGQAGR

SEQ ID NO: 52097 - protein, 138 aa, Homo sapiens
  Payload ID: 10376
  Gene Symbol: MRPL54
  Gene Name: mitochondrial ribosomal protein L54
  Uniprot ID: Q6P161
  ENSP ID: ENSP00000331849
MATKRLFGATRTWAGWGAWELLNPATSGRLLARDYAKKPVMKGAKSGKGAVTSEALKDPDVCTDPVQLTTYAMGVNIYKEGQDVPLKPDAEYPEWLFEMNLGPPKTLEELDPESREYWRRLRKQNIWRHNRLSKNKRL

SEQ ID NO: 52098 - protein, 76 aa, Homo sapiens
  Payload ID: 10376
  Gene Symbol: MRPL54
  Gene Name: mitochondrial ribosomal protein L54
  ENSP ID: ENSP00000467023
  MOD_RES (1)..(1): Any amino acid
XTKRLFGATRTWAGWGAWELLNPATSGRLLARDYAKKPVHPLESAFGTLTLTQGLTLGLSEDWPPCSPNNSCPAWL

SEQ ID NO: 52099 - protein, 128 aa, Homo sapiens
  Payload ID: 10377
  Gene Symbol: MRPL55
  Gene Name: mitochondrial ribosomal protein L55
  Uniprot ID: Q7Z7F7
  ENSP ID: ENSP00000295008
MAAVGSLLGRLRQSTVKATGPALRRLHTSSWRADSSRASLTRVHRQAYARLYPVLLVKQDGSTIHIRYREPRRMLAMPIDLDTLSPEERRARLRKREAQLQSRKEYEQELSDDLHVERYRQFWTRTKK

SEQ ID NO: 52100 - protein, 128 aa, Homo sapiens; identical to SEQ ID NO: 52099
  Payload ID: 10377
  Gene Symbol: MRPL55
  Gene Name: mitochondrial ribosomal protein L55
  Uniprot ID: Q7Z7F7
  ENSP ID: ENSP00000337342

SEQ ID NO: 52101 - protein, 128 aa, Homo sapiens; identical to SEQ ID NO: 52099
  Payload ID: 10377
  Gene Symbol: MRPL55
  Gene Name: mitochondrial ribosomal protein L55
  Uniprot ID: Q7Z7F7
  ENSP ID: ENSP00000337361

SEQ ID NO: 52102 - protein, 128 aa, Homo sapiens; identical to SEQ ID NO: 52099
  Payload ID: 10377
  Gene Symbol: MRPL55
  Gene Name: mitochondrial ribosomal protein L55
  Uniprot ID: Q7Z7F7
  ENSP ID: ENSP00000338189

SEQ ID NO: 52103 - protein, 55 aa, Homo sapiens
  Payload ID: 10377
  Gene Symbol: MRPL55
  Gene Name: mitochondrial ribosomal protein L55
  ENSP ID: ENSP00000355692
MLAMPIDLDTLSPEERRARLRKREAQLQSRKEYEQELSDDLHVERYRQFWTRTKK

SEQ ID NO: 52104 - protein, 55 aa, Homo sapiens; identical to SEQ ID NO: 52103
  Payload ID: 10377
  Gene Symbol: MRPL55
  Gene Name: mitochondrial ribosomal protein L55
  ENSP ID: ENSP00000355693

SEQ ID NO: 52105 - protein, 128 aa, Homo sapiens; identical to SEQ ID NO: 52099
  Payload ID: 10377
  Gene Symbol: MRPL55
  Gene Name: mitochondrial ribosomal protein L55
  Uniprot ID: Q7Z7F7
  ENSP ID: ENSP00000355694

SEQ ID NO: 52106 - protein, 128 aa, Homo sapiens; identical to SEQ ID NO: 52099
  Payload ID: 10377
  Gene Symbol: MRPL55
  Gene Name: mitochondrial ribosomal protein L55
  Uniprot ID: Q7Z7F7
  ENSP ID: ENSP00000355695

SEQ ID NO: 52107 - protein, 128 aa, Homo sapiens; identical to SEQ ID NO: 52099
  Payload ID: 10377
  Gene Symbol: MRPL55
  Gene Name: mitochondrial ribosomal protein L55
  Uniprot ID: Q7Z7F7
  ENSP ID: ENSP00000355696

SEQ ID NO: 52108 - protein, 128 aa, Homo sapiens; identical to SEQ ID NO: 52099
  Payload ID: 10377
  Gene Symbol: MRPL55
  Gene Name: mitochondrial ribosomal protein L55
  Uniprot ID: Q7Z7F7
  ENSP ID: ENSP00000355697

SEQ ID NO: 52109 - protein, 164 aa, Homo sapiens
  Payload ID: 10377
  Gene Symbol: MRPL55
  Gene Name: mitochondrial ribosomal protein L55
  Uniprot ID: Q7Z7F7
  ENSP ID: ENSP00000355699
MAAVGSLLGLAASSWLGGQNASDHSLWLLRKPRGSSCPGTGHQLCRLRQSTVKATGPALRRLHTSSWRADSSRASLTRVHRQAYARLYPVLLVKQDGSTIHIRYREPRRMLAMPIDLDTLSPEERRARLRKREAQLQSRKEYEQELSDDLHVERYRQFWTRTKK

SEQ ID NO: 52110 - protein, 128 aa, Homo sapiens; identical to SEQ ID NO: 52099
  Payload ID: 10377
  Gene Symbol: MRPL55
  Gene Name: mitochondrial ribosomal protein L55
  Uniprot ID: Q7Z7F7
  ENSP ID: ENSP00000355700

SEQ ID NO: 52111 - protein, 128 aa, Homo sapiens; identical to SEQ ID NO: 52099
  Payload ID: 10377
  Gene Symbol: MRPL55
  Gene Name: mitochondrial ribosomal protein L55
  Uniprot ID: Q7Z7F7
  ENSP ID: ENSP00000355701

SEQ ID NO: 52112 - protein, 128 aa, Homo sapiens; identical to SEQ ID NO: 52099
  Payload ID: 10377
  Gene Symbol: MRPL55
  Gene Name: mitochondrial ribosomal protein L55
  Uniprot ID: Q7Z7F7
  ENSP ID: ENSP00000355702

SEQ ID NO: 52113 - protein, 128 aa, Homo sapiens; identical to SEQ ID NO: 52099
  Payload ID: 10377
  Gene Symbol: MRPL55
  Gene Name: mitochondrial ribosomal protein L55
  Uniprot ID: Q7Z7F7
  ENSP ID: ENSP00000355703

SEQ ID NO: 52114 - protein, 128 aa, Homo sapiens; identical to SEQ ID NO: 52099
  Payload ID: 10377
  Gene Symbol: MRPL55
  Gene Name: mitochondrial ribosomal protein L55
  Uniprot ID: Q7Z7F7
  ENSP ID: ENSP00000355705

SEQ ID NO: 52115 - protein, 128 aa, Homo sapiens; identical to SEQ ID NO: 52099
  Payload ID: 10377
  Gene Symbol: MRPL55
  Gene Name: mitochondrial ribosomal protein L55
  Uniprot ID: Q7Z7F7
  ENSP ID: ENSP00000355707

SEQ ID NO: 52116 - protein, 128 aa, Homo sapiens; identical to SEQ ID NO: 52099
  Payload ID: 10377
  Gene Symbol: MRPL55
  Gene Name: mitochondrial ribosomal protein L55
  Uniprot ID: Q7Z7F7
  ENSP ID: ENSP00000355708

SEQ ID NO: 52117 - protein, 128 aa, Homo sapiens; identical to SEQ ID NO: 52099
  Payload ID: 10377
  Gene Symbol: MRPL55
  Gene Name: mitochondrial ribosomal protein L55
  Uniprot ID: Q7Z7F7
  ENSP ID: ENSP00000375740

SEQ ID NO: 52118 - protein, 43 aa, Homo sapiens
  Payload ID: 10377
  Gene Symbol: MRPL55
  Gene Name: mitochondrial ribosomal protein L55
  ENSP ID: ENSP00000401737
MAAVGSLLGRLRQSTVKATGPALRRLHTSSWRADSSRASLTRV

SEQ ID NO: 52119 - protein, 164 aa, Homo sapiens; identical to SEQ ID NO: 52109
  Payload ID: 10377
  Gene Symbol: MRPL55
  Gene Name: mitochondrial ribosomal protein L55
  Uniprot ID: Q7Z7F7
  ENSP ID: ENSP00000403614

SEQ ID NO: 52120 - protein, 76 aa, Homo sapiens
  Payload ID: 10377
  Gene Symbol: MRPL55
  Gene Name: mitochondrial ribosomal protein L55
  ENSP ID: ENSP00000409966
MAAVGSLLGRLRQSTVKATGPALRRLHTSSWRADSSRASLTRVHRQAYARLYPVLLVKQDGSTIHIRYREPRRMLA

SEQ ID NO: 52121 - protein, 4 aa, Homo sapiens
  Payload ID: 10377
  Gene Symbol: MRPL55
  Gene Name: mitochondrial ribosomal protein L55
  ENSP ID: ENSP00000479251
MAAV

SEQ ID NO: 52122 - protein, 8 aa, Homo sapiens
  Payload ID: 10377
  Gene Symbol: MRPL55
  Gene Name: mitochondrial ribosomal protein L55
  ENSP ID: ENSP00000479463
MAAVGSLL

SEQ ID NO: 52123 - protein, 55 aa, Homo sapiens; identical to SEQ ID NO: 52103
  Payload ID: 10377
  Gene Symbol: MRPL55
  Gene Name: mitochondrial ribosomal protein L55
  ENSP ID: ENSP00000482290

SEQ ID NO: 52124 - protein, 24 aa, Homo sapiens
  Payload ID: 10377
  Gene Symbol: MRPL55
  Gene Name: mitochondrial ribosomal protein L55
  ENSP ID: ENSP00000484813
MAAVGSLLGRLRQSTVKATGPALR

SEQ ID NO: 52125 - protein, 102 aa, Homo sapiens
  Payload ID: 10378
  Gene Symbol: MRPL57
  Gene Name: mitochondrial ribosomal protein L57
  Uniprot ID: Q9BQC6
  ENSP ID: ENSP00000310726
MFLTALLWRGRIPGRQWIGKHRRPRFVSLRAKQNMIRRLEIEAENHYWLSMPYMTREQERGHAAVRRREAFEAIKAAATSKFPPHRFIADQLDHLNVTKKWS

SEQ ID NO: 52126 - protein, 233 aa, Homo sapiens
  Payload ID: 10379
  Gene Symbol: MRPL9
  Gene Name: mitochondrial ribosomal protein L9
  ENSP ID: ENSP00000357822
MAAPVVTAPGRALLRAGAGRLLRGGVQELLRPRHEGNAPDLACNFSLSQNRGTVIVERWWKVPLAGEGRKPRLHRRHRVYKLVEDTKHRPKENLELILTQSVENVGVRGDLVSVKKSLGRNRLLPQGLAVYASPENKKLFEEEKLLRQEGKLEKIQTKAGEALGVVVAPHTLKLPEEPITRWGEYWCEVTVNGLDTVRVPMSVVNFEKPKTKRYKYWLAQQAAKAMAPTSPQI

SEQ ID NO: 52127 - protein, 267 aa, Homo sapiens [sequence omitted]

SEQ ID NO: 52128 - protein, 201 aa, Homo sapiens
  Payload ID: 10380
  Gene Symbol: MRPS10
  Gene Name: mitochondrial ribosomal protein S10
  Uniprot ID: P82664
  ENSP ID: ENSP00000053468
MAARTAFGAVCRRLWQGLGNFSVNTSKGNTAKNGGLLLSTNMKWVQFSNLHVDVPKDLTKPVVTISDEPDILYKRLSVLVKGHDKAVLDSYEYFAVLAAKELGISIKVHEPPRKIERFTLLQSVHIYKKHRVQYEMRTLYRCLELEHLTGSTADVYLEYIQRNLPEGVAMEVTKTQLEQLPEHIKEPIWETLSEEKEESKS

SEQ ID NO: 52129 - protein, 194 aa, Homo sapiens
  Payload ID: 10381
  Gene Symbol: MRPS11
  Gene Name: mitochondrial ribosomal protein S11
  Uniprot ID: P82912
  ENSP ID: ENSP00000317376
MQAVRNAGSRFLRSWTWPQTAGRVVARTPAGTICTGARQLQDAAAKQKVEQNAAPSHTKFSIYPPIPGEESSLRWAGKKFEEIPIAHIKASHNNTQIQVVSASNEPLAFASCGTEGFRNAKKGTGIAAQTAGIAAAARAKQKGVIHIRVVVKGLGPGRLSAMHGLIMGGLEVISITDNTPIPHNGCRPRKARKL

SEQ ID NO: 52130 - protein, 161 aa, Homo sapiens
  Payload ID: 10381
  Gene Symbol: MRPS11
  Gene Name: mitochondrial ribosomal protein S11
  Uniprot ID: P82912
  ENSP ID: ENSP00000318054
MQAVRNAGSRFLRSWTWPQTAGRVVARTPAGTICTGARQLQDAAAKQKVEQNAAPSHTKFSTQIQVVSASNEPLAFASCGTEGFRNAKKGTGIAAQTAGIAAAARAKQKGVIHIRVVVKGLGPGRLSAMHGLIMGGLEVISITDNTPIPHNGCRPRKARKL

SEQ ID NO: 52131 - protein, 118 aa, Homo sapiens
  Payload ID: 10381
  Gene Symbol: MRPS11
  Gene Name: mitochondrial ribosomal protein S11
  ENSP ID: ENSP00000453116
MQAVRNAGSRFLRSWTWPQTAGRVVARTPAGTICTGARQLQDAAAKQKVEQNAAPSHTKFSIYPPIPGEESSLRWAGKKFEEIPIAHIKASHNKGISECQEGHRHRSTDSRHSRSGES

SEQ ID NO: 52132 - protein, 138 aa, Homo sapiens
  Payload ID: 10382
  Gene Symbol: MRPS12
  Gene Name: mitochondrial ribosomal protein S12
  Uniprot ID: O15235
  ENSP ID: ENSP00000308845
MSWSGLLHGLNTSLTCGPALVPRLWATCSMATLNQMHRLGPPKRPPRKLGPTEGRPQLKGVVLCTFTRKPKKPNSANRKCCRVRLSTGREAVCFIPGEGHTLQEHQIVLVEGGRTQDLPGVKLTVVRGKYDCGHVQKK

SEQ ID NO: 52133 - protein, 138 aa, Homo sapiens; identical to SEQ ID NO: 52132
  Payload ID: 10382
  Gene Symbol: MRPS12
  Gene Name: mitochondrial ribosomal protein S12
  Uniprot ID: O15235
  ENSP ID: ENSP00000384579

SEQ ID NO: 52134 - protein, 138 aa, Homo sapiens; identical to SEQ ID NO: 52132
  Payload ID: 10382
  Gene Symbol: MRPS12
  Gene Name: mitochondrial ribosomal protein S12
  Uniprot ID: O15235
  ENSP ID: ENSP00000384952

SEQ ID NO: 52135 - protein, 138 aa, Homo sapiens; identical to SEQ ID NO: 52132
  Payload ID: 10382
  Gene Symbol: MRPS12
  Gene Name: Mitochondrial ribosomal protein S12
  ENSP ID: ENSP00000488926

SEQ ID NO: 52136 - protein, 138 aa, Homo sapiens; identical to SEQ ID NO: 52132
  Payload ID: 10382
  Gene Symbol: MRPS12
  Gene Name: Mitochondrial ribosomal protein S12
  ENSP ID: ENSP00000489374

SEQ ID NO: 52137 - protein, 138 aa, Homo sapiens; identical to SEQ ID NO: 52132
  Payload ID: 10382
  Gene Symbol: MRPS12
  Gene Name: Mitochondrial ribosomal protein S12
  ENSP ID: ENSP00000489467

SEQ ID NO: 52138 - protein, 128 aa, Homo sapiens
  Payload ID: 10383
  Gene Symbol: MRPS14
  Gene Name: mitochondrial ribosomal protein S14
  Uniprot ID: O60783
  ENSP ID: ENSP00000420714
MAAFMLGSLLRTFKQMVPSSASGQVRSHYVDWRMWRDVKRRKMAYEYADERLRINSLRKNTILPKILQDVADEEIAALPRDSCPVRIRNRCVMTSRPRGVKRRWRLSRIVFRHLADHGQLSGIQRATW

SEQ ID NO: 52139 - protein, 60 aa, Homo sapiens
  Payload ID: 10383
  Gene Symbol: MRPS14
  Gene Name: mitochondrial ribosomal protein S14
  ENSP ID: ENSP00000431220
MAAFMLGSLLRTFKQVRPLLLSTPLPLTAESHNPRVPHGSATCSARWFLHQLQAKFEVTM

SEQ ID NO: 52140 - protein, 257 aa, Homo sapiens
  Payload ID: 10384
  Gene Symbol: MRPS15
  Gene Name: mitochondrial ribosomal protein S15
  Uniprot ID: P82914
  ENSP ID: ENSP00000362208
MLRVAWRTLSLIRTRAVTQVLVPGLPGGGSAKFPFNQWGLQPRSLLLQAARGYVVRKPAQSRLDDDPPPSTLLKDYQNVPGIEKVDDVVKRLLSLEMANKKEMLKIKQEQFMKKIVANPEDTRSLEARIIALSVKIRSYEEHLEKHRKDKAHKRYLLMSIDQRKKMLKNLRNTNYDVFEKICWGLGIEYTFPPLYYRRAHRRFVTKKALCIRVFQETQKLKKRRRALKAAAAAQKQAKRRNPDSPAKAIPKTLKDSQ

SEQ ID NO: 52141 - protein, 99 aa, Homo sapiens
  Payload ID: 10385
  Gene Symbol: MRPS16
  Gene Name: mitochondrial ribosomal protein S16
  ENSP ID: ENSP00000362031
MVHLTTLLCKAYRGGHLTIRLALGGCTNRPFYRIVAAHNKCPRDGRFVEQLGSYDPLPNSHGEKLVALNLDRIRHWIGCGAHLSKPMEKLLGLKYSHVF

SEQ ID NO: 52142 - protein, 137 aa, Homo sapiens
  Payload ID: 10385
  Gene Symbol: MRPS16
  Gene Name: mitochondrial ribosomal protein S16
  Uniprot ID: Q9Y3D3
  ENSP ID: ENSP00000362036
MVHLTTLLCKAYRGGHLTIRLALGGCTNRPFYRIVAAHNKCPRDGRFVEQLGSYDPLPNSHGEKLVALNLDRIRHWIGCGAHLSKPMEKLLGLAGFFPLHPMMITNAERLRRKRAREVLLASQKTDAEATDTEATET

SEQ ID NO: 52143 - protein, 130 aa, Homo sapiens
  Payload ID: 10386
  Gene Symbol: MRPS17
  Gene Name: mitochondrial ribosomal protein S17
  Uniprot ID: Q9Y2R5
  ENSP ID: ENSP00000285298
MSVVRSSVHARWIVGKVIGTKMQKTAKVRVTRLVLDPYLLKYFNKRKTYFAHDALQQCTVGDIVLLRALPVPRAKHVKHELAEIVFKVGKVIDPVTGKPCAGTTYLESPLSSETTQLSKNLEELNISSAQ

SEQ ID NO: 52144 - protein, 129 aa, Homo sapiens
  Payload ID: 10386
  Gene Symbol: MRPS17
  Gene Name: mitochondrial ribosomal protein S17
  ENSP ID: ENSP00000401349
MSVVRSSVHARWIVGKVIGTKMQKTAKVRVTRLVLDPYLLKYFNKRKTYFAHDALQQCTVGDIVLLRALPVPRAKHVKHELAEIVFKVGKVIDPVTGKPCAGTTYLESPLSSETTQLSKNLEELNISSA

SEQ ID NO: 52145 - protein, 127 aa, Homo sapiens
  Payload ID: 10387
  Gene Symbol: MRPS18A
  Gene Name: mitochondrial ribosomal protein S18A
  Uniprot ID: Q9NVS2
  ENSP ID: ENSP00000361188
MAALKALVSGCGRLLRGLLAGPAATSWSRLPARGFREVVETQEGKTTIIEGRITATPKESPNPPNPSGQCPICRWNLKHKYNYDDVLLLSQFIRPHGGMLPRKITGLCQEEHRKIEECVKMAHRAGT

SEQ ID NO: 52146 - protein, 196 aa, Homo sapiens
  Payload ID: 10387
  Gene Symbol: MRPS18A
  Gene Name: mitochondrial ribosomal protein S18A
  Uniprot ID: Q9NVS2
  ENSP ID: ENSP00000361206
MAALKALVSGCGRLLRGLLAGPAATSWSRLPARGFREVVETQEGKTTIIEGRITATPKESPNPPNPSGQCPICRWNLKHKYNYDDVLLLSQFIRPHGGMLPRKITGLCQEEHRKIEECVKMAHRAGLLPNHRPRLPEGVVPKSKPQLNRYLTRWAPGSVKPIYKKGPRWNRVRMPVGSPLLRDNVCYSRTPWKLYH

SEQ ID NO: 52147 - protein, 263 aa, Homo sapiens
  Payload ID: 10387
  Gene Symbol: MRPS18A
  Gene Name: mitochondrial ribosomal protein S18A
  ENSP ID: ENSP00000398679
MAALKALVSGCGRLLRGLLAGPAATSWSRLPARGFREVVETQEGKTTIIEGRITATPKESPNPPNPSGQCPICRWNLKHKYNYDDVLLLSQFIRPHGGMLPRKITGLCQEEHRKIEECVKMAHRAGRRPWGPRGAEGCRHSLPTQLPHVSAPPGRKVDIRSVNYTHHPMPTFPLPWAFPLAPSELQRELQRLSPLPRHSGLLPNHRPRLPEGVVPKSKPQLNRYLTRWAPGSVKPIYKKGPRWNRVRMPVGSPLLRDNVCYSR

SEQ ID NO: 52148 - protein, 258 aa, Homo sapiens
  Payload ID: 10388
  Gene Symbol: MRPS18B
  Gene Name: mitochondrial ribosomal protein S18B
  Uniprot ID: Q9Y676
  ENSP ID: ENSP00000259873
MAASVLNTVLRRLPMLSLFRGSHRVQVPLQTLCTKAPSEEDSLSSVPISPYKDEPWKYLESEEYQERYGSRPVWADYRRNHKGGVPPQRTRKTCIRRNKVVGNPCPICRDHKLHVDFRNVKLLEQFVCAHTGIIFYAPYTGVCVKQHKRLTQAIQKARDHGLLIYHIPQVEPRDLDFSTSHGAVSATPPAPTLVSGDPWYPWYNWKQPPERELSRLRRLYQGHLQEESGPPPESMPKMPPRTPAEASSTGQTGPQSAL

SEQ ID NO: 52149 - protein, 215 aa, Homo sapiens
  Payload ID: 10388
  Gene Symbol: MRPS18B
  Gene Name: mitochondrial ribosomal protein S18B
  ENSP ID: ENSP00000383437
MAASVLNTVLRRLPMLSLFRGSHRVQVPLQTLCTKAPSEEDSLSSVPISPYKDEPWKYLESEEYQERYGSRPVWADYRRNHKGGVPPQRTRKTCINVKLLEQFVCAHTGIIFYAPYTGLLIYHIPQVEPRDLDFSTSHGAVSATPPAPTLVSGDPWYPWYNWKQPPERELSRLRRLYQGHLQEESGPPPESMPKMPPRTPAEASSTGQTGPQSAL

SEQ ID NO: 52150 - protein, 258 aa, Homo sapiens; identical to SEQ ID NO: 52148
  Payload ID: 10388
  Gene Symbol: MRPS18B
  Gene Name: mitochondrial ribosomal protein S18B
  Uniprot ID: Q9Y676
  ENSP ID: ENSP00000383438

SEQ ID NO: 52151 - protein, 215 aa, Homo sapiens; identical to SEQ ID NO: 52149
  Payload ID: 10388
  Gene Symbol: MRPS18B
  Gene Name: mitochondrial ribosomal protein S18B
  ENSP ID: ENSP00000390930

SEQ ID NO: 52152 - protein, 215 aa, Homo sapiens; identical to SEQ ID NO: 52149
  Payload ID: 10388
  Gene Symbol: MRPS18B
  Gene Name: mitochondrial ribosomal protein S18B
  ENSP ID: ENSP00000397340

SEQ ID NO: 52153 - protein, 215 aa, Homo sapiens; identical to SEQ ID NO: 52149
  Payload ID: 10388
  Gene Symbol: MRPS18B
  Gene Name: mitochondrial ribosomal protein S18B
  ENSP ID: ENSP00000397472

SEQ ID NO: 52154 - protein, 258 aa, Homo sapiens; identical to SEQ ID NO: 52148
  Payload ID: 10388
  Gene Symbol: MRPS18B
  Gene Name: mitochondrial ribosomal protein S18B
  Uniprot ID: Q9Y676
  ENSP ID: ENSP00000397790

SEQ ID NO: 52155 - protein, 258 aa, Homo sapiens; identical to SEQ ID NO: 52148
  Payload ID: 10388
  Gene Symbol: MRPS18B
  Gene Name: mitochondrial ribosomal protein S18B
  Uniprot ID: Q9Y676
  ENSP ID: ENSP00000398494

SEQ ID NO: 52156 - protein, 215 aa, Homo sapiens; identical to SEQ ID NO: 52149
  Payload ID: 10388
  Gene Symbol: MRPS18B
  Gene Name: mitochondrial ribosomal protein S18B
  ENSP ID: ENSP00000398549

SEQ ID NO: 52157 - protein, 215 aa, Homo sapiens; identical to SEQ ID NO: 52149
  Payload ID: 10388
  Gene Symbol: MRPS18B
  Gene Name: mitochondrial ribosomal protein S18B
  ENSP ID: ENSP00000398781

SEQ ID NO: 52158 - protein, 258 aa, Homo sapiens; identical to SEQ ID NO: 52148
  Payload ID: 10388
  Gene Symbol: MRPS18B
  Gene Name: mitochondrial ribosomal protein S18B
  Uniprot ID: Q9Y676
  ENSP ID: ENSP00000402718

SEQ ID NO: 52159 - protein, 258 aa, Homo sapiens; identical to SEQ ID NO: 52148
  Payload ID: 10388
  Gene Symbol: MRPS18B
  Gene Name: mitochondrial ribosomal protein S18B
  Uniprot ID: Q9Y676
  ENSP ID: ENSP00000414972

SEQ ID NO: 52160 - protein, 258 aa, Homo sapiens; identical to SEQ ID NO: 52148
  Payload ID: 10388
  Gene Symbol: MRPS18B
  Gene Name: mitochondrial ribosomal protein S18B
  Uniprot ID: Q9Y676
  ENSP ID: ENSP00000415703

SEQ ID NO: 52161 - protein, 142 aa, Homo sapiens
  Payload ID: 10389
  Gene Symbol: MRPS18C
  Gene Name: mitochondrial ribosomal protein S18C
  Uniprot ID: Q9Y3D5
  ENSP ID: ENSP00000295491
MAAVVAVCGGLGRKKLTHLVTAAVSLTHPGTHTVLWRRGCSQQVSSNEDLPISMENPYKEPLKKCILCGKHVDYKNVQLLSQFVSPFTGCIYGRHITGLCGKKQKEITKAIKRAQIMGFMPVTYKDPAYLKDPKVCNIRYRE

SEQ ID NO: 52162 - protein, 92 aa, Homo sapiens
  Payload ID: 10389
  Gene Symbol: MRPS18C
  Gene Name: mitochondrial ribosomal protein S18C
  ENSP ID: ENSP00000425268
VAVCGGLGRKKLTHLVTAAVSLTHPGTHTVLWRRGCSQQVSSNEDLPISMENPYKEPLKKCILCGKHVDYKNVQVFVGRNRKKSQKQLRELK

SEQ ID NO: 52163 - protein, 68 aa, Homo sapiens
  Payload ID: 10389
  Gene Symbol: MRPS18C
  Gene Name: mitochondrial ribosomal protein S18C
  ENSP ID: ENSP00000426930
MAAVVAVCGGLGRKKLTHLVTAAVSLTHPGTHTVLWRRGCSQQVSSNEDLVFVGRNRKKSQKQLRELK

SEQ ID NO: 52164 - protein, 113 aa, Homo sapiens
  Payload ID: 10389
  Gene Symbol: MRPS18C
  Gene Name: mitochondrial ribosomal protein S18C
  ENSP ID: ENSP00000427014
  MOD_RES (1)..(1): Any amino acid
XAVVAVCGGLGRKKLTHLVTAAVSLTHPGTHTVLWRRGCSQQVSSNEDLLLSQFVSPFTGCIYGRHITGLCGKKQKEITKAIKRAQIMGFMPVTYKDPAYLKDPKVCNIRYRE

SEQ ID NO: 52165 - protein, 114 aa, Homo sapiens
  Payload ID: 10389
  Gene Symbol: MRPS18C
  Gene Name: mitochondrial ribosomal protein S18C
  ENSP ID: ENSP00000427169
MAAVVAVCGGLGRKKLTHLVTAAVSLTHPGTHTVLWRRGCSQQVSSNEDLLLSQFVSPFTGCIYGRHITGLCGKKQKEITKAIKRAQIMGFMPVTYKDPAYLKDPKVCNIRYRE

SEQ ID NO: 52166 - protein, 296 aa, Homo sapiens
  Payload ID: 10390
  Gene Symbol: MRPS2
  Gene Name: mitochondrial ribosomal protein S2
  Uniprot ID: Q9Y399
  ENSP ID: ENSP00000241600
MATSSAALPRILGAGARAPSRWLGFLGKATPRPARPSRRTLGSATALMIRESEDSTDFNDKILNEPLKHSDFFNVKELFSVRSLFDARVHLGHKAGCRHRFMEPYIFGSRLDHDIIDLEQTATHLQLALNFTAHMAYRKGIILFISRNRQFSYLIENMARDCGEYAHTRYFRGGMLTNARLLFGPTVRLPDLIIFLHTLNNIFEPHVAVRDAAKMNIPTVGIVDTNCNPCLITYPVPGNDDSPLAVHLYCRLFQTAITRAKEKRQQVEALYRLQGQKEPGDQGPAHPPGADMSHSL

SEQ ID NO: 52167 - protein, 296 aa, Homo sapiens; identical to SEQ ID NO: 52166
  Payload ID: 10390
  Gene Symbol: MRPS2
  Gene Name: mitochondrial ribosomal protein S2
  Uniprot ID: Q9Y399
  ENSP ID: ENSP00000360850

SEQ ID NO: 52168 - protein, 270 aa, Homo sapiens
  Payload ID: 10390
  Gene Symbol: MRPS2
  Gene Name: mitochondrial ribosomal protein S2
  ENSP ID: ENSP00000400082
RRGPLGMRWGAGVVHSGLGARTSIYFPPGARAPSRWLGFLGKATPRPARPSRRTLGSATALMIRESEDSTDFNDKILNEPLKHSDFFNVKELFSVRSLFDARVHLGHKAGCRHRFMEPYIFGSRLDHDIIDLEQTATHLQLALNFTAHMAYRKGIILFISRNRQFSYLIENMARDCGEYAHTRYFRGGMLTNARLLFGPTVRLPDLIIFLHTLNNIFEPHVAVRDAAKMNIPTVGIVDTNCNPCLITYPVPGNDDSPLAVHLYCRLFQTA

SEQ ID NO: 52169 - protein, 87 aa, Homo sapiens
  Payload ID: 10391
  Gene Symbol: MRPS21
  Gene Name: mitochondrial ribosomal protein S21
  ENSP ID: ENSP00000461930
MAKHLKFIARTVMVQEGNVESAYRTLNRILTMDGLIEDIKHRRYYEKPCCRRQRESYERCRRIYNMEMARKINFLMRKNRADPWQGC

SEQ ID NO: 52170 - protein, 87 aa, Homo sapiens; identical to SEQ ID NO: 52169
  Payload ID: 10391
  Gene Symbol: MRPS21
  Gene Name: mitochondrial ribosomal protein S21
  ENSP ID: ENSP00000480129

SEQ ID NO: 52171 - protein, 360 aa, Homo sapiens
  Payload ID: 10392
  Gene Symbol: MRPS22
  Gene Name: mitochondrial ribosomal protein S22
  Uniprot ID: P82650
  ENSP ID: ENSP00000310785
MAPLGTTVLLWSLLRSSPGVERVCFRARIQPWHGGLLQPLPCSFEMGLPRRRFSSEAAESGSPETKKPTFMDEEVQSILTKMTGLNLQKTFKPAIQELKPPTYKLMTQAQLEEATRQAVEAAKVRLKMPPVLEERVPINDVLAEDKILEGTETTKYVFTDISYSIPHRERFIVVREPSGTLRKASWEERDRMIQVYFPKEGRKILTPIIFKEENLRTMYSQDRHVDVLNLCFAQFEPDSTEYIKVHHKTYEDIDKRGKYDLLRSTRYFGGMVWYFVNNKKIDGLLIDQIQRDLIDDATNLVQLYHVLHPDGQSAQGAKDQAAEGINLIKVFAKTEAQKGAYIELTLQTYQEALSRHSAAS

SEQ ID NO: 52172 - protein, 51 aa, Homo sapiens
  Payload ID: 10392
  Gene Symbol: MRPS22
  Gene Name: mitochondrial ribosomal protein S22
  ENSP ID: ENSP00000417104
MVQTGRSEGIPGWEQSMSKGREIPGSDSESGSPETKKPTFMDEEVQSILTK

SEQ ID NO: 52173 - protein, 360 aa, Homo sapiens; identical to SEQ ID NO: 52171
  Payload ID: 10392
  Gene Symbol: MRPS22
  Gene Name: mitochondrial ribosomal protein S22
  Uniprot ID: P82650
  ENSP ID: ENSP00000418008

SEQ ID NO: 52174 - protein, 359 aa, Homo sapiens
  Payload ID: 10392
  Gene Symbol: MRPS22
  Gene Name: mitochondrial ribosomal protein S22
  ENSP ID: ENSP00000418233
MAPLGTTVLLWSLLRSSPGVERVCFRARIQPWHGGLLQPLPCSFEMGLPRRRFSSEAESGSPETKKPTFMDEEVQSILTKMTGLNLQKTFKPAIQELKPPTYKLMTQAQLEEATRQAVEAAKVRLKMPPVLEERVPINDVLAEDKILEGTETTKYVFTDISYSIPHRERFIVVREPSGTLRKASWEERDRMIQVYFPKEGRKILTPIIFKEENLRTMYSQDRHVDVLNLCFAQFEPDSTEYIKVHHKTYEDIDKRGKYDLLRSTRYFGGMVWYFVNNKKIDGLLIDQIQRDLIDDATNLVQLYHVLHPDGQSAQGAKDQAAEGINLIKVFAKTEAQKGAYIELTLQTYQEALSRHSAAS

SEQ ID NO: 52175 - protein, 319 aa, Homo sapiens
  Payload ID: 10392
  Gene Symbol: MRPS22
  Gene Name: mitochondrial ribosomal protein S22
  ENSP ID: ENSP00000419303
MSRNETEHRYLGTHFGAESGSPETKKPTFMDEEVQSILTKMTGLNLQKTFKPAIQELKPPTYKLMTQAQLEEATRQAVEAAKVRLKMPPVLEERVPINDVLAEDKILEGTETTKYVFTDISYSIPHRERFIVVREPSGTLRKASWEERDRMIQVYFPKEGRKILTPIIFKEENLRTMYSQDRHVDVLNLCFAQFEPDSTEYIKVHHKTYEDIDKRGKYDLLRSTRYFGGMVWYFVNNKKIDGLLIDQIQRDLIDDATNLVQLYHVLHPDGQSAQGAKDQAAEGINLIKVFAKTEAQKGAYIELTLQTYQEALSRHSAAS

SEQ ID NO: 52176 - protein, 165 aa, Homo sapiens
  Payload ID: 10392
  Gene Symbol: MRPS22
  Gene Name: mitochondrial ribosomal protein S22
  ENSP ID: ENSP00000419737
  MOD_RES (1)..(1): Any amino acid
XTTVLLWSLLRSSPGVERVCFRARIQPWHGGLLQPLPCSFEMGLPRRRFSSEAAESGSPETKKPTFMDEEVQSILTKMTGLNLQKTFKPAIQELKPPTYKLMTQAQLEEATRQAVEAAKVRLKMPPVLEERVPINDVLAEDKILEGTETTKYVFTDISYSIPHRC

SEQ ID NO: 52177 - protein, 200 aa, Homo sapiens
  Payload ID: 10392
  Gene Symbol: MRPS22
  Gene Name: mitochondrial ribosomal protein S22
  ENSP ID: ENSP00000419920
GTTVLLWSLLRSSPGVERVCFRARIQPWHGGLLQPLPCSFEMGLPRRRFSSEAASYLLKSILAESGSPETKKPTFMDEEVQSILTKMTGLNLQKTFKPAIQELKPPTYKLMTQAQLEEATRQAVEAAKVRLKMPPVLEERVPINDVLAEDKILEGTETTKYVFTDISYSIPHRERFIVVREPSGTLRKASWEERDRMIQV

SEQ ID NO: 52178 - protein, 121 aa, Homo sapiens
  Payload ID: 10392
  Gene Symbol: MRPS22
  Gene Name: mitochondrial ribosomal protein S22
  ENSP ID: ENSP00000420229
  MOD_RES (1)..(1): Any amino acid
XKYVFTDISYSIPHRERFIVVREPSGTLRKASWEERDRMIQVYFPKEGRKILTPIIFKEENLRFEPDSTEYIKVHHKTYEDIDKRGKYDLLRSTRYFGGMVWYFVNNKKIDGLLIDQIQRD

SEQ ID NO: 52179 - protein, 168 aa, Homo sapiens
  Payload ID: 10392
  Gene Symbol: MRPS22
  Gene Name: mitochondrial ribosomal protein S22
  Uniprot ID: P82650
  ENSP ID: ENSP00000420482
MAPLGTTVLLWSLLRSSPGVERVCFRARIQPWHGGLLQPLPCSFEMGLPRRRFSSEAESGSPETKKPTFMDEEVQSILTKMTGLNLQKTFKPAIQELKPPTYKLMTQAQLEEATRQAVEAAKVRLKMPPVLEERVPINDVLAEDKILEGTETTKYVFTDISYSIPHRC

SEQ ID NO: 52180 - protein, 190 aa, Homo sapiens
  Payload ID: 10393
  Gene Symbol: MRPS23
  Gene Name: mitochondrial ribosomal protein S23
  Uniprot ID: Q9Y3D9
  ENSP ID: ENSP00000320184
MAGSRLETVGSIFSRTRDLVRAGVLKEKPLWFDVYDAFPPLREPVFQRPRVRYGKAKAPIQDIWYHEDRIRAKFYSVYGSGQRAFDLFNPNFKSTCQRFVEKYTELQKLGETDEEKLFVETGKALLAEGVILRRVGEARTQHGGSHVSRKSEHLSVRPQTALEENETQKEVPQDQHLEAPADQSKGLLPP

SEQ ID NO: 52181 - protein, 61 aa, Homo sapiens
  Payload ID: 10393
  Gene Symbol: MRPS23
  Gene Name: mitochondrial ribosomal protein S23
  ENSP ID: ENSP00000463481
MAKPKLPSKTSGTTRIGLERSFIQCMGLVKELLIYSIQTSSLPVNGLWRSTLSYRNLEKQM

SEQ ID NO: 52182 - protein, 152 aa, Homo sapiens
  Payload ID: 10393
  Gene Symbol: MRPS23
  Gene Name: mitochondrial ribosomal protein S23
  ENSP ID: ENSP00000463677
MAGSRLETVGSIFSRTRDLVRAGVLKEKPLWFDVYDAFPPLREPVFQRPRVRYGKAKAPIQDIWYHEDRIRAKFYSVYGSGQRAFDLFNPNFKSTCQRFVEKYTELQKLGETDEEKLFVETGKALLAEGVILRRVGEARTVSISLLKLLLGL

SEQ ID NO: 52183 - protein, 167 aa, Homo sapiens
  Payload ID: 10394
  Gene Symbol: MRPS24
  Gene Name: mitochondrial ribosomal protein S24
  Uniprot ID: Q96EL2
  ENSP ID: ENSP00000318158
MAASVCSGLLGPRVLSWSRELPCAWRALHTSPVCAKNRAARVRVSKGDKPVTYEEAHAPHYIAHRKGWLSLHTGNLDGEDHAAERTVEDVFLRKFMWGTFPGCLADQLVLKRRGNQLEICAVVLRQLSPHKYYFLVGYSETLLSYFYKCPVRLHLQTVPSKVVYKYL

SEQ ID NO: 52184 - protein, 72 aa, Homo sapiens
  Payload ID: 10394
  Gene Symbol: MRPS24
  Gene Name: mitochondrial ribosomal protein S24
  ENSP ID: ENSP00000407625
MWGTFPGCLADQLVLKRRGNQLEICAVVLRQLSPHKYYFLVGYSETLLSYFYKCPVRLHLQTVPSKVVYKYL

SEQ ID NO: 52185 - protein, 173 aa, Homo sapiens
  Payload ID: 10395
  Gene Symbol: MRPS25
  Gene Name: mitochondrial ribosomal protein S25
  Uniprot ID: P82663
  ENSP ID: ENSP00000253686
MPMKGRFPIRRTLQYLSQGNVVFKDSVKVMTVNYNTHGELGEGARKFVFFNIPQIQYKNPWVQIMMFKNMTPSPFLRFYLDSGEQVLVDVETKSNKEIMEHIRKILGKNEETLREEEEEKKQLSHPANFGPRKYCLRECICEVEGQVPCPSLVPLPKEMRGKYKAALKADAQD

SEQ ID NO: 52186 - protein, 145 aa, Homo sapiens
  Payload ID: 10395
  Gene Symbol: MRPS25
  Gene Name: mitochondrial ribosomal protein S25
  Uniprot ID: P82663
  ENSP ID: ENSP00000390882
MPMKGRFPIRRTLQYLSQGNVVFKDSVKVMTVNYNTHGELGEGARKFVFFNIPQIQYKNPWVQIMMFKNMTPSPFLRFYLDSGEQVLVDVETKSNKEIMEHIRKILGKNEHYLAAPSKPVSSAVVPVTQEAEAGGSLEPRRLRLE

SEQ ID NO: 52187 - protein, 110 aa, Homo sapiens
  Payload ID: 10395
  Gene Symbol: MRPS25
  Gene Name: mitochondrial ribosomal protein S25
  ENSP ID: ENSP00000396828
MPMKGRFPIRRTLQYLSQGNVVFKDSVKVMTVNYNTHGELGEGARKFVFFNIPQIQYKNPWVQIMMFKNMTPSPFLRFYLDSGEQVLVDVETKSNKEIMEHIRKILGKNE

SEQ ID NO: 52188 - protein, 110 aa, Homo sapiens; identical to SEQ ID NO: 52187
  Payload ID: 10395
  Gene Symbol: MRPS25
  Gene Name: mitochondrial ribosomal protein S25
  ENSP ID: ENSP00000402068

SEQ ID NO: 52189 - protein, 129 aa, Homo sapiens
  Payload ID: 10395
  Gene Symbol: MRPS25
  Gene Name: mitochondrial ribosomal protein S25
  Uniprot ID: P82663
  ENSP ID: ENSP00000407733
MPMKGRFPIRRTLQYLSQGNVVFKDSVKVMTVNYNTHGELGEGARKFVFFNIPQIQYKNPWVQIMMFKNMTPSPFLRFYLGKPSGKRRRRKSSFLTQPTSALESTACGSASVKWKGRCPAPAWCHYPRR

SEQ ID NO: 52190 - protein, 205 aa, Homo sapiens
  Payload ID: 10396
  Gene Symbol: MRPS26
  Gene Name: mitochondrial ribosomal protein S26
  Uniprot ID: Q9BYN8
  ENSP ID: ENSP00000369682
MLRALSRLGAGTPCRPRAPLVLPARGRKTRHDPLAKSKIERVNMPPAVDPAEFFVLMERYQHYRQTVRALRMEFVSEVQRKVHEARAGVLAERKALKDAAEHRELMAWNQAENRRLHELRIARLRQEEREQEQRQALEQARKAEEVQAWAQRKEREVLQLQEEVKNFITRENLEARVEAALDSRKNYNWAITREGLVVRPQRRDS

SEQ ID NO: 52191 - protein, 414 aa, Homo sapiens
  Payload ID: 10397
  Gene Symbol: MRPS27
  Gene Name: mitochondrial ribosomal protein S27
  Uniprot ID: Q92552
  ENSP ID: ENSP00000261413
MAASIVRRGMLLARQVVLPQLSPAGKRYLLSSAYVDSHKWEAREKEHYCLADLASLMDKTFERKLPVSSLTISRLIDNISSREEIDHAEYYLYKFRHSPNCWYLRNWTIHTWIRQCLKYDAQDKALYTLVNKVQYGIFPDNFTFNLLMDSFIKKENYKDALSVVFEVMMQEAFEVPSTQLLSLYVLFHCLAKKTDFSWEEERNFGASLLLPGLKQKNSVGFSSQLYGYALLGKVELQQGLRAVYHNMPLIWKPGYLDRALQVMEKVAASPEDIKLCREALDVLGAVLKALTSADGASEEQSQNDEDNQGSEKLVEQLDIEETEQSKLPQYLERFKALHSKLQALGKIESEGLLSLTTQLVKEKLSTCEAEDIATYEQNLQQWHLDLVQLIQREQQQREQAKQEYQAQKAAKASA

SEQ ID NO: 52192 - protein, 299 aa, Homo sapiens
  Payload ID: 10397
  Gene Symbol: MRPS27
  Gene Name: mitochondrial ribosomal protein S27
  ENSP ID: ENSP00000426176
MDKTFERKLPVSSLTISRLIDNISSREEIDHAEYYLYKFRHSPNCWYLRNWTIHTWIRQCLKYDAQDKALYTLVNKVQYGIFPDNFTFNLLMDSFIKKENYKDALSVVFEVMMQEAFEVPSTQLLSLYVLFHCLAKKTDFSWEEERNFGASLLLPGLKQKNSVGFSSQLYGYALLGKVELQQGLRAVYHNMPLIWKPGYLDRALQVMEKVAASPEDIKLCREALDVLGAVLKALTSADGASEEQSQNDEDNQGSEKLVEQLDIEETEQSKLPQYLERFKALHSKLQALGKIESEGLLSL

SEQ ID NO: 52193 - protein, 428 aa, Homo sapiens
  Payload ID: 10397
  Gene Symbol: MRPS27
  Gene Name: mitochondrial ribosomal protein S27
  Uniprot ID: Q92552
  ENSP ID: ENSP00000426941
MAASIVRRGMLLARQVVLPQLSPAGKRYLLSSAYVDSHKWEAREKEHYCLADLASLMDKTFERKLPVSSLTISRLIDNISSREEIDHAEYYLYKKGECSSSNPQNYSRFRHSPNCWYLRNWTIHTWIRQCLKYDAQDKALYTLVNKVQYGIFPDNFTFNLLMDSFIKKENYKDALSVVFEVMMQEAFEVPSTQLLSLYVLFHCLAKKTDFSWEEERNFGASLLLPGLKQKNSVGFSSQLYGYALLGKVELQQGLRAVYHNMPLIWKPGYLDRALQVMEKVAASPEDIKLCREALDVLGAVLKALTSADGASEEQSQNDEDNQGSEKLVEQLDIEETEQSKLPQYLERFKALHSKLQALGKIESEGLLSLTTQLVKEKLSTCEAEDIATYEQNLQQWHLDLVQLIQREQQQREQAKQEYQAQKAAKASA

SEQ ID NO: 52194 - protein, 197 aa, Homo sapiens
  Payload ID: 10397
  Gene Symbol: MRPS27
  Gene Name: mitochondrial ribosomal protein S27
  ENSP ID: ENSP00000427237
MDKTFERKLPVSSLTISRLIDNISSREEIDHAEYYLYKFRHSPNCWYLRNWTIHTWIRQCLKYDAQDKALYTLVNKVQYGIFPDNFTFNLLMDSFIKKENYKDALSVVFEVMMQEAFEVPSTQLLSLYVLFHCLAKKTDFSWEEERNFGASLLLPGLKQKNSVGFSSQLYGYALLGKLNDPYKYCSSWLELLHSSSS

SEQ ID NO: 52195 - protein, 358 aa, Homo sapiens
  Payload ID: 10397
  Gene Symbol: MRPS27
  Gene Name: mitochondrial ribosomal protein S27
  ENSP ID: ENSP00000428120
MDKTFERKLPVSSLTISRLIDNISSREEIDHAEYYLYKFRHSPNCWYLRNWTIHTWIRQCLKYDAQDKALYTLVNKVQYGIFPDNFTFNLLMDSFIKKENYKDALSVVFEVMMQEAFEVPSTQLLSLYVLFHCLAKKTDFSWEEERNFGASLLLPGLKQKNSVGFSSQLYGYALLGKVELQQGLRAVYHNMPLIWKPGYLDRALQVMEKVAASPEDIKLCREALDVLGAVLKALTSADGASEEQSQNDEDNQGSEKLVEQLDIEETEQSKLPQYLERFKALHSKLQALGKIESEGLLSLTTQLVKEKLSTCEAEDIATYEQNLQQWHLDLVQLIQREQQQREQAKQEYQAQKAAKASA

SEQ ID NO: 52196 - protein, 94 aa, Homo sapiens
  Payload ID: 10397
  Gene Symbol: MRPS27
  Gene Name: mitochondrial ribosomal protein S27
  ENSP ID: ENSP00000430590
MAASIVRRGMLLARQVVLPQLSPAGKRYLLSSAYVDSHKWEAREKEHYCLADLASLMDKTFERKLPVSSLTISRLIDNISSREEIDHAEYYLYK

SEQ ID NO: 52197 - protein, 187 aa, Homo sapiens
  Payload ID: 10398
  Gene Symbol: MRPS28
  Gene Name: mitochondrial ribosomal protein S28
  Uniprot ID: Q9Y2Q9
  ENSP ID: ENSP00000276585
MAALCRTRAVAAESHFLRVFLFFRPFRGVGTESGSESGSSNAKEPKTRAGGFASALERHSELLQKVEPLQKGSPKNVESFASMLRHSPLTQMGPAKDKLVIGRIFHIVENDLYIDFGGKFHCVCRRPEVDGEKYQKGTRVRLRLLDLELTSRFLGATTDTTVLEANAVLLGIQESKDSRSKEEHHEK

SEQ ID NO: 52198 - protein, 162 aa, Homo sapiens
  Payload ID: 10398
  Gene Symbol: MRPS28
  Gene Name: mitochondrial ribosomal protein S28
  ENSP ID: ENSP00000427846
  MOD_RES (1)..(1): Any amino acid
XTRAVAAESHFLRVFLFFRPFRGVGTESGSESGSSNAKEPKTRAGGFASALERHSELLQKRWGFAMLPRLVLNSWVQVILLRWPPKVLGLQMTDGSPKNVESFASMLRHSPLTQMGPAKDKLVIGRIFHIVENDLYIDFGGKFHCVCRRPEVDGEKYQKGTR

SEQ ID NO: 52199 - protein, 86 aa, Homo sapiens
  Payload ID: 10398
  Gene Symbol: MRPS28
  Gene Name: mitochondrial ribosomal protein S28
  ENSP ID: ENSP00000427965
MAALCRTRAVAAESHFLRVFLFFRPFRGVGTESGSESGSSNAKEPKTRAGGFASALERHSELLQKVEPLQKEIPERNQGPVAAIRS

SEQ ID NO: 52200 - protein, 143 aa, Homo sapiens
  Payload ID: 10398
  Gene Symbol: MRPS28
  Gene Name: mitochondrial ribosomal protein S28
  ENSP ID: ENSP00000428050
  MOD_RES (1)..(1): Any amino acid
XFCVAFAYWAGSVHTALVFLGLNAGGKGSPKNVESFASMLRHSPLTQMGPAKDKLVIGRIFHIVENDLYIDFGGKFHCVCRRPEVDGEKYQKGTRVRLRLLDLELTSRFLGATTDTTVLEANAVLLGIQESKDSRSKEEHHEK

SEQ ID NO: 52201 - protein, 103 aa, Homo sapiens
  Payload ID: 10398
  Gene Symbol: MRPS28
  Gene Name: mitochondrial ribosomal protein S28
  ENSP ID: ENSP00000428744
MLRHSPLTQMGPAKDKLVIGRIFHIVENDLYIDFGGKFHCVCRRPEVDGEKYQKGTRVRLRLLDLELTSRFLGATTDTTVLEANAVLLGIQESKDSRSKEEHH

SEQ ID NO: 52202 - protein, 125 aa, Homo sapiens
  Payload ID: 10398
  Gene Symbol: MRPS28
  Gene Name: mitochondrial ribosomal protein S28
  ENSP ID: ENSP00000428880
MLPRLVLNSWVQVILLRWPPKVLGLQMTDMGPAKDKLVIGRIFHIVENDLYIDFGGKFHCVCRRPEVDGEKYQKGTRVRLRLLDLELTSRFLGATTDTTVLEANAVLLGIQESKDSRSKEEHHEK

SEQ ID NO: 52203 - protein, 108 aa, Homo sapiens
  Payload ID: 10398
  Gene Symbol: MRPS28
  Gene Name: mitochondrial ribosomal protein S28
  ENSP ID: ENSP00000430401
MLPRLVLNSWVQVILLRWPPKVLGLQMTDMGPAKDKLVIGRIFHIVENDLYIDFGGKFHCVCRRPEVDGEKYQKGTRVRLRLLDLELTSRFLGATTDTTVLEANAVLL

SEQ ID NO: 52204 - protein, 83 aa, Homo sapiens
  Payload ID: 10398
  Gene Symbol: MRPS28
  Gene Name: mitochondrial ribosomal protein S28
  ENSP ID: ENSP00000476135
  MOD_RES (1)..(1): Any amino acid
XMLRHSPLTQMGPAKDKLVIGRIFHIVENDLYIDFGGKFHCVCRRPEVDGESPISWYAVWRRFSQVMITCFSSNSDFGKHRKR

SEQ ID NO: 52205 - protein, 439 aa, Homo sapiens
  Payload ID: 10399
  Gene Symbol: MRPS30
  Gene Name: mitochondrial ribosomal protein S30
  Uniprot ID: Q9NP92
  ENSP ID: ENSP00000424328
MAAARCWRPLLRGPRLSLHTAANAAATATETTCQDVAATPVARYPPIVASMTADSKAARLRRIERWQATVHAAESVDEKLRILTKMQFMKYMVYPQTFALNADRWYQYFTKTVFLSGLPPPPAEPEPEPEPEPEPALDLAALRAVACDCLLQEHFYLRRRRRVHRYEESEVISLPFLDQLVSTLVGLLSPHNPALAAAALDYRCPVHFYWVRGEEIIPRGHRRGRIDDLRYQIDDKPNNQIRISKQLAEFVPLDYSVPIEIPTIKCKPDKLPLFKRQYENHIFVGSKTADPCCYGHTQFHLLPDKLRRERLLRQNCADQIEVVFRANAIASLFAWTGAQAMYQGFWSEADVTRPFVSQAVITDGKYFSFFCYQLNTLALTTQADQNNPRKNICWGTQSKPLYETIEDNDVKGFNDDVLLQIVHFLLNRPKEEKSQLLEN

SEQ ID NO: 52206 - protein, 337 aa, Homo sapiens
  Payload ID: 10399
  Gene Symbol: MRPS30
  Gene Name: mitochondrial ribosomal protein S30
  ENSP ID: ENSP00000479189
MPTAGTSTSPRPCSCRVCRRPQRSPSPSPNPNLNLRWTSRRCVRSPATACCRSTYLRRGGACTVTRRARSYLCPSWISWCQPSWASSAHTTRPWPAALDYRCPVHFYWVRGEEIIPRGHRRGRIDDLRYQIDDKPNNQIRISKQLAEFVPLDYSVPIEIPTIKCKPDKLPLFKRQYENHIFVGSKTADPCCYGHTQFHLLPDKLRRERLLRQNCADQIEVVFRANAIASLFAWTGAQAMYQGFWSEADVTRPFVSQAVITDGKYFSFFCYQLNTLALTTQADQNNPRKNICWGTQSKPLYETIEDNDVKGFNDDVLLQIVHFLLNRPKEEKSQLLEN

SEQ ID NO: 52207 - protein, 395 aa, Homo sapiens
  Payload ID: 10400
  Gene Symbol: MRPS31
  Gene Name: mitochondrial ribosomal protein S31
  Uniprot ID: Q92665
  ENSP ID: ENSP00000315397
MFPRVSTFLPLRPLSRHPLSSGSPETSAAAIMLLTVRHGTVRYRSSALLARTKNNIQRYFGTNSVICSKKDKQSVRTEETSKETSESQDSEKENTKKDLLGIIKGMKVELSTVNVRTTKPPKRRPLKSLEATLGRLRRATEYAPKKRIEPLSPELVAAASAVADSLPFDKQTTKSELLSQLQQHEEESRAQRDAKRPKISFSNIISDMKVARSATARVRSRPELRIQFDEGYDNYPGQEKTDDLKKRKNIFTGKRLNIFDMMAVTKEAPETDTSPSLWDVEFAKQLATVNEQPLQNGFEELIQWTKEGKLWEFPINNEAGFDDDGSEFHEHIFLEKHLESFPKQGPIRHFMELVTCGLSKNPYLSVKQKVEHIEWFRNYFNEKKDILKESNIQFN

SEQ ID NO: 52208 - protein, 106 aa, Homo sapiens
  Payload ID: 10401
  Gene Symbol: MRPS33
  Gene Name: mitochondrial ribosomal protein S33
  Uniprot ID: Q9Y291
  ENSP ID: ENSP00000320567
MSSLSEYAFRMSRLSARLFGEVTRPTNSKSMKVVKLFSELPLAKKKETYDWYPNHHTYAELMQTLRFLGLYRDEHQDFMDEQKRLKKLRGKEKPKKGEGKRAAKRK

SEQ ID NO: 52209 - protein, 106 aa, Homo sapiens; identical to SEQ ID NO: 52208
  Payload ID: 10401
  Gene Symbol: MRPS33
  Gene Name: mitochondrial ribosomal protein S33
  Uniprot ID: Q9Y291
  ENSP ID: ENSP00000376732

SEQ ID NO: 52210 - protein, 106 aa, Homo sapiens; identical to SEQ ID NO: 52208
  Payload ID: 10401
  Gene Symbol: MRPS33
  Gene Name: mitochondrial ribosomal protein S33
  Uniprot ID: Q9Y291
  ENSP ID: ENSP00000417287

SEQ ID NO: 52211 - protein, 106 aa, Homo sapiens; identical to SEQ ID NO: 52208
  Payload ID: 10401
  Gene Symbol: MRPS33
  Gene Name: mitochondrial ribosomal protein S33
  Uniprot ID: Q9Y291
  ENSP ID: ENSP00000418451

SEQ ID NO: 52212 - protein, 96 aa, Homo sapiens
  Payload ID: 10401
  Gene Symbol: MRPS33
  Gene Name: mitochondrial ribosomal protein S33
  ENSP ID: ENSP00000420709
MSRLSARLFGEVTRPTNSKSMKVVKLFSELPLAKKKETYDWYPNHHTYAELMQTLRFLGLYRDEHQDFMDEQKRLKKLRGKEKPKKGEGKRAAKRK

SEQ ID NO: 52213 - protein, 225 aa, Homo sapiens
  Payload ID: 10402
  Gene Symbol: MRPS34
  Gene Name: mitochondrial ribosomal protein S34
  ENSP ID: ENSP00000177742
MARKKVRPRLIAELARRVRALREQLNRPRDSQLYAVDYETLTRPFSGRRLPVRAWADVRRESRLLQLLGRLPLFGLGRLVTRKSWLWQHDEPCYWRLTRVRPDYTAQNLDHGKAWGILTFKDASFSSSGKTESEAREIEHVMYHDWRLVPKHEEEAFTAFTPAPEDSLASVPYPPLLRAMIIAERQKNGDTSTEEPMLNVQRIRMEPWDYPAKQEDKGRAKGTPV

SEQ ID NO: 52214 - protein, 218 aa, Homo sapiens
  Payload ID: 10402
  Gene Symbol: MRPS34
  Gene Name: mitochondrial ribosomal protein S34
  Uniprot ID: P82930
  ENSP ID: ENSP00000380531
MARKKVRPRLIAELARRVRALREQLNRPRDSQLYAVDYETLTRPFSGRRLPVRAWADVRRESRLLQLLGRLPLFGLGRLVTRKSWLWQHDEPCYWRLTRVRPDYTAQNLDHGKAWGILTFKGKTESEAREIEHVMYHDWRLVPKHEEEAFTAFTPAPEDSLASVPYPPLLRAMIIAERQKNGDTSTEEPMLNVQRIRMEPWDYPAKQEDKGRAKGTPV

SEQ ID NO: 52215 - protein, 176 aa, Homo sapiens
  Payload ID: 10402
  Gene Symbol: MRPS34
  Gene Name: mitochondrial ribosomal protein S34
  ENSP ID: ENSP00000479049
MARKKVRPRLIAELARRVRALREQLNRPRDSQLYAVDYETLTRPFSGRRLPVRAWADVRRESRLLQLLGRLPLFGLGRLVTRKSWLWQHDEPCYWRLTRVRPDYTAQNLDHGKAWGILTFKDASFSSSGKTESEAREIEHVMYHDWRLVPKHEEEAFTASRRAGRQLASCRPASGP

SEQ ID NO: 52216 - protein, 323 aa, Homo sapiens
  Payload ID: 10403
  Gene Symbol: MRPS35
  Gene Name: mitochondrial ribosomal protein S35
  Uniprot ID: P82673
  ENSP ID: ENSP00000081029
MAAAALPAWLSLQSRARTLRAFSTAVYSATPVPTPSLPERTPGNERPPRRKALPPRTEKMAVDQDWPSVYPVAAPFKPSAVPLPVRMGYPVKKGVPMAKEGNLELLKIPNFLHLTPVAIKKHCEALKDFCTEWPAALDSDEKCEKHFPIEIDSTDYVSSGPSVRNPRARVVVLRVKLSSLNLDDHAKKKLIKLVGERYCKTTDVLTIKTDRCPLRRQNYDYAVYLLTVLYHESWNTEEWEKSKTEADMEEYIWENSSSERNILETLLQMKAAEKNMEINKEELLGTKEIEEYKKSVVSLKNEEENENSISQYKESVKRLLNVT

SEQ ID NO: 52217 - protein, 41 aa, Homo sapiens
  Payload ID: 10403
  Gene Symbol: MRPS35
  Gene Name: mitochondrial ribosomal protein S35
  ENSP ID: ENSP00000437990
MAAAALPAWLSLQSRARTLRAFSTAVYSATPVPTPSLRTTS

SEQ ID NO: 52218 - protein, 38 aa, Homo sapiens
  Payload ID: 10403
  Gene Symbol: MRPS35
  Gene Name: mitochondrial ribosomal protein S35
  ENSP ID: ENSP00000437991
AAAALPAWLSLQSRARTLRAFSTAVYSATPVPTPSLQY

SEQ ID NO: 52219 - protein, 162 aa, Homo sapiens
  Payload ID: 10403
  Gene Symbol: MRPS35
  Gene Name: mitochondrial ribosomal protein S35
  ENSP ID: ENSP00000442137
  MOD_RES (1)..(1): Any amino acid
XARTLRAFSTAVYSATPVPTPSLPERTPGNERPPRRKALPPRTEKMAVDQDWPSVYPVAAPFKPSAVPLPVRMGYPVKKGVPMAKEGNLELLKIPNFLHLTPVAIKKHCEALKDFCTEWPAALDSDEKCEKHFPIEIDSTDYVSSGPSVRNPRARVVVLREM

SEQ ID NO: 52220 - protein, 194 aa, Homo sapiens
  Payload ID: 10403
  Gene Symbol: MRPS35
  Gene Name: mitochondrial ribosomal protein S35
  Uniprot ID: P82673
  ENSP ID: ENSP00000445390
MAAAALPAWLSLQSRARTLRAFSTAVYSATPVPTPSLPERTPGNERPPRRKALPPRTEKMAVDQDWPSVYPVAAPFKPSAVPLPVRMGYPVKKGVPMAKEGNLELLKIPNFLHLTPVAIKKHCEALKDFCTEWPAALDSDEKCEKHFPIEIDSTDYVSSGPSVRNPRARVVVLRVPFKEAELRLCSVSTNSVIP

SEQ ID NO: 52221 - protein, 103 aa, Homo sapiens
  Payload ID: 10404
  Gene Symbol: MRPS36
  Gene Name: mitochondrial ribosomal protein S36
  Uniprot ID: P82909
  ENSP ID: ENSP00000256441
MMGSKMASASRVVQVVKPHTPLIRFPDRRDNPKPNVSEALRSAGLPSHSSVISQHSKGSKSPDLLMYQGPPDTAEIIKTLPQKYRRKLVSQEEMEFIQRGGPE

SEQ ID NO: 52222 - protein, 38 aa, Homo sapiens
  Payload ID: 10404
  Gene Symbol: MRPS36
  Gene Name: mitochondrial ribosomal protein S36
  ENSP ID: ENSP00000423659
MYQGPPDTAEIIKTLPQKYRRKLVSQEEMEFIQRGGPE

SEQ ID NO: 52223 - protein, 38 aa, Homo sapiens; identical to SEQ ID NO: 52222
  Payload ID: 10404
  Gene Symbol: MRPS36
  Gene Name: mitochondrial ribosomal protein S36
  ENSP ID: ENSP00000473310

SEQ ID NO: 52224 - protein, 103 aa, Homo sapiens; identical to SEQ ID NO: 52221
  Payload ID: 10404
  Gene Symbol: MRPS36
  Gene Name: mitochondrial ribosomal protein S36
  Uniprot ID: P82909
  ENSP ID: ENSP00000482331

SEQ ID NO: 52225 - protein, 38 aa, Homo sapiens; identical to SEQ ID NO: 52222
  Payload ID: 10404
  Gene Symbol: MRPS36
  Gene Name: mitochondrial ribosomal protein S36
  ENSP ID: ENSP00000484623

SEQ ID NO: 52226 - protein, 430 aa, Homo sapiens
  Payload ID: 10405
  Gene Symbol: MRPS5
  Gene Name: mitochondrial ribosomal protein S5
  Uniprot ID: P82675
  ENSP ID: ENSP00000272418
MATAVRAVGCLPVLCSGTAGHLLGRQCSLNTLPAASILAWKSVLGNGHLSSLGTRDTHPYASLSRALQTQCCISSPSHLMSQQYRPYSFFTKLTADELWKGALAETGAGAKKGRGKRTKKKKRKDLNRGQIIGEGRYGFLWPGLNVPLMKNGAVQTIAQRSKEEQEKVEADMIQQREEWDRKKKMKVKRERGWSGNSWGGISLGPPDPGPCGETYEDFDTRILEVRNVFTMTAKEGRKKSIRVLVAVGNGKGAAGFSIGKATDRMDAFRKAKNRAVHHLHYIERYEDHTIFHDISLRFKRTHIKMKKQPKGYGLRCHRAIITICRLIGIKDMYAKVSGSINMLSLTQGLFRGLSRQETHQQLADKKGLHVVEIREECGPLPIVVASPRGPLRKDPEPEDEVPDVKLDWEDVKTAQGMKRSVWSNLKRAAT

SEQ ID NO: 52227 - protein, 251 aa, Homo sapiens
  Payload ID: 10405
  Gene Symbol: MRPS5
  Gene Name: mitochondrial ribosomal protein S5
  Uniprot ID: P82675
  ENSP ID: ENSP00000341660
MATAVRAVGCLPVLCSGTAGHLLGRQCSLNTLPAASILAWKSVLGNGHLSSLGTRDTHPYASLSRALQTQCCISSPSHLMSQQYRPYSFFTKLTADELWKGALAETGAGAKKGRGKRTKKKKRKDLNRGQIIGEGRYGFLWPGLNVPLMKNGAVQTIAQRSKEEQEKVEADMIQQREEWDRKKKMKVKRERGWSGNSWGGISLGPPDPGPCGETYEDFDTRILEVFLLGKLLIGWMLSGKQRTEQFTICII

SEQ ID NO: 52228 - protein, 125 aa, Homo sapiens
  Payload ID: 10406
  Gene Symbol: MRPS6
  Gene Name: mitochondrial ribosomal protein S6
  Uniprot ID: P82932
  ENSP ID: ENSP00000382250
MPRYELALILKAMQRPETAATLKRTIEALMDRGAIVRDLENLGERALPYRISAHSQQHNRGGYFLVDFYAPTAAVESMVEHLSRDIDVIRGNIVKHPLTQELKECEGIVPVPLAEKLYSTKKRKK

SEQ ID NO: 52229 - protein, 242 aa, Homo sapiens
  Payload ID: 10407
  Gene Symbol: MRPS7
  Gene Name: mitochondrial ribosomal protein S7
  Uniprot ID: Q9Y2R9
  ENSP ID: ENSP00000245539
MAAPAVKVARGWSGLALGVRRAVLQLPGLTQVRWSRYSPEFKDPLIDKEYYRKPVEELTEEEKYVRELKKTQLIKAAPAGKTSSVFEDPVISKFTNMMMIGGNKVLARSLMIQTLEAVKRKQFEKYHAASAEEQATIERNPYTIFHQALKNCEPMIGLVPILKGGRFYQVPVPLPDRRRRFLAMKWMITECRDKKHQRTLMPEKLSHKLLEAFHNQGPVIKRKHDLHKMAEANRALAHYRWW

SEQ ID NO: 52230 - protein, 156 aa, Homo sapiens
  Payload ID: 10407
  Gene Symbol: MRPS7
  Gene Name: mitochondrial ribosomal protein S7
  ENSP ID: ENSP00000462506
  MOD_RES (1)..(1): Any amino acid
XDPVISKFTNMMMIGGNKVLARSLMIQTLEAVKRKQFEKYHAASAEEQATIERNPYTIFHQALKNCEPMIGLVPILKGGRFYQVPVPLPDRRRRFLAMKWMITECRDKKHQRTLMPEKLSHKLLEAFHNQGPVIKRKHDLHKMAEANRALAHYRWW

SEQ ID NO: 52231 - protein, 28 aa, Homo sapiens
  Payload ID: 10407
  Gene Symbol: MRPS7
  Gene Name: mitochondrial ribosomal protein S7
  ENSP ID: ENSP00000462677
RAVLQLPGFCLPPPFPPSQANSGEMEPL

SEQ ID NO: 52232 - protein, 183 aa, Homo sapiens
  Payload ID: 10407
  Gene Symbol: MRPS7
  Gene Name: mitochondrial ribosomal protein S7
  ENSP ID: ENSP00000463263
MAAPAVKVARGWSGLALGVRRAVLQLPGLTQVRWSRYSPEFKDPLIDKEYYRKPVEELTEEEKYVRELKKTQLIKAAPAGKTSSVFEDPVISKFTNMMMIGGNKVLARSLMIQTLEAVKRKQFEKYHAASAEEQATIERNPYTIFHQALKNCEPMIGLVPILKGGRFYQVNEWPGQESRALHM

SEQ ID NO: 52233 - protein, 271 aa, Homo sapiens
  Payload ID: 10407
  Gene Symbol: MRPS7
  Gene Name: mitochondrial ribosomal protein S7
  ENSP ID: ENSP00000463683
MSSYLGQGPELLWLRFSSRSPRRSPSSARWQSCLLLSQTYSLVESAFACLLLSPPPRLTQVRWSRYSPEFKDPLIDKEYYRKPVEELTEEEKYVRELKKTQLIKAAPAGKTSSVFEDPVISKFTNMMMIGGNKVLARSLMIQTLEAVKRKQFEKYHAASAEEQATIERNPYTIFHQALKNCEPMIGLVPILKGGRFYQVPVPLPDRRRRFLAMKWMITECRDKKHQRTLMPEKLSHKLLEAFHNQGPVIKRKHDLHKMAEANRALAHYRWW

SEQ ID NO: 52234 - protein, 172 aa, Homo sapiens
  Payload ID: 10407
  Gene Symbol: MRPS7
  Gene Name: mitochondrial ribosomal protein S7
  ENSP ID: ENSP00000463870
  MOD_RES (1)..(1): Any amino acid
XQLIKAAPAGKTSSVFEDPVISKFTNMMMIGGNKVLARSLMIQTLEAVKRKQFEKYHAASAEEQATIERNPYTIFHQALKNCEPMIGLVPILKGGRFYQVPVPLPDRRRRFLAMKWMITECRDKKHQRTLMPEKLSHKLLEAFHNQGPVIKRKHDLHKMAEANRALAHYRWW

SEQ ID NO: 52235 - protein, 396 aa, Homo sapiens
  Payload ID: 10408
  Gene Symbol: MRPS9
  Gene Name: mitochondrial ribosomal protein S9
  Uniprot ID: P82933
  ENSP ID: ENSP00000258455
MAAPCVSYGGAVSYRLLLWGRGSLARKQGLWKTAAPELQTNVRSQILRLRHTAFVIPKKNVPTSKRETYTEDFIKKQIEEFNIGKRHLANMMGEDPETFTQEDIDRAIAYLFPSGLFEKRARPVMKHPEQIFPRQRAIQWGEDGRPFHYLFYTGKQSYYSLMHDVYGMLLNLEKHQSHLQAKSLLPEKTVTRDVIGSRWLIKEELEEMLVEKLSDLDYMQFIRLLEKLLTSQCGAAEEEFVQRFRRSVTLESKKQLIEPVQYDEQGMAFSKSEGKRKTAKAEAIVYKHGSGRIKVNGIDYQLYFPITQDREQLMFPFHFVDRLGKHDVTCTVSGGGRSAQAGAIRLAMAKALCSFVTEDEVEWMRQAGLLTTDPRVRERKKPGQEGARRKFTWKKR

SEQ ID NO: 52236 - protein, 57 aa, Homo sapiens
  Payload ID: 10408
  Gene Symbol: MRPS9
  Gene Name: mitochondrial ribosomal protein S9
  ENSP ID: ENSP00000388885
  MOD_RES (1)..(1): Any amino acid
XQSHLQAKSLLPEKTVTRDVIGSRWLIKEELEEMLVEKLSDLDVQKSLRVCEMQSRE

SEQ ID NO: 52237 - protein, 210 aa, Homo sapiens
  Payload ID: 10409
  Gene Symbol: MRRF
  Gene Name: mitochondrial ribosome recycling factor
  Uniprot ID: Q96E11
  ENSP ID: ENSP00000297908
MALGLKCFRMVHPTFRNYLAASIRPVSEVTLKTVHERQHGHRQYMAYSAVPVRHFATKKAKGSLDKIAVVTADGKLALNQISQISMKSPQLILVNMASFPECTAAAIKAIRESGMNLNPEVEGTLIRVPIPQVTREHREMLVKLAKQNTNKAKDSLRKVRTNSMNKLKKSKDTVSEDTIRLIEKQISQMADDTVAELDRHLAVKTKELLG

SEQ ID NO: 52238 - protein, 262 aa, Homo sapiens
  Payload ID: 10409
  Gene Symbol: MRRF
  Gene Name: mitochondrial ribosome recycling factor
  Uniprot ID: Q96E11
  ENSP ID: ENSP00000343867
MALGLKCFRMVHPTFRNYLAASIRPVSEVTLKTVHERQHGHRQYMAYSAVPVRHFATKKAKAKGKGQSQTRVNINAALVEDIINLEEVNEEMKSVIEALKDNFNKTLNIRTSPGSLDKIAVVTADGKLALNQISQISMKSPQLILVNMASFPECTAAAIKAIRESGMNLNPEVEGTLIRVPIPQVTREHREMLVKLAKQNTNKAKDSLRKVRTNSMNKLKKSKDTVSEDTIRLIEKQISQMADDTVAELDRHLAVKTKELLG

SEQ ID NO: 52239 - protein, 201 aa, Homo sapiens
  Payload ID: 10409
  Gene Symbol: MRRF
  Gene Name: mitochondrial ribosome recycling factor
  Uniprot ID: Q96E11
  ENSP ID: ENSP00000362828
MALGLKCFRMVHPTFRNYLAASIRPVSEVTLKTVHERQHGHRQYMAYSAVPVRHFATKKAKAKGKGQSQTRVNINAALVEDIINLEEVNEEMKSVIEALKDNFNKTLNIRTSPGSLDKIAVVTADGKLALNQISQISMKSPQLILVNMASFPECTAAAIKAIRESGMNLNPEVEGTLIRVPIPQSAKWPMTQWQNWTGIWQ

SEQ ID NO: 52240 - protein, 218 aa, Homo sapiens
  Payload ID: 10409
  Gene Symbol: MRRF
  Gene Name: mitochondrial ribosome recycling factor
  Uniprot ID: Q96E11
  ENSP ID: ENSP00000362834
MAYSAVPVRHFATKKAKAKGKGQSQTRVNINAALVEDIINLEEVNEEMKSVIEALKDNFNKTLNIRTSPGSLDKIAVVTADGKLALNQISQISMKSPQLILVNMASFPECTAAAIKAIRESGMNLNPEVEGTLIRVPIPQVTREHREMLVKLAKQNTNKAKDSLRKVRTNSMNKLKKSKDTVSEDTIRLIEKQISQMADDTVAELDRHLAVKTKELLG

SEQ ID NO: 52241 - protein, 201 aa, Homo sapiens; identical to SEQ ID NO: 52239
  Payload ID: 10409
  Gene Symbol: MRRF
  Gene Name: mitochondrial ribosome recycling factor
  Uniprot ID: Q96E11
  ENSP ID: ENSP00000377850

SEQ ID NO: 52242 - protein, 153 aa, Homo sapiens
  Payload ID: 10409
  Gene Symbol: MRRF
  Gene Name: mitochondrial ribosome recycling factor
  ENSP ID: ENSP00000395072
MALGLKCFRMVHPTFRNYLAASIRPVSEVTLKTVHERQHGHRQYMAYSAVPVRHFATKKAKAKGKGQSQTRVNINAALVEDIINLEEVNEEMKSVIEALKDNFNKTLNIRTSPGSLDKIAVVTADGKLALNQISQISMKSPQLILVNMASFPE

SEQ ID NO: 52243 - protein, 176 aa, Homo sapiens
  Payload ID: 10409
  Gene Symbol: MRRF
  Gene Name: mitochondrial ribosome recycling factor
  Uniprot ID: Q96E11
  ENSP ID: ENSP00000433288
MALGLKCFRMVHPTFRNYLAASIRPVSEVTLKTVHERQHGHRQYMAYSAVPVRHFATKKAKAKGKGQSQTRVNINAALVEDIINLEEVNEEMKSVIEALKDNFNKTLNIRTSPGSLDKIAVVTADGKLALNQISQISMKSPQLILVNMASFPEELAWIRSLRVPGIRSHLYHQLAV

SEQ ID NO: 52244 - protein, 168 aa, Homo sapiens
  Payload ID: 10409
  Gene Symbol: MRRF
  Gene Name: mitochondrial ribosome recycling factor
  Uniprot ID: Q96E11
  ENSP ID: ENSP00000434807
MALGLKCFRMVHPTFRNYLAASIRPVSEVTLKTVHERQHGHRQYMAYSAVPVRHFATKKAKAKGKGQSQTRVNINAALVEDIINLEEVNEEMKSVIEALKDNFNKTLNIRTSPGSLDKIAVVTADGKLALNQISQISMKSPQLILVNMASFPETMKQIKQYFNGPNVA

SEQ ID NO: 52245 - protein, 168 aa, Homo sapiens; identical to SEQ ID NO: 52244
  Payload ID: 10409
  Gene Symbol: MRRF
  Gene Name: mitochondrial ribosome recycling factor
  Uniprot ID: Q96E11
  ENSP ID: ENSP00000436360

SEQ ID NO: 52246 - protein, 334 aa, Homo sapiens
  Payload ID: 10410
  Gene Symbol: MTG1
  Gene Name: mitochondrial ribosome-associated GTPase 1
  Uniprot ID: Q9BT17
  ENSP ID: ENSP00000323047
MRLTPRALCSAAQAAWRENFPLCGRDVARWFPGHMAKGLKKMQSSLKLVDCIIEVHDARIPLSGRNPLFQETLGLKPHLLVLNKMDLADLTEQQKIMQHLEGEGLKNVIFTNCVKDENVKQIIPMVTELIGRSHRYHRKENLEYCIMVIGVPNVGKSSLINSLRRQHLRKGKATRVGGEPGITRAVMSKIQVSERPLMFLLDTPGVLAPRIESVETGLKLALCGTVLDHLVGEETMADYLLYTLNKHQRFGYVQHYGLGSACDNVERVLKSVAVKLGKTQKVKVLTGTGNVNIIQPNYPAAARDFLQTFRRGLLGSVMLDLDVLRGHPPAETLP

SEQ ID NO: 52247 - protein, 283 aa, Homo sapiens
  Payload ID: 10410
  Gene Symbol: MTG1
  Gene Name: mitochondrial ribosome-associated GTPase 1
  ENSP ID: ENSP00000393480
MRLTPRALCSAAQAAWRENFPLCGRDVARWFPGHMAKGLKKMQSSLKLVDCIIEVHDARIPLSGRNPLFQETLGLKPHLLVLNKMDLADLTEQQKIMQHLEGEGLKNVIFTNCVKDENVKQIIPMVTELIGRSHRYHRKEVSERPLMFLLDTPGVLAPRIESVETGLKLALCGTVLDHLVGEETMADYLLYTLNKHQRFGYVQHYGLGSACDNVERVLKSVAVKLGKTQKVKVLTGTGNVNIIQPNYPAAARDFLQTFRRGLLGSVMLDLDVLRGHPPAETLP

SEQ ID NO: 52248 - protein, 293 aa, Homo sapiens
  Payload ID: 10410
  Gene Symbol: MTG1
  Gene Name: mitochondrial ribosome-associated GTPase 1
  ENSP ID: ENSP00000475596
MQSSLKLVDCIIEVHDARIPLSGRNPLFQETLGLKPHLLVLNKMDLADLTEQQKIMQHLEGEGLKNVIFTNCVKDENVKQIIPMVTELIGRSHRYHRKENLEYCIMVIGVPNVGKSSLINSLRRQHLRKGKATRVGGEPGITRAVMSKIQVSERPLMFLLDTPGVLAPRIESVETGLKLALCGTVLDHLVGEETMADYLLYTLNKHQRFGYVQHYGLGSACDNVERVLKSVAVKLGKTQKVKVLTGTGNVNIIQPNYPAAARDFLQTFRRGLLGSVMLDLDVLRGHPPAETLP

SEQ ID NO: 52249 - protein, 406 aa, Homo sapiens
  Payload ID: 10411
  Gene Symbol: MTG2
  Gene Name: mitochondrial ribosome-associated GTPase 2
  Uniprot ID: Q9H4K7
  ENSP ID: ENSP00000359859
MAPARCFSARLRTVFQGVGHWALSTWAGLKPSRLLPQRASPRLLSVGRADLAKHQELPGKKLLSEKKLKRYFVDYRRVLVCGGNGGAGASCFHSEPRKEFGGPDGGDGGNGGHVILRVDQQVKSLSSVLSRYQGFSGEDGGSKNCFGRSGAVLYIRVPVGTLVKEGGRVVADLSCVGDEYIAALGGAGGKGNRFFLANNNRAPVTCTPGQPGQQRVLHLELKTVAHAGMVGFPNAGKSSLLRAISNARPAVASYPFTTLKPHVGIVHYEGHLQIAVADIPGIIRGAHQNRGLGSAFLRHIERCRFLLFVVDLSQPEPWTQVDDLKYELEMYEKGLSARPHAIVANKIDLPEAQANLSQLRDHLGQEVIVLSALTGENLEQLLLHLKVLYDAYAEAELGQGRQPLRW

SEQ ID NO: 52250 - protein, 233 aa, Homo sapiens
  Payload ID: 10411
  Gene Symbol: MTG2
  Gene Name: mitochondrial ribosome-associated GTPase 2
  ENSP ID: ENSP00000414693
MAPARCFSARLRTVFQGVGHWALSTWAGLKPSRLLPQRASPRLLSVGRADLAKHQELPGKKLLSEKKLKRYFVDYRRVLVCGGNGGAGASCFHSEPRKEFGGPDGGDGGNGGHVILRVDQQVKSLSSVLSRYQGFSGEDGGSKNCFGRSGAVLYIRVPVGTLVKEGGRVVADLSCVGDEYIAALGGAGGKGNRFFLANNNRAPVTCTPGQPGQQRVLHLELKTVAHAGMVGFP

SEQ ID NO: 52251 - protein, 139 aa, Homo sapiens
  Payload ID: 10411
  Gene Symbol: MTG2
  Gene Name: mitochondrial ribosome-associated GTPase 2
  ENSP ID: ENSP00000435214
MAPARCFSARLRTVFQGVGHWALSTWAGLKPSRLLPQRASPRLLSVGRADLAKHQELPGKKLLSEKKLKRYFVDYRRVLVCGGNGGAGASCFHSEPRKEFGGPDGGDGGNGGHVILRGPRGHAGEGGRQSCGRPVLRGR

SEQ ID NO: 52252 - protein, 353 aa, Homo sapiens
  Payload ID: 10412
  Gene Symbol: MRM1
  Gene Name: mitochondrial rRNA methyltransferase 1
  Uniprot ID: Q6IN84
  ENSP ID: ENSP00000478520
MALLSTVRGATWGRLVTRHFSHAARHGERPGGEELSRLLLDDLVPTSRLELLFGMTPCLLALQAARRSVARLLLQAGKAGLQGKRAELLRMAEARDIPVLRPRRQKLDTMCRYQVHQGVCMEVSPLRPRPWREAGEASPGDDPQQLWLVLDGIQDPRNFGAVLRSAHFLGVDKVITSRRNSCPLTPVVSKSSAGAMEVMDVFSTDDLTGFLQTKAQQGWLVAGTVGCPSTEDPQSSEIPIMSCLEFLWERPTLLVLGNEGSGLSQEVQASCQLLLTILPRRQLPPGLESLNVSVAAGILLHSICSQRKGFPTEGERRQLLQDPQEPSARSEGLSMAQHPGLSSGPEKERQNEG

SEQ ID NO: 52253 - protein, 353 aa, Homo sapiens; identical to SEQ ID NO: 52252
  Payload ID: 10412
  Gene Symbol: MRM1
  Gene Name: mitochondrial rRNA methyltransferase 1
  Uniprot ID: Q6IN84
  ENSP ID: ENSP00000481559

SEQ ID NO: 52254 - protein, 158 aa, Homo sapiens
  Payload ID: 10412
  Gene Symbol: MRM1
  Gene Name: mitochondrial rRNA methyltransferase 1
  ENSP ID: ENSP00000482526
MEVMDVFSTDDLTGFLQTKAQQGWLVAGTVGCPSTEDPQSSEIPIMSCLEFLWERPTLLVLGNEGSGLSQEVQASCQLLLTILPRRQLPPGLESLNVSVAAGILLHSICSQRKGFPTEGERRQLLQDPQEPSARSEGLSMAQHPGLSSGPEKERQNEG

SEQ ID NO: 52255 - protein, 158 aa, Homo sapiens; identical to SEQ ID NO: 52254
  Payload ID: 10412
  Gene Symbol: MRM1
  Gene Name: mitochondrial rRNA methyltransferase 1
  ENSP ID: ENSP00000488408

SEQ ID NO: 52256 - protein, 373 aa, Homo sapiens
  Payload ID: 10413
  Gene Symbol: MECR
  Gene Name: mitochondrial trans-2-enoyl-CoA reductase
  Uniprot ID: Q9BV79
  ENSP ID: ENSP00000263702
MWVCSTLWRVRTPARQWRGLLPASGCHGPAASSYSASAEPARVRALVYGHHGDPAKVVELKNLELAAVRGSDVRVKMLAAPINPSDINMIQGNYGFLPELPAVGGNEGVAQVVAVGSNVTGLKPGDWVIPANAGLGTWRTEAVFSEEALIQVPSDIPLQSAATLGVNPCTAYRMLMDFEQLQPGDSVIQNASNSGVGQAVIQIAAALGLRTINVVRDRPDIQKLSDRLKSLGAEHVITEEELRRPEMKNFFKDMPQPRLALNCVGGKSSTELLRQLARGGTMVTYGGMAKQPVVASVSLLIFKDLKLRGFWLSQWKKDHSPDQFKELILTLCDLIRRGQLTAPACSQVPLQDYQSALEASMKPFISSKQILTM

SEQ ID NO: 52257 - protein, 297 aa, Homo sapiens
  Payload ID: 10413
  Gene Symbol: MECR
  Gene Name: mitochondrial trans-2-enoyl-CoA reductase
  Uniprot ID: Q9BV79
  ENSP ID: ENSP00000362896
MLAAPINPSDINMIQGNYGFLPELPAVGGNEGVAQVVAVGSNVTGLKPGDWVIPANAGLGTWRTEAVFSEEALIQVPSDIPLQSAATLGVNPCTAYRMLMDFEQLQPGDSVIQNASNSGVGQAVIQIAAALGLRTINVVRDRPDIQKLSDRLKSLGAEHVITEEELRRPEMKNFFKDMPQPRLALNCVGGKSSTELLRQLARGGTMVTYGGMAKQPVVASVSLLIFKDLKLRGFWLSQWKKDHSPDQFKELILTLCDLIRRGQLTAPACSQVPLQDYQSALEASMKPFISSKQILTM

SEQ ID NO: 52258 - protein, 212 aa, Homo sapiens
  Payload ID: 10413
  Gene Symbol: MECR
  Gene Name: mitochondrial trans-2-enoyl-CoA reductase
  ENSP ID: ENSP00000436831
VIPANAGLGTWRTEAVFSEEALIQVPSDIPLQSAATLGVNPCTAYRMLMDFEQLQPGDSVIQNASNSGVGQAVIQIAAALGLRTINVVRDRPDIQKLSDRLKSLGAEHVITEEELRRPEMKNFFKDMPQPRLALNCVGGKSSTELLRQLARGGTMVTYGGMAKQPVVASVVSWVQREACLEPGQTPQPGHIPWHDSCLSLGNAPFLEGSLYP

SEQ ID NO: 52259 - protein, 399 aa, Homo sapiens
  Payload ID: 10414
  Gene Symbol: MTERF1
  Gene Name: mitochondrial transcription termination factor 1
  Uniprot ID: Q99551
  ENSP ID: ENSP00000248643
MQSLSLGQTSISKGLNYLTIMAPGNLWHMRNNFLFGSRCWMTRFSAENIFKSVSFRLFGVKCHNTDSEPLKNEDLLKNLLTMGVDIDMARKRQPGVFHRMITNEQDLKMFLLSKGASKEVIASIISRYPRAITRTPENLSKRWDLWRKIVTSDLEIVNILERSPESFFRSNNNLNLENNIKFLYSVGLTRKCLCRLLTNAPRTFSNSLDLNKQMVEFLQAAGLSLGHNDPADFVRKIIFKNPFILIQSTKRVKANIEFLRSTFNLNSEELLVLICGPGAEILDLSNDYARRSYANIKEKLFSLGCTEEEVQKFVLSYPDVIFLAEKKFNDKIDCLMEENISISQIIENPRVLDSSISTLKSRIKELVNAGCNLSTLNITLLSWSKKRYEAKLKKLSRFA

SEQ ID NO: 52260 - protein, 379 aa, Homo sapiens
  Payload ID: 10414
  Gene Symbol: MTERF1
  Gene Name: mitochondrial transcription termination factor 1
  ENSP ID: ENSP00000384986
MAPGNLWHMRNNFLFGSRCWMTRFSAENIFKSVSFRLFGVKCHNTDSEPLKNEDLLKNLLTMGVDIDMARKRQPGVFHRMITNEQDLKMFLLSKGASKEVIASIISRYPRAITRTPENLSKRWDLWRKIVTSDLEIVNILERSPESFFRSNNNLNLENNIKFLYSVGLTRKCLCRLLTNAPRTFSNSLDLNKQMVEFLQAAGLSLGHNDPADFVRKIIFKNPFILIQSTKRVKANIEFLRSTFNLNSEELLVLICGPGAEILDLSNDYARRSYANIKEKLFSLGCTEEEVQKFVLSYPDVIFLAEKKFNDKIDCLMEENISISQIIENPRVLDSSISTLKSRIKELVNAGCNLSTLNITLLSWSKKRYEAKLKKLSRFA

SEQ ID NO: 52261 - protein, 158 aa, Homo sapiens
  Payload ID: 10414
  Gene Symbol: MTERF1
  Gene Name: mitochondrial transcription termination factor 1
  ENSP ID: ENSP00000395097
MQSLSLGQTSISKGLNYLTIMAPGNLWHMRNNFLFGSRCWMTRFSAENIFKSVSFRLFGVKCHNTDSEPLKNEDLLKNLLTMGVDIDMARKRQPGVFHRMITNEQDLKMFLLSKGASKEVIASIISRYPRAITRTPENLSKRWDLWRKIVTSDLEIVN

SEQ ID NO: 52262 - protein, 26 aa, Homo sapiens
  Payload ID: 10414
  Gene Symbol: MTERF1
  Gene Name: mitochondrial transcription termination factor 1
  ENSP ID: ENSP00000400966
MAPGNLWHMRNNFLFGSRCWMTRFSA

SEQ ID NO: 52263 - protein, 139 aa, Homo sapiens
  Payload ID: 10414
  Gene Symbol: MTERF1
  Gene Name: mitochondrial transcription termination factor 1
  ENSP ID: ENSP00000402175
MAPGNLWHMRNNFLFGSRCWMTRFSAENIFKSVSFRLFGVKCHNTDSEPLKNEDLLKNLLTMGVDIDMARKRQPGVFHRMITNEQDLKMFLLSKGASKEVIASIISRYPRAITRTPENLSKRWDLWRKIVTSDLEIVNI

SEQ ID NO: 52264 - protein, 379 aa, Homo sapiens; identical to SEQ ID NO: 52260
  Payload ID: 10414
  Gene Symbol: MTERF1
  Gene Name: mitochondrial transcription termination factor 1
  ENSP ID: ENSP00000414116

SEQ ID NO: 52265 - protein, 385 aa, Homo sapiens
  Payload ID: 10415
  Gene Symbol: MTERF2
  Gene Name: mitochondrial transcription termination factor 2
  Uniprot ID: Q49AM1
  ENSP ID: ENSP00000240050
MLWKLLLRSQSCRLCSFRKMRSPPKYRPFLACFTYTTDKQSSKENTRTVEKLYKCSVDIRKIRRLKGWVLLEDETYVEEIANILQELGADETAVASILERCPEAIVCSPTAVNTQRKLWQLVCKNEEELIKLIEQFPESFFTIKDQENQKLNVQFFQELGLKNVVISRLLTAAPNVFHNPVEKNKQMVRILQESYLDVGGSEANMKVWLLKLLSQNPFILLNSPTAIKETLEFLQEQGFTSFEILQLLSKLKGFLFQLCPRSIQNSISFSKNAFKCTDHDLKQLVLKCPALLYYSVPVLEERMQGLLREGISIAQIRETPMVLELTPQIVQYRIRKLNSSGYRIKDGHLANLNGSKKEFEANFGKIQAKKVRPLFNPVAPLNVEE

SEQ ID NO: 52266 - protein, 385 aa, Homo sapiens; identical to SEQ ID NO: 52265
  Payload ID: 10415
  Gene Symbol: MTERF2
  Gene Name: mitochondrial transcription termination factor 2
  Uniprot ID: Q49AM1
  ENSP ID: ENSP00000376575

SEQ ID NO: 52267 - protein, 385 aa, Homo sapiens; identical to SEQ ID NO: 52265
  Payload ID: 10415
  Gene Symbol: MTERF2
  Gene Name: mitochondrial transcription termination factor 2
  Uniprot ID: Q49AM1
  ENSP ID: ENSP00000447651

SEQ ID NO: 52268 - protein, 33 aa, Homo sapiens
  Payload ID: 10415
  Gene Symbol: MTERF2
  Gene Name: mitochondrial transcription termination factor 2
  ENSP ID: ENSP00000448246
MLWKLLLRSQSCRLCSFRKMRSPPKYRPFLACF

SEQ ID NO: 52269 - protein, 178 aa, Homo sapiens
  Payload ID: 10415
  Gene Symbol: MTERF2
  Gene Name: mitochondrial transcription termination factor 2
  ENSP ID: ENSP00000448343
MLWKLLLRSQSCRLCSFRKMRSPPKYRPFLACFTYTTDKQSSKENTRTVEKLYKCSVDIRKIRRLKGWVLLEDETYVEEIANILQELGADETAVASILERCPEAIVCSPTAVNTQRKLWQLVCKNEEELIKLIEQFPESFFTIKDQENQKLNVQFFQELGLKNVVISRLLTAAPNVFH

SEQ ID NO: 52270 - protein, 86 aa, Homo sapiens
  Payload ID: 10415
  Gene Symbol: MTERF2
  Gene Name: mitochondrial transcription termination factor 2
  ENSP ID: ENSP00000448854
MLWKLLLRSQSCRLCSFRKMRSPPKYRPFLACFTYTTDKQSSKENTRTVEKLYKCSVDIRKIRRLKGWVLLEDETYVEEIANILQE

SEQ ID NO: 52271 - protein, 417 aa, Homo sapiens
  Payload ID: 10416
  Gene Symbol: MTERF3
  Gene Name: mitochondrial transcription termination factor 3
  Uniprot ID: Q96E29
  ENSP ID: ENSP00000287025
MALSAQQIPRWFNSVKLRSLINAAQLTKRFTRPARTLLHGFSAQPQISSDNCFLQWGFKTYRTSSLWNSSQSTSSSSQENNSAQSSLLPSMNEQSQKTQNISSFDSELFLEELDELPPLSPMQPISEEEAIQIIADPPLPPASFTLRDYVDHSETLQKLVLLGVDLSKIEKHPEAANLLLRLDFEKDIKQMLLFLKDVGIEDNQLGAFLTKNHAIFSEDLENLKTRVAYLHSKNFSKADVAQMVRKAPFLLNFSVERLDNRLGFFQKELELSVKKTRDLVVRLPRLLTGSLEPVKENMKVYRLELGFKHNEIQHMITRIPKMLTANKMKLTETFDFVHNVMSIPHHIIVKFPQVFNTRLFKVKERHLFLTYLGRAQYDPAKPNYISLDKLVSIPDEIFCEEIAKASVQDFEKFLKTL

SEQ ID NO: 52272 - protein, 173 aa, Homo sapiens
  Payload ID: 10416
  Gene Symbol: MTERF3
  Gene Name: mitochondrial transcription termination factor 3
  ENSP ID: ENSP00000429267
MLLFLKDVGIEDNQLGAFLTKNHAIFSEDLENLKTRVAYLHSKNFSKADVAQMVRKAPFLLNFSVERLDNRLGFFQKELELSVKKTRDLVVRLPRLLTGSLEPVKENMKVFNTRLFKVKERHLFLTYLGRAQYDPAKPNYISLDKLVSIPDEIFCEEIAKASVQDFEKFLKTL

SEQ ID NO: 52273 - protein, 361 aa, Homo sapiens
  Payload ID: 10416
  Gene Symbol: MTERF3
  Gene Name: mitochondrial transcription termination factor 3
  ENSP ID: ENSP00000429400
MALSAQQIPRWFNSVKLRSLINAAQLTKRFTRPARTLLHGFSAQPQISSDNCFLQWGFKTYRTSSLWNSSQSTSSSSQENNSAQSSLLPSMNEQSQKTQNISSFDSELFLEELDELPPLSPMQPISEEEAIQIIADPPLPPASFTLRDYVDHSETLQKLVLLGVDLSKIEKHPEAANLLLRLDFEKDIKQMLLFLKDVGIEDNQLGAFLTKNHAIFSEDLENLKTRVAYLHSKNFSKADVAQMVRKAPFLLNFSVERLDNRLGFFQKELELSVKKTRDLVVRLPRLLTGSLEPVKENMKVYRLELGFKHNEIQHMITRIPKMLTANKMKLTETFDFVHNVMSIPHHIIVKFPQFLHRKYRI

SEQ ID NO: 52274 - protein, 67 aa, Homo sapiens
  Payload ID: 10416
  Gene Symbol: MTERF3
  Gene Name: mitochondrial transcription termination factor 3
  ENSP ID: ENSP00000429526
MALSAQQIPRWFNSVKLRSLINAAQLTKRFTRPARTLLHGFSAQPQISSDNCFLQWGFKTYRTSSLW

SEQ ID NO: 52275 - protein, 296 aa, Homo sapiens
  Payload ID: 10416
  Gene Symbol: MTERF3
  Gene Name: mitochondrial transcription termination factor 3
  Uniprot ID: Q96E29
  ENSP ID: ENSP00000430138
MQPISEEEAIQIIADPPLPPASFTLRDYVDHSETLQKLVLLGVDLSKIEKHPEAANLLLRLDFEKDIKQMLLFLKDVGIEDNQLGAFLTKNHAIFSEDLENLKTRVAYLHSKNFSKADVAQMVRKAPFLLNFSVERLDNRLGFFQKELELSVKKTRDLVVRLPRLLTGSLEPVKENMKVYRLELGFKHNEIQHMITRIPKMLTANKMKLTETFDFVHNVMSIPHHIIVKFPQVFNTRLFKVKERHLFLTYLGRAQYDPAKPNYISLDKLVSIPDEIFCEEIAKASVQDFEKFLKTL

SEQ ID NO: 52276 - protein, 381 aa, Homo sapiens
  Payload ID: 10417
  Gene Symbol: MTERF4
  Gene Name: mitochondrial transcription termination factor 4
  Uniprot ID: Q7Z6M4
  ENSP ID: ENSP00000241527
MAAFGRQVLDWHRLIPLTWACMARQTPHLGEQRRTTASLLRKLTTASNGGVIEELSCVRSNNYVQEPECRRNLVQCLLEKQGTPVVQGSLELERVMSSLLDMGFSNAHINELLSVRRGASLQQLLDIISEFILLGLNPEPVCVVLKKSPQLLKLPIMQMRKRSSYLQKLGLGEGKLKRVLYCCPEIFTMRQQDINDTVRLLKEKCLFTVQQVTKILHSCPSVLREDLGQLEYKFQYAYFRMGIKHPDIVKSEYLQYSLTKIKQRHIYLERLGRYQTPDKKGQTQIPNPLLKDILRVSEAEFLARTACTSVEEFQVFKKLLAREEEESESSTSDDKRASLDEDEDDDDEEDNDEDDNDEDDDDEDDDEAEDNDEDEDDDEEE

SEQ ID NO: 52277 - protein, 381 aa, Homo sapiens; identical to SEQ ID NO: 52276
  Payload ID: 10417
  Gene Symbol: MTERF4
  Gene Name: mitochondrial transcription termination factor 4
  Uniprot ID: Q7Z6M4
  ENSP ID: ENSP00000375840

SEQ ID NO: 52278 - protein, 193 aa, Homo sapiens
  Payload ID: 10417
  Gene Symbol: MTERF4
  Gene Name: mitochondrial transcription termination factor 4
  ENSP ID: ENSP00000384998
MRQQDINDTVRLLKEKCLFTVQQVTKILHSCPSVLREDLGQLEYKFQYAYFRMGIKHPDIVKSEYLQYSLTKIKQRHIYLERLGRYQTPDKKGQTQIPNPLLKDILRVSEAEFLARTACTSVEEFQVFKKLLAREEEESESSTSDDKRASLDEDEDDDDEEDNDEDDNDEDDDDEDDDEAEDNDEDEDDDEEE

SEQ ID NO: 52279 - protein, 182 aa, Homo sapiens
  Payload ID: 10417
  Gene Symbol: MTERF4
  Gene Name: mitochondrial transcription termination factor 4
  ENSP ID: ENSP00000385183
MAAFGRQVLDWHRLIPLTWACMARQTPHLGEQRRTTASLLRKLTTASNGGVIEELSCVRSNNYVQEPECRRNLVQCLLEKQGTPVVQGSLELERVMSSLLDMGFSNAHINELLSVRRGASLQQLLDIISEFILLGLNPEPVCVVLKKSPQLLKLPIMQMRKRSSYLQKLGLGEAASSYSVTA

SEQ ID NO: 52280 - protein, 252 aa, Homo sapiens
  Payload ID: 10417
  Gene Symbol: MTERF4
  Gene Name: mitochondrial transcription termination factor 4
  ENSP ID: ENSP00000385630
MAAFGRQVLDWHRLIPLTWACMARQTPHLGEQRRTTASLLRKLTTASNGGVIEELSCVRSNNYVQEPECRRNLVQCLLEKQGTPVVQGSLELERVMSSLLDMGFSNAHINELLSVRRGASLQQLLDIISEFILLGLNPEPVCVVLKKSPQLLKLPIMQMRKRSSYLQKLGLGEGKLKRVLYCCPEIFTMRQQDINDTVRLLKEKCLFTVQQVTKILHSCPSVLREDLGQLEYKFQVRMTDSVISVVSGENDW

SEQ ID NO: 52281 - protein, 151 aa, Homo sapiens
  Payload ID: 10417
  Gene Symbol: MTERF4
  Gene Name: mitochondrial transcription termination factor 4
  ENSP ID: ENSP00000393063
MARQTPHLGEQRRTTASLLRKLTTASNGGVIEELSCVRSNNYVQEPECRRNLVQCLLEKQGTPVVQGSLELERVMSSLLDMGFSNAHINELLSVRRGASLQQLLDIISEFILLGLNPEPVCVVLKKSPQLLKLPIMQMRKRSSYLQKLGLG

SEQ ID NO: 52282 - protein, 152 aa, Homo sapiens
  Payload ID: 10417
  Gene Symbol: MTERF4
  Gene Name: mitochondrial transcription termination factor 4
  ENSP ID: ENSP00000401409
SYLQKLGLGEGKLKRVLYCCPEIFTMRQQDINDTVRLLKEKCLFTVQQVTKILHSCPSVLREDLGQLEYKFQYAYFRMGIKHPDIVKTASSYSVTAKKKTFVLQKKSSSVTPSTSPQLSQMAVAVLCQWKEFLLRGGAGGLIYYCATASPAH

SEQ ID NO: 52283 - protein, 257 aa, Homo sapiens
  Payload ID: 10417
  Gene Symbol: MTERF4
  Gene Name: mitochondrial transcription termination factor 4
  ENSP ID: ENSP00000409023
VLDWHRLIPLTWACMARQTPHLGEQRRTTASLLRKLTTASNGGVIEELSCVRSNNYVQEPECRRNLVQCLLEKQGTPVVQGSLELERVMSSLLDMGFSNAHINELLSVRRGASLQQLLDIISEFILLGLNPEPVCVVLKKSPQLLKLPIMQMRKRSSYLQKLGLGEGKLKRVLYCCPEIFTMRQQDINDTVRLLKEKCLFTVQQVTKILHSCPSVLREDLGQLEYKFQKNTTSSFCPFSLLPLFPPTPLFPAPCFSG

SEQ ID NO: 52284 - protein, 107 aa, Homo sapiens
  Payload ID: 10417
  Gene Symbol: MTERF4
  Gene Name: mitochondrial transcription termination factor 4
  ENSP ID: ENSP00000413346
SSSVTPSTSPQLSQMAVAVLCQWKEFLLRGGAGECTPSTYEKKLTIKWPQAGPSGGFQKKASLSQEVAAPCVLLGHDVEVEEGDMDDPAPVTNLLLCNCQSCAFQLR

SEQ ID NO: 52285 - protein, 187 aa, Homo sapiens
  Payload ID: 10417
  Gene Symbol: MTERF4
  Gene Name: mitochondrial transcription termination factor 4
  ENSP ID: ENSP00000414989
MAAFGRQMAPPGCRKTSSGLPVILHYGKLKRVLYCCPEIFTMRQQDINDTVRLLKEKCLFTVQQVTKILHSCPSVLREDLGQLEYKFQYAYFRMGIKHPDIVKSEYLQYSLTKIKQRHIYLERLGRYQTPDKKGQTQIPNPLLKDILRVSEAEFLARTACTSVEEFQVFKKLLAREEEESESSTSDD

SEQ ID NO: 52286 - protein, 249 aa, Homo sapiens
  Payload ID: 10417
  Gene Symbol: MTERF4
  Gene Name: mitochondrial transcription termination factor 4
  ENSP ID: ENSP00000419315
MAAFGRQVLDWHRLIPLTWACMARQTPHLGEQRRTTASLLRKLTTASNGGVIEELSCVRSNNYVQEPECRRNLVQCLLEKQGTPVVQGSLELERVMSSLLDMGFSNAHINELLSVRRGASLQQLLDIISEFILLGLNPEPVCVVLKKSPQLLKLPIMQMRKRSSYLQKLGLGEECTPSTYEKKLTIKWPQAGPSGGFQKKASLSQEVAAPCVLLGHDVEVEEGLIYYCATASPAHSSYAKRPAQARNKT

SEQ ID NO: 52287 - protein, 381 aa, Homo sapiens; identical to SEQ ID NO: 52276
  Payload ID: 10417
  Gene Symbol: MTERF4
  Gene Name: mitochondrial transcription termination factor 4
  Uniprot ID: Q7Z6M4
  ENSP ID: ENSP00000480378

SEQ ID NO: 52288 - protein, 727 aa, Homo sapiens
  Payload ID: 10418
  Gene Symbol: MTIF2
  Gene Name: mitochondrial translational initiation factor 2
  Uniprot ID: P46199
  ENSP ID: ENSP00000263629
MNQKLLKLENLLRFHTIYRQLHSLCQRRALRQWRHGFSSAYPVWTAQLCAWPWPTDVLTGAALSQYRLLVTKKEEGPWKSQLSSTKSKKVVEVWIGMTIEELARAMEKNTDYVYEALLNTDIDIDSLEADSHLDEVWIKEVITKAGMKLKWSKLKQDKVRKNKDAVRRPQADPALLTPRSPVVTIMGHVDHGKTTLLDKFRKTQVAAVETGGITQHIGAFLVSLPSGEKITFLDTPGHAAFSAMRARGAQVTDIVVLVVAADDGVMKQTVESIQHAKDAQVPIILAVNKCDKAEADPEKVKKELLAYDVVCEDYGGDVQAVPVSALTGDNLMALAEATVALAEMLELKADPNGPVEGTVIESFTDKGRGLVTTAIIQRGTLRKGSVLVAGKCWAKVRLMFDENGKTIDEAYPSMPVGITGWRDLPSAGEEILEVESEPRAREVVDWRKYEQEQEKGQEDLKIIEEKRKEHKEAHQKAREKYGHLLWKKRSILRFLERKEQIPLKPKEKRERDSNVLSVIIKGDVDGSVEAILNIIDTYDASHECELELVHFGVGDVSANDVNLAETFDGVIYGFNVNAGNVIQQSAAKKGVKIKLHKIIYRLVEDLQEELSSRLPCAVEEHPVGEASILATFSVTEGKKKVPVAGCRVQKGQLEKQKKFKLTRNGHVIWKGSLTSLKHHKDDISIVKTGMDCGLSLDEDNMEFQVGDRIVCYEEKQIQAKTSWDPGF

SEQ ID NO: 52289 - protein, 727 aa, Homo sapiens; identical to SEQ ID NO: 52288
  Payload ID: 10418
  Gene Symbol: MTIF2
  Gene Name: mitochondrial translational initiation factor 2
  Uniprot ID: P46199
  ENSP ID: ENSP00000378099

SEQ ID NO: 52290 - protein, 70 aa, Homo sapiens
  Payload ID: 10418
  Gene Symbol: MTIF2
  Gene Name: mitochondrial translational initiation factor 2
  ENSP ID: ENSP00000383880
MNQKLLKLENLLRFHTIYRQLHSLCQRRALRQWRHGFSSAYPVWTAQLCAWPWPTDVLTGAALSQYRLLV

SEQ ID NO: 52291 - protein, 727 aa, Homo sapiens; identical to SEQ ID NO: 52288
  Payload ID: 10418
  Gene Symbol: MTIF2
  Gene Name: mitochondrial translational initiation factor 2
  Uniprot ID: P46199
  ENSP ID: ENSP00000384481

SEQ ID NO: 52292 - protein, 70 aa, Homo sapiens; identical to SEQ ID NO: 52290
  Payload ID: 10418
  Gene Symbol: MTIF2
  Gene Name: mitochondrial translational initiation factor 2
  ENSP ID: ENSP00000388640

SEQ ID NO: 52293 - protein, 7 aa, Homo sapiens
  Payload ID: 10418
  Gene Symbol: MTIF2
  Gene Name: mitochondrial translational initiation factor 2
  ENSP ID: ENSP00000393025
MNQKLLK

SEQ ID NO: 52294 - protein, 72 aa, Homo sapiens
  Payload ID: 10418
  Gene Symbol: MTIF2
  Gene Name: mitochondrial translational initiation factor 2
  ENSP ID: ENSP00000393337
MNQKLLKLENLLRFHTIYRQLHSLCQRRALRQWRHGFSSAYPVWTAQLCAWPWPTDVLTGAALSQYRLLVTK

SEQ ID NO: 52295 - protein, 10 aa, Homo sapiens
  Payload ID: 10418
  Gene Symbol: MTIF2
  Gene Name: mitochondrial translational initiation factor 2
  ENSP ID: ENSP00000399531
MNQKLLKLEN

SEQ ID NO: 52296 - protein, 301 aa, Homo sapiens
  Payload ID: 10418
  Gene Symbol: MTIF2
  Gene Name: mitochondrial translational initiation factor 2
  ENSP ID: ENSP00000403492
  MOD_RES (1)..(1): Any amino acid
XPIILAVNKCDKAEADPEKVKKELLAYDVVCEDYGGDVQAVPVSALTGDNLMALAEATVALAEMLELKADPNGPVEGTVIESFTDKGRGLVTTAIIQRGTLRKGSVLVAGKCWAKPRAREVVDWRKYEQEQEKGQEDLKIIEEKRKEHKEAHQKAREKYGHLLWKKRSILRFLERKEQIPLKPKEKRERDSNVLSVIIKGDVDGSVEAILNIIDTYDASHECELELVHFGVGDVSANDVNLAETFDGVIYGFNVNAGNVIQQSAAKKGVKIKLHKIIYRLVEDLQEELSSRLPCAVEEHPV

SEQ ID NO: 52297 - protein, 26 aa, Homo sapiens
  Payload ID: 10418
  Gene Symbol: MTIF2
  Gene Name: mitochondrial translational initiation factor 2
  ENSP ID: ENSP00000416057
MNQKLLKLENLLRFHTIYRQLHSLCQ

SEQ ID NO: 52298 - protein, 278 aa, Homo sapiens
  Payload ID: 10419
  Gene Symbol: MTIF3
  Gene Name: mitochondrial translational initiation factor 3
  Uniprot ID: Q9H2K0
  ENSP ID: ENSP00000370508
MAALFLKRLTLQTVKSENSCIRCFGKHILQKTAPAQLSPIASAPRLSFLIHAKAFSTAEDTQNEGKKTKKNKTAFSNVGRKISQRVIHLFDEKGNDLGNMHRANVIRLMDERDLRLVQRNTSTEPAEYQLMTGLQILQERQRLREMEKANPKTGPTLRKELILSSNIGQHDLDTKTKQIQQWIKKKHLVQITIKKGKNVDVSENEMEEIFHQILQTMPGIATFSSRPQAVQGGKALMCVLRAFSKNEEKAYKETQETQERDTLNKDHGNDKESNVLHQ

SEQ ID NO: 52299 - protein, 278 aa, Homo sapiens; identical to SEQ ID NO: 52298
  Payload ID: 10419
  Gene Symbol: MTIF3
  Gene Name: mitochondrial translational initiation factor 3
  Uniprot ID: Q9H2K0
  ENSP ID: ENSP00000370512

SEQ ID NO: 52300 - protein, 278 aa, Homo sapiens; identical to SEQ ID NO: 52298
  Payload ID: 10419
  Gene Symbol: MTIF3
  Gene Name: mitochondrial translational initiation factor 3
  Uniprot ID: Q9H2K0
  ENSP ID: ENSP00000384659

SEQ ID NO: 52301 - protein, 445 aa, Homo sapiens
  Payload ID: 10420
  Gene Symbol: MTRF1
  Gene Name: mitochondrial translational release factor 1
  Uniprot ID: O75570
  ENSP ID: ENSP00000368790
MNRHLCVWLFRHPSLNGYLQCHIQLHSHQFRQIHLDTRLQVFRQNRNCILHLLSKNWSRRYCHQDTKMLWKHKALQKYMENLSKEYQTLEQCLQHIPVNEENRRSLNRRHAELAPLAAIYQEIQETEQAIEELESMCKSLNKQDEKQLQELALEERQTIDQKINMLYNELFQSLVPKEKYDKNDVILEVTAGRTTGGDICQQFTREIFDMYQNYSCYKHWQFELLNYTPADYGGLHHAAARISGDGVYKHLKYEGGIHRVQRIPEVGLSSRMQRIHTGTMSVIVLPQPDEVDVKLDPKDLRIDTFRAKGAGGQHVNKTDSAVRLVHIPTGLVVECQQERSQIKNKEIAFRVLRARLYQQIIEKDKRQQQSARKLQVGTRAQSERIRTYNFTQDRVSDHRIAYEVRDIKEFLCGGKGLDQLIQRLLQSADEEAIAELLDEHLKSAK

SEQ ID NO: 52302 - protein, 445 aa, Homo sapiens; identical to SEQ ID NO: 52301
  Payload ID: 10420
  Gene Symbol: MTRF1
  Gene Name: mitochondrial translational release factor 1
  Uniprot ID: O75570
  ENSP ID: ENSP00000368793

SEQ ID NO: 52303 - protein, 226 aa, Homo sapiens
  Payload ID: 10420
  Gene Symbol: MTRF1
  Gene Name: mitochondrial translational release factor 1
  ENSP ID: ENSP00000399279
MNRHLCVWLFRHPSLNGYLQCHIQLHSHQFRQIHLDTRLQVFRQNRNCILHLLSKNWSRRYCHQDTKMLWKHKALQKYMENLSKEYQTLEQCLQHIPVNEENRRSLNRRHAELAPLAAIYQEIQETEQAIEELESMCKSLNKQDEKQLQELALEERQTIDQKINMLYNELFQSLVPKEKYDKNDVILEVTAGRTTGGDICQQFTREIFDMYQNYSCYKHWQFELLN

SEQ ID NO: 52304 - protein, 151 aa, Homo sapiens
  Payload ID: 10420
  Gene Symbol: MTRF1
  Gene Name: mitochondrial translational release factor 1
  ENSP ID: ENSP00000400031
MNRHLCVWLFRHPSLNGYLQCHIQLHSHQFRQIHLDTRLQVFRQNRNCILHLLSKNWSRRYCHQDTKMLWKHKALQKYMENLSKEYQTLEQCLQHIPVNEENRRSLNRRHAELAPLAAIYQEIQETEQAIEELESMCKKTESCSVAQAGMQ

SEQ ID NO: 52305 - protein, 151 aa, Homo sapiens; identical to SEQ ID NO: 52304
  Payload ID: 10420
  Gene Symbol: MTRF1
  Gene Name: mitochondrial translational release factor 1
  ENSP ID: ENSP00000481161

SEQ ID NO: 52306 - protein, 137 aa, Homo sapiens
  Payload ID: 10420
  Gene Symbol: MTRF1
  Gene Name: mitochondrial translational release factor 1
  ENSP ID: ENSP00000482339
RRHAELAPLAAIYQEIQETEQAIEELESMCKSLNKQDEKQLQELALEERQTIDQKINMLYNELFQSLVPKEKYDKNDVILEVTAGRTTGGDICQQFTREIFDMYQNYSCYKHWQFELLNYTPADYGRHIEEFACRRY

SEQ ID NO: 52307 - protein, 153 aa, Homo sapiens
  Payload ID: 10420
  Gene Symbol: MTRF1
  Gene Name: mitochondrial translational release factor 1
  ENSP ID: ENSP00000484414
MNRHLCVWLFRHPSLNGYLQCHIQLHSHQFRQIHLDTRLQVFRQNRNCILHLLSKNWSRRYCHQDTKMLWKHKALQKYMENLSKEYQTLEQCLQHIPVNEENRRSLNRRHAELAPLAAIYQEIQETEQAIEELESMCKRDRVLLCGPGWNAVV

SEQ ID NO: 52308 - protein, 235 aa, Homo sapiens
  Payload ID: 10421
  Gene Symbol: MTRF1L
  Gene Name: mitochondrial translational release factor 1-like
  Uniprot ID: Q9UGC7
  ENSP ID: ENSP00000356199
MRSRVLWGAARWLWPRRAVGPARRPLSSGSPPLEELFTRGGPLRTFLERQAGSEAHLKVRRPELLAVIKLLNEKERELRETEHLLHDENEDLRKLAENEITLCQKEITQLKHQIILLLVPSEETDENDLILEVTAGVGGGLRHASASIGGSEAYRHMKFEGGVHRVQRVPKTEKQGRVHTSTMTVAILPQPTEINLVINPKDLRIDTKRASGAGGQHVNTTDSAVRIVHLPTDWK

SEQ ID NO: 52309 - protein, 271 aa, Homo sapiens
  Payload ID: 10421
  Gene Symbol: MTRF1L
  Gene Name: mitochondrial translational release factor 1-like
  Uniprot ID: Q9UGC7
  ENSP ID: ENSP00000356200
MRSRVLWGAARWLWPRRAVGPARRPLSSGSPPLEELFTRGGPLRTFLERQAGSEAHLKVRRPELLAVIKLLNEKERELRETEHLLHDENEDLRKLAENEITLCQKEITQLKHQIILLLVPSEETDENDLILEVTAGVGGQEAMLFTSEIFDMYQQYAAFKRWHFETLEYFPSELGGLRHASASIGGSEAYRHMKFEGGVHRVQRVPKTEKQGRVHTSTMTVAILPQPTEINLVINPKDLRIDTKRASGAGGQHVNTTDSAVRIVHLPTDWK

SEQ ID NO: 52310 - protein, 380 aa, Homo sapiens
  Payload ID: 10421
  Gene Symbol: MTRF1L
  Gene Name: mitochondrial translational release factor 1-like
  Uniprot ID: Q9UGC7
  ENSP ID: ENSP00000356202
MRSRVLWGAARWLWPRRAVGPARRPLSSGSPPLEELFTRGGPLRTFLERQAGSEAHLKVRRPELLAVIKLLNEKERELRETEHLLHDENEDLRKLAENEITLCQKEITQLKHQIILLLVPSEETDENDLILEVTAGVGGQEAMLFTSEIFDMYQQYAAFKRWHFETLEYFPSELGGLRHASASIGGSEAYRHMKFEGGVHRVQRVPKTEKQGRVHTSTMTVAILPQPTEINLVINPKDLRIDTKRASGAGGQHVNTTDSAVRIVHLPTGVVSECQQERSQLKNKELAMTKLRAKLYSMHLEEEINKRQNARKIQIGSKGRSEKIRTYNFPQNRVTDHRINKTLHDLETFMQGDYLLDELVQSLKEYADYESLVEIISQKV

SEQ ID NO: 52311 - protein, 231 aa, Homo sapiens
  Payload ID: 10421
  Gene Symbol: MTRF1L
  Gene Name: mitochondrial translational release factor 1-like
  ENSP ID: ENSP00000414383
IILLLVPSEETDENDLILEVTAGVGGGLRHASASIGGSEAYRHMKFEGGVHRVQRVPKTEKQGRVHTSTMTVAILPQPTEINLVINPKDLRIDTKRASGAGGQHVNTTDSAVRIVHLPTGVVSECQQERSQLKNKELAMTKLRAKLYSMHLEEEINKRQNARKIQIGSKGRSEKIRTYNFPQNRVTDHRINKTLHDLETFMQGDYLLDELVQSLKEYADYESLVEIISQKV

SEQ ID NO: 52312 - protein, 163 aa, Homo sapiens
  Payload ID: 10421
  Gene Symbol: MTRF1L
  Gene Name: mitochondrial translational release factor 1-like
  ENSP ID: ENSP00000415113
MFISFYDFKNIPQDSRCDGQLFINGRNNKNNSISLYFQGGLRHASASIGGSEAYRHMKFEGGVHRVQRVPKTEKQGRVHTSTMTVAILPQPTEINLVINPKDLRIDTKRASGAGGQHVNTTDSAVRIVHLPTGVVSECQQERSQLKNKELAMTKLRAKLYSMH

SEQ ID NO: 52313 - protein, 717 aa, Homo sapiens
  Payload ID: 10422
  Gene Symbol: MTO1
  Gene Name: mitochondrial tRNA translation optimization 1
  Uniprot ID: Q9Y2Z2
  ENSP ID: ENSP00000359323
MFYFRGCGRWVAVSFTKQQFPLARLSSDSAAPRTPHFDVIVIGGGHAGTEAATAAARCGSRTLLLTHRVDTIGQMSCNPSFGGIGKGHLMREVDALDGLCSRICDQSGVHYKVLNRRKGPAVWGLRAQIDRKLYKQNMQKEILNTPLLTVQEGAVEDLILTEPEPEHTGKCRVSGVVLVDGSTVYAESVILTTGTFLRGMIVIGLETHPAGRLGDQPSIGLAQTLEKLGFVVGRLKTGTPPRIAKESINFSILNKHIPDNPSIPFSFTNETVWIKPEDQLPCYLTHTNPRVDEIVLKNLHLNSHVKETTRGPRYCPSIESKVLRFPNRLHQVWLEPEGMDSDLIYPQGLSMTLPAELQEKMITCIRGLEKAKVIQPDGVLLLLPRMECNGAISAHHNLPLPGYGVQYDYLDPRQITPSLETHLVQRLFFAGQINGTTGYEEAAAQGVIAGINASLRVSRKPPFVVSRTEGYIGVLIDDLTTLGTSEPYRMFTSRVEFRLSLRPDNADSRLTLRGYKDAGCVSQQRYERACWMKSSLEEGISVLKSIEFLSSKWKKLIPEASISTSRSLPVRALDVLKYEEVDMDSLAKAVPEPLKKYTKCRELAERLKIEATYESVLFHQLQEIKGVQQDEALQLPKDLDYLTIRDVSLSHEVREKLHFSRPQTIGAASRIPGVTPAAIINLLRFVKTTQRRQSAMNESSKTDQYLCDADRLQEREL

SEQ ID NO: 52314 - protein, 643 aa, Homo sapiens
  Payload ID: 10422
  Gene Symbol: MTO1
  Gene Name: mitochondrial tRNA translation optimization 1
  Uniprot ID: Q9Y2Z2
  ENSP ID: ENSP00000359328
MSCNPSFGGIGKGHLMREVDALDGLCSRICDQSGVHYKVLNRRKGPAVWGLRAQIDRKLYKQNMQKEILNTPLLTVQEGAVEDLILTEPEPEHTGKCRVSGVVLVDGSTVYAESVILTTGTFLRGMIVIGLETHPAGRLGDQPSIGLAQTLEKLGFVVGRLKTGTPPRIAKESINFSILNKHIPDNPSIPFSFTNETVWIKPEDQLPCYLTHTNPRVDEIVLKNLHLNSHVKETTRGPRYCPSIESKVLRFPNRLHQVWLEPEGMDSDLIYPQGLSMTLPAELQEKMITCIRGLEKAKVIQPDGVLLLLPRMECNGAISAHHNLPLPGYGVQYDYLDPRQITPSLETHLVQRLFFAGQINGTTGYEEAAAQGVIAGINASLRVSRKPPFVVSRTEGYIGVLIDDLTTLGTSEPYRMFTSRVEFRLSLRPDNADSRLTLRGYKDAGCVSQQRYERACWMKSSLEEGISVLKSIEFLSSKWKKLIPEASISTSRSLPVRALDVLKYEEVDMDSLAKAVPEPLKKYTKCRELAERLKIEATYESVLFHQLQEIKGVQQDEALQLPKDLDYLTIRDVSLSHEVREKLHFSRPQTIGAASRIPGVTPAAIINLLRFVKTTQRRQSAMNESSKTDQYLCDADRLQEREL

SEQ ID NO: 52315 - protein, 118 aa, Homo sapiens
  Payload ID: 10422
  Gene Symbol: MTO1
  Gene Name: mitochondrial tRNA translation optimization 1
  ENSP ID: ENSP00000396529
MSCNPSFGGIGKGHLMREVDALDGLCSRICDQSGVHYKVLNRRKGPAVWGLRAQIDRKLYKQNMQKEILNTPLLTVQEGAVEDLILTEPEPEHTGKCRVSGVVLARRSAAMLLDSHQP

SEQ ID NO: 52316 - protein, 732 aa, Homo sapiens
  Payload ID: 10422
  Gene Symbol: MTO1
  Gene Name: mitochondrial tRNA translation optimization 1
  Uniprot ID: Q9Y2Z2
  ENSP ID: ENSP00000402038
MFYFRGCGRWVAVSFTKQQFPLARLSSDSAAPRTPHFDVIVIGGGHAGTEAATAAARCGSRTLLLTHRVDTIGQMSCNPSFGGIGKGHLMREVDALDGLCSRICDQSGVHYKVLNRRKGPAVWGLRAQIDRKLYKQNMQKEILNTPLLTVQEGAVEDLILTEPEPEHTGKCRVSGVVLVDGSTVYAESVILTTGTFLRGMIVIGLETHPAGRLGDQPSIGLAQTLEKLGFVVGRLKTGTPPRIAKESINFSILNKHIPDNPSIPFSFTNETVWIKPEDQLPCYLTHTNPRVDEIVLKNLHLNSHVKETTRGPRYCPSIESKVLRFPNRLHQVWLEPEGMDSDLIYPQGLSMTLPAELQEKMITCIRGLEKAKVIQPGYGVQYDYLDPRQITPSLETHLVQRLFFAGQINGTTGYEEAAAQTECCSVARLECSDMISQLQAILLPQPSLVAGTAGMHHNTQGVIAGINASLRVSRKPPFVVSRTEGYIGVLIDDLTTLGTSEPYRMFTSRVEFRLSLRPDNADSRLTLRGYKDAGCVSQQRYERACWMKSSLEEGISVLKSIEFLSSKWKKLIPEASISTSRSLPVRALDVLKYEEVDMDSLAKAVPEPLKKYTKCRELAERLKIEATYESVLFHQLQEIKGVQQDEALQLPKDLDYLTIRDVSLSHEVREKLHFSRPQTIGAASRIPGVTPAAIINLLRFVKTTQRRQSAMNESSKTDQYLCDADRLQEREL

SEQ ID NO: 52317 - protein, 98 aa, Homo sapiens
  Payload ID: 10422
  Gene Symbol: MTO1
  Gene Name: mitochondrial tRNA translation optimization 1
  ENSP ID: ENSP00000407580
EPEGMDSDLIYPQGLSMTLPAELQEKMITCIRGLEKAKVIQPGYGVQYDYLDPRQITPSLETHLVQRLFFAGQINGTTGYEEAAAQSVALLPGWSAVI

SEQ ID NO: 52318 - protein, 192 aa, Homo sapiens
  Payload ID: 10422
  Gene Symbol: MTO1
  Gene Name: mitochondrial tRNA translation optimization 1
  ENSP ID: ENSP00000416397
MFYFRGCGRWVAVSFTKQQFPLARLSSDSAAPRTPHFDVIVIGGGHAGTEAATAAARCGSRTLLLTHRVDTIGQMSCNPSFGGIGKGHLMREVDALDGLCSRICDQSGVHYKVLNRRKGPAVWGLRAQIDRKLYKQNMQKEILNTPLLTVQEGAVEDLILTEPEPEHTGKCRVSGVVLARRSAAMLLDSHQP

SEQ ID NO: 52319 - protein, 692 aa, Homo sapiens
  Payload ID: 10422
  Gene Symbol: MTO1
  Gene Name: mitochondrial tRNA translation optimization 1
  Uniprot ID: Q9Y2Z2
  ENSP ID: ENSP00000419561
MFYFRGCGRWVAVSFTKQQFPLARLSSDSAAPRTPHFDVIVIGGGHAGTEAATAAARCGSRTLLLTHRVDTIGQMSCNPSFGGIGKGHLMREVDALDGLCSRICDQSGVHYKVLNRRKGPAVWGLRAQIDRKLYKQNMQKEILNTPLLTVQEGAVEDLILTEPEPEHTGKCRVSGVVLVDGSTVYAESVILTTGTFLRGMIVIGLETHPAGRLGDQPSIGLAQTLEKLGFVVGRLKTGTPPRIAKESINFSILNKHIPDNPSIPFSFTNETVWIKPEDQLPCYLTHTNPRVDEIVLKNLHLNSHVKETTRGPRYCPSIESKVLRFPNRLHQVWLEPEGMDSDLIYPQGLSMTLPAELQEKMITCIRGLEKAKVIQPGYGVQYDYLDPRQITPSLETHLVQRLFFAGQINGTTGYEEAAAQGVIAGINASLRVSRKPPFVVSRTEGYIGVLIDDLTTLGTSEPYRMFTSRVEFRLSLRPDNADSRLTLRGYKDAGCVSQQRYERACWMKSSLEEGISVLKSIEFLSSKWKKLIPEASISTSRSLPVRALDVLKYEEVDMDSLAKAVPEPLKKYTKCRELAERLKIEATYESVLFHQLQEIKGVQQDEALQLPKDLDYLTIRDVSLSHEVREKLHFSRPQTIGAASRIPGVTPAAIINLLRFVKTTQRRQSAMNESSKTDQYLCDADRLQEREL

SEQ ID NO: 52320 - protein, 110 aa, Homo sapiens
  Payload ID: 10422
  Gene Symbol: MTO1
  Gene Name: mitochondrial tRNA translation optimization 1
  ENSP ID: ENSP00000428302
MSCNPSFGGIGKGHLMREVDALDGLCSRICDQSGVHYKVLNRRKGPAVWGLRAQIDRKLYKQNMQKEILNTPLLTVQEGAVEDLILTEPEPEHTGKCRVSGVVLGWSAVA

SEQ ID NO: 52321 - protein, 144 aa, Homo sapiens
  Payload ID: 10422
  Gene Symbol: MTO1
  Gene Name: mitochondrial tRNA translation optimization 1
  ENSP ID: ENSP00000428863
YIGVLIDDLTTLGTSEPYRMFTSRVEFRLSLRPDNADSRLTLRGYKDAGCVSQQRYERACWMKSSLEEGISVLKSIEFLSSKWKKLIPEASISTSRSLPVRALDVLKYEEVDMDSLAKAVPEPLKKYTKCRELAERLKIEDRGC

SEQ ID NO: 52322 - protein, 95 aa, Homo sapiens
  Payload ID: 10422
  Gene Symbol: MTO1
  Gene Name: mitochondrial tRNA translation optimization 1
  ENSP ID: ENSP00000428903
MFYFRGCGRWVAVSFTKQQFPLARLSSDSAAPRTPHFDVIVIGGGHAGTEAATAAARCGSRTLLLTHRVDTIGEERGCCGTWRRTQAASFPPPPV

SEQ ID NO: 52323 - protein, 115 aa, Homo sapiens
  Payload ID: 10422
  Gene Symbol: MTO1
  Gene Name: mitochondrial tRNA translation optimization 1
  ENSP ID: ENSP00000429595
  MOD_RES (1)..(1): Any amino acid
XDDLTTLGTSEPYRMFTSRVEFRLSLRPDNADSRLTLRGYKDAGCVSQQRYERACWMKSSLEEGISVLKSIEFLSSKWKKLIPEASISTSRSLPVRRGGRHLNPSYLGGRGRRIV

SEQ ID NO: 52324 - protein, 86 aa, Homo sapiens
  Payload ID: 10422
  Gene Symbol: MTO1
  Gene Name: mitochondrial tRNA translation optimization 1
  ENSP ID: ENSP00000430660
  MOD_RES (1)..(1): Any amino acid
XVLLLLPRMECNGAISAHHNLPLPGYGVQYDYLDPRQITPSLETHLVQRLFFAGQINGTTGYEEAAAQGIKTLAVCPNNDMKELVG

SEQ ID NO: 52325 - protein, 226 aa, Homo sapiens
  Payload ID: 10423
  Gene Symbol: MT-ATP6
  Gene Name: mitochondrially encoded ATP synthase 6
  Uniprot ID: P00846
  ENSP ID: ENSP00000354632
MNENLFASFIAPTILGLPAAVLIILFPPLLIPTSKYLINNRLITTQQWLIKLTSKQMMTMHNTKGRTWSLMLVSLIIFIATTNLLGLLPHSFTPTTQLSMNLAMAIPLWAGTVIMGFRSKIKNALAHFLPQGTPTPLIPMLVIIETISLLIQPMALAVRLTANITAGHLLMHLIGSATLAMSTINLPSTLIIFTILILLTILEIAVALIQAYVFTLLVSLYLHDNT

SEQ ID NO: 52326 - protein, 68 aa, Homo sapiens
  Payload ID: 10424
  Gene Symbol: MT-ATP8
  Gene Name: mitochondrially encoded ATP synthase 8
  Uniprot ID: P03928
  ENSP ID: ENSP00000355265
MPQLNTTVWPTMITPMLLTLFLITQLKMLNTNYHLPPSPKPMKMKNYNKPWEPKWTKICSLHSLPPQS

SEQ ID NO: 52327 - protein, 380 aa, Homo sapiens
  Payload ID: 10425
  Gene Symbol: MT-CYB
  Gene Name: mitochondrially encoded cytochrome b
  Uniprot ID: P00156
  ENSP ID: ENSP00000354554
MTPMRKTNPLMKLINHSFIDLPTPSNISAWWNFGSLLGACLILQITTGLFLAMHYSPDASTAFSSIAHITRDVNYGWIIRYLHANGASMFFICLFLHIGRGLYYGSFLYSETWNIGIILLLATMATAFMGYVLPWGQMSFWGATVITNLLSAIPYIGTDLVQWIWGGYSVDSPTLTRFFTFHFILPFIIAALATLHLLFLHETGSNNPLGITSHSDKITFHPYYTIKDALGLLLFLLSLMTLTLFSPDLLGDPDNYTLANPLNTPPHIKPEWYFLFAYTILRSVPNKLGGVLALLLSILILAMIPILHMSKQQSMMFRPLSQSLYWLLAADLLILTWIGGQPVSYPFTIIGQVASVLYFTTILILMPTISLIENKMLKWA

SEQ ID NO: 52328 - protein, 513 aa, Homo sapiens
  Payload ID: 10426
  Gene Symbol: MT-CO1
  Gene Name: mitochondrially encoded cytochrome c oxidase I
  Uniprot ID: P00395
  ENSP ID: ENSP00000354499
MFADRWLFSTNHKDIGTLYLLFGAWAGVLGTALSLLIRAELGQPGNLLGNDHIYNVIVTAHAFVMIFFMVMPIMIGGFGNWLVPLMIGAPDMAFPRMNNMSFWLLPPSLLLLLASAMVEAGAGTGWTVYPPLAGNYSHPGASVDLTIFSLHLAGVSSILGAINFITTIINMKPPAMTQYQTPLFVWSVLITAVLLLLSLPVLAAGITMLLTDRNLNTTFFDPAGGGDPILYQHLFWFFGHPEVYILILPGFGMISHIVTYYSGKKEPFGYMGMVWAMMSIGFLGFIVWAHHMFTVGMDVDTRAYFTSATMIIAIPTGVKVFSWLATLHGSNMKWSAAVLWALGFIFLFTVGGLTGIVLANSSLDIVLHDTYYVVAHFHYVLSMGAVFAIMGGFIHWFPLFSGYTLDQTYAKIHFTIMFIGVNLTFFPQHFLGLSGMPRRYSDYPDAYTTWNILSSVGSFISLTAVMLMIFMIWEAFASKRKVLMVEEPSMNLEWLYGCPPPYHTFEEPVYMKS

SEQ ID NO: 52329 - protein, 227 aa, Homo sapiens
  Payload ID: 10427
  Gene Symbol: MT-CO2
  Gene Name: mitochondrially encoded cytochrome c oxidase II
  Uniprot ID: P00403
  ENSP ID: ENSP00000354876
MAHAAQVGLQDATSPIMEELITFHDHALMIIFLICFLVLYALFLTLTTKLTNTNISDAQEMETVWTILPAIILVLIALPSLRILYMTDEVNDPSLTIKSIGHQWYWTYEYTDYGGLIFNSYMLPPLFLEPGDLRLLDVDNRVVLPIEAPIRMMITSQDVLHSWAVPTLGLKTDAIPGRLNQTTFTATRPGVYYGQCSEICGANHSFMPIVLELIPLKIFEMGPVFTL

SEQ ID NO: 52330 - protein, 261 aa, Homo sapiens
  Payload ID: 10428
  Gene Symbol: MT-CO3
  Gene Name: mitochondrially encoded cytochrome c oxidase III
  Uniprot ID: P00414
  ENSP ID: ENSP00000354982
MTHQSHAYHMVKPSPWPLTGALSALLMTSGLAMWFHFHSMTLLMLGLLTNTLTMYQWWRDVTRESTYQGHHTPPVQKGLRYGMILFITSEVFFFAGFFWAFYHSSLAPTPQLGGHWPPTGITPLNPLEVPLLNTSVLLASGVSITWAHHSLMENNRNQMIQALLITILLGLYFTLLQASEYFESPFTISDGIYGSTFFVATGFHGLHVIIGSTFLTICFIRQLMFHFTSKHHFGFEAAAWYWHFVDVVWLFLYVSIYWWGS

SEQ ID NO: 52331 - protein, 318 aa, Homo sapiens
  Payload ID: 10429
  Gene Symbol: MT-ND1
  Gene Name: mitochondrially encoded NADH dehydrogenase 1
  Uniprot ID: P03886
  ENSP ID: ENSP00000354687
MPMANLLLLIVPILIAMAFLMLTERKILGYMQLRKGPNVVGPYGLLQPFADAMKLFTKEPLKPATSTITLYITAPTLALTIALLLWTPLPMPNPLVNLNLGLLFILATSSLAVYSILWSGWASNSNYALIGALRAVAQTISYEVTLAIILLSTLLMSGSFNLSTLITTQEHLWLLLPSWPLAMMWFISTLAETNRTPFDLAEGESELVSGFNIEYAAGPFALFFMAEYTNIIMMNTLTTTIFLGTTYDALSPELYTTYFVTKTLLLTSLFLWIRTAYPRFRYDQLMHLLWKNFLPLTLALLMWYVSMPITISSIPPQT

SEQ ID NO: 52332 - protein, 347 aa, Homo sapiens
  Payload ID: 10430
  Gene Symbol: MT-ND2
  Gene Name: mitochondrially encoded NADH dehydrogenase 2
  Uniprot ID: P03891
  ENSP ID: ENSP00000355046
MNPLAQPVIYSTIFAGTLITALSSHWFFTWVGLEMNMLAFIPVLTKKMNPRSTEAAIKYFLTQATASMILLMAILFNNMLSGQWTMTNTTNQYSSLMIMMAMAMKLGMAPFHFWVPEVTQGTPLTSGLLLLTWQKLAPISIMYQISPSLNVSLLLTLSILSIMAGSWGGLNQTQLRKILAYSSITHMGWMMAVLPYNPNMTILNLTIYIILTTTAFLLLNLNSSTTTLLLSRTWNKLTWLTPLIPSTLLSLGGLPPLTGFLPKWAIIEEFTKNNSLIIPTIMATITLLNLYFYLRLIYSTSITLLPMSNNVKMKWQFEHTKPTPFLPTLIALTTLLLPISPFMLMIL

SEQ ID NO: 52333 - protein, 115 aa, Homo sapiens
  Payload ID: 10431
  Gene Symbol: MT-ND3
  Gene Name: mitochondrially encoded NADH dehydrogenase 3
  Uniprot ID: P03897
  ENSP ID: ENSP00000355206
MNFALILMINTLLALLLMIITFWLPQLNGYMEKSTPYECGFDPMSPARVPFSMKFFLVAITFLLFDLEIALLLPLPWALQTTNLPLMVMSSLLLIIILALSLAYEWLQKGLDWTE

SEQ ID NO: 52334 - protein, 459 aa, Homo sapiens
  Payload ID: 10432
  Gene Symbol: MT-ND4
  Gene Name: mitochondrially encoded NADH dehydrogenase 4
  Uniprot ID: P03905
  ENSP ID: ENSP00000354961
MLKLIVPTIMLLPLTWLSKKHMIWINTTTHSLIISIIPLLFFNQINNNLFSCSPTFSSDPLTTPLLMLTTWLLPLTIMASQRHLSSEPLSRKKLYLSMLISLQISLIMTFTATELIMFYIFFETTLIPTLAIITRWGNQPERLNAGTYFLFYTLVGSLPLLIALIYTHNTLGSLNILLLTLTAQELSNSWANNLMWLAYTMAFMVKMPLYGLHLWLPKAHVEAPIAGSMVLAAVLLKLGGYGMMRLTLILNPLTKHMAYPFLVLSLWGMIMTSSICLRQTDLKSLIAYSSISHMALVVTAILIQTPWSFTGAVILMIAHGLTSSLLFCLANSNYERTHSRIMILSQGLQTLLPLMAFWWLLASLANLALPPTINLLGELSVLVTTFSWSNITLLLTGLNMLVTALYSLYMFTTTQWGSLTHHINNMKPSFTRENTLMFMHLSPILLLSLNPDIITGFSS

SEQ ID NO: 52335 - protein, 98 aa, Homo sapiens
  Payload ID: 10433
  Gene Symbol: MT-ND4L
  Gene Name: mitochondrially encoded NADH dehydrogenase 4L
  Uniprot ID: P03901
  ENSP ID: ENSP00000354728
MPLIYMNIMLAFTISLLGMLVYRSHLMSSLLCLEGMMLSLFIMATLMTLNTHSLLANIVPIAMLVFAACEAAVGLALLVSISNTYGLDYVHNLNLLQC

SEQ ID NO: 52336 - protein, 603 aa, Homo sapiens
  Payload ID: 10434
  Gene Symbol: MT-ND5
  Gene Name: mitochondrially encoded NADH dehydrogenase 5
  Uniprot ID: P03915
  ENSP ID: ENSP00000354813
MTMHTTMTTLTLTSLIPPILTTLVNPNKKNSYPHYVKSIVASTFIISLFPTTMFMCLDQEVIISNWHWATTQTTQLSLSFKLDYFSMMFIPVALFVTWSIMEFSLWYMNSDPNINQFFKYLLIFLITMLILVTANNLFQLFIGWEGVGIMSFLLISWWYARADANTAAIQAILYNRIGDIGFILALAWFILHSNSWDPQQMALLNANPSLTPLLGLLLAAAGKSAQLGLHPWLPSAMEGPTPVSALLHSSTMVVAGIFLLIRFHPLAENSPLIQTLTLCLGAITTLFAAVCALTQNDIKKIVAFSTSSQLGLMMVTIGINQPHLAFLHICTHAFFKAMLFMCSGSIIHNLNNEQDIRKMGGLLKTMPLTSTSLTIGSLALAGMPFLTGFYSKDHIIETANMSYTNAWALSITLIATSLTSAYSTRMILLTLTGQPRFPTLTNINENNPTLLNPIKRLAAGSLFAGFLITNNISPASPFQTTIPLYLKLTALAVTFLGLLTALDLNYLTNKLKMKSPLCTFYFSNMLGFYPSITHRTIPYLGLLTSQNLPLLLLDLTWLEKLLPKTISQHQISTSIITSTQKGMIKLYFLSFFFPLILTLLLIT

SEQ ID NO: 52337 - protein, 174 aa, Homo sapiens
  Payload ID: 10435
  Gene Symbol: MT-ND6
  Gene Name: mitochondrially encoded NADH dehydrogenase 6
  Uniprot ID: P03923
  ENSP ID: ENSP00000354665
MMYALFLLSVGLVMGFVGFSSKPSPIYGGLVLIVSGVVGCVIILNFGGGYMGLMVFLIYLGGMMVVFGYTTAMAIEEYPEAWGSGVEVLVSVLVGLAMEVGLVLWVKEYDGVVVVVNFNSVGSWMIYEGEGSGLIREDPIGAGALYDYGRWLVVVTGWTLFVGVYIVIEIARGN

SEQ ID NO: 52338 - protein, 240 aa, Homo sapiens
  Payload ID: 10436
  Gene Symbol: MGARP
  Gene Name: mitochondria-localized glutamic acid-rich protein
  Uniprot ID: Q8TDB4
  ENSP ID: ENSP00000381928
MYLRRAVSKTLALPLRAPPNPAPLGKDASLRRMSSNRFPGSSGSNMIYYLVVGVTVSAGGYYAYKTVTSDQAKHTEHKTNLKEKTKAEIHPFQGEKENVAETEKASSEAPEELIVEAEVVDAEESPSATVVVIKEASACPGHVEAAPETTAVSAETGPEVTDAAARETTEVNPETTPEVTNAALDEAVTIDNDKDTTKNETSDEYAELEEENSPAESESSAGDDLQEEASVGSEAASAQG

SEQ ID NO: 52339 - protein, 741 aa, Homo sapiens
  Payload ID: 10437
  Gene Symbol: MFN1
  Gene Name: mitofusin 1
  ENSP ID: ENSP00000263969
MAEPVSPLKHFVLAKKAITAIFDQLLEFVTEGSHFVEATYKNPELDRIATEDDLVEMQGYKDKLSIIGEVLSRRHMKVAFFGRTSSGKSSVINAMLWDKVLPSGIGHITNCFLSVEGTDGDKAYLMTEGSDEKKSVKTVNQLAHALHMDKDLKAGCLVRVFWPKAKCALLRDDLVLVDSPGTDVTTELDSWIDKFCLDADVFVLVANSESTLMNTEKHFFHKVNERLSKPNIFILNNRWDASASEPEYMEDVRRQHMERCLHFLVEELKVVNALEAQNRIFFVSAKEVLSARKQKAQGMPESGVALAEGFHARLQEFQNFEQIFEECISQSAVKTKFEQHTIRAKQILATVKNIMDSVNLAAEDKRHYSVEEREDQIDRLDFIRNQMNLLTLDVKKKIKEVTEEVANKVSCAMTDEICRLSVLVDEFCSEFHPNPDVLKIYKSELNKHIEDGMGRNLADRCTDEVNALVLQTQQEIIENLKPLLPAGIQDKLHTLIPCKKFDLSYNLNYHKLCSDFQEDIVFRFSLGWSSLVHRFLGPRNAQRVLLGLSEPIFQLPRSLASTPTAPTTPATPDNASQEELMITLVTGLASVTSRTSMGIIIVGGVIWKTIGWKLLSVSLTMYGALYLYERLSWTTHAKERAFKQQFVNYATEKLRMIVSSTSANCSHQVKQQIATTFARLCQQVDITQKQLEEEIARLPKEIDQLEKIQNNSKLLRNKAVQLENELENFTKQFLPSSNEES

SEQ ID NO: 52340 - protein, 370 aa, Homo sapiens
  Payload ID: 10437
  Gene Symbol: MFN1
  Gene Name: mitofusin 1
  Uniprot ID: Q8IWA4
  ENSP ID: ENSP00000349963
MAEPVSPLKHFVLAKKAITAIFDQLLEFVTEGSHFVEATYKNPELDRIATEDDLVEMQGYKDKLSIIGEVLSRRHMKVAFFGRTSSGKSSVINAMLWDKVLPSGIGHITNCFLSVEGTDGDKAYLMTEGSDEKKSVKTVNQLAHALHMDKDLKAGCLVRVFWPKAKCALLRDDLVLVDSPGTDVTTELDSWIDKFCLDADVFVLVANSESTLMNTEKHFFHKVNERLSKPNIFILNNRWDASASEPEYMEDVRRQHMERCLHFLVEELKVVNALEAQNRIFFVSAKEVLSARKQKAQGMPESGVALAEGFHARLQEFQNFEQIFEECISQSAVKTKFEQHTIRAKQILATVKNIMDSVNLAAEDKRFHVQ

SEQ ID NO: 52341 - protein, 154 aa, Homo sapiens
  Payload ID: 10437
  Gene Symbol: MFN1
  Gene Name: mitofusin 1
  ENSP ID: ENSP00000419134
MAEPVSPLKHFVLAKKAITAIFDQLLEFVTEGSHFVEATYKNPELDRIATEDDLVEMQGYKDKLSIIGEVLSRRHMKVAFFGRTSSGKSSVINAMLWDKVLPSGIGHITNCFLSVEGTDGDKAYLMTEGSDEKKSVKTVNQLAHALHMDKDLKA

SEQ ID NO: 52342 - protein, 493 aa, Homo sapiens
  Payload ID: 10437
  Gene Symbol: MFN1
  Gene Name: mitofusin 1
  ENSP ID: ENSP00000419926
TVNQLAHALHMDKDLKAGCLVRVFWPKAKCALLRDDLVLVDSPGTDVTTELDSWIDKFCLDADVFVLVANSESTLMNTEKHFFHKVNERLSKPNIFILNNRWDASASEPEYMEDVRRQHMERCLHFLVEELKVVNALEAQNRIFFVSAKEVLSARKQKAQGMPESGVALAEGFHARLQEFQNFEQIFEECISQSAVKTKFEQHTIRAKQILATVKNIMDSVNLAAEDKRHYSVEEREDQIDRLDFIRNQMNLLTLDVKKKIKEVTEEVANKVSCAMTDEICRLSVLVDEFCSEFHPNPDVLKIYKSLPRSLASTPTAPTTPATPDNASQEELMITLVTGLASVTSRTSMGIIIVGGVIWKTIGWKLLSVSLTMYGALYLYERLSWTTHAKERAFKQQFVNYATEKLRMIVSSTSANCSHQVKQQIATTFARLCQQVDITQKQLEEEIARLPKEIDQLEKIQNNSKLLRNKAVQLENELENFTKQFLPSSNEES

SEQ ID NO: 52343 - protein, 124 aa, Homo sapiens
  Payload ID: 10437
  Gene Symbol: MFN1
  Gene Name: mitofusin 1
  ENSP ID: ENSP00000420148
MDKDLKAGCLVRVFWPKAKCALLRDDLVLVDSPGTDVTTELDSWIDKFCLDADVFVLVANSESTLMNTEKHFFHKVNERLSKPNIFILNNRWDASASEPEYMEDVRRQHMERCLHFLVEELKVV

SEQ ID NO: 52344 - protein, 741 aa, Homo sapiens; identical to SEQ ID NO: 52339
  Payload ID: 10437
  Gene Symbol: MFN1
  Gene Name: mitofusin 1
  ENSP ID: ENSP00000420617

SEQ ID NO: 52345 - protein, 757 aa, Homo sapiens
  Payload ID: 10438
  Gene Symbol: MFN2
  Gene Name: mitofusin 2
  Uniprot ID: O95140
  ENSP ID: ENSP00000235329
MSLLFSRCNSIVTVKKNKRHMAEVNASPLKHFVTAKKKINGIFEQLGAYIQESATFLEDTYRNAELDPVTTEEQVLDVKGYLSKVRGISEVLARRHMKVAFFGRTSNGKSTVINAMLWDKVLPSGIGHTTNCFLRVEGTDGHEAFLLTEGSEEKRSAKTVNQLAHALHQDKQLHAGSLVSVMWPNSKCPLLKDDLVLMDSPGIDVTTELDSWIDKFCLDADVFVLVANSESTLMQTEKHFFHKVSERLSRPNIFILNNRWDASASEPEYMEEVRRQHMERCTSFLVDELGVVDRSQAGDRIFFVSAKEVLNARIQKAQGMPEGGGALAEGFQVRMFEFQNFERRFEECISQSAVKTKFEQHTVRAKQIAEAVRLIMDSLHMAAREQQVYCEEMREERQDRLKFIDKQLELLAQDYKLRIKQITEEVERQVSTAMAEEIRRLSVLVDDYQMDFHPSPVVLKVYKNELHRHIEEGLGRNMSDRCSTAITNSLQTMQQDMIDGLKPLLPVSVRSQIDMLVPRQCFSLNYDLNCDKLCADFQEDIEFHFSLGWTMLVNRFLGPKNSRRALMGYNDQVQRPIPLTPANPSMPPLPQGSLTQEEFMVSMVTGLASLTSRTSMGILVVGGVVWKAVGWRLIALSFGLYGLLYVYERLTWTTKAKERAFKRQFVEHASEKLQLVISYTGSNCSHQVQQELSGTFAHLCQQVDVTRENLEQEIAAMNKKIEVLDSLQSKAKLLRNKAGWLDSELNMFTHQYLQPSR

SEQ ID NO: 52346 - protein, 98 aa, Homo sapiens
  Payload ID: 10438
  Gene Symbol: MFN2
  Gene Name: mitofusin 2
  ENSP ID: ENSP00000412023
MSLLFSRCNSIVTVKKNKRHMAEVNASPLKHFVTAKKKINGIFEQLGAYIQESATFLEDTYRNAELDPVTTEEQVLDVKGYLSKVRGISEVLARRHMK

SEQ ID NO: 52347 - protein, 757 aa, Homo sapiens; identical to SEQ ID NO: 52345
  Payload ID: 10438
  Gene Symbol: MFN2
  Gene Name: mitofusin 2
  Uniprot ID: O95140
  ENSP ID: ENSP00000416338

SEQ ID NO: 52348 - protein, 360 aa, Homo sapiens [sequence omitted]

SEQ ID NO: 52349 - protein, 360 aa, Homo sapiens [sequence omitted]

SEQ ID NO: 52350 - protein, 316 aa, Homo sapiens
  Payload ID: 10439
  Gene Symbol: MAPK1
  Gene Name: mitogen-activated protein kinase 1
  Uniprot ID: P28482
  ENSP ID: ENSP00000440842
MAAAAAAGAGPEMVRGQVFDVGPRYTNLSYIGEGAYGMVCSAYDNVNKVRVAIKKISPFEHQTYCQRTLREIKILLRFRHENIIGINDIIRAPTIEQMKDVYIVQDLMETDLYKLLKTQHLSNDHICYFLYQILRGLKYIHSANVLHRDLKPSNLLLNTTCDLKICDFGLARVADPDHDHTGFLTEYVATRWYRAPEIMLNSKGYTKSIDIWSVGCILAEMLSNRPIFPGKHYLDQLNHILALDLLDKMLTFNPHKRIEVEQALAHPYLEQYYDPSDEPIAEAPFKFDMELDDLPKEKLKELIFEETARFQPGYRS

SEQ ID NO: 52351 - protein, 245 aa, Homo sapiens
  Payload ID: 10440
  Gene Symbol: MAPK1IP1L
  Gene Name: mitogen-activated protein kinase 1 interacting protein 1-like
  Uniprot ID: Q8NDC0
  ENSP ID: ENSP00000378851
MSDEFSLADALPEHSPAKTSAVSNTKPGQPPQGWPGSNPWNNPSAPSSVPSGLPPSATPSTVPFGPAPTGMYPSVPPTGPPPGPPAPFPPSGPSCPPPGGPYPAPTVPGPGPTGPYPTPNMPFPELPRPYGAPTDPAAAGPLGPWGSMSSGPWAPGMGGQYPTPNMPYPSPGPYPAPPPPQAPGAAPPVPWGTVPPGAWGPPAPYPAPTGSYPTPGLYPTPSNPFQVPSGPSGAPPMPGGPHSYH

SEQ ID NO: 52352 - protein, 245 aa, Homo sapiens; identical to SEQ ID NO: 52351
  Payload ID: 10440
  Gene Symbol: MAPK1IP1L
  Gene Name: mitogen-activated protein kinase 1 interacting protein 1-like
  Uniprot ID: Q8NDC0
  ENSP ID: ENSP00000481882

SEQ ID NO: 52353 - protein, 143 aa, Homo sapiens
  Payload ID: 10441
  Gene Symbol: MAPK10
  Gene Name: mitogen-activated protein kinase 10
  ENSP ID: ENSP00000309857
MSLHFLYYCSEPTLDVKIAFCQGFDKQVDVSYIAKHYNMSKSKVDNQFYSVEVGDSTFTVLKRYQNLKPIGSGAQGIVCAAYDAVLDRNVAIKKLSRPFQNQTHAKRAYRELVLMKCVNHKNLLSNGTDGCQLMSSDSDGIRP

SEQ ID NO: 52354 - protein, 464 aa, Homo sapiens
  Payload ID: 10441
  Gene Symbol: MAPK10
  Gene Name: mitogen-activated protein kinase 10
  Uniprot ID: P53779
  ENSP ID: ENSP00000352157
MSLHFLYYCSEPTLDVKIAFCQGFDKQVDVSYIAKHYNMSKSKVDNQFYSVEVGDSTFTVLKRYQNLKPIGSGAQGIVCAAYDAVLDRNVAIKKLSRPFQNQTHAKRAYRELVLMKCVNHKNIISLLNVFTPQKTLEEFQDVYLVMELMDANLCQVIQMELDHERMSYLLYQMLCGIKHLHSAGIIHRDLKPSNIVVKSDCTLKILDFGLARTAGTSFMMTPYVVTRYYRAPEVILGMGYKENVDIWSVGCIMGEMVRHKILFPGRDYIDQWNKVIEQLGTPCPEFMKKLQPTVRNYVENRPKYAGLTFPKLFPDSLFPADSEHNKLKASQARDLLSKMLVIDPAKRISVDDALQHPYINVWYDPAEVEAPPPQIYDKQLDEREHTIEEWKELIYKEVMNSEEKTKNGVVKGQPSPSGAAVNSSESLPPSSSVNDISSMSTDQTLASDTDSSLEASAGPLGCCR

SEQ ID NO: 52355 - protein, 422 aa, Homo sapiens
  Payload ID: 10441
  Gene Symbol: MAPK10
  Gene Name: mitogen-activated protein kinase 10
  Uniprot ID: P53779
  ENSP ID: ENSP00000355297
MSLHFLYYCSEPTLDVKIAFCQGFDKQVDVSYIAKHYNMSKSKVDNQFYSVEVGDSTFTVLKRYQNLKPIGSGAQGIVCAAYDAVLDRNVAIKKLSRPFQNQTHAKRAYRELVLMKCVNHKNIISLLNVFTPQKTLEEFQDVYLVMELMDANLCQVIQMELDHERMSYLLYQMLCGIKHLHSAGIIHRDLKPSNIVVKSDCTLKILDFGLARTAGTSFMMTPYVVTRYYRAPEVILGMGYKENVDIWSVGCIMGEMVRHKILFPGRDYIDQWNKVIEQLGTPCPEFMKKLQPTVRNYVENRPKYAGLTFPKLFPDSLFPADSEHNKLKASQARDLLSKMLVIDPAKRISVDDALQHPYINVWYDPAEVEAPPPQIYDKQLDEREHTIEEWKELIYKEVMNSEEKTKNGVVKGQPSPSAQVQQ

SEQ ID NO: 52356 - protein, 319 aa, Homo sapiens
  Payload ID: 10441
  Gene Symbol: MAPK10
  Gene Name: mitogen-activated protein kinase 10
  ENSP ID: ENSP00000378586
MELMDANLCQVIQMELDHERMSYLLYQMLCGIKHLHSAGIIHRDLKPSNIVVKSDCTLKILDFGLARTAGTSFMMTPYVVTRYYRAPEVILGMGYKENVDIWSVGCIMGEMVRHKILFPGRDYIDQWNKVIEQLGTPCPEFMKKLQPTVRNYVENRPKYAGLTFPKLFPDSLFPADSEHNKLKASQARDLLSKMLVIDPAKRISVDDALQHPYINVWYDPAEVEAPPPQIYDKQLDEREHTIEEWKELIYKEVMNSEEKTKNGVVKGQPSPSGAAVNSSESLPPSSSVNDISSMSTDQTLASDTDSSLEASAGPLGCCR

SEQ ID NO: 52357 - protein, 277 aa, Homo sapiens
  Payload ID: 10441
  Gene Symbol: MAPK10
  Gene Name: mitogen-activated protein kinase 10
  Uniprot ID: P53779
  ENSP ID: ENSP00000378589
MELMDANLCQVIQMELDHERMSYLLYQMLCGIKHLHSAGIIHRDLKPSNIVVKSDCTLKILDFGLARTAGTSFMMTPYVVTRYYRAPEVILGMGYKENVDIWSVGCIMGEMVRHKILFPGRDYIDQWNKVIEQLGTPCPEFMKKLQPTVRNYVENRPKYAGLTFPKLFPDSLFPADSEHNKLKASQARDLLSKMLVIDPAKRISVDDALQHPYINVWYDPAEVEAPPPQIYDKQLDEREHTIEEWKELIYKEVMNSEEKTKNGVVKGQPSPSAQVQQ

SEQ ID NO: 52358 - protein, 319 aa, Homo sapiens
  Payload ID: 10441
  Gene Symbol: MAPK10
  Gene Name: mitogen-activated protein kinase 10
  ENSP ID: ENSP00000378590
MELMDANLCQVIQMELDHERMSYLLYQMLCGIKHLHSAGIIHRDLKPSNIVVKSDCTLKILDFGLARTAGTSFMMTPYVVTRYYRAPEVILGMGYKENVDMWSVGCIMGEMIKGAVLFPGTDHIDQWNKVIEQLGTPCPEFMKKLQPTVRNYVENRPKYAGLTFPKLFPDSLFPADSEHNKLKASQARDLLSKMLVIDPAKRISVDDALQHPYINVWYDPAEVEAPPPQIYDKQLDEREHTIEEWKELIYKEVMNSEEKTKNGVVKGQPSPSGAAVNSSESLPPSSSVNDISSMSTDQTLASDTDSSLEASAGPLGCCR

SEQ ID NO: 52359 - protein, 426 aa, Homo sapiens
  Payload ID: 10441
  Gene Symbol: MAPK10
  Gene Name: mitogen-activated protein kinase 10
  Uniprot ID: P53779
  ENSP ID: ENSP00000378595
MSKSKVDNQFYSVEVGDSTFTVLKRYQNLKPIGSGAQGIVCAAYDAVLDRNVAIKKLSRPFQNQTHAKRAYRELVLMKCVNHKNIISLLNVFTPQKTLEEFQDVYLVMELMDANLCQVIQMELDHERMSYLLYQMLCGIKHLHSAGIIHRDLKPSNIVVKSDCTLKILDFGLARTAGTSFMMTPYVVTRYYRAPEVILGMGYKENVDIWSVGCIMGEMVRHKILFPGRDYIDQWNKVIEQLGTPCPEFMKKLQPTVRNYVENRPKYAGLTFPKLFPDSLFPADSEHNKLKASQARDLLSKMLVIDPAKRISVDDALQHPYINVWYDPAEVEAPPPQIYDKQLDEREHTIEEWKELIYKEVMNSEEKTKNGVVKGQPSPSGAAVNSSESLPPSSSVNDISSMSTDQTLASDTDSSLEASAGPLGCCR

SEQ ID NO: 52360 - protein, 426 aa, Homo sapiens; identical to SEQ ID NO: 52359
  Payload ID: 10441
  Gene Symbol: MAPK10
  Gene Name: mitogen-activated protein kinase 10
  Uniprot ID: P53779
  ENSP ID: ENSP00000378598

SEQ ID NO: 52361 - protein, 319 aa, Homo sapiens; identical to SEQ ID NO: 52358
  Payload ID: 10441
  Gene Symbol: MAPK10
  Gene Name: mitogen-activated protein kinase 10
  ENSP ID: ENSP00000414469

SEQ ID NO: 52362 - protein, 48 aa, Homo sapiens
  Payload ID: 10441
  Gene Symbol: MAPK10
  Gene Name: mitogen-activated protein kinase 10
  ENSP ID: ENSP00000420987
MSLHFLYYCSEPTLDVKIAFCQGFDKQVDVSYIAKHYNMSKSKVDNQF

SEQ ID NO: 52363 - protein, 91 aa, Homo sapiens
  Payload ID: 10441
  Gene Symbol: MAPK10
  Gene Name: mitogen-activated protein kinase 10
  ENSP ID: ENSP00000421359
MSLHFLYYCSEPTLDVKIAFCQGFDKQVDVSYIAKHYNMSKSKVDNQFYSVEVGDSTFTVLKRYQNLKPIGSGAQGIVCAAYDAVLDRNVA

SEQ ID NO: 52364 - protein, 50 aa, Homo sapiens
  Payload ID: 10441
  Gene Symbol: MAPK10
  Gene Name: mitogen-activated protein kinase 10
  ENSP ID: ENSP00000421409
MSLHFLYYCSEPTLDVKIAFCQGFDKQVDVSYIAKHYNMSKSKVDNQFYS

SEQ ID NO: 52365 - protein, 117 aa, Homo sapiens
  Payload ID: 10441
  Gene Symbol: MAPK10
  Gene Name: mitogen-activated protein kinase 10
  ENSP ID: ENSP00000421762
MSLHFLYYCSEPTLDVKIAFCQGFDKQVDVSYIAKHYNMSKSKVDNQFYSVEVGDSTFTVLKRYQNLKPIGSGAQGIVCAAYDAVLDRNVAIKKLSRPFQNQTHAKRAYRELVLMKC

SEQ ID NO: 52366 - protein, 121 aa, Homo sapiens
  Payload ID: 10441
  Gene Symbol: MAPK10
  Gene Name: mitogen-activated protein kinase 10
  ENSP ID: ENSP00000422277
MSLHFLYYCSEPTLDVKIAFCQGFDKQVDVSYIAKHYNMSKSKVDNQFYSVEVGDSTFTVLKRYQNLKPIGSGAQGIVCAAYDAVLDRNVAIKKLSRPFQNQTHAKRAYRELVLMKCVNHK

SEQ ID NO: 52367 - protein, 84 aa, Homo sapiens
  Payload ID: 10441
  Gene Symbol: MAPK10
  Gene Name: mitogen-activated protein kinase 10
  ENSP ID: ENSP00000422985
MSKSKVDNQFYSVEVGDSTFTVLKRYQNLKPIGSGAQGIVCAAYDAVLDRNVAIKKLSRPFQNQTHAKRAYRELVLMKCVNHKN

SEQ ID NO: 52368 - protein, 33 aa, Homo sapiens
  Payload ID: 10441
  Gene Symbol: MAPK10
  Gene Name: mitogen-activated protein kinase 10
  ENSP ID: ENSP00000423918
MSKSKVDNQFYSVEVGDSTFTVLKRYQNLKPIG

SEQ ID NO: 52369 - protein, 73 aa, Homo sapiens
  Payload ID: 10441
  Gene Symbol: MAPK10
  Gene Name: mitogen-activated protein kinase 10
  ENSP ID: ENSP00000424128
MSKSKVDNQFYSVEVGDSTFTVLKRYQNLKPIGSGAQGIVCAAYDAVLDRNVAIKKLSRPFQNQTHAKRAYRE

SEQ ID NO: 52370 - protein, 335 aa, Homo sapiens
  Payload ID: 10441
  Gene Symbol: MAPK10
  Gene Name: mitogen-activated protein kinase 10
  ENSP ID: ENSP00000424154
  MOD_RES (1)..(1): Any amino acid
XNVAIKKLSRPFQNQTHAKRAYRELVLMKCVNHKNIISLLNVFTPQKTLEEFQDVYLVMELMDANLCQVIQMELDHERMSYLLYQMLCGIKHLHSAGIIHRDLKPSNIVVKSDCTLKILDFGLARTAGTSFMMTPYVVTRYYRAPEVILGMGYKENVDMWSVGCIMGEMIKGAVLFPGTDHIDQWNKVIEQLGTPCPEFMKKLQPTVRNYVENRPKYAGLTFPKLFPDSLFPADSEHNKLKASQARDLLSKMLVIDPAKRISVDDALQHPYINVWYDPAEVEAPPPQIYDKQLDEREHTIEEWKELIYKEVMNSEEKTKNGVVKGQPSPSAQVQQ

SEQ ID NO: 52371 - protein, 141 aa, Homo sapiens
  Payload ID: 10441
  Gene Symbol: MAPK10
  Gene Name: mitogen-activated protein kinase 10
  ENSP ID: ENSP00000424755
MSLHFLYYCSEPTLDVKIAFCQGFDKQVDVSYIAKHYNMSKSKVDNQFYSVEVGDSTFTVLKRYQNLKPIGSGAQGIVCAAYDAVLDRNVAIKKLSRPFQNQTHAKRAYRELVLMKCVNHKNIISLLNVFTPQKTLEEFQD

SEQ ID NO: 52372 - protein, 51 aa, Homo sapiens
  Payload ID: 10441
  Gene Symbol: MAPK10
  Gene Name: mitogen-activated protein kinase 10
  ENSP ID: ENSP00000425654
MSKSKVDNQFYSVEVGDSTFTVLKRYQNLKPIGSGAQGIVCAAYDAVLDRN

SEQ ID NO: 52373 - protein, 364 aa, Homo sapiens
  Payload ID: 10442
  Gene Symbol: MAPK11
  Gene Name: mitogen-activated protein kinase 11
  Uniprot ID: Q15759
  ENSP ID: ENSP00000333685
MSGPRAGFYRQELNKTVWEVPQRLQGLRPVGSGAYGSVCSAYDARLRQKVAVKKLSRPFQSLIHARRTYRELRLLKHLKHENVIGLLDVFTPATSIEDFSEVYLVTTLMGADLNNIVKCQALSDEHVQFLVYQLLRGLKYIHSAGIIHRDLKPSNVAVNEDCELRILDFGLARQADEEMTGYVATRWYRAPEIMLNWMHYNQTVDIWSVGCIMAELLQGKALFPGSDYIDQLKRIMEVVGTPSPEVLAKISSEHARTYIQSLPPMPQKDLSSIFRGANPLAIDLLGRMLVLDSDQRVSAAEALAHAYFSQYHDPEDEPEAEPYDESVEAKERTLEEWKELTYQEVLSFKPPEPPKPPGSLEIEQ

SEQ ID NO: 52374 - protein, 364 aa, Homo sapiens; identical to SEQ ID NO: 52373
  Payload ID: 10442
  Gene Symbol: MAPK11
  Gene Name: mitogen-activated protein kinase 11
  Uniprot ID: Q15759
  ENSP ID: ENSP00000379113

SEQ ID NO: 52375 - protein, 163 aa, Homo sapiens
  Payload ID: 10442
  Gene Symbol: MAPK11
  Gene Name: mitogen-activated protein kinase 11
  ENSP ID: ENSP00000409136
MSGPRAGFYRQELNKTVWEVPQRLQGLRPVGSGAYGSVCSAYDARLRQKVAVKKLSRPFQSLIHARRTYRELRLLKHLKHENVIGLLDVFTPATSIEDFSEVYLVTTLMGADLNNIVKCQALSDEHVQFLVYQLLRGLKYIHSAGIIHRVGPEAQQRGCERGL

SEQ ID NO: 52376 - protein, 367 aa, Homo sapiens
  Payload ID: 10443
  Gene Symbol: MAPK12
  Gene Name: mitogen-activated protein kinase 12
  Uniprot ID: P53778
  ENSP ID: ENSP00000215659
MSSPPPARSGFYRQEVTKTAWEVRAVYRDLQPVGSGAYGAVCSAVDGRTGAKVAIKKLYRPFQSELFAKRAYRELRLLKHMRHENVIGLLDVFTPDETLDDFTDFYLVMPFMGTDLGKLMKHEKLGEDRIQFLVYQMLKGLRYIHAAGIIHRDLKPGNLAVNEDCELKILDFGLARQADSEMTGYVVTRWYRAPEVILNWMRYTQTVDIWSVGCIMAEMITGKTLFKGSDHLDQLKEIMKVTGTPPAEFVQRLQSDEAKNYMKGLPELEKKDFASILTNASPLAVNLLEKMLVLDAEQRVTAGEALAHPYFESLHDTEDEPQVQKYDDSFDDVDRTLDEWKRVTYKEVLSFKPPRQLGARVSKETPL

SEQ ID NO: 52377 - protein, 119 aa, Homo sapiens
  Payload ID: 10443
  Gene Symbol: MAPK12
  Gene Name: mitogen-activated protein kinase 12
  ENSP ID: ENSP00000379124
MSSPPPARSGFYRQEVTKTAWEVRAVYRDLQPVGSGAYGAVCSAVDGRTGAKVAIKKLYRPFQSELFAKRAYRELRLLKHMRHENVIGLLDVFTPDETLDDFTDLKVPCSGPWHQVCGR

SEQ ID NO: 52378 - protein, 277 aa, Homo sapiens
  Payload ID: 10443
  Gene Symbol: MAPK12
  Gene Name: mitogen-activated protein kinase 12
  ENSP ID: ENSP00000379126
MRHENVIGLLDVFTPDETLDDFTDFYLVMPFMGTDLGKLMKHEKLGEDRIQFLVYQMLKGLRDLKPGNLAVNEDCELKILDFGLARQADSEMTGYVVTRWYRAPEVILNWMRYTQTVDIWSVGCIMAEMITGKTLFKGSDHLDQLKEIMKVTGTPPAEFVQRLQSDEAKNYMKGLPELEKKDFASILTNASPLAVNLLEKMLVLDAEQRVTAGEALAHPYFESLHDTEDEPQVQKYDDSFDDVDRTLDEWKRVTYKEVLSFKPPRQLGARVSKETPL

SEQ ID NO: 52379 - protein, 357 aa, Homo sapiens
  Payload ID: 10443
  Gene Symbol: MAPK12
  Gene Name: mitogen-activated protein kinase 12
  Uniprot ID: P53778
  ENSP ID: ENSP00000479972
MSSPPPARSGFYRQEVTKTAWEVRAVYRDLQPVGSGAYGAVCSAVDGRTGAKVAIKKLYRPFQSELFAKRAYRELRLLKHMRHENVIGLLDVFTPDETLDDFTDFYLVMPFMGTDLGKLMKHEKLGEDRIQFLVYQMLKGLRDLKPGNLAVNEDCELKILDFGLARQADSEMTGYVVTRWYRAPEVILNWMRYTQTVDIWSVGCIMAEMITGKTLFKGSDHLDQLKEIMKVTGTPPAEFVQRLQSDEAKNYMKGLPELEKKDFASILTNASPLAVNLLEKMLVLDAEQRVTAGEALAHPYFESLHDTEDEPQVQKYDDSFDDVDRTLDEWKRVTYKEVLSFKPPRQLGARVSKETPL

SEQ ID NO: 52380 - protein, 365 aa, Homo sapiens
  Payload ID: 10444
  Gene Symbol: MAPK13
  Gene Name: mitogen-activated protein kinase 13
  Uniprot ID: O15264
  ENSP ID: ENSP00000211287
MSLIRKKGFYKQDVNKTAWELPKTYVSPTHVGSGAYGSVCSAIDKRSGEKVAIKKLSRPFQSEIFAKRAYRELLLLKHMQHENVIGLLDVFTPASSLRNFYDFYLVMPFMQTDLQKIMGMEFSEEKIQYLVYQMLKGLKYIHSAGVVHRDLKPGNLAVNEDCELKILDFGLARHADAEMTGYVVTRWYRAPEVILSWMHYNQTVDIWSVGCIMAEMLTGKTLFKGKDYLDQLTQILKVTGVPGTEFVQKLNDKAAKSYIQSLPQTPRKDFTQLFPRASPQAADLLEKMLELDVDKRLTAAQALTHPFFEPFRDPEEETEAQQPFDDSLEHEKLTVDEWKQHIYKEIVNFSPIARKDSRRRSGMKL

SEQ ID NO: 52381 - protein, 152 aa, Homo sapiens
  Payload ID: 10444
  Gene Symbol: MAPK13
  Gene Name: mitogen-activated protein kinase 13
  ENSP ID: ENSP00000362864
MQHENVIGLLDVFTPASSLRNFYDFYLVMPFMQTDLQKIMGMEFSEEKIQYLVYQMLKGLKYIHSAGVVHRDLKPGNLAVNEDCELKILDFGLARHADAEMTGYVVTRWYRAPEVILSWMHYNQTGQILHPVPATDPQEGFHSAVPTGQPPG

SEQ ID NO: 52382 - protein, 257 aa, Homo sapiens
  Payload ID: 10444
  Gene Symbol: MAPK13
  Gene Name: mitogen-activated protein kinase 13
  Uniprot ID: O15264
  ENSP ID: ENSP00000362871
MSLIRKKGFYKQDVNKTAWELPKTYVSPTHVGSGAYGSVCSAIDKRSGEKVAIKKLSRPFQSEIFAKRAYRELLLLKHMQHENVIGLLDVFTPASSLRNFYDFYLVMPFMQTDLQKIMGMEFSEEKIQYLVYQMLKGLKYIHSAGVVHRDLKPGNLAVNEDCELKILDFGLARHADAEMTGYVVTRWYRAPEVILSWMHYNQTGQILHPVPATDPQEGFHSAVPTGQPPGCGPAGEDAGARRGQAPDGRAGPHPSLL

SEQ ID NO: 52383 - protein, 360 aa, Homo sapiens
  Payload ID: 10445
  Gene Symbol: MAPK14
  Gene Name: mitogen-activated protein kinase 14
  Uniprot ID: Q16539
  ENSP ID: ENSP00000229794
MSQERPTFYRQELNKTIWEVPERYQNLSPVGSGAYGSVCAAFDTKTGLRVAVKKLSRPFQSIIHAKRTYRELRLLKHMKHENVIGLLDVFTPARSLEEFNDVYLVTHLMGADLNNIVKCQKLTDDHVQFLIYQILRGLKYIHSADIIHRDLKPSNLAVNEDCELKILDFGLARHTDDEMTGYVATRWYRAPEIMLNWMHYNQTVDIWSVGCIMAELLTGRTLFPGTDHIDQLKLILRLVGTPGAELLKKISSESARNYIQSLTQMPKMNFANVFIGANPLAVDLLEKMLVLDSDKRITAAQALAHAYFAQYHDPDDEPVADPYDQSFESRDLLIDEWKSLTYDEVISFVPPPLDQEEMES

SEQ ID NO: 52384 - protein, 360 aa, Homo sapiens
  Payload ID: 10445
  Gene Symbol: MAPK14
  Gene Name: mitogen-activated protein kinase 14
  Uniprot ID: Q16539
  ENSP ID: ENSP00000229795
MSQERPTFYRQELNKTIWEVPERYQNLSPVGSGAYGSVCAAFDTKTGLRVAVKKLSRPFQSIIHAKRTYRELRLLKHMKHENVIGLLDVFTPARSLEEFNDVYLVTHLMGADLNNIVKCQKLTDDHVQFLIYQILRGLKYIHSADIIHRDLKPSNLAVNEDCELKILDFGLARHTDDEMTGYVATRWYRAPEIMLNWMHYNQTVDIWSVGCIMAELLTGRTLFPGTDHINQLQQIMRLTGTPPAYLINRMPSHEARNYIQSLTQMPKMNFANVFIGANPLAVDLLEKMLVLDSDKRITAAQALAHAYFAQYHDPDDEPVADPYDQSFESRDLLIDEWKSLTYDEVISFVPPPLDQEEMES

SEQ ID NO: 52385 - protein, 307 aa, Homo sapiens
  Payload ID: 10445
  Gene Symbol: MAPK14
  Gene Name: mitogen-activated protein kinase 14
  Uniprot ID: Q16539
  ENSP ID: ENSP00000308669
MSQERPTFYRQELNKTIWEVPERYQNLSPVGSGAYGSVCAAFDTKTGLRVAVKKLSRPFQSIIHAKRTYRELRLLKHMKHENVIGLLDVFTPARSLEEFNDVYLVTHLMGADLNNIVKCQKLTDDHVQFLIYQILRGLKYIHSADIIHRDLKPSNLAVNEDCELKILDFGLARHTDDEMTGYVATRWYRAPEIMLNWMHYNQTVDIWSVGCIMAELLTGRTLFPGTDHIDQLKLILRLVGTPGAELLKKISSESLSTCWRRCLYWTQIRELQRPKPLHMPTLLSTTILMMNQWPILMISPLKAGTSL

SEQ ID NO: 52386 - protein, 90 aa, Homo sapiens
  Payload ID: 10445
  Gene Symbol: MAPK14
  Gene Name: mitogen-activated protein kinase 14
  ENSP ID: ENSP00000417065
  MOD_RES (1)..(1): Any amino acid
XKTIWEVPERYQNLSPVGSGAYGSVCAAFDTKTGLRVAVKKLSRPFQSIIHAKRTYRELRLLKHMKHENVIGLLDVFTPARSLEEFNDVA

SEQ ID NO: 52387 - protein, 173 aa, Homo sapiens
  Payload ID: 10445
  Gene Symbol: MAPK14
  Gene Name: mitogen-activated protein kinase 14
  ENSP ID: ENSP00000417531
MSQERPTFYRQELNKTIWEVPERYQNLSPVGSGAYGSVCAAFDTKTGLRVAVKKLSRPFQSIIHAKRTYRELRLLKHMKHENVIGLLDVFTPARSLEEFNDVYLVTHLMGADLNNIVKCQKLTDDHVQFLIYQILRGLKYIHSADIIHRDLKPSNLAVNEDCELKFVCSSSAL

SEQ ID NO: 52388 - protein, 132 aa, Homo sapiens
  Payload ID: 10445
  Gene Symbol: MAPK14
  Gene Name: mitogen-activated protein kinase 14
  ENSP ID: ENSP00000419141
MKHENVIGLLDVFTPARSLEEFNDVYLVTHLMGADLNNIVKCQKLTDDHVQFLIYQILRGLKYIHSADIIHRDLKPSNLAVNEDCELKILDFGLARHTDDEMTGYVATRWYRAPEIMLNWMHYNQTVDIWSV

SEQ ID NO: 52389 - protein, 283 aa, Homo sapiens
  Payload ID: 10445
  Gene Symbol: MAPK14
  Gene Name: mitogen-activated protein kinase 14
  ENSP ID: ENSP00000419837
MKHENVIGLLDVFTPARSLEEFNDVYLVTHLMGADLNNIVKCQKLTDDHVQFLIYQILRGLKYIHSADIIHRDLKPSNLAVNEDCELKILDFGLARHTDDEMTGYVATRWYRAPEIMLNWMHYNQTVDIWSVGCIMAELLTGRTLFPGTDHIDQLKLILRLVGTPGAELLKKISSESARNYIQSLTQMPKMNFANVFIGANPLAVDLLEKMLVLDSDKRITAAQALAHAYFAQYHDPDDEPVADPYDQSFESRDLLIDEWKSLTYDEVISFVPPPLDQEEMES

SEQ ID NO: 52390 - protein, 173 aa, Homo sapiens; identical to SEQ ID NO: 52387
  Payload ID: 10445
  Gene Symbol: MAPK14
  Gene Name: mitogen-activated protein kinase 14
  ENSP ID: ENSP00000478079

SEQ ID NO: 52391 - protein, 544 aa, Homo sapiens
  Payload ID: 10446
  Gene Symbol: MAPK15
  Gene Name: mitogen-activated protein kinase 15
  Uniprot ID: Q8TD08
  ENSP ID: ENSP00000337691
MCTVVDPRIVRRYLLRRQLGQGAYGIVWKAVDRRTGEVVAIKKIFDAFRDKTDAQRTFREITLLQEFGDHPNIISLLDVIRAENDRDIYLVFEFMDTDLNAVIRKGGLLQDVHVRSIFYQLLRATRFLHSGHVVHRDQKPSNVLLDANCTVKLCDFGLARSLGDLPEGPEDQAVTEYVATRWYRAPEVLLSSHRYTLGVDMWSLGCILGEMLRGRPLFPGTSTLHQLELILETIPPPSEEDLLALGSGCRASVLHQLGSRPRQTLDALLPPDTSPEALDLLRRLLVFAPDKRLSATQALQHPYVQRFHCPSDEWAREADVRPRAHEGVQLSVPEYRSRVYQMILECGGSSGTSREKGPEGVSPSQAHLHKPRADPQLPSRTPVQGPRPRPQSSPGHDPAEHESPRAAKNVPRQNSAPLLQTALLGNGERPPGAKEAPPLTLSLVKPSGRGAAPSLTSQAAAQVANQALIRGDWNRGGGVRVASVQQVPPRLPPEARPGRRMFSTSALQGAQGGARALLGGYSQAYGTVCHSALGHLPLLEGHHV

SEQ ID NO: 52392 - protein, 277 aa, Homo sapiens
  Payload ID: 10446
  Gene Symbol: MAPK15
  Gene Name: mitogen-activated protein kinase 15
  Uniprot ID: Q8TD08
  ENSP ID: ENSP00000378539
MCTVVDPRIVRRYLLRRQLGQGAYGIVWKAVDRRTGEVVAIKKIFDAFRDKTDAQRTFREITLLQEFGDHPNIISLLDVIRAENDRDIYLVFEFMGCPPSPPPPTAVRTLSADTDLNAVIRKGGLLQDVHVRSIFYQLLRATRFLHSGHVVHRDQKPSNVLLDANCTVKLCDFGLARSLGDLPEGPEDQAVTEYVATRWYRAPEVLLSSHRYTLGVDMWSLGCILGEMLRGRPLFPGTSTLHQLELILETIPPPSEEDLLALGSGCRASVLHQLGSR

SEQ ID NO: 52393 - protein, 254 aa, Homo sapiens
  Payload ID: 10446
  Gene Symbol: MAPK15
  Gene Name: mitogen-activated protein kinase 15
  Uniprot ID: Q8TD08
  ENSP ID: ENSP00000378540
MCTVVDPRIVRRYLLRRQLGQGAYGIVWKAVDRRTGEVVAIKKIFDAFRDKTDAQRTFREITLLQEFGDHPNIISLLDVIRAENDRDIYLVFEFMDTDLNAVIRKGGLLQDVHVRSIFYQLLRATRFLHSGHVVHRDQKPSNVLLDANCTVKLCDFGLARSLGDLPEGPEDQAVTEYVATRWYRAPEVLLSSHRYTLGVDMWSLGCILGEMLRGRPLFPGTSTLHQLELILETIPPPSEEGAQTACRSGTGAST

SEQ ID NO: 52394 - protein, 276 aa, Homo sapiens
  Payload ID: 10446
  Gene Symbol: MAPK15
  Gene Name: mitogen-activated protein kinase 15
  ENSP ID: ENSP00000478678
MCTVVDPRIVRRYLLRRQLGQGAYGIVWKAVDRRTGEVVAIKKIFDAFRDKTDAQRTFREITLLQEFGDHPNIISLLDVIRAENDRDIYLVFEFMGCPPSPPPPTAVRTLSADTDLNAVIRKGGLLQDVHVRSIFYQLLRATRFLHSGHVVHRDQKPSNVLLDANCTVKLCDFGLARSLGDLPEGPEDQAVTEYVATRWYRAPEVLLSSHRYTLGVDMWSLGCILGEMLRGRPLFPGTSTLHQLELILETIPPPSEEDLLALGSGCRASVLHQLGS

SEQ ID NO: 52395 - protein, 544 aa, Homo sapiens; identical to SEQ ID NO: 52391
  Payload ID: 10446
  Gene Symbol: MAPK15
  Gene Name: mitogen-activated protein kinase 15
  Uniprot ID: Q8TD08
  ENSP ID: ENSP00000483093

SEQ ID NO: 52396 - protein, 379 aa, Homo sapiens
  Payload ID: 10447
  Gene Symbol: MAPK3
  Gene Name: mitogen-activated protein kinase 3
  Uniprot ID: P27361
  ENSP ID: ENSP00000263025
MAAAAAQGGGGGEPRRTEGVGPGVPGEVEMVKGQPFDVGPRYTQLQYIGEGAYGMVSSAYDHVRKTRVAIKKISPFEHQTYCQRTLREIQILLRFRHENVIGIRDILRASTLEAMRDVYIVQDLMETDLYKLLKSQQLSNDHICYFLYQILRGLKYIHSANVLHRDLKPSNLLINTTCDLKICDFGLARIADPEHDHTGFLTEYVATRWYRAPEIMLNSKGYTKSIDIWSVGCILAEMLSNRPIFPGKHYLDQLNHILGILGSPSQEDLNCIINMKARNYLQSLPSKTKVAWAKLFPKSDSKALDLLDRMLTFNPNKRITVEEALAHPYLEQYYDPTDEPVAEEPFTFAMELDDLPKERLKELIFQETARFQPGVLEAP

SEQ ID NO: 52397 - protein, 335 aa, Homo sapiens
  Payload ID: 10447
  Gene Symbol: MAPK3
  Gene Name: mitogen-activated protein kinase 3
  Uniprot ID: P27361
  ENSP ID: ENSP00000327293
MAAAAAQGGGGGEPRRTEGVGPGVPGEVEMVKGQPFDVGPRYTQLQYIGEGAYGMVSSAYDHVRKTRVAIKKISPFEHQTYCQRTLREIQILLRFRHENVIGIRDILRASTLEAMRDVYIVQDLMETDLYKLLKSQQLSNDHICYFLYQILRGLKYIHSANVLHRDLKPSNLLINTTCDLKICDFGLARIADPEHDHTGFLTEYVATRWYRAPEIMLNSKGYTKSIDIWSVGCILAEMLSNRPIFPGKHYLDQLNHILALDLLDRMLTFNPNKRITVEEALAHPYLEQYYDPTDEPVAEEPFTFAMELDDLPKERLKELIFQETARFQPGVLEAP

SEQ ID NO: 52398 - protein, 357 aa, Homo sapiens
  Payload ID: 10447
  Gene Symbol: MAPK3
  Gene Name: mitogen-activated protein kinase 3
  Uniprot ID: P27361
  ENSP ID: ENSP00000378625
MAAAAAQGGGGGEPRRTEGVGPGVPGEVEMVKGQPFDVGPRYTQLQYIGEGAYGMVSSAYDHVRKTRVAIKKISPFEHQTYCQRTLREIQILLRFRHENVIGIRDILRASTLEAMRDVYIVQDLMETDLYKLLKSQQLSNDHICYFLYQILRGLKYIHSANVLHRDLKPSNLLINTTCDLKICDFGLARIADPEHDHTGFLTEYVATRWYRAPEIMLNSKGYTKSIDIWSVGCILAEMLSNRPIFPGKHYLDQLNHILGILGSPSQEDLNCIINMKARNYLQSLPSKTKVAWAKLFPKSDSKALDLLDRMLTFNPNKRITVEEALAHPYLEQYYDPTDEVGQSPAAVGLGAGEQGGT

SEQ ID NO: 52399 - protein, 311 aa, Homo sapiens
  Payload ID: 10447
  Gene Symbol: MAPK3
  Gene Name: mitogen-activated protein kinase 3
  ENSP ID: ENSP00000378626
MVKGQPFDVGPRYTQLQYIGEGAYGMVSSAYDHVRKTRVAIKKISPFEHQTYCQRTLREIQILLRFRHENVIGIRDILRASTLEAMRDVYIVQDLMETDLYKLLKSQQLSNDHICYFLYQILRGLKYIHSANVLHRDLKPSNLLINTTCDLKGYTKSIDIWSVGCILAEMLSNRPIFPGKHYLDQLNHILGILGSPSQEDLNCIINMKARNYLQSLPSKTKVAWAKLFPKSDSKALDLLDRMLTFNPNKRITVEEALAHPYLEQYYDPTDEPVAEEPFTFAMELDDLPKERLKELIFQETARFQPGVLEAP

SEQ ID NO: 52400 - protein, 335 aa, Homo sapiens; identical to SEQ ID NO: 52397
  Payload ID: 10447
  Gene Symbol: MAPK3
  Gene Name: mitogen-activated protein kinase 3
  Uniprot ID: P27361
  ENSP ID: ENSP00000378628

SEQ ID NO: 52401 - protein, 136 aa, Homo sapiens
  Payload ID: 10447
  Gene Symbol: MAPK3
  Gene Name: mitogen-activated protein kinase 3
  ENSP ID: ENSP00000432292
MLSNRPIFPGKHYLDQLNHILGILGSPSQEDLNCIINMKARNYLQSLPSKTKVAWAKLFPKSDSKALDLLDRMLTFNPNKRITVEEALAHPYLEQYYDPTDEPVAEEPFTFAMELDDLPKERLKELIFQETARFQP

SEQ ID NO: 52402 - protein, 339 aa, Homo sapiens
  Payload ID: 10447
  Gene Symbol: MAPK3
  Gene Name: mitogen-activated protein kinase 3
  ENSP ID: ENSP00000432479
MAAAAAQGGGGGEPRRTEGVGPGVPGEVEMVKGQPFDVGPRYTQLQYIGEGAYGMVSSAYDHVRKTRVAIKKISPFEHQTYCQRTLREIQILLRFRHENVIGIRDILRASTLEAMRDVYIVQDLMETDLYKLLKSQQLSNDHICYFLYQILRGLKYIHSANVLHRDLKPSNLLINTTCDLKICDFGLARIADPEHDHTGFLTEYVATRWYRAPEIMLNSKGYTKSIDIWSVGCILAEMLSNRPIFPGKHYLDQLNHILGILGSPSQEDLNCIINMKARNYLQSLPSKTKVAWAKLFPKSDSKALDLLDRMLTFNPNKRITWPRSPSPSPWSWMTYLRSG

SEQ ID NO: 52403 - protein, 265 aa, Homo sapiens
  Payload ID: 10447
  Gene Symbol: MAPK3
  Gene Name: mitogen-activated protein kinase 3
  ENSP ID: ENSP00000432742
MRDVYIVQDLMETDLYKLLKSQQLSNDHICYFLYQILRGLKYIHSANVLHRDLKPSNLLINTTCDLKICDFGLARIADPEHDHTGFLTEYVATRWYRAPEIMLNSKGYTKSIDIWSVGCILAEMLSNRPIFPGKHYLDQLNHILGILGSPSQEDLNCIINMKARNYLQSLPSKTKVAWAKLFPKSDSKALDLLDRMLTFNPNKRITVEEALAHPYLEQYYDPTDEPVAEEPFTFAMELDDLPKERLKELIFQETARFQPGVLEAP

SEQ ID NO: 52404 - protein, 87 aa, Homo sapiens
  Payload ID: 10447
  Gene Symbol: MAPK3
  Gene Name: mitogen-activated protein kinase 3
  ENSP ID: ENSP00000433639
MRDVYIVQDLMETDLYKLLKSQQLSNDHICYFLYQILRGLKYIHSANVLHRDLKPSNLLINTTCDLKICDFGLARIADPEHDHTGFL

SEQ ID NO: 52405 - protein, 316 aa, Homo sapiens
  Payload ID: 10447
  Gene Symbol: MAPK3
  Gene Name: mitogen-activated protein kinase 3
  ENSP ID: ENSP00000433746
MAAAAAQGGGGGEPRRTEGVGPGVPGEVEMVKGQPFDVGPRYTQLQYIGEGAYGMVSSAYDHVRKTRVAIKKISPFEHQTYCQRTLREIQILLRFRHENVIGIRDILRASTLEAMRDVYIVQDLMETDLYKLLKSQQLSNDHICYFLYQILRGLKYIHSANVLHRDLKPSNLLINTTCDLKICDFGLARIADPEHDHTGFLTEYVATRWYRAPEIMLNSKGYTKSIDIWSVGCILAEMLSNRPIFPGKHYLDQLNHILGILGSPSQEDLNCIINMKARNYLQSLPSKTKVAWAKLFPKSDSKGSRDMRPLTCWTGC

SEQ ID NO: 52406 - protein, 121 aa, Homo sapiens
  Payload ID: 10447
  Gene Symbol: MAPK3
  Gene Name: mitogen-activated protein kinase 3
  ENSP ID: ENSP00000436772
GILGSPSQEDLNCIINMKARNYLQSLPSKTKVAWAKLFPKSDSKALDLLDRMLTFNPNKRITVEEALAHPYLEQYYDPTDEPVAEEPFTFAMELDDLPKERLKELIFQETARFQPGVLEAP

SEQ ID NO: 52407 - protein, 587 aa, Homo sapiens
  Payload ID: 10448
  Gene Symbol: MAPK4
  Gene Name: mitogen-activated protein kinase 4
  Uniprot ID: P31152
  ENSP ID: ENSP00000383234
MAEKGDCIASVYGYDLGGRFVDFQPLGFGVNGLVLSAVDSRACRKVAVKKIALSDARSMKHALREIKIIRRLDHDNIVKVYEVLGPKGTDLQGELFKFSVAYIVQEYMETDLARLLEQGTLAEEHAKLFMYQLLRGLKYIHSANVLHRDLKPANIFISTEDLVLKIGDFGLARIVDQHYSHKGYLSEGLVTKWYRSPRLLLSPNNYTKAIDMWAAGCILAEMLTGRMLFAGAHELEQMQLILETIPVIREEDKDELLRVMPSFVSSTWEVKRPLRKLLPEVNSEAIDFLEKILTFNPMDRLTAEMGLQHPYMSPYSCPEDEPTSQHPFRIEDEIDDIVLMAANQSQLSNWDTCSSRYPVSLSSDLEWRPDRCQDASEVQRDPRAGSAPLAEDVQVDPRKDSHSSSERFLEQSHSSMERAFEADYGRSCDYKVGSPSYLDKLLWRDNKPHHYSEPKLILDLSHWKQAAGAPPTATGLADTGAREDEPASLFLEIAQWVKSTQGGPEHASPPADDPERRLSASPPGRPAPVDGGASPQFDLDVFISRALKLCTKPEDLPDNKLGDLNGACIPEHPGDLVQTEAFSKERW

SEQ ID NO: 52408 - protein, 376 aa, Homo sapiens
  Payload ID: 10448
  Gene Symbol: MAPK4
  Gene Name: mitogen-activated protein kinase 4
  ENSP ID: ENSP00000439231
MWAAGCILAEMLTGRMLFAGAHELEQMQLILETIPVIREEDKDELLRVMPSFVSSTWEVKRPLRKLLPEVNSEAIDFLEKILTFNPMDRLTAEMGLQHPYMSPYSCPEDEPTSQHPFRIEDEIDDIVLMAANQSQLSNWDTCSSRYPVSLSSDLEWRPDRCQDASEVQRDPRAGSAPLAEDVQVDPRKDSHSSSERFLEQSHSSMERAFEADYGRSCDYKVGSPSYLDKLLWRDNKPHHYSEPKLILDLSHWKQAAGAPPTATGLADTGAREDEPASLFLEIAQWVKSTQGGPEHASPPADDPERRLSASPPGRPAPVDGGASPQFDLDVFISRALKLCTKPEDLPDNKLGDLNGACIPEHPGDLVQTEAFSKERW

SEQ ID NO: 52409 - protein, 281 aa, Homo sapiens
  Payload ID: 10448
  Gene Symbol: MAPK4
  Gene Name: mitogen-activated protein kinase 4
  ENSP ID: ENSP00000465661
MAEKGDCIASVYGYDLGGRFVDFQPLGFGVNGLVLSAVDSRACRKVAVKKIALSDARSMKHALREIKIIRRLDHDNIVKVYEVLGPKGTDLQGELFKFSVAYIVQEYMETDLARLLEQGTLAEEHAKLFMYQLLRGLKYIHSANVLHRDLKPANIFISTEDLVLKIGDFGLARIVDQHYSHKSTDCITSIVGHIPEPSEKGEVREVPFVLLSVLCKSNWGEFQSCGVGAAVKRLESEGTLGPGGLMEDSVMLDYVVSLPSLPLHPLLWSRDNDSSHPGRAS

SEQ ID NO: 52410 - protein, 233 aa, Homo sapiens
  Payload ID: 10448
  Gene Symbol: MAPK4
  Gene Name: mitogen-activated protein kinase 4
  ENSP ID: ENSP00000466233
MAEKGDCIASVYGYDLGGRFVDFQPLGFGVNGLVLSAVDSRACRKVAVKKIALSDARSMKHALREIKIIRRLDHDNIVKVYEVLGPKGTDLQGELFKFSVAYIVQEYMETDLARLLEQGTLAEEHAKLFMYQLLRGLKYIHSANVLHRDLKPANIFISTEDLVLKIGDFGLARIVDQHYSHKGYLSEGLVTKWYRSPRLLLSPNNYTKAIDMWAAGCILAEMLTGRMLFAGTL

SEQ ID NO: 52411 - protein, 721 aa, Homo sapiens
  Payload ID: 10449
  Gene Symbol: MAPK6
  Gene Name: mitogen-activated protein kinase 6
  Uniprot ID: Q16659
  ENSP ID: ENSP00000261845
MAEKFESLMNIHGFDLGSRYMDLKPLGCGGNGLVFSAVDNDCDKRVAIKKIVLTDPQSVKHALREIKIIRRLDHDNIVKVFEILGPSGSQLTDDVGSLTELNSVYIVQEYMETDLANVLEQGPLLEEHARLFMYQLLRGLKYIHSANVLHRDLKPANLFINTEDLVLKIGDFGLARIMDPHYSHKGHLSEGLVTKWYRSPRLLLSPNNYTKAIDMWAAGCIFAEMLTGKTLFAGAHELEQMQLILESIPVVHEEDRQELLSVIPVYIRNDMTEPHKPLTQLLPGISREALDFLEQILTFSPMDRLTAEEALSHPYMSIYSFPMDEPISSHPFHIEDEVDDILLMDETHSHIYNWERYHDCQFSEHDWPVHNNFDIDEVQLDPRALSDVTDEEEVQVDPRKYLDGDREKYLEDPAFDTNYSTEPCWQYSDHHENKYCDLECSHTCNYKTRSSSYLDNLVWRESEVNHYYEPKLIIDLSNWKEQSKEKSDKKGKSKCERNGLVKAQIALEEASQQLAGKEREKNQGFDFDSFIAGTIQLSSQHEPTDVVDKLNDLNSSVSQLELKSLISKSVSQEKQEKGMANLAQLEALYQSSWDSQFVSGGEDCFFINQFCEVRKDEQVEKENTYTSYLDKFFSRKEDTEMLETEPVEDGKLGERGHEEGFLNNSGEFLFNKQLESIGIPQFHSPVGSPLKSIQATLTPSAMKSSPQIPHQTYSSILKHLN

SEQ ID NO: 52412 - protein, 677 aa, Homo sapiens
  Payload ID: 10450
  Gene Symbol: MAPK7
  Gene Name: mitogen-activated protein kinase 7
  Uniprot ID: Q13164
  ENSP ID: ENSP00000299612
MESDLHQIIHSSQPLTLEHVRYFLYQLLRGLKYMHSAQVIHRDLKPSNLLVNENCELKIGDFGMARGLCTSPAEHQYFMTEYVATRWYRAPELMLSLHEYTQAIDLWSVGCIFGEMLARRQLFPGKNYVHQLQLIMMVLGTPSPAVIQAVGAERVRAYIQSLPPRQPVPWETVYPGADRQALSLLGRMLRFEPSARISAAAALRHPFLAKYHDPDDEPDCAPPFDFAFDREALTRERIKEAIVAEIEDFHARREGIRQQIRFQPSLQPVASEPGCPDVEMPSPWAPSGDCAMESPPPAPPPCPGPAPDTIDLTLQPPPPVSEPAPPKKDGAISDNTKAALKAALLKSLRSRLRDGPSAPLEAPEPRKPVTAQERQREREEKRRRRQERAKEREKRRQERERKERGAGASGGPSTDPLAGLVLSDNDRSLLERWTRMARPAAPALTSVPAPAPAPTPTPTPVQPTSPPPGPVAQPTGPQPQSAGSTSGPVPQPACPPPGPAPHPTGPPGPIPVPAPPQIATSTSLLAAQSLVPPPGLPGSSTPGVLPYFPPGLPPPDAGGAPQSSMSESPDVNLVTQQLSKSQVEDPLPPVFSGTPKGSGAGYGVGFDLEEFLNQSFDMGVADGPQDGQADSASLSASLLADWLEGHGMNPADIESLQREIQMDSPMLLADLPDLQDP

SEQ ID NO: 52413 - protein, 816 aa, Homo sapiens
  Payload ID: 10450
  Gene Symbol: MAPK7
  Gene Name: mitogen-activated protein kinase 7
  Uniprot ID: Q13164
  ENSP ID: ENSP00000311005
MAEPLKEEDGEDGSAEPPGPVKAEPAHTAASVAAKNLALLKARSFDVTFDVGDEYEIIETIGNGAYGVVSSARRRLTGQQVAIKKIPNAFDVVTNAKRTLRELKILKHFKHDNIIAIKDILRPTVPYGEFKSVYVVLDLMESDLHQIIHSSQPLTLEHVRYFLYQLLRGLKYMHSAQVIHRDLKPSNLLVNENCELKIGDFGMARGLCTSPAEHQYFMTEYVATRWYRAPELMLSLHEYTQAIDLWSVGCIFGEMLARRQLFPGKNYVHQLQLIMMVLGTPSPAVIQAVGAERVRAYIQSLPPRQPVPWETVYPGADRQALSLLGRMLRFEPSARISAAAALRHPFLAKYHDPDDEPDCAPPFDFAFDREALTRERIKEAIVAEIEDFHARREGIRQQIRFQPSLQPVASEPGCPDVEMPSPWAPSGDCAMESPPPAPPPCPGPAPDTIDLTLQPPPPVSEPAPPKKDGAISDNTKAALKAALLKSLRSRLRDGPSAPLEAPEPRKPVTAQERQREREEKRRRRQERAKEREKRRQERERKERGAGASGGPSTDPLAGLVLSDNDRSLLERWTRMARPAAPALTSVPAPAPAPTPTPTPVQPTSPPPGPVAQPTGPQPQSAGSTSGPVPQPACPPPGPAPHPTGPPGPIPVPAPPQIATSTSLLAAQSLVPPPGLPGSSTPGVLPYFPPGLPPPDAGGAPQSSMSESPDVNLVTQQLSKSQVEDPLPPVFSGTPKGSGAGYGVGFDLEEFLNQSFDMGVADGPQDGQADSASLSASLLADWLEGHGMNPADIESLQREIQMDSPMLLADLPDLQDP

SEQ ID NO: 52414 - protein, 816 aa, Homo sapiens; identical to SEQ ID NO: 52413
  Payload ID: 10450
  Gene Symbol: MAPK7
  Gene Name: mitogen-activated protein kinase 7
  Uniprot ID: Q13164
  ENSP ID: ENSP00000378966

SEQ ID NO: 52415 - protein, 816 aa, Homo sapiens; identical to SEQ ID NO: 52413
  Payload ID: 10450
  Gene Symbol: MAPK7
  Gene Name: mitogen-activated protein kinase 7
  Uniprot ID: Q13164
  ENSP ID: ENSP00000378968

SEQ ID NO: 52416 - protein, 241 aa, Homo sapiens
  Payload ID: 10450
  Gene Symbol: MAPK7
  Gene Name: mitogen-activated protein kinase 7
  ENSP ID: ENSP00000412902
MAEPLKEEDGEDGSAEPPGPVKAEPAHTAASVAAKNLALLKARSFDVTFDVGDEYEIIETIGNGAYGVVSSARRRLTGQQVAIKKIPNAFDVVTNAKRTLRELKILKHFKHDNIIAIKDILRPTVPYGEFKSVYVVLDLMESDLHQIIHSSQPLTLEHVRYFLYQLLRGLKYMHSAQVIHRDLKPSNLLVNENCELKIGDFGMARGLCTSPAEHQYFMTEYVATRWYRAPELMLSLHEYTQ

SEQ ID NO: 52417 - protein, 195 aa, Homo sapiens
  Payload ID: 10450
  Gene Symbol: MAPK7
  Gene Name: mitogen-activated protein kinase 7
  ENSP ID: ENSP00000458146
MESDLHQIIHSSQPLTLEHVRYFLYQLLRGLKYMHSAQVIHRDLKPSNLLVNENCELKIGDFGMARGLCTSPAEHQYFMTEYVATRWYRAPELMLSLHEYTQAIDLWSVGCIFGEMLARRQLFPGKNYVHQLQLIMMVLGTPSPAVIQAVGAERVRAYIQSLPPRQPVPWETVYPGADRQALSLLGRMLRFEPSA

SEQ ID NO: 52418 - protein, 80 aa, Homo sapiens
  Payload ID: 10450
  Gene Symbol: MAPK7
  Gene Name: mitogen-activated protein kinase 7
  ENSP ID: ENSP00000462804
MAEPLKEEDGEDGSAEPPGPVKAEPAHTAASVAAKNLALLKARSFDVTFDVGDEYEIIETIGNGAYGVVSSARRRLTGEL

SEQ ID NO: 52419 - protein, 157 aa, Homo sapiens
  Payload ID: 10450
  Gene Symbol: MAPK7
  Gene Name: mitogen-activated protein kinase 7
  ENSP ID: ENSP00000462819
MAEPLKEEDGEDGSAEPPGPVKAEPAHTAASVAAKNLALLKARSFDVTFDVGDEYEIIETIGNGAYGVVSSARRRLTGQQVAIKKIPNAFDVVTNAKRTLRELKILKHFKHDNIIAIKDILRPTVPYGEFKSVYVVLDLMESDLHQIIHSSQPLTLE

SEQ ID NO: 52420 - protein, 144 aa, Homo sapiens
  Payload ID: 10450
  Gene Symbol: MAPK7
  Gene Name: mitogen-activated protein kinase 7
  ENSP ID: ENSP00000474397
MAEPLKEEDGEDGSAEPPGPVKAEPAHTAASVAAKNLALLKARSFDVTFDVGDEYEIIETIGNGAYGVVSSARRRLTGQQVAIKKIPNAFDVVTNAKRTLRELKILKHFKHDNIIAIKDILRPTVPYGEFKSVPYGVPGYVVLD

SEQ ID NO: 52421 - protein, 308 aa, Homo sapiens
  Payload ID: 10451
  Gene Symbol: MAPK8
  Gene Name: mitogen-activated protein kinase 8
  Uniprot ID: P45983
  ENSP ID: ENSP00000353483
MSRSKRDNNFYSVEIGDSTFTVLKRYQNLKPIGSGAQGIVCAAYDAILERNVAIKKLSRPFQNQTHAKRAYRELVLMKCVNHKNIIGLLNVFTPQKSLEEFQDVYIVMELMDANLCQVIQMELDHERMSYLLYQMLCGIKHLHSAGIIHRDLKPSNIVVKSDCTLKILDFGLARTAGTSFMMTPYVVTRYYRAPEVILGMGYKENADSEHNKLKASQARDLLSKMLVIDASKRISVDEALQHPYINVWYDPSEAEAPPPKIPDKQLDEREHTIEEWKELIYKEVMDLEERTKNGVIRGQPSPLAQVQQ

SEQ ID NO: 52422 - protein, 218 aa, Homo sapiens [sequence omitted]

SEQ ID NO: 52423 - protein, 427 aa, Homo sapiens
  Payload ID: 10451
  Gene Symbol: MAPK8
  Gene Name: mitogen-activated protein kinase 8
  Uniprot ID: P45983
  ENSP ID: ENSP00000363291
MSRSKRDNNFYSVEIGDSTFTVLKRYQNLKPIGSGAQGIVCAAYDAILERNVAIKKLSRPFQNQTHAKRAYRELVLMKCVNHKNIIGLLNVFTPQKSLEEFQDVYIVMELMDANLCQVIQMELDHERMSYLLYQMLCGIKHLHSAGIIHRDLKPSNIVVKSDCTLKILDFGLARTAGTSFMMTPYVVTRYYRAPEVILGMGYKENVDIWSVGCIMGEMIKGGVLFPGTDHIDQWNKVIEQLGTPCPEFMKKLQPTVRTYVENRPKYAGYSFEKLFPDVLFPADSEHNKLKASQARDLLSKMLVIDASKRISVDEALQHPYINVWYDPSEAEAPPPKIPDKQLDEREHTIEEWKELIYKEVMDLEERTKNGVIRGQPSPLGAAVINGSQHPSSSSSVNDVSSMSTDPTLASDTDSSLEAAAGPLGCCR

SEQ ID NO: 52424 - protein, 384 aa, Homo sapiens
  Payload ID: 10451
  Gene Symbol: MAPK8
  Gene Name: mitogen-activated protein kinase 8
  Uniprot ID: P45983
  ENSP ID: ENSP00000363294
MSRSKRDNNFYSVEIGDSTFTVLKRYQNLKPIGSGAQGIVCAAYDAILERNVAIKKLSRPFQNQTHAKRAYRELVLMKCVNHKNIIGLLNVFTPQKSLEEFQDVYIVMELMDANLCQVIQMELDHERMSYLLYQMLCGIKHLHSAGIIHRDLKPSNIVVKSDCTLKILDFGLARTAGTSFMMTPYVVTRYYRAPEVILGMGYKENVDIWSVGCIMGEMIKGGVLFPGTDHIDQWNKVIEQLGTPCPEFMKKLQPTVRTYVENRPKYAGYSFEKLFPDVLFPADSEHNKLKASQARDLLSKMLVIDASKRISVDEALQHPYINVWYDPSEAEAPPPKIPDKQLDEREHTIEEWKELIYKEVMDLEERTKNGVIRGQPSPLAQVQQ

SEQ ID NO: 52425 - protein, 384 aa, Homo sapiens
  Payload ID: 10451
  Gene Symbol: MAPK8
  Gene Name: mitogen-activated protein kinase 8
  Uniprot ID: P45983
  ENSP ID: ENSP00000363297
MSRSKRDNNFYSVEIGDSTFTVLKRYQNLKPIGSGAQGIVCAAYDAILERNVAIKKLSRPFQNQTHAKRAYRELVLMKCVNHKNIIGLLNVFTPQKSLEEFQDVYIVMELMDANLCQVIQMELDHERMSYLLYQMLCGIKHLHSAGIIHRDLKPSNIVVKSDCTLKILDFGLARTAGTSFMMTPYVVTRYYRAPEVILGMGYKENVDLWSVGCIMGEMVCHKILFPGRDYIDQWNKVIEQLGTPCPEFMKKLQPTVRTYVENRPKYAGYSFEKLFPDVLFPADSEHNKLKASQARDLLSKMLVIDASKRISVDEALQHPYINVWYDPSEAEAPPPKIPDKQLDEREHTIEEWKELIYKEVMDLEERTKNGVIRGQPSPLAQVQQ

SEQ ID NO: 52426 - protein, 427 aa, Homo sapiens
  Payload ID: 10451
  Gene Symbol: MAPK8
  Gene Name: mitogen-activated protein kinase 8
  Uniprot ID: P45983
  ENSP ID: ENSP00000363304
MSRSKRDNNFYSVEIGDSTFTVLKRYQNLKPIGSGAQGIVCAAYDAILERNVAIKKLSRPFQNQTHAKRAYRELVLMKCVNHKNIIGLLNVFTPQKSLEEFQDVYIVMELMDANLCQVIQMELDHERMSYLLYQMLCGIKHLHSAGIIHRDLKPSNIVVKSDCTLKILDFGLARTAGTSFMMTPYVVTRYYRAPEVILGMGYKENVDLWSVGCIMGEMVCHKILFPGRDYIDQWNKVIEQLGTPCPEFMKKLQPTVRTYVENRPKYAGYSFEKLFPDVLFPADSEHNKLKASQARDLLSKMLVIDASKRISVDEALQHPYINVWYDPSEAEAPPPKIPDKQLDEREHTIEEWKELIYKEVMDLEERTKNGVIRGQPSPLGAAVINGSQHPSSSSSVNDVSSMSTDPTLASDTDSSLEAAAGPLGCCR

SEQ ID NO: 52427 - protein, 427 aa, Homo sapiens; identical to SEQ ID NO: 52423
  Payload ID: 10451
  Gene Symbol: MAPK8
  Gene Name: mitogen-activated protein kinase 8
  Uniprot ID: P45983
  ENSP ID: ENSP00000378974

SEQ ID NO: 52428 - protein, 142 aa, Homo sapiens
  Payload ID: 10451
  Gene Symbol: MAPK8
  Gene Name: mitogen-activated protein kinase 8
  ENSP ID: ENSP00000387936
MSRSKRDNNFYSVEIGDSTFTVLKRYQNLKPIGSGAQGIVCAAYDAILERNVAIKKLSRPFQNQTHAKRAYRELVLMKCVNHKNIIGLLNVFTPQKSLEEFQDVYIVMELMDANLCQVIQMELDHERMSYLLYQMLCGIKHL

SEQ ID NO: 52429 - protein, 97 aa, Homo sapiens
  Payload ID: 10451
  Gene Symbol: MAPK8
  Gene Name: mitogen-activated protein kinase 8
  ENSP ID: ENSP00000393223
MIIGLLNVFTPQKSLEEFQDVYIVMELMDANLCQVIQMELDHERMSYLLYQMLCGIKHLHSAGIIHRDLKPSNIVVKSDCTLKILDFGLARTAGTSF

SEQ ID NO: 52430 - protein, 142 aa, Homo sapiens; identical to SEQ ID NO: 52428
  Payload ID: 10451
  Gene Symbol: MAPK8
  Gene Name: mitogen-activated protein kinase 8
  ENSP ID: ENSP00000397729

SEQ ID NO: 52431 - protein, 711 aa, Homo sapiens
  Payload ID: 10452
  Gene Symbol: MAPK8IP1
  Gene Name: mitogen-activated protein kinase 8 interacting protein 1
  Uniprot ID: Q9UQF2
  ENSP ID: ENSP00000241014
MAERESGGLGGGAASPPAASPFLGLHIASPPNFRLTHDISLEEFEDEDLSEITDECGISLQCKDTLSLRPPRAGLLSAGGGGAGSRLQAEMLQMDLIDATGDTPGAEDDEEDDDEERAARRPGAGPPKAESGQEPASRGQGQSQGQSQGPGSGDTYRPKRPTTLNLFPQVPRSQDTLNNNSLGKKHSWQDRVSRSSSPLKTGEQTPPHEHICLSDELPPQSGPAPTTDRGTSTDSPCRRSTATQMAPPGGPPAAPPGGRGHSHRDRIHYQADVRLEATEEIYLTPVQRPPDAAEPTSAFLPPTESRMSVSSDPDPAAYPSTAGRPHPSISEEEEGFDCLSSPERAEPPGGGWRGSLGEPPPPPRASLSSDTSALSYDSVKYTLVVDEHAQLELVSLRPCFGDYSDESDSATVYDNCASVSSPYESAIGEEYEEAPRPQPPACLSEDSTPDEPDVHFSKKFLNVFMSGRSRSSSAESFGLFSCIINGEEQEQTHRAIFRFVPRHEDELELEVDDPLLVELQAEDYWYEAYNMRTGARGVFPAYYAIEVTKEPEHMAALAKNSDWVDQFRVKFLGSVQVPYHKGNDVLCAAMQKIATTRRLTVHFNPPSSCVLEISVRGVKIGVKADDSQEAKGNKCSHFFQLKNISFCGYHPKNNKYFGFITKHPADHRFACHVFVSEDSTKALAESVGRAFQQFYKQFVEYTCPTEDIYLE

SEQ ID NO: 52432 - protein, 701 aa, Homo sapiens
  Payload ID: 10452
  Gene Symbol: MAPK8IP1
  Gene Name: mitogen-activated protein kinase 8 interacting protein 1
  ENSP ID: ENSP00000378991
MQLVLKMDSSPDNDSWLEDQWERWLTHDISLEEFEDEDLSEITDECGISLQCKDTLSLRPPRAGLLSAGGGGAGSRLQAEMLQMDLIDATGDTPGAEDDEEDDDEERAARRPGAGPPKAESGQEPASRGQGQSQGQSQGPGSGDTYRPKRPTTLNLFPQVPRSQDTLNNNSLGKKHSWQDRVSRSSSPLKTGEQTPPHEHICLSDELPPQSGPAPTTDRGTSTDSPCRRSTATQMAPPGGPPAAPPGGRGHSHRDRIHYQADVRLEATEEIYLTPVQRPPDAAEPTSAFLPPTESRMSVSSDPDPAAYPSTAGRPHPSISEEEEGFDCLSSPERAEPPGGGWRGSLGEPPPPPRASLSSDTSALSYDSVKYTLVVDEHAQLELVSLRPCFGDYSDESDSATVYDNCASVSSPYESAIGEEYEEAPRPQPPACLSEDSTPDEPDVHFSKKFLNVFMSGRSRSSSAESFGLFSCIINGEEQEQTHRAIFRFVPRHEDELELEVDDPLLVELQAEDYWYEAYNMRTGARGVFPAYYAIEVTKEPEHMAALAKNSDWVDQFRVKFLGSVQVPYHKGNDVLCAAMQKIATTRRLTVHFNPPSSCVLEISVRGVKIGVKADDSQEAKGNKCSHFFQLKNISFCGYHPKNNKYFGFITKHPADHRFACHVFVSEDSTKALAESVGRAFQQFYKQFVEYTCPTEDIYLE

SEQ ID NO: 52433 - protein, 824 aa, Homo sapiens
  Payload ID: 10453
  Gene Symbol: MAPK8IP2
  Gene Name: mitogen-activated protein kinase 8 interacting protein 2
  Uniprot ID: Q13387
  ENSP ID: ENSP00000330572
MADRAEMFSLSTFHSLSPPGCRPPQDISLEEFDDEDLSEITDDCGLGLSYDSDHCEKDSLSLGRSEQPHPICSFQDDFQEFEMIDDNEEEDDEDEEEEEEEEEGDGEGQEGGDPGSEAPAPGPLIPSPSVEEPHKHRPTTLRLTTLGAQDSLNNNGGFDLVRPASWQETALCSPAPEALRELPGPLPATDTGPGGAQSPVRPGCDCEGNRPAEPPAPGGTSPSSDPGIEADLRSRSSGGRGGRRSSQELSSPGSDSEDAGGARLGRMISSISETELELSSDGGSSSSGRSSHLTNSIEEASSPASEPEPPREPPRRPAFLPVGPDDTNSEYESGSESEPDLSEDADSPWLLSNLVSRMISEGSSPIRCPGQCLSPAPRPPGEPVSPAGGAAQDSQDPEAAAGPGGVELVDMETLCAPPPPAPAAPRPGPAQPGPCLFLSNPTRDTITPLWAAPGRAARPGRACSAACSEEEDEEDDEEEEDAEDSAGSPGGRGTGPSAPRDASLVYDAVKYTLVVDEHTQLELVSLRRCAGLGHDSEEDSGGEASEEEAGAALLGGGQVSGDTSPDSPDLTFSKKFLNVFVNSTSRSSSTESFGLFSCLVNGEEREQTHRAVFRFIPRHPDELELDVDDPVLVEAEEDDFWFRGFNMRTGERGVFPAFYAHAVPGPAKDLLGSKRSPCWVERFDVQFLGSVEVPCHQGNGILCAAMQKIATARKLTVHLRPPASCDLEISLRGVKLSLSGGGPEFQRCSHFFQMKNISFCGCHPRNSCYFGFITKHPLLSRFACHVFVSQESMRPVAQSVGRAFLEYYQEHLAYACPTEDIYLE

SEQ ID NO: 52434 - protein, 1336 aa, Homo sapiens
  Payload ID: 10454
  Gene Symbol: MAPK8IP3
  Gene Name: mitogen-activated protein kinase 8 interacting protein 3
  Uniprot ID: Q9UPT6
  ENSP ID: ENSP00000250894
MMEIQMDEGGGVVVYQDDYCSGSVMSERVSGLAGSIYREFERLIHCYDEEVVKELMPLVVNVLENLDSVLSENQEHEVELELLREDNEQLLTQYEREKALRRQAEEKFIEFEDALEQEKKELQIQVEHYEFQTRQLELKAKNYADQISRLEERESEMKKEYNALHQRHTEMIQTYVEHIERSKMQQVGGNSQTESSLPGRRKERPTSLNVFPLADGTVRAQIGGKLVPAGDHWHLSDLGQLQSSSSYQCPQDEMSESGQSSAAATPSTTGTKSNTPTSSVPSAAVTPLNESLQPLGDYGVGSKNSKRAREKRDSRNMEVQVTQEMRNVSIGMGSSDEWSDVQDIIDSTPELDMCPETRLDRTGSSPTQGIVNKAFGINTDSLYHELSTAGSEVIGDVDEGADLLGEFSVRDDFFGMGKEVGNLLLENSQLLETKNALNVVKNDLIAKVDQLSGEQEVLRGELEAAKQAKVKLENRIKELEEELKRVKSEAIIARREPKEEAEDVSSYLCTESDKIPMAQRRRFTRVEMARVLMERNQYKERLMELQEAVRWTEMIRASREHPSVQEKKKSTIWQFFSRLFSSSSSPPPAKRPYPSVNIHYKSPTTAGFSQRRNHAMCPISAGSRPLEFFPDDDCTSSARREQKREQYRQVREHVRNDDGRLQACGWSLPAKYKQLSPNGGQEDTRMKNVPVPVYCRPLVEKDPTMKLWCAAGVNLSGWRPNEDDAGNGVKPAPGRDPLTCDREGDGEPKSAHTSPEKKKAKELPEMDATSSRVWILTSTLTTSKVVIIDANQPGTVVDQFTVCNAHVLCISSIPAASDSDYPPGEMFLDSDVNPEDPGADGVLAGITLVGCATRCNVPRSNCSSRGDTPVLDKGQGEVATIANGKVNPSQSTEEATEATEVPDPGPSEPETATLRPGPLTEHVFTDPAPTPSSGPQPGSENGPEPDSSSTRPEPEPSGDPTGAGSSAAPTMWLGAQNGWLYVHSAVANWKKCLHSIKLKDSVLSLVHVKGRVLVALADGTLAIFHRGEDGQWDLSNYHLMDLGHPHHSIRCMAVVYDRVWCGYKNKVHVIQPKTMQIEKSFDAHPRRESQVRQLAWIGDGVWVSIRLDSTLRLYHAHTHQHLQDVDIEPYVSKMLGTGKLGFSFVRITALLVAGSRLWVGTGNGVVISIPLTETVVLHRGQLLGLRANKTSPTSGEGARPGGIIHVYGDDSSDRAASSFIPYCSMAQAQLCFHGHRDAVKFFVSVPGNVLATLNGSVLDSPAEGPGPAAPASEVEGQKLRNVLVLSGGEGYIDFRIGDGEDDETEEGAGDMSQVKPVLSKAERSHIIVWQVSYTPE

SEQ ID NO: 52435 - protein, 1330 aa, Homo sapiens
  Payload ID: 10454
  Gene Symbol: MAPK8IP3
  Gene Name: mitogen-activated protein kinase 8 interacting protein 3
  ENSP ID: ENSP00000348290
MMEIQMDEGGGVVVYQDDYCSGSVMSERVSGLAGSIYREFERLIHCYDEEVVKELMPLVVNVLENLDSVLSENQEHEVELELLREDNEQLLTQYEREKALRRQAEEKFIEFEDALEQEKKELQIQVEHYEFQTRQLELKAKNYADQISRLEERESEMKKEYNALHQRHTEMIQTYVEHIERSKMQQVGGNSQTESSLPGRRKERPTSLNVFPLADGTVRAQIGGKLVPAGDHWHLSDLGQLQSSSSYQCPQDEMSESGQSSAAATPSTTGTKSNTPTSSVPSAAVTPLNESLQPLGDYGVGSKNSKRAREKRDSRNMEVQVTQEMRNVSIGMGSSDEWSDVQDIIDSTPELDMCPETRLDRTGSSPTQGIVNKAFGINTDSLYHELSTAGSEVIGDVDEGADLLGEFSGMGKEVGNLLLENSQLLETKNALNVVKNDLIAKVDQLSGEQEVLRGELEAAKQAKVKLENRIKELEEELKRVKSEAIIARREPKEEAEDVSSYLCTESDKIPMAQRRRFTRVEMARVLMERNQYKERLMELQEAVRWTEMIRASREHPSVQEKKKSTIWQFFSRLFSSSSSPPPAKRPYPSVNIHYKSPTTAGFSQRRNHAMCPISAGSRPLEFFPDDDCTSSARREQKREQYRQVREHVRNDDGRLQACGWSLPAKYKQLSPNGGQEDTRMKNVPVPVYCRPLVEKDPTMKLWCAAGVNLSGWRPNEDDAGNGVKPAPGRDPLTCDREGDGEPKSAHTSPEKKKAKELPEMDATSSRVWILTSTLTTSKVVIIDANQPGTVVDQFTVCNAHVLCISSIPAASDSDYPPGEMFLDSDVNPEDPGADGVLAGITLVGCATRCNVPRSNCSSRGDTPVLDKGQGEVATIANGKVNPSQSTEEATEATEVPDPGPSEPETATLRPGPLTEHVFTDPAPTPSSGPQPGSENGPEPDSSSTRPEPEPSGDPTGAGSSAAPTMWLGAQNGWLYVHSAVANWKKCLHSIKLKDSVLSLVHVKGRVLVALADGTLAIFHRGEDGQWDLSNYHLMDLGHPHHSIRCMAVVYDRVWCGYKNKVHVIQPKTMQIEKSFDAHPRRESQVRQLAWIGDGVWVSIRLDSTLRLYHAHTHQHLQDVDIEPYVSKMLGTGKLGFSFVRITALLVAGSRLWVGTGNGVVISIPLTETVVLHRGQLLGLRANKTSPTSGEGARPGGIIHVYGDDSSDRAASSFIPYCSMAQAQLCFHGHRDAVKFFVSVPGNVLATLNGSVLDSPAEGPGPAAPASEVEGQKLRNVLVLSGGEGYIDFRIGDGEDDETEEGAGDMSQVKPVLSKAERSHIIVWQVSYTPE

SEQ ID NO: 52436 - protein, 69 aa, Homo sapiens
  Payload ID: 10454
  Gene Symbol: MAPK8IP3
  Gene Name: mitogen-activated protein kinase 8 interacting protein 3
  ENSP ID: ENSP00000454739
  MOD_RES (1)..(1): Any amino acid
XRPPHPAPQAPSPTRPHPPCPRPPSHPSTRACSPWGTMAWAPRTASVPGRSATAATWKYRSPRRCATSV

SEQ ID NO: 52437 - protein, 1337 aa, Homo sapiens
  Payload ID: 10454
  Gene Symbol: MAPK8IP3
  Gene Name: mitogen-activated protein kinase 8 interacting protein 3
  ENSP ID: ENSP00000481780
MMEIQMDEGGGVVVYQDDYCSGSVMSERVSGLAGSIYREFERLIHCYDEEVVKELMPLVVNVLENLDSVLSENQEHEVELELLREDNEQLLTQYEREKALRRQAEEKFIEFEDALEQEKKELQIQVEHYEFQTRQLELKAKNYADQISRLEERESEMKKEYNALHQRHTEMIQTYVEHIERSKMQQVGGNSQTESSLPGRSRKERPTSLNVFPLADGTVRAQIGGKLVPAGDHWHLSDLGQLQSSSSYQCPQDEMSESGQSSAAATPSTTGTKSNTPTSSVPSAAVTPLNESLQPLGDYGVGSKNSKRAREKRDSRNMEVQVTQEMRNVSIGMGSSDEWSDVQDIIDSTPELDMCPETRLDRTGSSPTQGIVNKAFGINTDSLYHELSTAGSEVIGDVDEGADLLGEFSVRDDFFGMGKEVGNLLLENSQLLETKNALNVVKNDLIAKVDQLSGEQEVLRGELEAAKQAKVKLENRIKELEEELKRVKSEAIIARREPKEEAEDVSSYLCTESDKIPMAQRRRFTRVEMARVLMERNQYKERLMELQEAVRWTEMIRASREHPSVQEKKKSTIWQFFSRLFSSSSSPPPAKRPYPSVNIHYKSPTTAGFSQRRNHAMCPISAGSRPLEFFPDDDCTSSARREQKREQYRQVREHVRNDDGRLQACGWSLPAKYKQLSPNGGQEDTRMKNVPVPVYCRPLVEKDPTMKLWCAAGVNLSGWRPNEDDAGNGVKPAPGRDPLTCDREGDGEPKSAHTSPEKKKAKELPEMDATSSRVWILTSTLTTSKVVIIDANQPGTVVDQFTVCNAHVLCISSIPAASDSDYPPGEMFLDSDVNPEDPGADGVLAGITLVGCATRCNVPRSNCSSRGDTPVLDKGQGEVATIANGKVNPSQSTEEATEATEVPDPGPSEPETATLRPGPLTEHVFTDPAPTPSSGPQPGSENGPEPDSSSTRPEPEPSGDPTGAGSSAAPTMWLGAQNGWLYVHSAVANWKKCLHSIKLKDSVLSLVHVKGRVLVALADGTLAIFHRGEDGQWDLSNYHLMDLGHPHHSIRCMAVVYDRVWCGYKNKVHVIQPKTMQIEKSFDAHPRRESQVRQLAWIGDGVWVSIRLDSTLRLYHAHTHQHLQDVDIEPYVSKMLGTGKLGFSFVRITALLVAGSRLWVGTGNGVVISIPLTETVVLHRGQLLGLRANKTSPTSGEGARPGGIIHVYGDDSSDRAASSFIPYCSMAQAQLCFHGHRDAVKFFVSVPGNVLATLNGSVLDSPAEGPGPAAPASEVEGQKLRNVLVLSGGEGYIDFRIGDGEDDETEEGAGDMSQVKPVLSKAERSHIIVWQVSYTPE

SEQ ID NO: 52438 - protein, 339 aa, Homo sapiens
  Payload ID: 10455
  Gene Symbol: MAPK9
  Gene Name: mitogen-activated protein kinase 9
  ENSP ID: ENSP00000321410
MSDSKCDSQFYSVQVADSTFTVLKRYQQLKPIGSGAQGIVCAAFDTVLGINVAVKKLSRPFQNQTHAKRAYRELVLLKCVNHKNIISLLNVFTPQKTLEEFQDVYLVMELMDANLCQVIHMELDHERMSYLLYQMLCGIKHLHSAGIIHRDLKPSNIVVKSDCTLKILDFGLARTACTNFMMTPYVVTRYYRAPEVILGMGYKENASQARDLLSKMLVIDPDKRISVDEALRHPYITVWYDPAEAEAPPPQIYDAQLEEREHAIEEWKELIYKEVMDWEERSKNGVVKDQPSDAAVSSNATPSQSSSINDISSMSTEQTLASDTDSSLDASTGPLEGCR

SEQ ID NO: 52439 - protein, 382 aa, Homo sapiens
  Payload ID: 10455
  Gene Symbol: MAPK9
  Gene Name: mitogen-activated protein kinase 9
  Uniprot ID: P45984
  ENSP ID: ENSP00000345524
MSDSKCDSQFYSVQVADSTFTVLKRYQQLKPIGSGAQGIVCAAFDTVLGINVAVKKLSRPFQNQTHAKRAYRELVLLKCVNHKNIISLLNVFTPQKTLEEFQDVYLVMELMDANLCQVIHMELDHERMSYLLYQMLCGIKHLHSAGIIHRDLKPSNIVVKSDCTLKILDFGLARTACTNFMMTPYVVTRYYRAPEVILGMGYKENVDIWSVGCIMAEMVLHKVLFPGRDYIDQWNKVIEQLGTPSAEFMKKLQPTVRNYVENRPKYPGIKFEELFPDWIFPSESERDKIKTSQARDLLSKMLVIDPDKRISVDEALRHPYITVWYDPAEAEAPPPQIYDAQLEEREHAIEEWKELIYKEVMDWEERSKNGVVKDQPSAQMQQ

SEQ ID NO: 52440 - protein, 382 aa, Homo sapiens
  Payload ID: 10455
  Gene Symbol: MAPK9
  Gene Name: mitogen-activated protein kinase 9
  Uniprot ID: P45984
  ENSP ID: ENSP00000377028
MSDSKCDSQFYSVQVADSTFTVLKRYQQLKPIGSGAQGIVCAAFDTVLGINVAVKKLSRPFQNQTHAKRAYRELVLLKCVNHKNIISLLNVFTPQKTLEEFQDVYLVMELMDANLCQVIHMELDHERMSYLLYQMLCGIKHLHSAGIIHRDLKPSNIVVKSDCTLKILDFGLARTACTNFMMTPYVVTRYYRAPEVILGMGYKENVDIWSVGCIMGELVKGCVIFQGTDHIDQWNKVIEQLGTPSAEFMKKLQPTVRNYVENRPKYPGIKFEELFPDWIFPSESERDKIKTSQARDLLSKMLVIDPDKRISVDEALRHPYITVWYDPAEAEAPPPQIYDAQLEEREHAIEEWKELIYKEVMDWEERSKNGVVKDQPSAQMQQ

SEQ ID NO: 52441 - protein, 124 aa, Homo sapiens
  Payload ID: 10455
  Gene Symbol: MAPK9
  Gene Name: mitogen-activated protein kinase 9
  ENSP ID: ENSP00000377029
MSDSKCDSQFYSVQVADSTFTVLKRYQQLKPIGSGAQGIVWRHHCSALPFIGRMRPVSVIVTPWINQEGMLCEGLGWPSLPWCLTSTVCPAQNVRIVSLTLNVSLLHGKTVSRRSITGQLKCCI

SEQ ID NO: 52442 - protein, 124 aa, Homo sapiens; identical to SEQ ID NO: 52441
  Payload ID: 10455
  Gene Symbol: MAPK9
  Gene Name: mitogen-activated protein kinase 9
  ENSP ID: ENSP00000380262

SEQ ID NO: 52443 - protein, 424 aa, Homo sapiens
  Payload ID: 10455
  Gene Symbol: MAPK9
  Gene Name: mitogen-activated protein kinase 9
  Uniprot ID: P45984
  ENSP ID: ENSP00000389338
MSDSKCDSQFYSVQVADSTFTVLKRYQQLKPIGSGAQGIVCAAFDTVLGINVAVKKLSRPFQNQTHAKRAYRELVLLKCVNHKNIISLLNVFTPQKTLEEFQDVYLVMELMDANLCQVIHMELDHERMSYLLYQMLCGIKHLHSAGIIHRDLKPSNIVVKSDCTLKILDFGLARTACTNFMMTPYVVTRYYRAPEVILGMGYKENVDIWSVGCIMAEMVLHKVLFPGRDYIDQWNKVIEQLGTPSAEFMKKLQPTVRNYVENRPKYPGIKFEELFPDWIFPSESERDKIKTSQARDLLSKMLVIDPDKRISVDEALRHPYITVWYDPAEAEAPPPQIYDAQLEEREHAIEEWKELIYKEVMDWEERSKNGVVKDQPSDAAVSSNATPSQSSSINDISSMSTEQTLASDTDSSLDASTGPLEGCR

SEQ ID NO: 52444 - protein, 424 aa, Homo sapiens
  Payload ID: 10455
  Gene Symbol: MAPK9
  Gene Name: mitogen-activated protein kinase 9
  Uniprot ID: P45984
  ENSP ID: ENSP00000394560
MSDSKCDSQFYSVQVADSTFTVLKRYQQLKPIGSGAQGIVCAAFDTVLGINVAVKKLSRPFQNQTHAKRAYRELVLLKCVNHKNIISLLNVFTPQKTLEEFQDVYLVMELMDANLCQVIHMELDHERMSYLLYQMLCGIKHLHSAGIIHRDLKPSNIVVKSDCTLKILDFGLARTACTNFMMTPYVVTRYYRAPEVILGMGYKENVDIWSVGCIMGELVKGCVIFQGTDHIDQWNKVIEQLGTPSAEFMKKLQPTVRNYVENRPKYPGIKFEELFPDWIFPSESERDKIKTSQARDLLSKMLVIDPDKRISVDEALRHPYITVWYDPAEAEAPPPQIYDAQLEEREHAIEEWKELIYKEVMDWEERSKNGVVKDQPSDAAVSSNATPSQSSSINDISSMSTEQTLASDTDSSLDASTGPLEGCR

SEQ ID NO: 52445 - protein, 242 aa, Homo sapiens
  Payload ID: 10455
  Gene Symbol: MAPK9
  Gene Name: mitogen-activated protein kinase 9
  Uniprot ID: P45984
  ENSP ID: ENSP00000397422
MSDSKCDSQFYSVQVADSTFTVLKRYQQLKPIGSGAQGIVCAAFDTVLGINVAVKKLSRPFQNQTHAKRAYRELVLLKCVNHKNIISLLNVFTPQKTLEEFQDVYLVMELMDANLCQVIHMELDHERMSYLLYQMLCGIKHLHSAGIIHRDLKPSNIVVKSDCTLKILDFGLARTACTNFMMTPYVVTRYYRAPEVILGMGYKENVDIWSVGCIMGELVKGCVIFQGTDRILPRDLGPAMLS

SEQ ID NO: 52446 - protein, 103 aa, Homo sapiens
  Payload ID: 10455
  Gene Symbol: MAPK9
  Gene Name: mitogen-activated protein kinase 9
  ENSP ID: ENSP00000430608
MSDSKCDSQFYSVQVADSTFTVLKRYQQLKPIGSGAQGIVCAAFDTVLGINVAVKKLSRPFQNQTHAKRAYRELVLLKCVNHKNIISLLNVFTPQKTLEEFQD

SEQ ID NO: 52447 - protein, 214 aa, Homo sapiens
  Payload ID: 10455
  Gene Symbol: MAPK9
  Gene Name: mitogen-activated protein kinase 9
  ENSP ID: ENSP00000443149
MSDSKCDSQFYSVQVADSTFTVLKRYQQLKPIGSGAQGIVCAAFDTVLGINVAVKKLSRPFQNQTHAKRAYRELVLLKCVNHKNIISLLNVFTPQKTLEEFQDVYLVMELMDANLCQVIHMELDHERMSYLLYQMLCGIKHLHSAGIIHRDLKPSNIVVKSDCTLKILDFGLARTACTNFMMTPYVVTRYYRAPEVILGMGYKENAIKYWTLWH

SEQ ID NO: 52448 - protein, 522 aa, Homo sapiens
  Payload ID: 10456
  Gene Symbol: MAPKAP1
  Gene Name: mitogen-activated protein kinase associated protein 1
  Uniprot ID: Q9BPZ7
  ENSP ID: ENSP00000265960
MAFLDNPTIILAHIRQSHVTSDDTGMCEMVLIDHDVDLEKIHPPSMPGDSGSEIQGSNGETQGYVYAQSVDITSSWDFGIRRRSNTAQRLERLRKERQNQIKCKNIQWKERNSKQSAQELKSLFEKKSLKEKPPISGKQSILSVRLEQCPLQLNNPFNEYSKFDGKGHVGTTATKKIDVYLPLHSSQDRLLPMTVVTMASARVQDLIGLICWQYTSEGREPKLNDNVSAYCLHIAEDDGEVDTDFPPLDSNEPIHKFGFSTLALVEKYSSPGLTSKESLFVRINAAHGFSLIQVDNTKVTMKEILLKAVKRRKGSQKVSGPQYRLEKQSEPNVAVDLDSTLESQSAWEFCLVRENSSRADGVFEEDSQIDIATVQDMLSSHHYKSFKVSMIHRLRFTTDVQLGISGDKVEIDPVTNQKASTKFWIKQKPISIDSDLLCACDLAEEKSPSHAIFKLTYLSNHDYKHLYFESDAATVNEIVLKVNYILESRASTARADYFAQKQRKLNRRTSFSFQKEKKSGQQ

SEQ ID NO: 52449 - protein, 486 aa, Homo sapiens
  Payload ID: 10456
  Gene Symbol: MAPKAP1
  Gene Name: mitogen-activated protein kinase associated protein 1
  Uniprot ID: Q9BPZ7
  ENSP ID: ENSP00000265961
MAFLDNPTIILAHIRQSHVTSDDTGMCEMVLIDHDVDLEKIHPPSMPGDSGSEIQGSNGETQGYVYAQSVDITSSWDFGIRRRSNTAQRLERLRKERQNQIKCKNIQWKERNSKQSAQELKSLFEKKSLKEKPPISGKQSILSVRLEQCPLQLNNPFNEYSKFDGKGHVGTTATKKIDVYLPLHSSQDRLLPMTVVTMASARVQDLIGLICWQYTSEGREPKLNDNVSAYCLHIAEDDGEVDTDFPPLDSNEPIHKFGFSTLALVEKYSSPGLTSKESLFVRINAAHGFSLIQVDNTKVTMKEILLKAVKRRKGSQKVSGSRADGVFEEDSQIDIATVQDMLSSHHYKSFKVSMIHRLRFTTDVQLGISGDKVEIDPVTNQKASTKFWIKQKPISIDSDLLCACDLAEEKSPSHAIFKLTYLSNHDYKHLYFESDAATVNEIVLKVNYILESRASTARADYFAQKQRKLNRRTSFSFQKEKKSGQQ

SEQ ID NO: 52450 - protein, 132 aa, Homo sapiens
  Payload ID: 10456
  Gene Symbol: MAPKAP1
  Gene Name: mitogen-activated protein kinase associated protein 1
  ENSP ID: ENSP00000362595
MAFLDNPTIILAHIRQSHVTSDDTGMCEMVLIDHDVDLEKIHPPSMPGDSGSEIQGSNAQRLERLRKERQNQIKCKNIQWKERNSKQSAQELKSLFEKKSLKEKPPISGKQSILSVRLEQCPLQLNNPFNEY

SEQ ID NO: 52451 - protein, 522 aa, Homo sapiens; identical to SEQ ID NO: 52448
  Payload ID: 10456
  Gene Symbol: MAPKAP1
  Gene Name: mitogen-activated protein kinase associated protein 1
  Uniprot ID: Q9BPZ7
  ENSP ID: ENSP00000362597

SEQ ID NO: 52452 - protein, 330 aa, Homo sapiens
  Payload ID: 10456
  Gene Symbol: MAPKAP1
  Gene Name: mitogen-activated protein kinase associated protein 1
  Uniprot ID: Q9BPZ7
  ENSP ID: ENSP00000362602
MTVVTMASARVQDLIGLICWQYTSEGREPKLNDNVSAYCLHIAEDDGEVDTDFPPLDSNEPIHKFGFSTLALVEKYSSPGLTSKESLFVRINAAHGFSLIQVDNTKVTMKEILLKAVKRRKGSQKVSGPQYRLEKQSEPNVAVDLDSTLESQSAWEFCLVRENSSRADGVFEEDSQIDIATVQDMLSSHHYKSFKVSMIHRLRFTTDVQLGISGDKVEIDPVTNQKASTKFWIKQKPISIDSDLLCACDLAEEKSPSHAIFKLTYLSNHDYKHLYFESDAATVNEIVLKVNYILESRASTARADYFAQKQRKLNRRTSFSFQKEKKSGQQ

SEQ ID NO: 52453 - protein, 475 aa, Homo sapiens
  Payload ID: 10456
  Gene Symbol: MAPKAP1
  Gene Name: mitogen-activated protein kinase associated protein 1
  Uniprot ID: Q9BPZ7
  ENSP ID: ENSP00000362610
MAFLDNPTIILAHIRQSHVTSDDTGMCEMVLIDHDVDLEKIHPPSMPGDSGSEIQGSNGETQGYVYAQSVDITSSWDFGIRRRSNTAQRLERLRKERQNQIKCKNIQWKERNSKQSAQELKSLFEKKSLKEKPPISGKQSILSVRLEQCPLQLNNPFNEYSKFDGKGHVGTTATKKIDVYLPLHSSQDRLLPMTVVTMASARVQDLIGLICWQYTSEGREPKLNDNVSAYCLHIAEDDGEVDTDFPPLDSNEPIHKFGFSTLALVEKYSSPGLTSKESLFVRINAAHGFSLIQVDNTKVTMKEILLKAVKRRKGSQKVSGPQYRLEKQSEPNVAVDLDSTLESQSAWEFCLVRENSISGDKVEIDPVTNQKASTKFWIKQKPISIDSDLLCACDLAEEKSPSHAIFKLTYLSNHDYKHLYFESDAATVNEIVLKVNYILESRASTARADYFAQKQRKLNRRTSFSFQKEKKSGQQ

SEQ ID NO: 52454 - protein, 323 aa, Homo sapiens
  Payload ID: 10456
  Gene Symbol: MAPKAP1
  Gene Name: mitogen-activated protein kinase associated protein 1
  Uniprot ID: Q9BPZ7
  ENSP ID: ENSP00000377624
MAFLDNPTIILAHIRQSHVTSDDTGMCEMVLIDHDVDLEKIHPPSMPGDSGSEIQGSNGETQGYVYAQSVDITSSWDFGIRRRSNTAQRLERLRKERQNQIKCKNIQWKERNSKQSAQELKSLFEKKSLKEKPPISGKQSILSVRLEQCPLQLNNPFNEYSKFDGKGHVGTTATKKIDVYLPLHSSQDRLLPMTVVTMASARVQDLIGLICWQYTSEGREPKLNDNVSAYCLHIAEDDGEVDTDFPPLDSNEPIHKFGFSTLALVEKYSSPGLTSKESLFVRINAAHGFSLIQVDNTKVTMKEILLKAVKRRKGSQKVSGACD

SEQ ID NO: 52455 - protein, 330 aa, Homo sapiens; identical to SEQ ID NO: 52452
  Payload ID: 10456
  Gene Symbol: MAPKAP1
  Gene Name: mitogen-activated protein kinase associated protein 1
  Uniprot ID: Q9BPZ7
  ENSP ID: ENSP00000377627

SEQ ID NO: 52456 - protein, 93 aa, Homo sapiens
  Payload ID: 10456
  Gene Symbol: MAPKAP1
  Gene Name: mitogen-activated protein kinase associated protein 1
  ENSP ID: ENSP00000390024
MAFLDNPTIILAHIRQSHVTSDDTGMCEMVLIDHDVDLEKIHPPSMPGDSGSEIQGSNGETQGYVYAQSVDITSSWDFGIRRRSNTAQRLERL

SEQ ID NO: 52457 - protein, 253 aa, Homo sapiens
  Payload ID: 10456
  Gene Symbol: MAPKAP1
  Gene Name: mitogen-activated protein kinase associated protein 1
  ENSP ID: ENSP00000400182
MTVVTMASARVQDLIGLICWQYTSEGREPKLNDNVSAYCLHIAEDDGEVDTDFPPLDSNEPIHKFGFSTLALVEKYSSPGLTSKESLFVRINAAHGFSLIQVDNTKVTMKEILLKAVKRRKGSQKVSGSRADGVFEEDSQIDIATVQDMLSSHHYKSFKVSMIHRLRFTTDVQLGISGDKVEIDPVTNQKASTKFWIKQKPISIDSDLLCACDLAEEKSPSHAIFKLTYLSNHDYKHLYFESDAATVNEIVLK

SEQ ID NO: 52458 - protein, 127 aa, Homo sapiens
  Payload ID: 10456
  Gene Symbol: MAPKAP1
  Gene Name: mitogen-activated protein kinase associated protein 1
  ENSP ID: ENSP00000408359
MTVVTMASARVQDLIGLICWQYTSEGREPKLNDNVSAYCLHIAEDDGEVDTDFPPLDSNEPIHKFGFSTLALVEKYSSPGLTSKESLFVRINAAHGFSLIQVDNTKVTMKEILLKAVKRRKGSQKVS

SEQ ID NO: 52459 - protein, 94 aa, Homo sapiens
  Payload ID: 10456
  Gene Symbol: MAPKAP1
  Gene Name: mitogen-activated protein kinase associated protein 1
  ENSP ID: ENSP00000412485
  MOD_RES (1)..(1): Any amino acid
XKSFKVSMIHRLRFTTDVQLGHAIFKLTYLSNHDYKHLYFESDAATVNEIVLKVNYILESRASTARADYFAQKQRKLNRRTSFSFQKEKKSGQQ

SEQ ID NO: 52460 - protein, 133 aa, Homo sapiens
  Payload ID: 10456
  Gene Symbol: MAPKAP1
  Gene Name: mitogen-activated protein kinase associated protein 1
  ENSP ID: ENSP00000417766
EQCPLQLNNPFNEYSKFDGKHCSSLCRIIMNKCFLQSLALNSSLQRKSLKTLQKSMKPPRNVANSEKGHVGTTATKKIDVYLPLHSSQDRLLPMTVVTMASARVQDLIGLICWQYTSEGREPKLNDNVSAYCL

SEQ ID NO: 52461 - protein, 245 aa, Homo sapiens
  Payload ID: 10456
  Gene Symbol: MAPKAP1
  Gene Name: mitogen-activated protein kinase associated protein 1
  ENSP ID: ENSP00000418607
MTVVTMASARVQDLIGLICWQYTSEGREPKLNDNVSAYCLHIAEDDGEVDTDFPPLDSNEPIHKFGFSTLALVEKYSSPGLTSKESLFVRINAAHGFSLIQVDNTKVTMKEILLKAVKRRKGSQKVSGSRADGVFEEDSQIDIATVQDMLSSHHYKSFKVSMIHRLRFTTDVQLGISGDKVEIDPVTNQKASTKFWIKQKPISIDSDLLCACDLAEEKSPRFRSSLLAESKRGLSAVAVHRASAQ

SEQ ID NO: 52462 - protein, 1514 aa, Homo sapiens
  Payload ID: 10457
  Gene Symbol: MAPKBP1
  Gene Name: mitogen-activated protein kinase binding protein 1
  Uniprot ID: O60336
  ENSP ID: ENSP00000393099
MAVEGSTITSRIKNLLRSPSIKLRRSKAGNRREDLSSKVTLEKVLGITVSGGRGLACDPRSGLVAYPAGCVVVLFNPRKHKQHHILNSSRKTITALAFSPDGKYLVTGESGHMPAVRVWDVAEHSQVAELQEHKYGVACVAFSPSAKYIVSVGYQHDMIVNVWAWKKNIVVASNKVSSRVTAVSFSEDCSYFVTAGNRHIKFWYLDDSKTSKVNATVPLLGRSGLLGELRNNLFTDVACGRGKKADSTFCITSSGLLCEFSDRRLLDKWVELRNIDSFTTTVAHCISVSQDYIFCGCADGTVRLFNPSNLHFLSTLPRPHALGTDIASVTEASRLFSGVANARYPDTIALTFDPTNQWLSCVYNDHSIYVWDVRDPKKVGKVYSALYHSSCVWSVEVYPEVKDSNQACLPPSSFITCSSDNTIRLWNTESSGVHGSTLHRNILSSDLIKIIYVDGNTQALLDTELPGGDKADASLLDPRVGIRSVCVSPNGQHLASGDRMGTLRVHELQSLSEMLKVEAHDSEILCLEYSKPDTGLKLLASASRDRLIHVLDAGREYSLQQTLDEHSSSITAVKFAASDGQVRMISCGADKSIYFRTAQKSGDGVQFTRTHHVVRKTTLYDMDVEPSWKYTAIGCQDRNIRIFNISSGKQKKLFKGSQGEDGTLIKVQTDPSGIYIATSCSDKNLSIFDFSSGECVATMFGHSEIVTGMKFSNDCKHLISVSGDSCIFVWRLSSEMTISMRQRLAELRQRQRGGKQQGPSSPQRASGPNRHQAPSMLSPGPALSSDSDKEGEDEGTEEELPALPVLAKSTKKALASVPSPALPRSLSHWEMSRAQESVGFLDPAPAANPGPRRRGRWVQPGVELSVRSMLDLRQLETLAPSLQDPSQDSLAIIPSGPRKHGQEALETSLTSQNEKPPRPQASQPCSYPHIIRLLSQEEGVFAQDLEPAPIEDGIVYPEPSDNPTMDTSEFQVQAPARGTLGRVYPGSRSSEKHSPDSACSVDYSSSCLSSPEHPTEDSESTEPLSVDGISSDLEEPAEGDEEEEEEEGGMGPYGLQEGSPQTPDQEQFLKQHFETLASGAAPGAPVQVPERSESRSISSRFLLQVQTRPLREPSPSSSSLALMSRPAQVPQASGEQPRGNGANPPGAPPEVEPSSGNPSPQQAASVLLPRCRLNPDSSWAPKRVATASPFSGLQKAQSVHSLVPQERHEASLQAPSPGALLSREIEAQDGLGSLPPADGRPSRPHSYQNPTTSSMAKISRSISVGENLGLVAEPQAHAPIRVSPLSKLALPSRAHLVLDIPKPLPDRPTLAAFSPVTKGRAPGEAEKPGFPVGLGKAHSTTERWACLGEGTTPKPRTECQAHPGPSSPCAQQLPVSSLFQGPENLQPPPPEKTPNPMECTKPGAALSQDSEPAVSLEQCEQLVAELRGSVRQAVRLYHSVAGCKMPSAEQSRIAQLLRDTFSSVRQELEAVAGAVLSSPGSSPGAVGAEQTQALLEQYSELLLRAVERRMERKL

SEQ ID NO: 52463 - protein, 1508 aa, Homo sapiens
  Payload ID: 10457
  Gene Symbol: MAPKBP1
  Gene Name: mitogen-activated protein kinase binding protein 1
  Uniprot ID: O60336
  ENSP ID: ENSP00000397570
MAVEGSTITSRIKNLLRSPSIKLRRSKAGNRREDLSSKVTLEKVLGITVSGGRGLACDPRSGLVAYPAGCVVVLFNPRKHKQHHILNSSRKTITALAFSPDGKYLVTGESGHMPAVRVWDVAEHSQVAELQEHKYGVACVAFSPSAKYIVSVGYQHDMIVNVWAWKKNIVVASNKVSSRVTAVSFSEDCSYFVTAGNRHIKFWYLDDSKTSKVNATVPLLGRSGLLGELRNNLFTDVACGRGKKADSTFCITSSGLLCEFSDRRLLDKWVELRTTVAHCISVSQDYIFCGCADGTVRLFNPSNLHFLSTLPRPHALGTDIASVTEASRLFSGVANARYPDTIALTFDPTNQWLSCVYNDHSIYVWDVRDPKKVGKVYSALYHSSCVWSVEVYPEVKDSNQACLPPSSFITCSSDNTIRLWNTESSGVHGSTLHRNILSSDLIKIIYVDGNTQALLDTELPGGDKADASLLDPRVGIRSVCVSPNGQHLASGDRMGTLRVHELQSLSEMLKVEAHDSEILCLEYSKPDTGLKLLASASRDRLIHVLDAGREYSLQQTLDEHSSSITAVKFAASDGQVRMISCGADKSIYFRTAQKSGDGVQFTRTHHVVRKTTLYDMDVEPSWKYTAIGCQDRNIRIFNISSGKQKKLFKGSQGEDGTLIKVQTDPSGIYIATSCSDKNLSIFDFSSGECVATMFGHSEIVTGMKFSNDCKHLISVSGDSCIFVWRLSSEMTISMRQRLAELRQRQRGGKQQGPSSPQRASGPNRHQAPSMLSPGPALSSDSDKEGEDEGTEEELPALPVLAKSTKKALASVPSPALPRSLSHWEMSRAQESVGFLDPAPAANPGPRRRGRWVQPGVELSVRSMLDLRQLETLAPSLQDPSQDSLAIIPSGPRKHGQEALETSLTSQNEKPPRPQASQPCSYPHIIRLLSQEEGVFAQDLEPAPIEDGIVYPEPSDNPTMDTSEFQVQAPARGTLGRVYPGSRSSEKHSPDSACSVDYSSSCLSSPEHPTEDSESTEPLSVDGISSDLEEPAEGDEEEEEEEGGMGPYGLQEGSPQTPDQEQFLKQHFETLASGAAPGAPVQVPERSESRSISSRFLLQVQTRPLREPSPSSSSLALMSRPAQVPQASGEQPRGNGANPPGAPPEVEPSSGNPSPQQAASVLLPRCRLNPDSSWAPKRVATASPFSGLQKAQSVHSLVPQERHEASLQAPSPGALLSREIEAQDGLGSLPPADGRPSRPHSYQNPTTSSMAKISRSISVGENLGLVAEPQAHAPIRVSPLSKLALPSRAHLVLDIPKPLPDRPTLAAFSPVTKGRAPGEAEKPGFPVGLGKAHSTTERWACLGEGTTPKPRTECQAHPGPSSPCAQQLPVSSLFQGPENLQPPPPEKTPNPMECTKPGAALSQDSEPAVSLEQCEQLVAELRGSVRQAVRLYHSVAGCKMPSAEQSRIAQLLRDTFSSVRQELEAVAGAVLSSPGSSPGAVGAEQTQALLEQYSELLLRAVERRMERKL

SEQ ID NO: 52464 - protein, 69 aa, Homo sapiens
  Payload ID: 10457
  Gene Symbol: MAPKBP1
  Gene Name: mitogen-activated protein kinase binding protein 1
  ENSP ID: ENSP00000421891
MAVEGSTITSRIKNLLRSPSIKLRRSKAGNRREDLSSKVCGCVVQSPETQTAPHPQQFQENHHCPCLLP

SEQ ID NO: 52465 - protein, 156 aa, Homo sapiens
  Payload ID: 10457
  Gene Symbol: MAPKBP1
  Gene Name: mitogen-activated protein kinase binding protein 1
  ENSP ID: ENSP00000422132
MAVEGSTITSRIKNLLRSPSIKLRRSKAGNRREDLSSKVTLEKVLGITVSGGRGLACDPRSGLVAYPAGCVVVLFNPRKHKQHHILNSSRKTITALAFSPDGKYLVTGESGHMPAVRVWDVAEHSQVAELQEHKYGVACVAFSPSAKYIVSVGYQH

SEQ ID NO: 52466 - protein, 1231 aa, Homo sapiens
  Payload ID: 10457
  Gene Symbol: MAPKBP1
  Gene Name: mitogen-activated protein kinase binding protein 1
  Uniprot ID: O60336
  ENSP ID: ENSP00000426154
MAVEGSTITSRIKNLLRSPSIKLRRSKAGNRREDLSSKVTLEKVLGITVSGGRGLACDPRSGLVAYPAGCVVVLFNPRKHKQHHILNSSRKTITALAFSPDGKYLVTGESGHMPAVRVWDVAEHSQVAELQEHKYGVACVAFSPSAKYIVSVGYQHDMIVNVWAWKKNIVVASNKVSSRVTAVSFSEDCSYFVTAGNRHIKFWYLDDSKTSKVNATVPLLGRSGLLGELRNNLFTDVACGRGKKADSTFCITSSGLLCEFSDRRLLDKWVELRTTVAHCISVSQDYIFCGCADGTVRLFNPSNLHFLSTLPRPHALGTDIASVTEASRLFSGVANARYPDTIALTFDPTNQWLSCVYNDHSIYVWDVRDPKKVGKVYSALYHSSCVWSVEVYPEVKDSNQACLPPSSFITCSSDNTIRLWNTESSGVHGSTLHRNILSSDLIKIIYVDGNTQALLDTELPGGDKADASLLDPRVGIRSVCVSPNGQHLASGDRMGTLRVHELQSLSEMLKVEAHDSEILCLEYSKPDTGLKLLASASRDRLIHVLDAGREYSLQQTLDEHSSSITAVKFAASDGQVRMISCGADKSIYFRTAQKSGDGVQFTRTHHVVRKTTLYDMDVEPSWKYTAIGCQDRNIRIFNISSGKQKKLFKGSQGEDGTLIKVQTDPSGIYIATSCSDKNLSIFDFSSGECVATMFGHSEIVTGMKFSNDCKHLISVSGDSCIFVWRLSSEMTISMRQRLAELRQRQRGGKQQGPSSPQRASGPNRHQAPSMLSPGPALSSDSDKEGEDEGTEEELPALPVLAKSTKKALASVPSPALPRSLSHWEMSRAQESVGFLDPAPAANPGPRRRGRWVQPGVELSVRSMLDLRQLETLAPSLQDPSQDSLAIIPSGPRKHGQEALETSLTSQNEKPPRPQASQPCSYPHIIRLLSQEEGVFAQDLEPAPIEDGIVYPEPSDNPTMDTSEFQVQAPARGTLGRVYPGSRSSEKHSPDSACSVDYSSSCLSSPEHPTEDSESTEPLSVDGISSDLEEPAEGDEEEEEEEGGMGPYGLQEGSPQTPDQEQFLKQHFETLASGAAPGAPVQVPERSESRSISSRFLLQVQTRPLREPSPSSSSLALMSRPAQVPQASEPAVSLEQCEQLVAELRGSVRQAVRLYHSVAGCKMPSAEQSRIAQLLRDTFSSVRQELEAVAGAVLSSPGSSPGAVGAEQTQALLEQYSELLLRAVERRMERKL

SEQ ID NO: 52467 - protein, 331 aa, Homo sapiens
  Payload ID: 10457
  Gene Symbol: MAPKBP1
  Gene Name: mitogen-activated protein kinase binding protein 1
  ENSP ID: ENSP00000427582
MAVEGSTITSRIKNLLRSPSIKLRRSKAGNRREDLSSKVTLEKVLGITVSGGRGLACDPRSGLVAYPAGCVVVLFNPRKHKQHHILNSSRKTITALAFSPDGKYLVTGESGHMPAVRVWDVAEHSQVAELQEHKYGVACVAFSPSAKYIVSVGYQHDMIVNVWAWKKNIVVASNKVSSRVTAVSFSEDCSYFVTAGNRHIKFWYLDDSKTSKVNATVPLLGRSGLLGELRNNLFTDVACGRGKKADSTFCITSSGLLCEFSDRRLLDKWVELRTTVAHCISVSQDYIFCGCADGTVRLFNPSNLHFLSTLPRPHALGTDIASVTEARSTPR

SEQ ID NO: 52468 - protein, 69 aa, Homo sapiens; identical to SEQ ID NO: 52464
  Payload ID: 10457
  Gene Symbol: MAPKBP1
  Gene Name: mitogen-activated protein kinase binding protein 1
  ENSP ID: ENSP00000487189

SEQ ID NO: 52469 - protein, 393 aa, Homo sapiens [sequence omitted]

SEQ ID NO: 52470 - protein, 217 aa, Homo sapiens
  Payload ID: 10458
  Gene Symbol: MAP2K1
  Gene Name: mitogen-activated protein kinase kinase 1
  ENSP ID: ENSP00000456438
MVPVHQQFLSKQHNVKPSNILVNSRGEIKLCDFGVSGQLIDSMANSFVGTRSYMSPERLQGTHYSVQSDIWSMGLSLVEMAVGRYPIPPPDAKELELMFGCQVEGDAAETPPRPRTPGRPLSSYGMDSRPPMAIFELLDYIVNEPPPKLPSGVFSLEFQDFVNKCLIKNPAERADLKQLMVHAFIKRSDAEEVDFAGWLCSTIGLNQPSTPTHAAGV

SEQ ID NO: 52471 - protein, 400 aa, Homo sapiens [sequence omitted]

SEQ ID NO: 52472 - protein, 303 aa, Homo sapiens
  Payload ID: 10459
  Gene Symbol: MAP2K2
  Gene Name: mitogen-activated protein kinase kinase 2
  ENSP ID: ENSP00000378336
MARKLIHLEIKPAIRNQIIRELQVLHECNSPYIVGFYGAFYSDGEISICMEHMDGGSLDQVLKEAKRIPEEILGKVSIAVLRGLAYLREKHQIMHRDVKPSNILVNSRGEIKLCDFGVSGQLIDSMANSFVGTRSYMAPERLQGTHYSVQSDIWSMGLSLVELAVGRYPIPPPDAKELEAIFGRPVVDGEEGEPHSISPRPRPPGRPVSGHGMDSRPAMAIFELLDYIVNEPPPKLPNGVFTPDFQEFVNKCLIKNPAERADLKMLTNHTFIKRSEVEEVDFAGWLCKTLRLNQPGTPTRTAV

SEQ ID NO: 52473 - protein, 104 aa, Homo sapiens
  Payload ID: 10459
  Gene Symbol: MAP2K2
  Gene Name: mitogen-activated protein kinase kinase 2
  ENSP ID: ENSP00000471763
  MOD_RES (1)..(1): Any amino acid
XLRGHALLHGCHGMDSRPAMAIFELLDYIVNEPPPKLPNGVFTPDFQEFVNKCLIKNPAERADLKMLTNHTFIKRSEVEEVDFAGWLCKTLRLNQPGTPTRTAV

SEQ ID NO: 52474 - protein, 318 aa, Homo sapiens
  Payload ID: 10460
  Gene Symbol: MAP2K3
  Gene Name: mitogen-activated protein kinase kinase 3
  Uniprot ID: P46734
  ENSP ID: ENSP00000319139
MSKPPAPNPTPPRNLDSRTFITIGDRNFEVEADDLVTISELGRGAYGVVEKVRHAQSGTIMAVKRIRATVNSQEQKRLLMDLDINMRTVDCFYTVTFYGALFREGDVWICMELMDTSLDKFYRKVLDKNMTIPEDILGEIAVSIVRALEHLHSKLSVIHRDVKPSNVLINKEGHVKMCDFGISGYLVDSVAKTMDAGCKPYMAPERINPELNQKGYNVKSDVWSLGITMIEMAILRFPYESWGTPFQQLKQVVEEPSPQLPADRFSPEFVDFTAQCLRKNPAERMSYLELMEHPFFTLHKTKKTDIAAFVKEILGEDS

SEQ ID NO: 52475 - protein, 347 aa, Homo sapiens
  Payload ID: 10460
  Gene Symbol: MAP2K3
  Gene Name: mitogen-activated protein kinase kinase 3
  Uniprot ID: P46734
  ENSP ID: ENSP00000345083
MESPASSQPASMPQSKGKSKRKKDLRISCMSKPPAPNPTPPRNLDSRTFITIGDRNFEVEADDLVTISELGRGAYGVVEKVRHAQSGTIMAVKRIRATVNSQEQKRLLMDLDINMRTVDCFYTVTFYGALFREGDVWICMELMDTSLDKFYRKVLDKNMTIPEDILGEIAVSIVRALEHLHSKLSVIHRDVKPSNVLINKEGHVKMCDFGISGYLVDSVAKTMDAGCKPYMAPERINPELNQKGYNVKSDVWSLGITMIEMAILRFPYESWGTPFQQLKQVVEEPSPQLPADRFSPEFVDFTAQCLRKNPAERMSYLELMEHPFFTLHKTKKTDIAAFVKEILGEDS

SEQ ID NO: 52476 - protein, 318 aa, Homo sapiens; identical to SEQ ID NO: 52474
  Payload ID: 10460
  Gene Symbol: MAP2K3
  Gene Name: mitogen-activated protein kinase kinase 3
  Uniprot ID: P46734
  ENSP ID: ENSP00000355081

SEQ ID NO: 52477 - protein, 46 aa, Homo sapiens
  Payload ID: 10460
  Gene Symbol: MAP2K3
  Gene Name: mitogen-activated protein kinase kinase 3
  ENSP ID: ENSP00000378869
MESPASSQPASMPQSKERLVISMVTIYGPQQVPICAVNPVLSTLQT

SEQ ID NO: 52478 - protein, 101 aa, Homo sapiens
  Payload ID: 10460
  Gene Symbol: MAP2K3
  Gene Name: mitogen-activated protein kinase kinase 3
  ENSP ID: ENSP00000431203
MESPASSQPASMPQSKGNSLSANPWPSAQREQSSQLARVRRRPGQRRLPAAGGCRGQSIYHPGLRGAWSPPIQPICASALDREAGHIHGDHLWATTGPHLR

SEQ ID NO: 52479 - protein, 160 aa, Homo sapiens
  Payload ID: 10460
  Gene Symbol: MAP2K3
  Gene Name: mitogen-activated protein kinase kinase 3
  ENSP ID: ENSP00000434068
MSKPPAPNPTPPRNLDSRTFITIGDRNFEVEADDLVTISELGRGAYGVVEKVRHAQSGTIMAVKRIRATVNSQEQKRLLMDLDINMRTVDCFYTVTFYGALFREGDVWICMELMDTSLDKFYRKVLDKNMTIPEDILGEIAVSIVRALEHLHSKLSVIHR

SEQ ID NO: 52480 - protein, 136 aa, Homo sapiens
  Payload ID: 10460
  Gene Symbol: MAP2K3
  Gene Name: mitogen-activated protein kinase kinase 3
  ENSP ID: ENSP00000462178
IEMAILRFPYESWGTPFQQLKQVVEEPSPQLPADRFSPEFVDFTAQCLRKNPAERMSYLELMVSMGGRCLPCSSGLAGAGWGSGERAASCTQMGSSSGWPCVLSFRCSVICLLLHTWLPPPSFLHARPWEGYTGSV

SEQ ID NO: 52481 - protein, 46 aa, Homo sapiens
  Payload ID: 10460
  Gene Symbol: MAP2K3
  Gene Name: mitogen-activated protein kinase kinase 3
  ENSP ID: ENSP00000463202
MESPASSQPASMPQSKGRWMQRPVHIPPRPARSVVPTHPAHMCKCP

SEQ ID NO: 52482 - protein, 46 aa, Homo sapiens; identical to SEQ ID NO: 52481
  Payload ID: 10460
  Gene Symbol: MAP2K3
  Gene Name: mitogen-activated protein kinase kinase 3
  ENSP ID: ENSP00000463417

SEQ ID NO: 52483 - protein, 173 aa, Homo sapiens
  Payload ID: 10460
  Gene Symbol: MAP2K3
  Gene Name: mitogen-activated protein kinase kinase 3
  ENSP ID: ENSP00000464043
MESPASSQPASMPQSKGKSKRKKDLRISCMSKPPAPNPTPPRNLDSRTFITIGDRNFEVEADDLVTISELGRGAYGVVEKVRHAQSGTIMAVKRIRATVNSQEQKRLLMDLDINMRTVDCFYTVTFYGALFREGDVWICMELMDTSLDKFYRKVLDKNMTIPEDILGEIAVSM

SEQ ID NO: 52484 - protein, 318 aa, Homo sapiens; identical to SEQ ID NO: 52474
  Payload ID: 10460
  Gene Symbol: MAP2K3
  Gene Name: mitogen-activated protein kinase kinase 3
  Uniprot ID: P46734
  ENSP ID: ENSP00000478619

SEQ ID NO: 52485 - protein, 46 aa, Homo sapiens; identical to SEQ ID NO: 52481
  Payload ID: 10460
  Gene Symbol: MAP2K3
  Gene Name: mitogen-activated protein kinase kinase 3
  ENSP ID: ENSP00000486923

SEQ ID NO: 52486 - protein, 399 aa, Homo sapiens
  Payload ID: 10461
  Gene Symbol: MAP2K4
  Gene Name: mitogen-activated protein kinase kinase 4
  Uniprot ID: P45985
  ENSP ID: ENSP00000262445
MAAPSPSGGGGSGGGSGSGTPGPVGSPAPGHPAVSSMQGKRKALKLNFANPPFKSTARFTLNPNPTGVQNPHIERLRTHSIESSGKLKISPEQHWDFTAEDLKDLGEIGRGAYGSVNKMVHKPSGQIMAVKRIRSTVDEKEQKQLLMDLDVVMRSSDCPYIVQFYGALFREGDCWICMELMSTSFDKFYKYVYSVLDDVIPEEILGKITLATVKALNHLKENLKIIHRDIKPSNILLDRSGNIKLCDFGISGQLVDSIAKTRDAGCRPYMAPERIDPSASRQGYDVRSDVWSLGITLYELATGRFPYPKWNSVFDQLTQVVKGDPPQLSNSEEREFSPSFINFVNLCLTKDESKRPKYKELLKHPFILMYEERAVEVACYVCKILDQMPATPSSPMYVD

SEQ ID NO: 52487 - protein, 410 aa, Homo sapiens
  Payload ID: 10461
  Gene Symbol: MAP2K4
  Gene Name: mitogen-activated protein kinase kinase 4
  Uniprot ID: P45985
  ENSP ID: ENSP00000410402
MAAPSPSGGGGSGGGSGSGTPGPVGSPAPGHPAVSSMQGFQINFCEKAQSKRKALKLNFANPPFKSTARFTLNPNPTGVQNPHIERLRTHSIESSGKLKISPEQHWDFTAEDLKDLGEIGRGAYGSVNKMVHKPSGQIMAVKRIRSTVDEKEQKQLLMDLDVVMRSSDCPYIVQFYGALFREGDCWICMELMSTSFDKFYKYVYSVLDDVIPEEILGKITLATVKALNHLKENLKIIHRDIKPSNILLDRSGNIKLCDFGISGQLVDSIAKTRDAGCRPYMAPERIDPSASRQGYDVRSDVWSLGITLYELATGRFPYPKWNSVFDQLTQVVKGDPPQLSNSEEREFSPSFINFVNLCLTKDESKRPKYKELLKHPFILMYEERAVEVACYVCKILDQMPATPSSPMYVD

SEQ ID NO: 52488 - protein, 45 aa, Homo sapiens
  Payload ID: 10461
  Gene Symbol: MAP2K4
  Gene Name: mitogen-activated protein kinase kinase 4
  ENSP ID: ENSP00000463507
MAAPSPSGGGGSGGGSGSGTPGPVGSPAPGHPAVSSMQENSVNSG

SEQ ID NO: 52489 - protein, 16 aa, Homo sapiens
  Payload ID: 10461
  Gene Symbol: MAP2K4
  Gene Name: mitogen-activated protein kinase kinase 4
  ENSP ID: ENSP00000467239
  MOD_RES (1)..(1): Any amino acid
XHPAVSSMQENSVNSG

SEQ ID NO: 52490 - protein, 41 aa, Homo sapiens
  Payload ID: 10461
  Gene Symbol: MAP2K4
  Gene Name: mitogen-activated protein kinase kinase 4
  ENSP ID: ENSP00000473458
MAAPSPSGGGGSGGGSGSGTPGPVGSPAPGHPAVSSMQERD

SEQ ID NO: 52491 - protein, 92 aa, Homo sapiens
  Payload ID: 10461
  Gene Symbol: MAP2K4
  Gene Name: mitogen-activated protein kinase kinase 4
  ENSP ID: ENSP00000473472
MAAPSPSGGGGSGGGSGSGTPGPVGSPAPGHPAVSSMQGKRKALKLNFANPPFKSTARFTLNPNPTGVQNPHIEFGQQWMKKNKNNFLWIWM

SEQ ID NO: 52492 - protein, 41 aa, Homo sapiens; identical to SEQ ID NO: 52490
  Payload ID: 10461
  Gene Symbol: MAP2K4
  Gene Name: mitogen-activated protein kinase kinase 4
  ENSP ID: ENSP00000473511

SEQ ID NO: 52493 - protein, 41 aa, Homo sapiens; identical to SEQ ID NO: 52490
  Payload ID: 10461
  Gene Symbol: MAP2K4
  Gene Name: mitogen-activated protein kinase kinase 4
  ENSP ID: ENSP00000473582

SEQ ID NO: 52494 - protein, 45 aa, Homo sapiens; identical to SEQ ID NO: 52488
  Payload ID: 10461
  Gene Symbol: MAP2K4
  Gene Name: mitogen-activated protein kinase kinase 4
  ENSP ID: ENSP00000473606

SEQ ID NO: 52495 - protein, 448 aa, Homo sapiens
  Payload ID: 10462
  Gene Symbol: MAP2K5
  Gene Name: mitogen-activated protein kinase kinase 5
  Uniprot ID: Q13163
  ENSP ID: ENSP00000178640
MLWLALGPFPAMENQVLVIRIKIPNSGAVDWTVHSGPQLLFRDVLDVIGQVLPEATTTAFEYEDEDGDRITVRSDEEMKAMLSYYYSTVMEQQVNGQLIEPLQIFPRACKPPGERNIHGLKVNTRAGPSQHSSPAVSDSLPSNSLKKSSAELKKILANGQMNEQDIRYRDTLGHGNGGTVYKAYHVPSGKILAVKVILLDITLELQKQIMSELEILYKCDSSYIIGFYGAFFVENRISICTEFMDGGSLDVYRKMPEHVLGRIAVAVVKGLTYLWSLKILHRDVKPSNMLVNTRGQVKLCDFGVSTQLVNSIAKTYVGTNAYMAPERISGEQYGIHSDVWSLGISFMELALGRFPYPQIQKNQGSLMPLQLLQCIVDEDSPVLPVGEFSEPFVHFITQCMRKQPKERPAPEELMGHPFIVQFNDGNAAVVSMWVCRALEERRSQQGPP

SEQ ID NO: 52496 - protein, 258 aa, Homo sapiens
  Payload ID: 10462
  Gene Symbol: MAP2K5
  Gene Name: mitogen-activated protein kinase kinase 5
  ENSP ID: ENSP00000342101
MEDFEVILLDITLELQKQIMSELEILYKCDSSYIIGFYGAFFVENRISICTEFMDGGSLDVYRKMPEHVLGRIAVAVVKGLTYLWSLKILHRDVKPSNMLVNTRGQVKLCDFGVSTQLVNSIAKTYVGTNAYMAPERISGEQYGIHSDVWSLGISFMELALGRFPYPQIQKNQGSLMPLQLLQCIVDEDSPVLPVGEFSEPFVHFITQCMRKQPKERPAPEELMGHPFIVQFNDGNAAVVSMWVCRALEERRSQQGPP

SEQ ID NO: 52497 - protein, 412 aa, Homo sapiens
  Payload ID: 10462
  Gene Symbol: MAP2K5
  Gene Name: mitogen-activated protein kinase kinase 5
  Uniprot ID: Q13163
  ENSP ID: ENSP00000346493
MMEGHFPQSDVIGQVLPEATTTAFEYEDEDGDRITVRSDEEMKAMLSYYYSTVMEQQVNGQLIEPLQIFPRACKPPGERNIHGLKVNTRAGPSQHSSPAVSDSLPSNSLKKSSAELKKILANGQMNEQDIRYRDTLGHGNGGTVYKAYHVPSGKILAVKVILLDITLELQKQIMSELEILYKCDSSYIIGFYGAFFVENRISICTEFMDGGSLDVYRKMPEHVLGRIAVAVVKGLTYLWSLKILHRDVKPSNMLVNTRGQVKLCDFGVSTQLVNSIAKTYVGTNAYMAPERISGEQYGIHSDVWSLGISFMELALGRFPYPQIQKNQGSLMPLQLLQCIVDEDSPVLPVGEFSEPFVHFITQCMRKQPKERPAPEELMGHPFIVQFNDGNAAVVSMWVCRALEERRSQQGPP

SEQ ID NO: 52498 - protein, 438 aa, Homo sapiens
  Payload ID: 10462
  Gene Symbol: MAP2K5
  Gene Name: mitogen-activated protein kinase kinase 5
  Uniprot ID: Q13163
  ENSP ID: ENSP00000378859
MLWLALGPFPAMENQVLVIRIKIPNSGAVDWTVHSGPQLLFRDVLDVIGQVLPEATTTAFEYEDEDGDRITVRSDEEMKAMLSYYYSTVMEQQVNGQLIEPLQIFPRACKPPGERNIHGLKVNTRAGPSQHSSPAVSDSLPSNSLKKSSAELKKILANGQMNEQDIRYRDTLGHGNGGTVYKAYHVPSGKILAVKVILLDITLELQKQIMSELEILYKCDSSYIIGFYGAFFVENRISICTEFMDGGSLDVYRKMPEHVLGRIAVAVVKGLTYLWSLKILHRDVKPSNMLVNTRGQVKLCDFGVSTQLVNSIAKTYVGTNAYMAPERISGEQYGIHSDVWSLGISFMEIQKNQGSLMPLQLLQCIVDEDSPVLPVGEFSEPFVHFITQCMRKQPKERPAPEELMGHPFIVQFNDGNAAVVSMWVCRALEERRSQQGPP

SEQ ID NO: 52499 - protein, 128 aa, Homo sapiens
  Payload ID: 10462
  Gene Symbol: MAP2K5
  Gene Name: mitogen-activated protein kinase kinase 5
  ENSP ID: ENSP00000390196
DRITVRSDEEMKAMLSYYYSTVMEQQVNGQLIEPLQIFPRACKPPGERNIHGLKVNTRAGPSQHSSPAVSDSLPSNSLKKSSAELKKILANGQMNEQDIRYRDTLGHGNGGTVYKAYHVPSGKILAVK

SEQ ID NO: 52500 - protein, 182 aa, Homo sapiens
  Payload ID: 10462
  Gene Symbol: MAP2K5
  Gene Name: mitogen-activated protein kinase kinase 5
  ENSP ID: ENSP00000480580
  MOD_RES (1)..(1): Any amino acid
XCKPPGERNIHGLKVNTRAGPSQHSSPAVSDSLPSNSLKKSSAELKKILANGQMNEQDIRYRDTLGHGNGGTVYKAYHVPSGKILAVKVILLDITLELQKQIMSELEILYKCDSSYIIGFYGAFFVENRISICTEFMDGGSLDVYRKMPEHVLGRIAVAVVKGLTYLWSLKILHRANKDLCT

SEQ ID NO: 52501 - protein, 49 aa, Homo sapiens
  Payload ID: 10462
  Gene Symbol: MAP2K5
  Gene Name: mitogen-activated protein kinase kinase 5
  ENSP ID: ENSP00000483771
QYGIHSDVWSLGISFMEPLQLLQCIVDEDSPVLPVGEFSEPFVHFITQW

SEQ ID NO: 52502 - protein, 68 aa, Homo sapiens
  Payload ID: 10463
  Gene Symbol: MAP2K6
  Gene Name: mitogen-activated protein kinase kinase 6
  ENSP ID: ENSP00000351997
MSQSKGKKRNPGLKIPKEAFEQPQTSSTPPRDLDSKACISIGNQNFEVKADDLEPIMELGRADPSHSK

SEQ ID NO: 52503 - protein, 128 aa, Homo sapiens
  Payload ID: 10463
  Gene Symbol: MAP2K6
  Gene Name: mitogen-activated protein kinase kinase 6
  ENSP ID: ENSP00000464916
MSHRAWAEGKKRNPGLKIPKEAFEQPQTSSTPPRDLDSKACISIGNQNFEVKADDLEPIMELGRGAYGVVEKMRHVPSGQIMAVKRIRATVNSQEQKRLLMDLDISMRTVDCPFTVTFYGALFREGDV

SEQ ID NO: 52504 - protein, 84 aa, Homo sapiens
  Payload ID: 10463
  Gene Symbol: MAP2K6
  Gene Name: mitogen-activated protein kinase kinase 6
  ENSP ID: ENSP00000466143
MELGRGAYGVVEKMRHVPSGQIMAVKRIRATVNSQEQKRLLMDLDISMRTVDCPFTVTFYGALFREGDVWICMELMDTSLDKFY

SEQ ID NO: 52505 - protein, 278 aa, Homo sapiens
  Payload ID: 10463
  Gene Symbol: MAP2K6
  Gene Name: mitogen-activated protein kinase kinase 6
  Uniprot ID: P52564
  ENSP ID: ENSP00000467213
MELGRGAYGVVEKMRHVPSGQIMAVKRIRATVNSQEQKRLLMDLDISMRTVDCPFTVTFYGALFREGDVWICMELMDTSLDKFYKQVIDKGQTIPEDILGKIAVSIVKALEHLHSKLSVIHRDVKPSNVLINALGQVKMCDFGISGYLVDSVAKTIDAGCKPYMAPERINPELNQKGYSVKSDIWSLGITMIELAILRFPYDSWGTPFQQLKQVVEEPSPQLPADKFSAEFVDFTSQCLKKNSKERPTYPELMQHPFFTLHESKGTDVASFVKLILGD

SEQ ID NO: 52506 - protein, 334 aa, Homo sapiens
  Payload ID: 10463
  Gene Symbol: MAP2K6
  Gene Name: mitogen-activated protein kinase kinase 6
  Uniprot ID: P52564
  ENSP ID: ENSP00000468348
MSQSKGKKRNPGLKIPKEAFEQPQTSSTPPRDLDSKACISIGNQNFEVKADDLEPIMELGRGAYGVVEKMRHVPSGQIMAVKRIRATVNSQEQKRLLMDLDISMRTVDCPFTVTFYGALFREGDVWICMELMDTSLDKFYKQVIDKGQTIPEDILGKIAVSIVKALEHLHSKLSVIHRDVKPSNVLINALGQVKMCDFGISGYLVDSVAKTIDAGCKPYMAPERINPELNQKGYSVKSDIWSLGITMIELAILRFPYDSWGTPFQQLKQVVEEPSPQLPADKFSAEFVDFTSQCLKKNSKERPTYPELMQHPFFTLHESKGTDVASFVKLILGD

SEQ ID NO: 52507 - protein, 278 aa, Homo sapiens; identical to SEQ ID NO: 52505
  Payload ID: 10463
  Gene Symbol: MAP2K6
  Gene Name: mitogen-activated protein kinase kinase 6
  Uniprot ID: P52564
  ENSP ID: ENSP00000477701

SEQ ID NO: 52508 - protein, 419 aa, Homo sapiens
  Payload ID: 10464
  Gene Symbol: MAP2K7
  Gene Name: mitogen-activated protein kinase kinase 7
  Uniprot ID: O14733
  ENSP ID: ENSP00000381066
MAASSLEQKLSRLEAKLKQENREARRRIDLNLDISPQRPRPTLQLPLANDGGSRSPSSESSPQHPTPPARPRHMLGLPSTLFTPRSMESIEIDQKLQEIMKQTGYLTIGGQRYQAEINDLENLGEMGSGTCGQVWKMRFRKTGHVIAVKQMRRSGNKEENKRILMDLDVVLKSHDCPYIVQCFGTFITNTDVFIAMELMGTCAEKLKKRMQGPIPERILGKMTVAIVKALYYLKEKHGVIHRDVKPSNILLDERGQIKLCDFGISGRLVDSKAKTRSAGCAAYMAPERIDPPDPTKPDYDIRADVWSLGISLVELATGQFPYKNCKTDFEVLTKVLQEEPPLLPGHMGFSGDFQSFVKDCLTKDHRKRPKYNKLLEHSFIKRYETLEVDVASWFKDVMAKTESPRTSGVLSQPHLPFFR

SEQ ID NO: 52509 - protein, 426 aa, Homo sapiens
  Payload ID: 10464
  Gene Symbol: MAP2K7
  Gene Name: mitogen-activated protein kinase kinase 7
  Uniprot ID: O14733
  ENSP ID: ENSP00000381068
MAASSLEQKLSRLEAKLKQENREARRRIDLNLDISPQRPRPTLQLPLANDGGSRSPSSESSPQHPTPPARPRHMLGLPSTLFTPRSMESIEIDQKLQEIMKQTGYLTIGGQRYQAEINDLENLGEMGSGTCGQVWKMRFRKTGHVIAVKQMRRSGNKEENKRILMDLDVVLKSHDCPYIVQCFGTFITNTDVFIAMELMGTCAEKLKKRMQGPIPERILGKMTVAIVKALYYLKEKHGVIHRDVKPSNILLDERGQIKLCDFGISGRLVDSKAKTRSAGCAAYMAPERIDPPDPTKPDYDIRADVWSLGISLPCPSPSQVELATGQFPYKNCKTDFEVLTKVLQEEPPLLPGHMGFSGDFQSFVKDCLTKDHRKRPKYNKLLEHSFIKRYETLEVDVASWFKDVMAKTESPRTSGVLSQPHLPFFR

SEQ ID NO: 52510 - protein, 435 aa, Homo sapiens
  Payload ID: 10464
  Gene Symbol: MAP2K7
  Gene Name: mitogen-activated protein kinase kinase 7
  Uniprot ID: O14733
  ENSP ID: ENSP00000381070
MAASSLEQKLSRLEAKLKQENREARRRIDLNLDISPQRPRPIIVITLSPAPAPSQRAALQLPLANDGGSRSPSSESSPQHPTPPARPRHMLGLPSTLFTPRSMESIEIDQKLQEIMKQTGYLTIGGQRYQAEINDLENLGEMGSGTCGQVWKMRFRKTGHVIAVKQMRRSGNKEENKRILMDLDVVLKSHDCPYIVQCFGTFITNTDVFIAMELMGTCAEKLKKRMQGPIPERILGKMTVAIVKALYYLKEKHGVIHRDVKPSNILLDERGQIKLCDFGISGRLVDSKAKTRSAGCAAYMAPERIDPPDPTKPDYDIRADVWSLGISLVELATGQFPYKNCKTDFEVLTKVLQEEPPLLPGHMGFSGDFQSFVKDCLTKDHRKRPKYNKLLEHSFIKRYETLEVDVASWFKDVMAKTESPRTSGVLSQPHLPFFR

SEQ ID NO: 52511 - protein, 1512 aa, Homo sapiens
  Payload ID: 10465
  Gene Symbol: MAP3K1
  Gene Name: mitogen-activated protein kinase kinase kinase 1, E3 ubiquitin protein ligase
  Uniprot ID: Q13233
  ENSP ID: ENSP00000382423
MAAAAGNRASSSGFPGARATSPEAGGGGGALKASSAPAAAAGLLREAGSGGRERADWRRRQLRKVRSVELDQLPEQPLFLAASPPASSTSPSPEPADAAGSGTGFQPVAVPPPHGAASRGGAHLTESVAAPDSGASSPAAAEPGEKRAPAAEPSPAAAPAGREMENKETLKGLHKMDDRPEERMIREKLKATCMPAWKHEWLERRNRRGPVVVKPIPVKGDGSEMNHLAAESPGEVQASAASPASKGRRSPSPGNSPSGRTVKSESPGVRRKRVSPVPFQSGRITPPRRAPSPDGFSPYSPEETNRRVNKVMRARLYLLQQIGPNSFLIGGDSPDNKYRVFIGPQNCSCARGTFCIHLLFVMLRVFQLEPSDPMLWRKTLKNFEVESLFQKYHSRRSSRIKAPSRNTIQKFVSRMSNSHTLSSSSTSTSSSENSIKDEEEQMCPICLLGMLDEESLTVCEDGCRNKLHHHCMSIWAEECRRNREPLICPLCRSKWRSHDFYSHELSSPVDSPSSLRAAQQQTVQQQPLAGSRRNQESNFNLTHYGTQQIPPAYKDLAEPWIQVFGMELVGCLFSRNWNVREMALRRLSHDVSGALLLANGESTGNSGGSSGSSPSGGATSGSSQTSISGDVVEACCSVLSMVCADPVYKVYVAALKTLRAMLVYTPCHSLAERIKLQRLLQPVVDTILVKCADANSRTSQLSISTLLELCKGQAGELAVGREILKAGSIGIGGVDYVLNCILGNQTESNNWQELLGRLCLIDRLLLEFPAEFYPHIVSTDVSQAEPVEIRYKKLLSLLTFALQSIDNSHSMVGKLSRRIYLSSARMVTTVPHVFSKLLEMLSVSSSTHFTRMRRRLMAIADEVEIAEAIQLGVEDTLDGQQDSFLQASVPNNYLETTENSSPECTVHLEKTGKGLCATKLSASSEDISERLASISVGPSSSTTTTTTTTEQPKPMVQTKGRPHSQCLNSSPLSHHSQLMFPALSTPSSSTPSVPAGTATDVSKHRLQGFIPCRIPSASPQTQRKFSLQFHRNCPENKDSDKLSPVFTQSRPLPSSNIHRPKPSRPTPGNTSKQGDPSKNSMTLDLNSSSKCDDSFGCSSNSSNAVIPSDETVFTPVEEKCRLDVNTELNSSIEDLLEASMPSSDTTVTFKSEVAVLSPEKAENDDTYKDDVNHNQKCKEKMEAEEEEALAIAMAMSASQDALPIVPQLQVENGEDIIIIQQDTPETLPGHTKAKQPYREDTEWLKGQQIGLGAFSSCYQAQDVGTGTLMAVKQVTYVRNTSSEQEEVVEALREEIRMMSHLNHPNIIRMLGATCEKSNYNLFIEWMAGGSVAHLLSKYGAFKESVVINYTEQLLRGLSYLHENQIIHRDVKGANLLIDSTGQRLRIADFGAAARLASKGTGAGEFQGQLLGTIAFMAPEVLRGQQYGRSCDVWSVGCAIIEMACAKPPWNAEKHSNHLALIFKIASATTAPSIPSHLSPGLRDVALRCLELQPQDRPPSRELLKHPVFRTTW

SEQ ID NO: 52512 - protein, 954 aa, Homo sapiens
  Payload ID: 10466
  Gene Symbol: MAP3K10
  Gene Name: mitogen-activated protein kinase kinase kinase 10
  Uniprot ID: Q02779
  ENSP ID: ENSP00000253055
MEEEEGAVAKEWGTTPAGPVWTAVFDYEAAGDEELTLRRGDRVQVLSQDCAVSGDEGWWTGQLPSGRVGVFPSNYVAPGAPAAPAGLQLPQEIPFHELQLEEIIGVGGFGKVYRALWRGEEVAVKAARLDPEKDPAVTAEQVCQEARLFGALQHPNIIALRGACLNPPHLCLVMEYARGGALSRVLAGRRVPPHVLVNWAVQVARGMNYLHNDAPVPIIHRDLKSINILILEAIENHNLADTVLKITDFGLAREWHKTTKMSAAGTYAWMAPEVIRLSLFSKSSDVWSFGVLLWELLTGEVPYREIDALAVAYGVAMNKLTLPIPSTCPEPFARLLEECWDPDPHGRPDFGSILKRLEVIEQSALFQMPLESFHSLQEDWKLEIQHMFDDLRTKEKELRSREEELLRAAQEQRFQEEQLRRREQELAEREMDIVERELHLLMCQLSQEKPRVRKRKGNFKRSRLLKLREGGSHISLPSGFEHKITVQASPTLDKRKGSDGASPPASPSIIPRLRAIRLTPVDCGGSSSGSSSGGSGTWSRGGPPKKEELVGGKKKGRTWGPSSTLQKERVGGEERLKGLGEGSKQWSSSAPNLGKSPKHTPIAPGFASLNEMEEFAEAEDGGSSVPPSPYSTPSYLSVPLPAEPSPGARAPWEPTPSAPPARWGHGARRRCDLALLGCATLLGAVGLGADVAEARAADGEEQRRWLDGLFFPRAGRFPRGLSPPARPHGRREDVGPGLGLAPSATLVSLSSVSDCNSTRSLLRSDSDEAAPAAPSPPPSPPAPTPTPSPSTNPLVDLELESFKKDPRQSLTPTHVTAACAVSRGHRRTPSDGALGQRGPPEPAGHGPGPRDLLDFPRLPDPQALFPARRRPPEFPGRPTTLTFAPRPRPAASRPRLDPWKLVSFGRTLTISPPSRPDTPESPGPPSVQPTLLDMDMEGQNQDSTVPLCGAHGSH

SEQ ID NO: 52513 - protein, 67 aa, Homo sapiens
  Payload ID: 10466
  Gene Symbol: MAP3K10
  Gene Name: mitogen-activated protein kinase kinase kinase 10
  ENSP ID: ENSP00000471116
  MOD_RES (1)..(1): Any amino acid
XNHNLADTVLKITDFGLAREWHKTTKMSAAGTYAWMAPEVIRLSLFSKSSDVWRMLGPRPPRAARFR

SEQ ID NO: 52514 - protein, 180 aa, Homo sapiens
  Payload ID: 10466
  Gene Symbol: MAP3K10
  Gene Name: mitogen-activated protein kinase kinase kinase 10
  ENSP ID: ENSP00000471916
LAREWHKTTKMSAAGTYAWMAPEVIRLSLFSKSSDVWSFGVLLWELLTGEVPYREIDALAVAYGVAMNKLTLPIPSTCPEPFARLLEECWDPDPHGRPDFGSILKRLEVIEQSALFQMPLESFHSLQEDWKLEIQHMFDDLRTKEKALSIRSQSRPLQLWISGKDPMGPAPLQAPASSPG

SEQ ID NO: 52515 - protein, 122 aa, Homo sapiens
  Payload ID: 10466
  Gene Symbol: MAP3K10
  Gene Name: mitogen-activated protein kinase kinase kinase 10
  ENSP ID: ENSP00000473021
QDHGLRPRPRVAQDHQDERCGDLRLDGAGECWDPDPHGRPDFGSILKRLEVIEQSALFQMPLESFHSLQEDWKLEIQHMFDDLRTKEKALSIRSQSRPLQLWISGKDPMGPAPLQAPASSPG

SEQ ID NO: 52516 - protein, 847 aa, Homo sapiens
  Payload ID: 10467
  Gene Symbol: MAP3K11
  Gene Name: mitogen-activated protein kinase kinase kinase 11
  Uniprot ID: Q16584
  ENSP ID: ENSP00000309597
MEPLKSLFLKSPLGSWNGSGSGGGGGGGGGRPEGSPKAAGYANPVWTALFDYEPSGQDELALRKGDRVEVLSRDAAISGDEGWWAGQVGGQVGIFPSNYVSRGGGPPPCEVASFQELRLEEVIGIGGFGKVYRGSWRGELVAVKAARQDPDEDISVTAESVRQEARLFAMLAHPNIIALKAVCLEEPNLCLVMEYAAGGPLSRALAGRRVPPHVLVNWAVQIARGMHYLHCEALVPVIHRDLKSNNILLLQPIESDDMEHKTLKITDFGLAREWHKTTQMSAAGTYAWMAPEVIKASTFSKGSDVWSFGVLLWELLTGEVPYRGIDCLAVAYGVAVNKLTLPIPSTCPEPFAQLMADCWAQDPHRRPDFASILQQLEALEAQVLREMPRDSFHSMQEGWKREIQGLFDELRAKEKELLSREEELTRAAREQRSQAEQLRRREHLLAQWELEVFERELTLLLQQVDRERPHVRRRRGTFKRSKLRARDGGERISMPLDFKHRITVQASPGLDRRRNVFEVGPGDSPTFPRFRAIQLEPAEPGQAWGRQSPRRLEDSSNGERRACWAWGPSSPKPGEAQNGRRRSRMDEATWYLDSDDSSPLGSPSTPPALNGNPPRPSLEPEEPKRPVPAERGSSSGTPKLIQRALLRGTALLASLGLGRDLQPPGGPGRERGESPTTPPTPTPAPCPTEPPPSPLICFSLKTPDSPPTPAPLLLDLGIPVGQRSAKSPRREEEPRGGTVSPPPGTSRSAPGTPGTPRSPPLGLISRPRPSPLRSRIDPWSFVSAGPRPSPLPSPQPAPRRAPWTLFPDSDPFWDSPPANPFQGGPQDCRAQTKDMGAQAPWVPEAGP

SEQ ID NO: 52517 - protein, 215 aa, Homo sapiens
  Payload ID: 10467
  Gene Symbol: MAP3K11
  Gene Name: mitogen-activated protein kinase kinase kinase 11
  ENSP ID: ENSP00000431506
DDMEHKTLKITDFGLAREWHKTTQMSAAGTYAWMAPEVIKASTFSKGSDVWSFGVLLWELLTGEVPYRGIDCLAVAYGVAVNKLTLPIPSTCPEPFAQLMAGRLEARDPGSLRRAASQGKGTTEPRGGADASGARAAVTGGAAAAARAPAGPVGARGVRARADAAAAAGGPRATARAPPPRDIQAQQAPGARRRRAYQHATRLQAPHHRAGLTRP

SEQ ID NO: 52518 - protein, 263 aa, Homo sapiens
  Payload ID: 10467
  Gene Symbol: MAP3K11
  Gene Name: mitogen-activated protein kinase kinase kinase 11
  ENSP ID: ENSP00000432068
MDEATWYLDSDDSSPLGSPSTPPALNGNPPRPSLEPEEPKRPVPAERGSSSGTPKLIQRALLRGTALLASLGLGRDLQPPGGPGRERGESPTTPPTPTPAPCPTEPPPSPLICFSLKTPDSPPTPAPLLLDLGIPVGQRSAKSPRREEEPRGGTVSPPPGTSRSAPGTPGTPRSPPLGLISRPRPSPLRSRIDPWSFVSAGPRPSPLPSPQPAPRRAPWTLFPDSDPFWDSPPANPFQGGPQDCRAQTKDMGAQAPWVPEAGP

SEQ ID NO: 52519 - protein, 590 aa, Homo sapiens
  Payload ID: 10467
  Gene Symbol: MAP3K11
  Gene Name: mitogen-activated protein kinase kinase kinase 11
  Uniprot ID: Q16584
  ENSP ID: ENSP00000433886
MEHKTLKITDFGLAREWHKTTQMSAAGTYAWMAPEVIKASTFSKGSDVWSFGVLLWELLTGEVPYRGIDCLAVAYGVAVNKLTLPIPSTCPEPFAQLMADCWAQDPHRRPDFASILQQLEALEAQVLREMPRDSFHSMQEGWKREIQGLFDELRAKEKELLSREEELTRAAREQRSQAEQLRRREHLLAQWELEVFERELTLLLQQVDRERPHVRRRRGTFKRSKLRARDGGERISMPLDFKHRITVQASPGLDRRRNVFEVGPGDSPTFPRFRAIQLEPAEPGQAWGRQSPRRLEDSSNGERRACWAWGPSSPKPGEAQNGRRRSRMDEATWYLDSDDSSPLGSPSTPPALNGNPPRPSLEPEEPKRPVPAERGSSSGTPKLIQRALLRGTALLASLGLGRDLQPPGGPGRERGESPTTPPTPTPAPCPTEPPPSPLICFSLKTPDSPPTPAPLLLDLGIPVGQRSAKSPRREEEPRGGTVSPPPGTSRSAPGTPGTPRSPPLGLISRPRPSPLRSRIDPWSFVSAGPRPSPLPSPQPAPRRAPWTLFPDSDPFWDSPPANPFQGGPQDCRAQTKDMGAQAPWVPEAGP

SEQ ID NO: 52520 - protein, 96 aa, Homo sapiens
  Payload ID: 10467
  Gene Symbol: MAP3K11
  Gene Name: mitogen-activated protein kinase kinase kinase 11
  ENSP ID: ENSP00000435237
MEHKTLKITDFGLAREWHKTTQMSAAGTYAWMAPEVIKASTFSKGSDVWSFGVLLWELLTGEVPYRGIDCLAVAYGVAVNKLTLPIPSTCPEPFAQ

SEQ ID NO: 52521 - protein, 111 aa, Homo sapiens
  Payload ID: 10467
  Gene Symbol: MAP3K11
  Gene Name: mitogen-activated protein kinase kinase kinase 11
  ENSP ID: ENSP00000435970
MPIESDDMEHKTLKITDFGLAREWHKTTQMSAAGTYAWMAPEVIKASTFSKGSDVWSFGVLLWELLTGEVPYRGIDCLAVAYGVAVNKLTLPIPSTCPEPFAQLMADCWAQ

SEQ ID NO: 52522 - protein, 859 aa, Homo sapiens
  Payload ID: 10468
  Gene Symbol: MAP3K12
  Gene Name: mitogen-activated protein kinase kinase kinase 12
  Uniprot ID: Q12852
  ENSP ID: ENSP00000267079
MACLHETRTPSPSFGGFVSTLSEASMRKLDPDTSDCTPEKDLTPTHVLQLHEQDAGGPGGAAGSPESRASRVRADEVRLQCQSGSGFLEGLFGCLRPVWTMIGKAYSTEHKQQQEDLWEVPFEEILDLQWVGSGAQGAVFLGRFHGEEVAVKKVRDLKETDIKHLRKLKHPNIITFKGVCTQAPCYCILMEFCAQGQLYEVLRAGRPVTPSLLVDWSMGIAGGMNYLHLHKIIHRDLKSPNMLITYDDVVKISDFGTSKELSDKSTKMSFAGTVAWMAPEVIRNEPVSEKVDIWSFGVVLWELLTGEIPYKDVDSSAIIWGVGSNSLHLPVPSSCPDGFKILLRQCWNSKPRNRPSFRQILLHLDIASADVLSTPQETYFKSQAEWREEVKLHFEKIKSEGTCLHRLEEELVMRRREELRHALDIREHYERKLERANNLYMELNALMLQLELKERELLRREQALERRCPGLLKPHPSRGLLHGNTMEKLIKKRNVPQKLSPHSKRPDILKTESLLPKLDAALSGVGLPGCPKGPPSPGRSRRGKTRHRKASAKGSCGDLPGLRTAVPPHEPGGPGSPGGLGGGPSAWEACPPALRGLHHDLLLRKMSSSSPDLLSAALGSRGRGATGGAGDPGSPPPARGDTPPSEGSAPGSTSPDSPGGAKGEPPPPVGPGEGVGLLGTGREGTSGRGGSRAGSQHLTPAALLYRAAVTRSQKRGISSEEEEGEVDSEVELTSSQRWPQSLNMRQSLSTFSSENPSDGEEGTASEPSPSGTPEVGSTNTDERPDERSDDMCSQGSEIPLDPPPSEVIPGPEPSSLPIPHQELLRERGPPNSEDSDCDSTELDNSNSVDALRPPASLPP

SEQ ID NO: 52523 - protein, 393 aa, Homo sapiens
  Payload ID: 10468
  Gene Symbol: MAP3K12
  Gene Name: mitogen-activated protein kinase kinase kinase 12
  ENSP ID: ENSP00000447889
MACLHETRTPSPSFGGFVSTLSEASMRKLDPDTSDCTPEKDLTPTHVLQLHEQDAGGPGGAAGSPESRASRVRADEVRLQCQSGSGFLEGLFGCLRPVWTMIGKAYSTEHKQQQEDLWEVPFEEILDLQWVGSGAQGAVFLGRFHGEEVAVKKVRDLKETDIKHLRKLKHPNIITFKGVCTQAPCYCILMEFCAQGQLYEVLRAGRPVTPSLLVDWSMGIAGGMNYLHLHKIIHRDLKSPNMLITYDDVVKISDFGTSKELSDKSTKMSFAGTVAWMAPEVIRNEPVSEKVDIWSFGVVLWELLTGEIPYKDVDSSAIIWGVGSNSLHLPVPSSCPDGFKILLRQCWNSKPRNRPSFRQILLHLDIASADVLSTPQETYFKSQVCCGQSGGKK

SEQ ID NO: 52524 - protein, 892 aa, Homo sapiens
  Payload ID: 10468
  Gene Symbol: MAP3K12
  Gene Name: mitogen-activated protein kinase kinase kinase 12
  Uniprot ID: Q12852
  ENSP ID: ENSP00000448689
MACLHETRTPSPSFGGFVSTLSEASMRKLDPDTSDCTPEKDLTPTQCVLRDVVPLGGQGGGGPSPSPGGEPPPEPFANSVLQLHEQDAGGPGGAAGSPESRASRVRADEVRLQCQSGSGFLEGLFGCLRPVWTMIGKAYSTEHKQQQEDLWEVPFEEILDLQWVGSGAQGAVFLGRFHGEEVAVKKVRDLKETDIKHLRKLKHPNIITFKGVCTQAPCYCILMEFCAQGQLYEVLRAGRPVTPSLLVDWSMGIAGGMNYLHLHKIIHRDLKSPNMLITYDDVVKISDFGTSKELSDKSTKMSFAGTVAWMAPEVIRNEPVSEKVDIWSFGVVLWELLTGEIPYKDVDSSAIIWGVGSNSLHLPVPSSCPDGFKILLRQCWNSKPRNRPSFRQILLHLDIASADVLSTPQETYFKSQAEWREEVKLHFEKIKSEGTCLHRLEEELVMRRREELRHALDIREHYERKLERANNLYMELNALMLQLELKERELLRREQALERRCPGLLKPHPSRGLLHGNTMEKLIKKRNVPQKLSPHSKRPDILKTESLLPKLDAALSGVGLPGCPKGPPSPGRSRRGKTRHRKASAKGSCGDLPGLRTAVPPHEPGGPGSPGGLGGGPSAWEACPPALRGLHHDLLLRKMSSSSPDLLSAALGSRGRGATGGAGDPGSPPPARGDTPPSEGSAPGSTSPDSPGGAKGEPPPPVGPGEGVGLLGTGREGTSGRGGSRAGSQHLTPAALLYRAAVTRSQKRGISSEEEEGEVDSEVELTSSQRWPQSLNMRQSLSTFSSENPSDGEEGTASEPSPSGTPEVGSTNTDERPDERSDDMCSQGSEIPLDPPPSEVIPGPEPSSLPIPHQELLRERGPPNSEDSDCDSTELDNSNSVDALRPPASLPP

SEQ ID NO: 52525 - protein, 892 aa, Homo sapiens; identical to SEQ ID NO: 52524
  Payload ID: 10468
  Gene Symbol: MAP3K12
  Gene Name: mitogen-activated protein kinase kinase kinase 12
  Uniprot ID: Q12852
  ENSP ID: ENSP00000449038

SEQ ID NO: 52526 - protein, 25 aa, Homo sapiens
  Payload ID: 10468
  Gene Symbol: MAP3K12
  Gene Name: mitogen-activated protein kinase kinase kinase 12
  ENSP ID: ENSP00000454355
MACLHETRTPSPSFGGFVSTLSEAS

SEQ ID NO: 52527 - protein, 966 aa, Homo sapiens
  Payload ID: 10469
  Gene Symbol: MAP3K13
  Gene Name: mitogen-activated protein kinase kinase kinase 13
  Uniprot ID: O43283
  ENSP ID: ENSP00000265026
MANFQEHLSCSSSPHLPFSESKTFNGLQDELTAMGNHPSPKLLEDQQEKGMVRTELIESVHSPVTTTVLTSVSEDSRDQFENSVLQLREHDESETAVSQGNSNTVDGESTSGTEDIKIQFSRSGSGSGGFLEGLFGCLRPVWNIIGKAYSTDYKLQQQDTWEVPFEEISELQWLGSGAQGAVFLGKFRAEEVAIKKVREQNETDIKHLRKLKHPNIIAFKGVCTQAPCYCIIMEYCAHGQLYEVLRAGRKITPRLLVDWSTGIASGMNYLHLHKIIHRDLKSPNVLVTHTDAVKISDFGTSKELSDKSTKMSFAGTVAWMAPEVIRNEPVSEKVDIWSFGVVLWELLTGEIPYKDVDSSAIIWGVGSNSLHLPVPSTCPDGFKILMKQTWQSKPRNRPSFRQTLMHLDIASADVLATPQETYFKSQAEWREEVKKHFEKIKSEGTCIHRLDEELIRRRREELRHALDIREHYERKLERANNLYMELSAIMLQLEMREKELIKREQAVEKKYPGTYKRHPVRPIIHPNAMEKLMKRKGVPHKSGMQTKRPDLLRSEGIPTTEVAPTASPLSGSPKMSTSSSKSRYRSKPRHRRGNSRGSHSDFAAILKNQPAQENSPHPTYLHQAQSQYPSLHHHNSLQQQYQQPPPAMSQSHHPRLNMHGQDIATCANNLRYFGPAAALRSPLSNHAQRQLPGSSPDLISTAMAADCWRSSEPDKGQAGPWGCCQADAYDPCLQCRPEQYGSLDIPSAEPVGRSPDLSKSPAHNPLLENAQSSEKTEENEFSGCRSESSLGTSHLGTPPALPRKTRPLQKSGDDSSEEEEGEVDSEVEFPRRQRPHRCISSCQSYSTFSSENFSVSDGEEGNTSDHSNSPDELADKLEDRLAEKLDDLLSQTPEIPIDISSHSDGLSDKECAVRRVKTQMSLGKLCVEERGYENPMQFEESDCDSSDGECSDATVRTNKHYSSATW

SEQ ID NO: 52528 - protein, 113 aa, Homo sapiens
  Payload ID: 10469
  Gene Symbol: MAP3K13
  Gene Name: mitogen-activated protein kinase kinase kinase 13
  ENSP ID: ENSP00000389495
MANFQEHLSCSSSPHLPFSESKTFNGLQDELTAMGNHPSPKLLEDQQEKGMVRTELIESVHSPVTTTVLTSVSEDSRDQFENSVLQLREHDESETAVSQGNSNTVDGESTSGT

SEQ ID NO: 52529 - protein, 128 aa, Homo sapiens
  Payload ID: 10469
  Gene Symbol: MAP3K13
  Gene Name: mitogen-activated protein kinase kinase kinase 13
  Uniprot ID: O43283
  ENSP ID: ENSP00000389798
MANFQEHLSCSSSPHLPFSESKTFNGLQDELTAMGNHPSPKLLEDQQEKGMVRTELIESVHSPVTTTVLTSVSEDSRDQFENSVLQLREHDESETAVSQGNSNTVDGESTSGTEDIKIQFSRYLGSAI

SEQ ID NO: 52530 - protein, 40 aa, Homo sapiens
  Payload ID: 10469
  Gene Symbol: MAP3K13
  Gene Name: mitogen-activated protein kinase kinase kinase 13
  ENSP ID: ENSP00000390323
MYCGIQILALWESIKYHVFEDHGLSSLCIQDLSLNNLIKT

SEQ ID NO: 52531 - protein, 40 aa, Homo sapiens; identical to SEQ ID NO: 52530
  Payload ID: 10469
  Gene Symbol: MAP3K13
  Gene Name: mitogen-activated protein kinase kinase kinase 13
  ENSP ID: ENSP00000392223

SEQ ID NO: 52532 - protein, 966 aa, Homo sapiens; identical to SEQ ID NO: 52527
  Payload ID: 10469
  Gene Symbol: MAP3K13
  Gene Name: mitogen-activated protein kinase kinase kinase 13
  Uniprot ID: O43283
  ENSP ID: ENSP00000399910

SEQ ID NO: 52533 - protein, 160 aa, Homo sapiens
  Payload ID: 10469
  Gene Symbol: MAP3K13
  Gene Name: mitogen-activated protein kinase kinase kinase 13
  Uniprot ID: O43283
  ENSP ID: ENSP00000403561
MANFQEHLSCSSSPHLPFSESKTFNGLQDELTAMGNHPSPKLLEDQQEKGMVRTELIESVHSPVTTTVLTSVSEDSRDQFENSVLQLREHDESETAVSQGNSNTVDGESTSGTEDIKIQFSRSGSGSGGFLEGLFGCLRPVWNIIGKAYSTDYKLQQQVF

SEQ ID NO: 52534 - protein, 137 aa, Homo sapiens
  Payload ID: 10469
  Gene Symbol: MAP3K13
  Gene Name: mitogen-activated protein kinase kinase kinase 13
  ENSP ID: ENSP00000405163
MANFQEHLSCSSSPHLPFSESKTFNGLQDELTAMGNHPSPKLLEDQQEKGMVRTELIESVHSPVTTTVLTSVSEDSRDQFENSVLQLREHDESETAVSQGNSNTVDGESTSGTEDIKIQFSRSGSGSGGFLEGLFGC

SEQ ID NO: 52535 - protein, 40 aa, Homo sapiens; identical to SEQ ID NO: 52530
  Payload ID: 10469
  Gene Symbol: MAP3K13
  Gene Name: mitogen-activated protein kinase kinase kinase 13
  ENSP ID: ENSP00000405233

SEQ ID NO: 52536 - protein, 194 aa, Homo sapiens
  Payload ID: 10469
  Gene Symbol: MAP3K13
  Gene Name: mitogen-activated protein kinase kinase kinase 13
  ENSP ID: ENSP00000407361
MANFQEHLSCSSSPHLPFSESKTFNGLQDELTAMGNHPSPKLLEDQQEKGMVRTELIESVHSPVTTTVLTSVSEDSRDQFENSVLQLREHDESETAVSQGNSNTVDGESTSGTEDIKIQFSRSGSGSGGFLEGLFGCLRPVWNIIGKAYSTDYKLQQQGVFVLRPHVIVLSWNTVPMDNSTRSYELAGRSHLDC

SEQ ID NO: 52537 - protein, 822 aa, Homo sapiens
  Payload ID: 10469
  Gene Symbol: MAP3K13
  Gene Name: mitogen-activated protein kinase kinase kinase 13
  Uniprot ID: O43283
  ENSP ID: ENSP00000409325
MSYVECKCLQLENKNTWEVPFEEISELQWLGSGAQGAVFLGKFRAEEVAIKKVREQNETDIKHLRKLKHPNIIAFKGVCTQAPCYCIIMEYCAHGQLYEVLRAGRKITPRLLVDWSTGIASGMNYLHLHKIIHRDLKSPNVLVTHTDAVKISDFGTSKELSDKSTKMSFAGTVAWMAPEVIRNEPVSEKVDIWSFGVVLWELLTGEIPYKDVDSSAIIWGVGSNSLHLPVPSTCPDGFKILMKQTWQSKPRNRPSFRQTLMHLDIASADVLATPQETYFKSQAEWREEVKKHFEKIKSEGTCIHRLDEELIRRRREELRHALDIREHYERKLERANNLYMELSAIMLQLEMREKELIKREQAVEKKYPGTYKRHPVRPIIHPNAMEKLMKRKGVPHKSGMQTKRPDLLRSEGIPTTEVAPTASPLSGSPKMSTSSSKSRYRSKPRHRRGNSRGSHSDFAAILKNQPAQENSPHPTYLHQAQSQYPSLHHHNSLQQQYQQPPPAMSQSHHPRLNMHGQDIATCANNLRYFGPAAALRSPLSNHAQRQLPGSSPDLISTAMAADCWRSSEPDKGQAGPWGCCQADAYDPCLQCRPEQYGSLDIPSAEPVGRSPDLSKSPAHNPLLENAQSSEKTEENEFSGCRSESSLGTSHLGTPPALPRKTRPLQKSGDDSSEEEEGEVDSEVEFPRRQRPHRCISSCQSYSTFSSENFSVSDGEEGNTSDHSNSPDELADKLEDRLAEKLDDLLSQTPEIPIDISSHSDGLSDKECAVRRVKTQMSLGKLCVEERGYENPMQFEESDCDSSDGECSDATVRTNKHYSSATW

SEQ ID NO: 52538 - protein, 759 aa, Homo sapiens
  Payload ID: 10469
  Gene Symbol: MAP3K13
  Gene Name: mitogen-activated protein kinase kinase kinase 13
  Uniprot ID: O43283
  ENSP ID: ENSP00000411483
MYCGIQILALWERGVCTQAPCYCIIMEYCAHGQLYEVLRAGRKITPRLLVDWSTGIASGMNYLHLHKIIHRDLKSPNVLVTHTDAVKISDFGTSKELSDKSTKMSFAGTVAWMAPEVIRNEPVSEKVDIWSFGVVLWELLTGEIPYKDVDSSAIIWGVGSNSLHLPVPSTCPDGFKILMKQTWQSKPRNRPSFRQTLMHLDIASADVLATPQETYFKSQAEWREEVKKHFEKIKSEGTCIHRLDEELIRRRREELRHALDIREHYERKLERANNLYMELSAIMLQLEMREKELIKREQAVEKKYPGTYKRHPVRPIIHPNAMEKLMKRKGVPHKSGMQTKRPDLLRSEGIPTTEVAPTASPLSGSPKMSTSSSKSRYRSKPRHRRGNSRGSHSDFAAILKNQPAQENSPHPTYLHQAQSQYPSLHHHNSLQQQYQQPPPAMSQSHHPRLNMHGQDIATCANNLRYFGPAAALRSPLSNHAQRQLPGSSPDLISTAMAADCWRSSEPDKGQAGPWGCCQADAYDPCLQCRPEQYGSLDIPSAEPVGRSPDLSKSPAHNPLLENAQSSEKTEENEFSGCRSESSLGTSHLGTPPALPRKTRPLQKSGDDSSEEEEGEVDSEVEFPRRQRPHRCISSCQSYSTFSSENFSVSDGEEGNTSDHSNSPDELADKLEDRLAEKLDDLLSQTPEIPIDISSHSDGLSDKECAVRRVKTQMSLGKLCVEERGYENPMQFEESDCDSSDGECSDATVRTNKHYSSATW

SEQ ID NO: 52539 - protein, 40 aa, Homo sapiens; identical to SEQ ID NO: 52530
  Payload ID: 10469
  Gene Symbol: MAP3K13
  Gene Name: mitogen-activated protein kinase kinase kinase 13
  ENSP ID: ENSP00000412037

SEQ ID NO: 52540 - protein, 246 aa, Homo sapiens
  Payload ID: 10469
  Gene Symbol: MAP3K13
  Gene Name: mitogen-activated protein kinase kinase kinase 13
  ENSP ID: ENSP00000415712
VAIKKVREQNETDIKHLRKLKHPNIIAFNVLVTHTDAVKISDFGTSKELSDKSTKMSFAGTVAWMAPEVIRNEPVSEKVDIWSFGVVLWELLTGEIPYKDVDSSAIIWGVGSNSLHLPVPSTCPDGFKILMKQTWQSKPRNRPSFRQTLMHLDIASADVLATPQETYFKSQAEWREEVKKHFEKIKSEGTCIHRLDEELIRRRREELRHALDIREHYERKLERANNLYMELSAIMLQLEMREKELI

SEQ ID NO: 52541 - protein, 947 aa, Homo sapiens
  Payload ID: 10470
  Gene Symbol: MAP3K14
  Gene Name: mitogen-activated protein kinase kinase kinase 14
  Uniprot ID: Q99558
  ENSP ID: ENSP00000478552
MAVMEMACPGAPGSAVGQQKELPKAKEKTPPLGKKQSSVYKLEAVEKSPVFCGKWEILNDVITKGTAKEGSEAGPAAISIIAQAECENSQEFSPTFSERIFIAGSKQYSQSESLDQIPNNVAHATEGKMARVCWKGKRRSKARKKRKKKSSKSLAHAGVALAKPLPRTPEQESCTIPVQEDESPLGAPYVRNTPQFTKPLKEPGLGQLCFKQLGEGLRPALPRSELHKLISPLQCLNHVWKLHHPQDGGPLPLPTHPFPYSRLPHPFPFHPLQPWKPHPLESFLGKLACVDSQKPLPDPHLSKLACVDSPKPLPGPHLEPSCLSRGAHEKFSVEEYLVHALQGSVSSGQAHSLTSLAKTWAARGSRSREPSPKTEDNEGVLLTEKLKPVDYEYREEVHWATHQLRLGRGSFGEVHRMEDKQTGFQCAVKKVRLEVFRAEELMACAGLTSPRIVPLYGAVREGPWVNIFMELLEGGSLGQLVKEQGCLPEDRALYYLGQALEGLEYLHSRRILHGDVKADNVLLSSDGSHAALCDFGHAVCLQPDGLGKSLLTGDYIPGTETHMAPEVVLGRSCDAKVDVWSSCCMMLHMLNGCHPWTQFFRGPLCLKIASEPPPVREIPPSCAPLTAQAIQEGLRKEPIHRVSAAELGGKVNRALQQVGGLKSPWRGEYKEPRHPPPNQANYHQTLHAQPRELSPRAPGPRPAEETTGRAPKLQPPLPPEPPEPNKSPPLTLSKEESGMWEPLPLSSLEPAPARNPSSPERKATVPEQELQQLEIELFLNSLSQPFSLEEQEQILSCLSIDSLSLSDDSEKNPSKASQSSRDTLSSGVHSWSSQAEARSSSWNMVLARGRPTDTPSYFNGVKVQIQSLNGEHLHIREFHRVKVGDIATGISSQIPAAAFSLVTKDGQPVRYDMEVPDSGIDLQCTLAPDGSFAWSWRVKHGQLENRP

SEQ ID NO: 52542 - protein, 157 aa, Homo sapiens
  Payload ID: 10470
  Gene Symbol: MAP3K14
  Gene Name: mitogen-activated protein kinase kinase kinase 14
  ENSP ID: ENSP00000480974
MAVMEMACPGAPGSAVGQQKELPKAKEKTPPLGKKQSSVYKLEAVEKSPVFCGKWEILNDVITKGTAKEGSEAGPAAISIIAQAECENSQEFSPTFSERIFIAGSKQYSQSESLDQIPNNVAHATEGKMARVCWKGKRRSKARKKRKKKSSKPAWAT

SEQ ID NO: 52543 - protein, 947 aa, Homo sapiens; identical to SEQ ID NO: 52541
  Payload ID: 10470
  Gene Symbol: MAP3K14
  Gene Name: mitogen-activated protein kinase kinase kinase 14
  Uniprot ID: Q99558
  ENSP ID: ENSP00000482657

SEQ ID NO: 52544 - protein, 1313 aa, Homo sapiens
  Payload ID: 10471
  Gene Symbol: MAP3K15
  Gene Name: mitogen-activated protein kinase kinase kinase 15
  Uniprot ID: Q6ZN16
  ENSP ID: ENSP00000345629
MESGGGNAPAGALGAASESPQCPPPPGVEGAAGPAEPDGAAEGAAGGSGEGESGGGPRRALRAVYVRSESSQGGAAGGPEAGARQCLLRACEAEGAHLTSVPFGELDFGETAVLDAFYDADVAVVDMSDVSRQPSLFYHLGVRESFDMANNVILYHDTDADTALSLKDMVTQKNTASSGNYYFIPYIVTPCADYFCCESDAQRRASEYMQPNWDNILGPLCMPLVDRFISLLKDIHVTSCVYYKETLLNDIRKAREKYQGEELAKELARIKLRMDNTEVLTSDIIINLLLSYRDIQDYDAMVKLVETLEMLPTCDLADQHNIKFHYAFALNRRNSTGDREKALQIMLQVLQSCDHPGPDMFCLCGRIYKDIFLDSDCKDDTSRDSAIEWYRKGFELQSSLYSGINLAVLLIVAGQQFETSLELRKIGVRLNSLLGRKGSLEKMNNYWDVGQFFSVSMLAHDVGKAVQAAERLFKLKPPVWYLRSLVQNLLLIRRFKKTIIEHSPRQERLNFWLDIIFEATNEVTNGLRFPVLVIEPTKVYQPSYVSINNEAEERTVSLWHVSPTEMKQMHEWNFTASSIKGISLSKFDERCCFLYVHDNSDDFQIYFSTEEQCSRFFSLVKEMITNTAGSTVELEGETDGDTLEYEYDHDANGERVVLGKGTYGIVYAGRDLSNQVRIAIKEIPERDSRYSQPLHEEIALHKYLKHRNIVQYLGSVSENGYIKIFMEQVPGGSLSALLRSKWGPMKEPTIKFYTKQILEGLKYLHENQIVHRDIKGDNVLVNTYSGVVKISDFGTSKRLAGVNPCTETFTGTLQYMAPEIIDQGPRGYGAPADIWSLGCTIIEMATSKPPFHELGEPQAAMFKVGMFKIHPEIPEALSAEARAFILSCFEPDPHKRATTAELLREGFLRQVNKGKKNRIAFKPSEGPRGVVLALPTQGEPMATSSSEHGSVSPDSDAQPDALFERTRAPRHHLGHLLSVPDESSALEDRGLASSPEDRDQGLFLLRKDSERRAILYKILWEEQNQVASNLQECVAQSSEELHLSVGHIKQIIGILRDFIRSPEHRVMATTISKLKVDLDFDSSSISQIHLVLFGFQDAVNKILRNHLIRPHWMFAMDNIIRRAVQAAVTILIPELRAHFEPTCETEGVDKDMDEAEEGYPPATGPGQEAQPHQQHLSLQLGELRQETNRLLEHLVEKEREYQNLLRQTLEQKTQELYHLQLKLKSNCITENPAGPYGQRTDKELIDWLRLQGADAKTIEKIVEEGYTLSDILNEITKEDLRYLRLRGGLLCRLWSAVSQYRRAQEASETKDKA

SEQ ID NO: 52545 - protein, 283 aa, Homo sapiens
  Payload ID: 10471
  Gene Symbol: MAP3K15
  Gene Name: mitogen-activated protein kinase kinase kinase 15
  ENSP ID: ENSP00000352093
  MOD_RES (1)..(1): Any amino acid
XDIRKAREKYQGEELAKELARIKLRMDNTEVLTSDIIINLLLSYRDIQDYDAMVKLVETLEMLPTCDLADQHNIKFHYAFALNRRNSTGDREKALQIMLQVLQSCDHPGPDMFCLCGRIYKDIFLDSDCKDDTSRDSAIEWYRKGFELQSSLYSGINLAVLLIVAGQQFETSLELRKIGVRLNSLLGRKGSLEKMNNYWDVGQFFSVSMLAHDVGKAVQAAERLFKLKPPVWYLRSLVQNLLLIRRFKKTIIEHSPRQERLNFWLDIIFEATNEVTNGLRFPL

SEQ ID NO: 52546 - protein, 1215 aa, Homo sapiens
  Payload ID: 10472
  Gene Symbol: MAP3K19
  Gene Name: mitogen-activated protein kinase kinase kinase 19
  Uniprot ID: Q56UN5
  ENSP ID: ENSP00000351140
MSSMPKPERHAESLLDICHDTNSSPTDLMTVTKNQNIILQSISRSEEFDQDGDCSHSTLVNEEEDPSGGRQDWQPRTEEFSTSHMKYSGRSIKFLLPPLSLLPTRSGVLTIPQNHKFPKEKERNIPSLTSFVPKLSVSVRQSDELSPSNEPPGALVKSLMDPTLRSSDGFIWSRNMCSFPKTNHHRQCLEKEENWKSKEIEECNKIEITHFEKGQSLVSFENLKEGNIPAVREEDIDCHGSKTRKPEEENSQYLSSRKNESSVAKNYEQDPEIVCTIPSKFQETQHSEITPSQDEEMRNNKAASKRVSLHKNEAMEPNNILEECTVLKSLSSVVFDDPIDKLPEGCSSMETNIKISIAERAKPEMSRMVPLIHITFPVDGSPKEPVIAKPSLQTRKGTIHNNHSVNIPVHQENDKHKMNSHRSKLDSKTKTSKKTPQNFVISTEGPIKPTMHKTSIKTQIFPALGLVDPRPWQLPRFQKKMPQIAKKQSTHRTQKPKKQSFPCICKNPGTQKSCVPLSVQPTEPRLNYLDLKYSDMFKEINSTANGPGIYEMFGTPVYCHVRETERDENTYYREICSAPSGRRITNKCRSSHSERKSNIRTRLSQKKTHMKCPKTSFGIKQEHKVLISKEKSSKAVHSNLHDIENGDGISEPDWQIKSSGNEFLSSKDEIHPMNLAQTPEQSMKQNEFPPVSDLSIVEEVSMEESTGDRDISNNQILTTSLRDLQELEELHHQIPFIPSEDSWAVPSEKNSNKYVQQEKQNTASLSKVNASRILTNDLEFDSVSDHSKTLTNFSFQAKQESASSQTYQYWVHYLDHDSLANKSITYQMFGKTLSGTNSISQEIMDSVNNEELTDELLGCLAAELLALDEKDNNSCQKMANETDPENLNLVLRWRGSTPKEMGRETTKVKIQRHSSGLRIYDREEKFLISNEKKIFSENSLKSEEPILWTKGEILGKGAYGTVYCGLTSQGQLIAVKQVALDTSNKLAAEKEYRKLQEEVDLLKALKHVNIVAYLGTCLQENTVSIFMEFVPGGSISSIINRFGPLPEMVFCKYTKQILQGVAYLHENCVVHRDIKGNNVMLMPTGIIKLIDFGCARRLAWAGLNGTHSDMLKSMHGTPYWMAPEVINESGYGRKSDIWSIGCTVFEMATGKPPLASMDRMAAMFYIGAHRGLMPPLPDHFSENAADFVRMCLTRDQHERPSALQLLKHSFLERSH

SEQ ID NO: 52547 - protein, 510 aa, Homo sapiens
  Payload ID: 10472
  Gene Symbol: MAP3K19
  Gene Name: mitogen-activated protein kinase kinase kinase 19
  Uniprot ID: Q56UN5
  ENSP ID: ENSP00000365004
MSSMPKPERHAESLLDICHDTNSSPTDLMTVTKNQNIILQSISRSEEFDQDGDCSHSTLVNEEEDPSGGRQDWQPRTEGVEITVTFPRDVSPPQEMSQEDLKEKNLINSSLQEWAQAHAVSHPNEIETVELRKKKLTMRPLVLQKEESSRELCNVNLGFLLPRSCLELNISKSVTREDAPHFLKEQQRKSEEFSTSHMKYSGRSIKRHSSGLRIYDREEKFLISNEKKIFSENSLKSEEPILWTKGEILGKGAYGTVYCGLTSQGQLIAVKQVALDTSNKLAAEKEYRKLQEEVDLLKALKHVNIVAYLGTCLQENTVSIFMEFVPGGSISSIINRFGPLPEMVFCKYTKQILQGVAYLHENCVVHRDIKGNNVMLMPTGIIKLIDFGCARRLAWAGLNGTHSDMLKSMHGTPYWMAPEVINESGYGRKSDIWSIGCTVFEMATGKPPLASMDRMAAMFYIGAHRGLMPPLPDHFSENAADFVRMCLTRDQHERPSALQLLKHSFLERSH

SEQ ID NO: 52548 - protein, 1328 aa, Homo sapiens
  Payload ID: 10472
  Gene Symbol: MAP3K19
  Gene Name: mitogen-activated protein kinase kinase kinase 19
  Uniprot ID: Q56UN5
  ENSP ID: ENSP00000365005
MSSMPKPERHAESLLDICHDTNSSPTDLMTVTKNQNIILQSISRSEEFDQDGDCSHSTLVNEEEDPSGGRQDWQPRTEGVEITVTFPRDVSPPQEMSQEDLKEKNLINSSLQEWAQAHAVSHPNEIETVELRKKKLTMRPLVLQKEESSRELCNVNLGFLLPRSCLELNISKSVTREDAPHFLKEQQRKSEEFSTSHMKYSGRSIKFLLPPLSLLPTRSGVLTIPQNHKFPKEKERNIPSLTSFVPKLSVSVRQSDELSPSNEPPGALVKSLMDPTLRSSDGFIWSRNMCSFPKTNHHRQCLEKEENWKSKEIEECNKIEITHFEKGQSLVSFENLKEGNIPAVREEDIDCHGSKTRKPEEENSQYLSSRKNESSVAKNYEQDPEIVCTIPSKFQETQHSEITPSQDEEMRNNKAASKRVSLHKNEAMEPNNILEECTVLKSLSSVVFDDPIDKLPEGCSSMETNIKISIAERAKPEMSRMVPLIHITFPVDGSPKEPVIAKPSLQTRKGTIHNNHSVNIPVHQENDKHKMNSHRSKLDSKTKTSKKTPQNFVISTEGPIKPTMHKTSIKTQIFPALGLVDPRPWQLPRFQKKMPQIAKKQSTHRTQKPKKQSFPCICKNPGTQKSCVPLSVQPTEPRLNYLDLKYSDMFKEINSTANGPGIYEMFGTPVYCHVRETERDENTYYREICSAPSGRRITNKCRSSHSERKSNIRTRLSQKKTHMKCPKTSFGIKQEHKVLISKEKSSKAVHSNLHDIENGDGISEPDWQIKSSGNEFLSSKDEIHPMNLAQTPEQSMKQNEFPPVSDLSIVEEVSMEESTGDRDISNNQILTTSLRDLQELEELHHQIPFIPSEDSWAVPSEKNSNKYVQQEKQNTASLSKVNASRILTNDLEFDSVSDHSKTLTNFSFQAKQESASSQTYQYWVHYLDHDSLANKSITYQMFGKTLSGTNSISQEIMDSVNNEELTDELLGCLAAELLALDEKDNNSCQKMANETDPENLNLVLRWRGSTPKEMGRETTKVKIQRHSSGLRIYDREEKFLISNEKKIFSENSLKSEEPILWTKGEILGKGAYGTVYCGLTSQGQLIAVKQVALDTSNKLAAEKEYRKLQEEVDLLKALKHVNIVAYLGTCLQENTVSIFMEFVPGGSISSIINRFGPLPEMVFCKYTKQILQGVAYLHENCVVHRDIKGNNVMLMPTGIIKLIDFGCARRLAWAGLNGTHSDMLKSMHGTPYWMAPEVINESGYGRKSDIWSIGCTVFEMATGKPPLASMDRMAAMFYIGAHRGLMPPLPDHFSENAADFVRMCLTRDQHERPSALQLLKHSFLERSH

SEQ ID NO: 52549 - protein, 1152 aa, Homo sapiens
  Payload ID: 10472
  Gene Symbol: MAP3K19
  Gene Name: mitogen-activated protein kinase kinase kinase 19
  ENSP ID: ENSP00000376647
MGAHWNFQVASFCRTGLVGKDRLKERHAESLLDICHDTNSSPTDLMTVTKNQNIILQSISRSEEFDQDGDCSHSTLVNEEEDPSGGRQDWQPRTEGVEITVTFPRDVSPPQEMSQEDLKEKNLINSSLQEWAQAHAVSHPNEIETVELRKKKLTMRPLVLQKEESSRELCNVNLGFLLPRSCLELNISKSVTREDAPHFLKEQQRKSEEFSTSHMKYSGRSIKFLLPPLSLLPTRSGVLTIPQNHKFPKEKERNIPSLTSFVPKLSVSVRQSDELSPSNEPPGALVKSLMDPTLRSSDGFIWSRNMCSFPKTNHHRQCLEKEENWKSKEIEECNKIEITHFEKGQSLVSFENLKEGNIPAVREEDIDCHGSKTRKPEEENSQYLSSRKNESSVAKNYEQDPEIVCTIPSKFQETQHSEITPSQDEEMRNNKAASKRVSLHKNEAMEPNNILEECTVLKSLSSVVFDDPIDKLPEGCSSMETNIKISIAERAKPEMSRMVPLIHITFPVDGSPKEPVIAKPSLQTRKGTIHNNHSVNIPVHQENDKHKMNSHRSKLDSKTKTSKKTPQNFVISTEGPIKPTMHKTSIKTQIFPALGLVDPRPWQLPRFQKKMPQIAKKQSTHRTQKPKKQSFPCICKNPGTQKSCVPLSVQPTEPRLNYLDLKYSDMFKEINSTANGPGIYEMFGTPVYCHVRETERDENTYYREICSAPSGRRITNKCRSSHSERKSNIRTRLSQKKTHMKCPKTSFGIKQEHKVLISKEKSSKAVHSNLHDIENGDGISEPDWQIKSSGNEFLSSKDEIHPMNLAQTPEQSMKQNEFPPVSDLSIVEEVSMEESTGDRDISNNQILTTSLRDLQELEELHHQIPFIPSEDSWAVPSEKNSNKYVQQEKQNTASLSKVNASRILTNDLEFDSVSDHSKTLTNFSFQAKQESASSQTYQYWVHYLDHDSLANKSITYQMFGKTLSGTNSISQEIMDSVNNEELTDELLGCLAAELLALDEKDNNSCQKMANETDPENLNLVLRWRGSTPKEMGRETTKVKIQRHSSGLRIYDREEKFLISNEKKIFSENSLKSEEPILWTKGEILGKGAYGTVQVQWERNIFLQQLNMLLEVWRIITRWQKQKMFLPFCELHKRSWGVGDEERYTVVSLVKDS

SEQ ID NO: 52550 - protein, 460 aa, Homo sapiens
  Payload ID: 10472
  Gene Symbol: MAP3K19
  Gene Name: mitogen-activated protein kinase kinase kinase 19
  Uniprot ID: Q56UN5
  ENSP ID: ENSP00000376649
MSSMPKPERHAESLLDICHDTNSSPTDLMTVTKNQNIILQSISRSEEFDQDGDCSHSTLVNEEEDPSGGRQDWQPRTEGVEITVTFPRDVSPPQEMSQEDLKEKNLINSSLQEWAQAHAVSHPNEIETVELRKKKLTMRPLVLQKEESSRELCNVNLGFLLPRSCLELNISKSVTREDAPHFLKEQQRKSEEFSTSHMKYSGRSIKVYCGLTSQGQLIAVKQVALDTSNKLAAEKEYRKLQEEVDLLKALKHVNIVAYLGTCLQENTVSIFMEFVPGGSISSIINRFGPLPEMVFCKYTKQILQGVAYLHENCVVHRDIKGNNVMLMPTGIIKLIDFGCARRLAWAGLNGTHSDMLKSMHGTPYWMAPEVINESGYGRKSDIWSIGCTVFEMATGKPPLASMDRMAAMFYIGAHRGLMPPLPDHFSENAADFVRMCLTRDQHERPSALQLLKHSFLERSH

SEQ ID NO: 52551 - protein, 462 aa, Homo sapiens
  Payload ID: 10472
  Gene Symbol: MAP3K19
  Gene Name: mitogen-activated protein kinase kinase kinase 19
  Uniprot ID: Q56UN5
  ENSP ID: ENSP00000376650
MSSMPKPERHAESLLDICHDTNSSPTDLMTVTKNQNIILQSISRSEEFDQDGDCSHSTLVNEEEDPSGGRQDWQPRTEGVEITVTFPRDVSPPQEMSQEDLKEKNLINSSLQEWAQAHAVSHPNEIETVELRKKKLTMRPLVLQKEESSRELCNVNLGFLLPRSCLELNISKSVTREDAPHFLKEQQRKSEEFSTSHMKYSGRSIKRHSSGLRIYDREEKFLISNEKKIFSENSLKSEEPILWTKVDLLKALKHVNIVAYLGTCLQENTVSIFMEFVPGGSISSIINRFGPLPEMVFCKYTKQILQGVAYLHENCVVHRDIKGNNVMLMPTGIIKLIDFGCARRLAWAGLNGTHSDMLKSMHGTPYWMAPEVINESGYGRKSDIWSIGCTVFEMATGKPPLASMDRMAAMFYIGAHRGLMPPLPDHFSENAADFVRMCLTRDQHERPSALQLLKHSFLERSH

SEQ ID NO: 52552 - protein, 102 aa, Homo sapiens
  Payload ID: 10472
  Gene Symbol: MAP3K19
  Gene Name: mitogen-activated protein kinase kinase kinase 19
  ENSP ID: ENSP00000390940
MTVTKNQNIILQSISRSEEFDQDGDCSHSTLVNEEEDPSGGRQDWQPRTEGVEITVTFPRDVSPPQEMSQEDLKEKNLINSSLQEWAQAHAVSHPNEIETVE

SEQ ID NO: 52553 - protein, 697 aa, Homo sapiens
  Payload ID: 10472
  Gene Symbol: MAP3K19
  Gene Name: mitogen-activated protein kinase kinase kinase 19
  ENSP ID: ENSP00000392827
KQSFPCICKNPGTQKSCVPLSVQPTEPRLNYLDLKYSDMFKEINSTANGPGIYEMFGTPVYCHVRETERDENTYYREICSAPSGRRITNKCRSSHSERKSNIRTRLSQKKTHMKCPKTSFGIKQEHKVLISKEKSSKAVHSNLHDIENGDGISEPDWQIKSSGNEFLSSKDEIHPMNLAQTPEQSMKQNEFPPVSDLSIVEEVSMEESTGDRDISNNQILTTSLRDLQELEELHHQIPFIPSEDSWAVPSEKNSNKYVQQEKQNTASLSKVNASRILTNDLEFDSVSDHSKTLTNFSFQAKQESASSQTYQYWVHYLDHDSLANKSITYQMFGKTLSGTNSISQEIMDSVNNEELTDELLGCLAAELLALDEKDNNSCQKMANETDPENLNLVLRWRGSTPKEMGRETTKVKIQRHSSGLRIYDREEKFLISNEKKIFSENSLKSEEPILWTKGEILGKGAYGTVYCGLTSQGQLIAVKQVALDTSNKLAAEKEYRKLQEEVDLLKALKHVNIVAYLGTCLQENTVSIFMEFVPGGSISSIINRFGPLPEMVFCKYTKQILQGVAYLHENCVVHRDIKGNNVMLMPTGIIKLIDFGCARRLAWAGLNGTHSDMLKSMHGTPYWMAPEVINESGYGRKSDIWSIGCTVFEMATGKPPLASMDRMAAMFYIGAHRGLMPPLPDHFSENAADFVRMCLTR

SEQ ID NO: 52554 - protein, 21 aa, Homo sapiens
  Payload ID: 10472
  Gene Symbol: MAP3K19
  Gene Name: mitogen-activated protein kinase kinase kinase 19
  ENSP ID: ENSP00000416345
MTVTKNQNIILQSISRSEEFD

SEQ ID NO: 52555 - protein, 619 aa, Homo sapiens
  Payload ID: 10473
  Gene Symbol: MAP3K2
  Gene Name: mitogen-activated protein kinase kinase kinase 2
  Uniprot ID: Q9Y2U5
  ENSP ID: ENSP00000343463
MDDQQALNSIMQDLAVLHKASRPALSLQETRKAKSSSPKKQNDVRVKFEHRGEKRILQFPRPVKLEDLRSKAKIAFGQSMDLHYTNNELVIPLTTQDDLDKAVELLDRSIHMKSLKILLVINGSTQATNLEPLPSLEDLDNTVFGAERKKRLSIIGPTSRDRSSPPPGYIPDELHQVARNGSFTSINSEGEFIPESMDQMLDPLSLSSPENSGSGSCPSLDSPLDGESYPKSRMPRAQSYPDNHQEFSDYDNPIFEKFGKGGTYPRRYHVSYHHQEYNDGRKTFPRARRTQGTSLRSPVSFSPTDHSLSTSSGSSIFTPEYDDSRIRRRGSDIDNPTLTVMDISPPSRSPRAPTNWRLGKLLGQGAFGRVYLCYDVDTGRELAVKQVQFDPDSPETSKEVNALECEIQLLKNLLHERIVQYYGCLRDPQEKTLSIFMEYMPGGSIKDQLKAYGALTENVTRKYTRQILEGVHYLHSNMIVHRDIKGANILRDSTGNVKLGDFGASKRLQTICLSGTGMKSVTGTPYWMSPEVISGEGYGRKADIWSVACTVVEMLTEKPPWAEFEAMAAIFKIATQPTNPKLPPHVSDYTRDFLKRIFVEAKLRPSADELLRHMFVHYH

SEQ ID NO: 52556 - protein, 47 aa, Homo sapiens
  Payload ID: 10473
  Gene Symbol: MAP3K2
  Gene Name: mitogen-activated protein kinase kinase kinase 2
  ENSP ID: ENSP00000386313
MDDQQALNSIMQDLAVLHKASRPALSLQETRKAKSSSPKKQNDVRVK

SEQ ID NO: 52557 - protein, 619 aa, Homo sapiens; identical to SEQ ID NO: 52555
  Payload ID: 10473
  Gene Symbol: MAP3K2
  Gene Name: mitogen-activated protein kinase kinase kinase 2
  Uniprot ID: Q9Y2U5
  ENSP ID: ENSP00000387246

SEQ ID NO: 52558 - protein, 626 aa, Homo sapiens
  Payload ID: 10474
  Gene Symbol: MAP3K3
  Gene Name: mitogen-activated protein kinase kinase kinase 3
  Uniprot ID: Q99759
  ENSP ID: ENSP00000354485
MDEQEALNSIMNDLVALQMNRRHRMPGYETMKNKDTGHSNRQSDVRIKFEHNGERRIIAFSRPVKYEDVEHKVTTVFGQPLDLHYMNNELSILLKNQDDLDKAIDILDRSSSMKSLRILLLSQDRNHNSSSPHSGVSRQVRIKASQSAGDINTIYQPPEPRSRHLSVSSQNPGRSSPPPGYVPERQQHIARQGSYTSINSEGEFIPETSEQCMLDPLSSAENSLSGSCQSLDRSADSPSFRKSRMSRAQSFPDNRQEYSDRETQLYDKGVKGGTYPRRYHVSVHHKDYSDGRRTFPRIRRHQGNLFTLVPSSRSLSTNGENMGLAVQYLDPRGRLRSADSENALSVQERNVPTKSPSAPINWRRGKLLGQGAFGRVYLCYDVDTGRELASKQVQFDPDSPETSKEVSALECEIQLLKNLQHERIVQYYGCLRDRAEKTLTIFMEYMPGGSVKDQLKAYGALTESVTRKYTRQILEGMSYLHSNMIVHRDIKGANILRDSAGNVKLGDFGASKRLQTICMSGTGMRSVTGTPYWMSPEVISGEGYGRKADVWSLGCTVVEMLTEKPPWAEYEAMAAIFKIATQPTNPQLPSHISEHGRDFLRRIFVEARQRPSAEELLTHHFAQLMY

SEQ ID NO: 52559 - protein, 657 aa, Homo sapiens
  Payload ID: 10474
  Gene Symbol: MAP3K3
  Gene Name: mitogen-activated protein kinase kinase kinase 3
  Uniprot ID: Q99759
  ENSP ID: ENSP00000354927
MDEQEALNSIMNDLVALQMNRRHRMPGYETMKNKDTGHSNRQKKHNSSSSALLNSPTVTTSSCAGASEKKKFLSDVRIKFEHNGERRIIAFSRPVKYEDVEHKVTTVFGQPLDLHYMNNELSILLKNQDDLDKAIDILDRSSSMKSLRILLLSQDRNHNSSSPHSGVSRQVRIKASQSAGDINTIYQPPEPRSRHLSVSSQNPGRSSPPPGYVPERQQHIARQGSYTSINSEGEFIPETSEQCMLDPLSSAENSLSGSCQSLDRSADSPSFRKSRMSRAQSFPDNRQEYSDRETQLYDKGVKGGTYPRRYHVSVHHKDYSDGRRTFPRIRRHQGNLFTLVPSSRSLSTNGENMGLAVQYLDPRGRLRSADSENALSVQERNVPTKSPSAPINWRRGKLLGQGAFGRVYLCYDVDTGRELASKQVQFDPDSPETSKEVSALECEIQLLKNLQHERIVQYYGCLRDRAEKTLTIFMEYMPGGSVKDQLKAYGALTESVTRKYTRQILEGMSYLHSNMIVHRDIKGANILRDSAGNVKLGDFGASKRLQTICMSGTGMRSVTGTPYWMSPEVISGEGYGRKADVWSLGCTVVEMLTEKPPWAEYEAMAAIFKIATQPTNPQLPSHISEHGRDFLRRIFVEARQRPSAEELLTHHFAQLMY

SEQ ID NO: 52560 - protein, 657 aa, Homo sapiens; identical to SEQ ID NO: 52559
  Payload ID: 10474
  Gene Symbol: MAP3K3
  Gene Name: mitogen-activated protein kinase kinase kinase 3
  Uniprot ID: Q99759
  ENSP ID: ENSP00000461988

SEQ ID NO: 52561 - protein, 622 aa, Homo sapiens
  Payload ID: 10474
  Gene Symbol: MAP3K3
  Gene Name: mitogen-activated protein kinase kinase kinase 3
  ENSP ID: ENSP00000462086
MDEQEALNSIMNDLVALQMNRRHRMPGYETMKNKDTGHSNRQSDVRIKFEHNGERRIIAFSRPVKYEDVEHKVTTVFGQPLDLHYMNNELSILLKNQDDLDKAIDILDRSSSMKSLRILLLSQDRNHNSSSPHSGVSRQVRIKASQSAGDINTIYQPPEPRSRHLSVSSQNPGRSSPPPGYVPERQQHIARQGSYTSINSEGEFIPETSEQCMLDPLSSAENSLSGSCQSLDSPSFRKSRMSRAQSFPDNRQEYSDRETQLYDKGVKGGTYPRRYHVSVHHKDYSDGRRTFPRIRRHQGNLFTLVPSSRSLSTNGENMGLAVQYLDPRGRLRSADSENALSVQERNVPTKSPSAPINWRRGKLLGQGAFGRVYLCYDVDTGRELASKQVQFDPDSPETSKEVSALECEIQLLKNLQHERIVQYYGCLRDRAEKTLTIFMEYMPGGSVKDQLKAYGALTESVTRKYTRQILEGMSYLHSNMIVHRDIKGANILRDSAGNVKLGDFGASKRLQTICMSGTGMRSVTGTPYWMSPEVISGEGYGRKADVWSLGCTVVEMLTEKPPWAEYEAMAAIFKIATQPTNPQLPSHISEHGRDFLRRIFVEARQRPSAEELLTHHFAQLMY

SEQ ID NO: 52562 - protein, 56 aa, Homo sapiens
  Payload ID: 10474
  Gene Symbol: MAP3K3
  Gene Name: mitogen-activated protein kinase kinase kinase 3
  ENSP ID: ENSP00000462917
MDEQEALNSIMNDLVALQMNRRHRMPGYETMKNKDTGHSNRVTSESSSSTTGRGEL

SEQ ID NO: 52563 - protein, 653 aa, Homo sapiens
  Payload ID: 10474
  Gene Symbol: MAP3K3
  Gene Name: mitogen-activated protein kinase kinase kinase 3
  ENSP ID: ENSP00000464130
MDEQEALNSIMNDLVALQMNRRHRMPGYETMKNKDTGHSNRQKKHNSSSSALLNSPTVTTSSCAGASEKKKFLSDVRIKFEHNGERRIIAFSRPVKYEDVEHKVTTVFGQPLDLHYMNNELSILLKNQDDLDKAIDILDRSSSMKSLRILLLSQDRNHNSSSPHSGVSRQVRIKASQSAGDINTIYQPPEPRSRHLSVSSQNPGRSSPPPGYVPERQQHIARQGSYTSINSEGEFIPETSEQCMLDPLSSAENSLSGSCQSLDSPSFRKSRMSRAQSFPDNRQEYSDRETQLYDKGVKGGTYPRRYHVSVHHKDYSDGRRTFPRIRRHQGNLFTLVPSSRSLSTNGENMGLAVQYLDPRGRLRSADSENALSVQERNVPTKSPSAPINWRRGKLLGQGAFGRVYLCYDVDTGRELASKQVQFDPDSPETSKEVSALECEIQLLKNLQHERIVQYYGCLRDRAEKTLTIFMEYMPGGSVKDQLKAYGALTESVTRKYTRQILEGMSYLHSNMIVHRDIKGANILRDSAGNVKLGDFGASKRLQTICMSGTGMRSVTGTPYWMSPEVISGEGYGRKADVWSLGCTVVEMLTEKPPWAEYEAMAAIFKIATQPTNPQLPSHISEHGRDFLRRIFVEARQRPSAEELLTHHFAQLMY

SEQ ID NO: 52564 - protein, 42 aa, Homo sapiens
  Payload ID: 10474
  Gene Symbol: MAP3K3
  Gene Name: mitogen-activated protein kinase kinase kinase 3
  ENSP ID: ENSP00000464482
  MOD_RES (1)..(1): Any amino acid
XLCYDVDTGRELASKQVQFDPDSPETSKFPRQIPVRPLTRAS

SEQ ID NO: 52565 - protein, 31 aa, Homo sapiens
  Payload ID: 10474
  Gene Symbol: MAP3K3
  Gene Name: mitogen-activated protein kinase kinase kinase 3
  ENSP ID: ENSP00000464532
  MOD_RES (1)..(1): Any amino acid
XASQSAGDINTIYQPPEPRSRHLSVSRIASN

SEQ ID NO: 52566 - protein, 1554 aa, Homo sapiens
  Payload ID: 10475
  Gene Symbol: MAP3K4
  Gene Name: mitogen-activated protein kinase kinase kinase 4
  ENSP ID: ENSP00000297332
MREAAAALVPPPAFAVTPAAAMEEPPPPPPPPPPPPEPETESEPECCLAARQEGTLGDSACKSPESDLEDFSDETNTENLYGTSPPSTPRQMKRMSTKHQRNNVGRPASRSNLKEKMNAPNQPPHKDTGKTVENVEEYSYKQEKKIRAALRTTERDRKKNVQCSFMLDSVGGSLPKKSIPDVDLNKPYLSLGCSNAKLPVSVPMPIARPARQTSRTDCPADRLKFFETLRLLLKLTSVSKKKDREQRGQENTSGFWLNRSNELIWLELQAWHAGRTINDQDFFLYTARQAIPDIINEILTFKVDYGSFAFVRDRAGFNGTSVEGQCKATPGTKIVGYSTHHEHLQRQRVSFEQVKRIMELLEYIEALYPSLQALQKDYEKYAAKDFQDRVQALCLWLNITKDLNQKLRIMGTVLGIKNLSDIGWPVFEIPSPRPSKGNEPEYEGDDTEGELKELESSTDESEEEQISDPRVPEIRQPIDNSFDIQSRDCISKKLERLESEDDSLGWGAPDWSTEAGFSRHCLTSIYRPFVDKALKQMGLRKLILRLHKLMDGSLQRARIALVKNDRPVEFSEFPDPMWGSDYVQLSRTPPSSEEKCSAVSWEELKAMDLPSFEPAFLVLCRVLLNVIHECLKLRLEQRPAGEPSLLSIKQLVRECKEVLKGGLLMKQYYQFMLQEVLEDLEKPDCNIDAFEEDLHKMLMVYFDYMRSWIQMLQQLPQASHSLKNLLEEEWNFTKEITHYIRGGEAQAGKLFCDIAGMLLKSTGSFLEFGLQESCAEFWTSADDSSASDEIRRSVIEISRALKELFHEARERASKALGFAKMLRKDLEIAAEFRLSAPVRDLLDVLKSKQYVKVQIPGLENLQMFVPDTLAEEKSIILQLLNAAAGKDCSKDSDDVLIDAYLLLTKHGDRARDSEDSWGTWEAQPVKVVPQVETVDTLRSMQVDNLLLVVMQSAHLTIQRKAFQQSIEGLMTLCQEQTSSQPVIAKALQQLKNDALELCNRISNAIDRVDHMFTSEFDAEVDESESVTLQQYYREAMIQGYNFGFEYHKEVVRLMSGEFRQKIGDKYISFARKWMNYVLTKCESGRGTRPRWATQGFDFLQAIEPAFISALPEDDFLSLQALMNECIGHVIGKPHSPVTAIHRNSPRPMKVPRCHSDPPNPHLIIPTPEGFRGSSVPENDRLASIAAELQFRSLSRHSSPTEERDEPAYPRGDSSGSTRRSWELRTLISQSKDTASKLGPIEAIQKSVRLFEEKRYREMRRKNIIGQVCDTPKSYDNVMHVGLRKVTFKWQRGNKIGEGQYGKVYTCISVDTGELMAMKEIRFQPNDHKTIKETADELKIFEGIKHPNLVRYFGVELHREEMYIFMEYCDEGTLEEVSRLGLQEHVIRLYSKQITIAINVLHEHGIVHRDIKGANIFLTSSGLIKLGDFGCSVKLKNNAQTMPGEVNSTLGTAAYMAPEVITRAKGEGHGRAADIWSLGCVVIEMVTGKRPWHEYEHNFQIMYKVGMGHKPPIPERLSPEGKDFLSHCLESDPKMRWTASQLLDHSFVKVCTDEE

SEQ ID NO: 52567 - protein, 1558 aa, Homo sapiens
  Payload ID: 10475
  Gene Symbol: MAP3K4
  Gene Name: mitogen-activated protein kinase kinase kinase 4
  Uniprot ID: Q9Y6R4
  ENSP ID: ENSP00000355886
MREAAAALVPPPAFAVTPAAAMEEPPPPPPPPPPPPEPETESEPECCLAARQEGTLGDSACKSPESDLEDFSDETNTENLYGTSPPSTPRQMKRMSTKHQRNNVGRPASRSNLKEKMNAPNQPPHKDTGKTVENVEEYSYKQEKKIRAALRTTERDRKKNVQCSFMLDSVGGSLPKKSIPDVDLNKPYLSLGCSNAKLPVSVPMPIARPARQTSRTDCPADRLKFFETLRLLLKLTSVSKKKDREQRGQENTSGFWLNRSNELIWLELQAWHAGRTINDQDFFLYTARQAIPDIINEILTFKVDYGSFAFVRDRAGFNGTSVEGQCKATPGTKIVGYSTHHEHLQRQRVSFEQVKRIMELLEYIEALYPSLQALQKDYEKYAAKDFQDRVQALCLWLNITKDLNQKLRIMGTVLGIKNLSDIGWPVFEIPSPRPSKGNEPEYEGDDTEGELKELESSTDESEEEQISDPRVPEIRQPIDNSFDIQSRDCISKKLERLESEDDSLGWGAPDWSTEAGFSRHCLTSIYRPFVDKALKQMGLRKLILRLHKLMDGSLQRARIALVKNDRPVEFSEFPDPMWGSDYVQLSRTPPSSEEKCSAVSWEELKAMDLPSFEPAFLVLCRVLLNVIHECLKLRLEQRPAGEPSLLSIKQLVRECKEVLKGGLLMKQYYQFMLQEVLEDLEKPDCNIDAFEEDLHKMLMVYFDYMRSWIQMLQQLPQASHSLKNLLEEEWNFTKEITHYIRGGEAQAGKLFCDIAGMLLKSTGSFLEFGLQESCAEFWTSADDSSASDEIRRSVIEISRALKELFHEARERASKALGFAKMLRKDLEIAAEFRLSAPVRDLLDVLKSKQYVKVQIPGLENLQMFVPDTLAEEKSIILQLLNAAAGKDCSKDSDDVLIDAYLLLTKHGDRARDSEDSWGTWEAQPVKVVPQVETVDTLRSMQVDNLLLVVMQSAHLTIQRKAFQQSIEGLMTLCQEQTSSQPVIAKALQQLKNDALELCNRISNAIDRVDHMFTSEFDAEVDESESVTLQQYYREAMIQGYNFGFEYHKEVVRLMSGEFRQKIGDKYISFARKWMNYVLTKCESGRGTRPRWATQGFDFLQAIEPAFISALPEDDFLSLQALMNECIGHVIGKPHSPVTGLYLAIHRNSPRPMKVPRCHSDPPNPHLIIPTPEGFRGSSVPENDRLASIAAELQFRSLSRHSSPTEERDEPAYPRGDSSGSTRRSWELRTLISQSKDTASKLGPIEAIQKSVRLFEEKRYREMRRKNIIGQVCDTPKSYDNVMHVGLRKVTFKWQRGNKIGEGQYGKVYTCISVDTGELMAMKEIRFQPNDHKTIKETADELKIFEGIKHPNLVRYFGVELHREEMYIFMEYCDEGTLEEVSRLGLQEHVIRLYSKQITIAINVLHEHGIVHRDIKGANIFLTSSGLIKLGDFGCSVKLKNNAQTMPGEVNSTLGTAAYMAPEVITRAKGEGHGRAADIWSLGCVVIEMVTGKRPWHEYEHNFQIMYKVGMGHKPPIPERLSPEGKDFLSHCLESDPKMRWTASQLLDHSFVKVCTDEE

SEQ ID NO: 52568 - protein, 1604 aa, Homo sapiens
  Payload ID: 10475
  Gene Symbol: MAP3K4
  Gene Name: mitogen-activated protein kinase kinase kinase 4
  ENSP ID: ENSP00000355887
MREAAAALVPPPAFAVTPAAAMEEPPPPPPPPPPPPEPETESEPECCLAARQEGTLGDSACKSPESDLEDFSDETNTENLYGTSPPSTPRQMKRMSTKHQRNNVGRPASRSNLKEKMNAPNQPPHKDTGKTVENVEEYSYKQEKKIRAALRTTERDRKKNVQCSFMLDSVGGSLPKKSIPDVDLNKPYLSLGCSNAKLPVSVPMPIARPARQTSRTDCPADRLKFFETLRLLLKLTSVSKKKDREQRGQENTSGFWLNRSNELIWLELQAWHAGRTINDQDFFLYTARQAIPDIINEILTFKVDYGSFAFVRDRAGFNGTSVEGQCKATPGTKIVGYSTHHEHLQRQRVSFEQVKRIMELLEYIEALYPSLQALQKDYEKYAAKDFQDRVQALCLWLNITKDLNQKLRIMGTVLGIKNLSDIGWPVFEIPSPRPSKGNEPEYEGDDTEGELKELESSTDESEEEQISDPRVPEIRQPIDNSFDIQSRDCISKKLERLESEDDSLGWGAPDWSTEAGFSRHCLTSIYRPFVDKALKQMGLRKLILRLHKLMDGSLQRARIALVKNDRPVEFSEFPDPMWGSDYVQLSRTPPSSEEKCSAVSWEELKAMDLPSFEPAFLVLCRVLLNVIHECLKLRLEQRPAGEPSLLSIKQLVRECKEVLKGGLLMKQYYQFMLQEVLEDLEKPDCNIDAFEEDLHKMLMVYFDYMRSWIQMLQQLPQASHSLKNLLEEEWNFTKEITHYIRGGEAQAGKLFCDIAGMLLKSTGSFLEFGLQESCAEFWTSADDSSASDEIRRSVIEISRALKELFHEARERASKALGFAKMLRKDLEIAAEFRLSAPVRDLLDVLKSKQYVKVQIPGLENLQMFVPDTLAEEKSIILQLLNAAAGKDCSKDSDDVLIDAYLLLTKHGDRARDSEDSWGTWEAQPVKVVPQVETVDTLRSMQVDNLLLVVMQSAHLTIQRKAFQQSIEGLMTLCQEQTSSQPVIAKALQQLKNDALELCNRISNAIDRVDHMFTSEFDAEVDESESVTLQQYYREAMIQGYNFGFEYHKEVVRLMSGEFRQKIGDKYISFARKWMNYVLTKCESGRGTRPRWATQGFDFLQAIEPAFISALPEDDFLSLQALMNECIGHVIGKPHSPVTAIHRNSPRPMKVPRCHSDPPNPHLIIPTPEGFSTRSMPSDARSHGSPAAAAAAAAAAVAASRPSPSGGDSVLPKSISSAHDTRGSSVPENDRLASIAAELQFRSLSRHSSPTEERDEPAYPRGDSSGSTRRSWELRTLISQSKDTASKLGPIEAIQKSVRLFEEKRYREMRRKNIIGQVCDTPKSYDNVMHVGLRKVTFKWQRGNKIGEGQYGKVYTCISVDTGELMAMKEIRFQPNDHKTIKETADELKIFEGIKHPNLVRYFGVELHREEMYIFMEYCDEGTLEEVSRLGLQEHVIRLYSKQITIAINVLHEHGIVHRDIKGANIFLTSSGLIKLGDFGCSVKLKNNAQTMPGEVNSTLGTAAYMAPEVITRAKGEGHGRAADIWSLGCVVIEMVTGKRPWHEYEHNFQIMYKVGMGHKPPIPERLSPEGKDFLSHCLESDPKMRWTASQLLDHSFVKVCTDEE

SEQ ID NO: 52569 - protein, 1608 aa, Homo sapiens
  Payload ID: 10475
  Gene Symbol: MAP3K4
  Gene Name: mitogen-activated protein kinase kinase kinase 4
  Uniprot ID: Q9Y6R4
  ENSP ID: ENSP00000375986
MREAAAALVPPPAFAVTPAAAMEEPPPPPPPPPPPPEPETESEPECCLAARQEGTLGDSACKSPESDLEDFSDETNTENLYGTSPPSTPRQMKRMSTKHQRNNVGRPASRSNLKEKMNAPNQPPHKDTGKTVENVEEYSYKQEKKIRAALRTTERDRKKNVQCSFMLDSVGGSLPKKSIPDVDLNKPYLSLGCSNAKLPVSVPMPIARPARQTSRTDCPADRLKFFETLRLLLKLTSVSKKKDREQRGQENTSGFWLNRSNELIWLELQAWHAGRTINDQDFFLYTARQAIPDIINEILTFKVDYGSFAFVRDRAGFNGTSVEGQCKATPGTKIVGYSTHHEHLQRQRVSFEQVKRIMELLEYIEALYPSLQALQKDYEKYAAKDFQDRVQALCLWLNITKDLNQKLRIMGTVLGIKNLSDIGWPVFEIPSPRPSKGNEPEYEGDDTEGELKELESSTDESEEEQISDPRVPEIRQPIDNSFDIQSRDCISKKLERLESEDDSLGWGAPDWSTEAGFSRHCLTSIYRPFVDKALKQMGLRKLILRLHKLMDGSLQRARIALVKNDRPVEFSEFPDPMWGSDYVQLSRTPPSSEEKCSAVSWEELKAMDLPSFEPAFLVLCRVLLNVIHECLKLRLEQRPAGEPSLLSIKQLVRECKEVLKGGLLMKQYYQFMLQEVLEDLEKPDCNIDAFEEDLHKMLMVYFDYMRSWIQMLQQLPQASHSLKNLLEEEWNFTKEITHYIRGGEAQAGKLFCDIAGMLLKSTGSFLEFGLQESCAEFWTSADDSSASDEIRRSVIEISRALKELFHEARERASKALGFAKMLRKDLEIAAEFRLSAPVRDLLDVLKSKQYVKVQIPGLENLQMFVPDTLAEEKSIILQLLNAAAGKDCSKDSDDVLIDAYLLLTKHGDRARDSEDSWGTWEAQPVKVVPQVETVDTLRSMQVDNLLLVVMQSAHLTIQRKAFQQSIEGLMTLCQEQTSSQPVIAKALQQLKNDALELCNRISNAIDRVDHMFTSEFDAEVDESESVTLQQYYREAMIQGYNFGFEYHKEVVRLMSGEFRQKIGDKYISFARKWMNYVLTKCESGRGTRPRWATQGFDFLQAIEPAFISALPEDDFLSLQALMNECIGHVIGKPHSPVTGLYLAIHRNSPRPMKVPRCHSDPPNPHLIIPTPEGFSTRSMPSDARSHGSPAAAAAAAAAAVAASRPSPSGGDSVLPKSISSAHDTRGSSVPENDRLASIAAELQFRSLSRHSSPTEERDEPAYPRGDSSGSTRRSWELRTLISQSKDTASKLGPIEAIQKSVRLFEEKRYREMRRKNIIGQVCDTPKSYDNVMHVGLRKVTFKWQRGNKIGEGQYGKVYTCISVDTGELMAMKEIRFQPNDHKTIKETADELKIFEGIKHPNLVRYFGVELHREEMYIFMEYCDEGTLEEVSRLGLQEHVIRLYSKQITIAINVLHEHGIVHRDIKGANIFLTSSGLIKLGDFGCSVKLKNNAQTMPGEVNSTLGTAAYMAPEVITRAKGEGHGRAADIWSLGCVVIEMVTGKRPWHEYEHNFQIMYKVGMGHKPPIPERLSPEGKDFLSHCLESDPKMRWTASQLLDHSFVKVCTDEE

SEQ ID NO: 52570 - protein, 23 aa, Homo sapiens
  Payload ID: 10475
  Gene Symbol: MAP3K4
  Gene Name: mitogen-activated protein kinase kinase kinase 4
  ENSP ID: ENSP00000390508
MKRMSTKHQRNNVGRPASRSNLK

SEQ ID NO: 52571 - protein, 85 aa, Homo sapiens
  Payload ID: 10475
  Gene Symbol: MAP3K4
  Gene Name: mitogen-activated protein kinase kinase kinase 4
  ENSP ID: ENSP00000439377
MREAAAALVPPPAFAVTPAAAMEEPPPPPPPPPPPPEPETESEPECCLAASFLNFQIPCGVQIMCSCQGHHLHLRRNAVLCRGRS

SEQ ID NO: 52572 - protein, 1442 aa, Homo sapiens
  Payload ID: 10475
  Gene Symbol: MAP3K4
  Gene Name: mitogen-activated protein kinase kinase kinase 4
  ENSP ID: ENSP00000445018
MREAAAALVPPPAFAVTPAAAMEEPPPPPPPPPPPPEPETESEPECCLAARQEGTLGDSACKSPESDLEDFSDETNTENLYGTSPPSTPRQMKRMSTKHQRNNVGRPASRSNLKEKMNAPNQPPHKDTGKTVENVEEYSYKQEKKIRAALRTTERDRKKNVQCSFMLDSVGGSLPKKSIPDVDLNKPYLSLGCSNAKLPVSVPMPIARPARQTSRTDCPADRLKFFETLRLLLKLTSVSKKKDREQRGQENTSGFWLNRSNELIWLELQAWHAGRTINDQDFFLYTARQAIPDIINEILTFKVDYGSFAFVRDRAGFNGTSVEGQCKATPGTKIVGYSTHHEHLQRQRVSFEQVKRIMELLEYIEALYPSLQALQKDYEKYAAKDFQDRVQALCLWLNITKDLNQKLRIMGTVLGIKNLSDIGWPVFEIPSPRPSKGNEPEYEGDDTEGELKELESSTDESEEEQISDPRVPEIRQPIDNSFDIQSRDCISKKLERLESEDDSLGWGAPDWSTEAGFSRHCLTSIYRPFVDKALKQMGLRKLILRLHKLMDGSLQRARIALVKNDRPVEFSEFPDPMWGSDYVQLSRTPPSSEEKCSAVSWEELKAMDLPSFEPAFLVLCRVLLNVIHECLKLRLEQRPAGEPSLLSIKQLVRECKEVLKGGLLMKQYYQFMLQEVLEDLEKPDCNIDAFEEDLHKMLMVYFDYMRSWIQMLQQLPQASHSLKNLLEEEWNFTKEITHYIRGGEAQAGKLFCDIAGMLLKSTGSFLEFGLQESCAEFWTSADDSSASDEIRRSVIEISRALKELFHEARERASKALGFAKMLRKDLEIAAEFRLSAPVRDLLDVLKSKQYVKVQIPGLENLQMFVPDTLAEEKSIILQLLNAAAGKDCSKDSDDVLIDAYLLLTKHGDRARDSEDSWGTWEAQPVKVVPQVETVDTLRSMQVDNLLLVVMQSAHLTIQRKAFQQSIEGLMTLCQEQTSSQPVIAKALQQLKNDALELCNRISNAIDRVDHMFTSEFDAEVDESESVTLQQYYREAMIQGYNFGFEYHKEVVRLMSGEFRQKIGDKYISFARKWMNYVLTKCESGRGTRPRWATQGFDFLQAIEPAFISALPEDDFLSLQALMNECIGHVIGKPHSPVTGLYLAIHRNSPRPMKVPRCHSDPPNPHLIIPTPEGFSTRSMPSDARSHGSPAAAAAAAAAAVAASRPSPSGGDSVLPKSISSAHDTRGSSVPENDRLASIAAELQFRSLSRHSSPTEERDEPAYPRGDSSGSTRRSWELRTLISQSKDTASKLGPIEAIQKSVRLFEEKRYREMRRKNIIGQVCDTPKSYDNVMHVGLRKVTFKWQRGNKIGEGQYGKVYTCISVDTGELMAMKEIRFQPNDHKTIKETADELKIFEGIKHPNLVRYFGVELHRSTVTLPNSQEISMSYIISAFSLKLEEFLLK

SEQ ID NO: 52573 - protein, 636 aa, Homo sapiens
  Payload ID: 10475
  Gene Symbol: MAP3K4
  Gene Name: mitogen-activated protein kinase kinase kinase 4
  ENSP ID: ENSP00000446303
MREAAAALVPPPAFAVTPAAAMEEPPPPPPPPPPPPEPETESEPECCLAARQEGTLGDSACKSPESDLEDFSDETNTENLYGTSPPSTPRQMKRMSTKHQRNNVGRPASRSNLKEKMNAPNQPPHKDTGKTVENVEEYSYKQEKKIRAALRTTERDRKKNVQCSFMLDSVGGSLPKKSIPDVDLNKPYLSLGCSNAKLPVSVPMPIARPARQTSRTDCPADRLKFFETLRLLLKLTSVSKKKDREQRGQENTSGFWLNRSNELIWLELQAWHAGRTINDQDFFLYTARQAIPDIINEILTFKVDYGSFAFVRDRAGFNGTSVEGQCKATPGTKIVGYSTHHEHLQRQRVSFEQVKRIMELLEYIEALYPSLQALQKDYEKYAAKDFQDRVQALCLWLNITKDLNQKLRIMGTVLGIKNLSDIGWPVFEIPSPRPSKGNEPEYEGDDTEGELKELESSTDESEEEQISDPRVPEIRQPIDNSFDIQSRDCISKKLERLESEDDSLGWGAPDWSTEAGFSRHCLTSIYRPFVDKALKQMGLRKLILRLHKLMDGSLQRARIALVKNDRPVEGDMRHQSIYVRCTLVPSRKTGQLEAGMGLAGHSFLNFQIPCGVQIMCSCQGHHLHLRRNAVLCRGRS

SEQ ID NO: 52574 - protein, 1374 aa, Homo sapiens
  Payload ID: 10476
  Gene Symbol: MAP3K5
  Gene Name: mitogen-activated protein kinase kinase kinase 5
  Uniprot ID: Q99683
  ENSP ID: ENSP00000351908
MSTEADEGITFSVPPFAPSGFCTIPEGGICRRGGAAAVGEGEEHQLPPPPPGSFWNVESAAAPGIGCPAATSSSSATRGRGSSVGGGSRRTTVAYVINEASQGQLVVAESEALQSLREACETVGATLETLHFGKLDFGETTVLDRFYNADIAVVEMSDAFRQPSLFYHLGVRESFSMANNIILYCDTNSDSLQSLKEIICQKNTMCTGNYTFVPYMITPHNKVYCCDSSFMKGLTELMQPNFELLLGPICLPLVDRFIQLLKVAQASSSQYFRESILNDIRKARNLYTGKELAAELARIRQRVDNIEVLTADIVINLLLSYRDIQDYDSIVKLVETLEKLPTFDLASHHHVKFHYAFALNRRNLPGDRAKALDIMIPMVQSEGQVASDMYCLVGRIYKDMFLDSNFTDTESRDHGASWFKKAFESEPTLQSGINYAVLLLAAGHQFESSFELRKVGVKLSSLLGKKGNLEKLQSYWEVGFFLGASVLANDHMRVIQASEKLFKLKTPAWYLKSIVETILIYKHFVKLTTEQPVAKQELVDFWMDFLVEATKTDVTVVRFPVLILEPTKIYQPSYLSINNEVEEKTISIWHVLPDDKKGIHEWNFSASSVRGVSISKFEERCCFLYVLHNSDDFQIYFCTELHCKKFFEMVNTITEEKGRSTEEGDCESDLLEYDYEYDENGDRVVLGKGTYGIVYAGRDLSNQVRIAIKEIPERDSRYSQPLHEEIALHKHLKHKNIVQYLGSFSENGFIKIFMEQVPGGSLSALLRSKWGPLKDNEQTIGFYTKQILEGLKYLHDNQIVHRDIKGDNVLINTYSGVLKISDFGTSKRLAGINPCTETFTGTLQYMAPEIIDKGPRGYGKAADIWSLGCTIIEMATGKPPFYELGEPQAAMFKVGMFKVHPEIPESMSAEAKAFILKCFEPDPDKRACANDLLVDEFLKVSSKKKKTQPKLSALSAGSNEYLRSISLPVPVLVEDTSSSSEYGSVSPDTELKVDPFSFKTRAKSCGERDVKGIRTLFLGIPDENFEDHSAPPSPEEKDSGFFMLRKDSERRATLHRILTEDQDKIVRNLMESLAQGAEEPKLKWEHITTLIASLREFVRSTDRKIIATTLSKLKLELDFDSHGISQVQVVLFGFQDAVNKVLRNHNIKPHWMFALDSIIRKAVQTAITILVPELRPHFSLASESDTADQEDLDVEDDHEEQPSNQTVRRPQAVIEDAVATSGVSTLSSTVSHDSQSAHRSLNVQLGRMKIETNRLLEELVRKEKELQALLHRAIEEKDQEIKHLKLKSQPIEIPELPVFHLNSSGTNTEDSELTDWLRVNGADEDTISRFLAEDYTLLDVLYYVTRDDLKCLRLRGGMLCTLWKAIIDFRNKQT

SEQ ID NO: 52575 - protein, 1288 aa, Homo sapiens
  Payload ID: 10477
  Gene Symbol: MAP3K6
  Gene Name: mitogen-activated protein kinase kinase kinase 6
  Uniprot ID: O95382
  ENSP ID: ENSP00000350195
MAGPCPRSGAERAGSCWQDPLAVALSRGRQLAAPPGRGCARSRPLSVVYVLTREPQPGLEPREGTEAEPLPLRCLREACAQVPRPRPPPQLRSLPFGTLELGDTAALDAFYNADVVVLEVSSSLVQPSLFYHLGVRESFSMTNNVLLCSQADLPDLQALREDVFQKNSDCVGSYTLIPYVVTATGRVLCGDAGLLRGLADGLVQAGVGTEALLTPLVGRLARLLEATPTDSCGYFRETIRRDIRQARERFSGPQLRQELARLQRRLDSVELLSPDIIMNLLLSYRDVQDYSAIIELVETLQALPTCDVAEQHNVCFHYTFALNRRNRPGDRAKALSVLLPLVQLEGSVAPDLYCMCGRIYKDMFFSSGFQDAGHREQAYHWYRKAFDVEPSLHSGINAAVLLIAAGQHFEDSKELRLIGMKLGCLLARKGCVEKMQYYWDVGFYLGAQILANDPTQVVLAAEQLYKLNAPIWYLVSVMETFLLYQHFRPTPEPPGGPPRRAHFWLHFLLQSCQPFKTACAQGDQCLVLVLEMNKVLLPAKLEVRGTDPVSTVTLSLLEPETQDIPSSWTFPVASICGVSASKRDERCCFLYALPPAQDVQLCFPSVGHCQWFCGLIQAWVTNPDSTAPAEEAEGAGEMLEFDYEYTETGERLVLGKGTYGVVYAGRDRHTRVRIAIKEIPERDSRFSQPLHEEIALHRRLRHKNIVRYLGSASQGGYLKIFMEEVPGGSLSSLLRSVWGPLKDNESTISFYTRQILQGLGYLHDNHIVHRDIKGDNVLINTFSGLLKISDFGTSKRLAGITPCTETFTGTLQYMAPEIIDQGPRGYGKAADIWSLGCTVIEMATGRPPFHELGSPQAAMFQVGMYKVHPPMPSSLSAEAQAFLLRTFEPDPRLRASAQTLLGDPFLQPGKRSRSPSSPRHAPRPSDAPSASPTPSANSTTQSQTFPCPQAPSQHPPSPPKRCLSYGGTSQLRVPEEPAAEEPASPEESSGLSLLHQESKRRAMLAAVLEQELPALAENLHQEQKQEQGARLGRNHVEELLRCLGAHIHTPNRRQLAQELRALQGRLRAQGLGPALLHRPLFAFPDAVKQILRKRQIRPHWMFVLDSLLSRAVRAALGVLGPEVEKEAVSPRSEELSNEGDSQQSPGQQSPLPVEPEQGPAPLMVQLSLLRAETDRLREILAGKEREYQALVQRALQRLNEEARTYVLAPEPPTALSTDQGLVQWLQELNVDSGTIQMLLNHSFTLHTLLTYATRDDLIYTRIRGGMVCRIWRAILAQRAGSTPVTSGP

SEQ ID NO: 52576 - protein, 1280 aa, Homo sapiens
  Payload ID: 10477
  Gene Symbol: MAP3K6
  Gene Name: mitogen-activated protein kinase kinase kinase 6
  Uniprot ID: O95382
  ENSP ID: ENSP00000363152
MAGPCPRSGAERAGSCWQDPLAVALSRGRQLAAPPGRGCARSRPLSVVYVLTREPQPGLEPREGTEAEPLPLRCLREACAQVPRPRPPPQLRSLPFGTLELGDTAALDAFYNADVVVLEVSSSLVQPSLFYHLGVRESFSMTNNVLLCSQADLPDLQALRDCVGSYTLIPYVVTATGRVLCGDAGLLRGLADGLVQAGVGTEALLTPLVGRLARLLEATPTDSCGYFRETIRRDIRQARERFSGPQLRQELARLQRRLDSVELLSPDIIMNLLLSYRDVQDYSAIIELVETLQALPTCDVAEQHNVCFHYTFALNRRNRPGDRAKALSVLLPLVQLEGSVAPDLYCMCGRIYKDMFFSSGFQDAGHREQAYHWYRKAFDVEPSLHSGINAAVLLIAAGQHFEDSKELRLIGMKLGCLLARKGCVEKMQYYWDVGFYLGAQILANDPTQVVLAAEQLYKLNAPIWYLVSVMETFLLYQHFRPTPEPPGGPPRRAHFWLHFLLQSCQPFKTACAQGDQCLVLVLEMNKVLLPAKLEVRGTDPVSTVTLSLLEPETQDIPSSWTFPVASICGVSASKRDERCCFLYALPPAQDVQLCFPSVGHCQWFCGLIQAWVTNPDSTAPAEEAEGAGEMLEFDYEYTETGERLVLGKGTYGVVYAGRDRHTRVRIAIKEIPERDSRFSQPLHEEIALHRRLRHKNIVRYLGSASQGGYLKIFMEEVPGGSLSSLLRSVWGPLKDNESTISFYTRQILQGLGYLHDNHIVHRDIKGDNVLINTFSGLLKISDFGTSKRLAGITPCTETFTGTLQYMAPEIIDQGPRGYGKAADIWSLGCTVIEMATGRPPFHELGSPQAAMFQVGMYKVHPPMPSSLSAEAQAFLLRTFEPDPRLRASAQTLLGDPFLQPGKRSRSPSSPRHAPRPSDAPSASPTPSANSTTQSQTFPCPQAPSQHPPSPPKRCLSYGGTSQLRVPEEPAAEEPASPEESSGLSLLHQESKRRAMLAAVLEQELPALAENLHQEQKQEQGARLGRNHVEELLRCLGAHIHTPNRRQLAQELRALQGRLRAQGLGPALLHRPLFAFPDAVKQILRKRQIRPHWMFVLDSLLSRAVRAALGVLGPEVEKEAVSPRSEELSNEGDSQQSPGQQSPLPVEPEQGPAPLMVQLSLLRAETDRLREILAGKEREYQALVQRALQRLNEEARTYVLAPEPPTALSTDQGLVQWLQELNVDSGTIQMLLNHSFTLHTLLTYATRDDLIYTRIRGGMVCRIWRAILAQRAGSTPVTSGP

SEQ ID NO: 52577 - protein, 798 aa, Homo sapiens
  Payload ID: 10477
  Gene Symbol: MAP3K6
  Gene Name: mitogen-activated protein kinase kinase kinase 6
  ENSP ID: ENSP00000418731
  MOD_RES (1)..(1): Any amino acid
XMNLLLSYRDVQDYSAIIELVETLQALPTCDVAEQHNVCFHYTFALNRRNRPGDRAKALSVLLPLVQLEGSVAPDLYCMCGRIYKDMFFSSGFQDAGHREQAYHWYRKAFDVEPSLHSGINAAVLLIAAGQHFEDSKELRLIGMKLGCLLARKGCVEKMQYYWDVGFYLGAQILANDPTQVVLAAEQLYKLNAPIWYLVSVMETFLLYQHFRPTPEPPGGPPRRAHFWLHFLLQSCQPFKTACAQGDQCLVLVLEMNKVLLPAKLEVRGTDPVSTVTLSLLEPETQDIPSSWTFPVASICGVSASKRDERCCFLYALPPAQDVQLCFPSVGHCQWFCGLIQAWVTNPDSTAPAEEAEGAGEMLEFDYEYTETGERLVLGKGTYGVVYAGRDRHTRVRIAIKEIPERDSRFSQPLHEEIALHRRLRHKNIVRYLGSASQGGYLKIFMEEVPGGSLSSLLRSVWGPLKDNESTISFYTRQILQGLGYLHDNHIVHRDIKGDNVLINTFSGLLKISDFGTSKRLAGITPCTETFTGTLQYMAPEIIDQGPRGYGKAADIWSLGCTVIEMATGRPPFHELGSPQAAMFQVGMYKVHPPMPSSLSAEAQAFLLRTFEPDPRLRASAQTLLGDPFLQPGKRSRSPSSPRHAPRPSDAPSASPTPSANSTTQSQTFPCPQAPSQHPPSPPKRCLSYGGTSQLRVPEEPAAEEPASPEESSGLSLLHQESKRRAMLAAVLEQELPALAENLHQEQKQEQGARLGRNHVEELLRCLGAHIHTPNRRQLAQELRALQGWMNGEDKGSF

SEQ ID NO: 52578 - protein, 82 aa, Homo sapiens
  Payload ID: 10477
  Gene Symbol: MAP3K6
  Gene Name: mitogen-activated protein kinase kinase kinase 6
  ENSP ID: ENSP00000418932
  MOD_RES (1)..(1): Any amino acid
XEYQALVQRALQRLNEEARTYVLAPEPPTALSTDQGLVQWLQELNVDSGTIQMGRDGMPHLEGHLGTASRIHTSHLWTLRAE

SEQ ID NO: 52579 - protein, 1288 aa, Homo sapiens; identical to SEQ ID NO: 52575
  Payload ID: 10477
  Gene Symbol: MAP3K6
  Gene Name: mitogen-activated protein kinase kinase kinase 6
  Uniprot ID: O95382
  ENSP ID: ENSP00000419591

SEQ ID NO: 52580 - protein, 260 aa, Homo sapiens
  Payload ID: 10478
  Gene Symbol: MAP3K7
  Gene Name: mitogen-activated protein kinase kinase kinase 7
  ENSP ID: ENSP00000358326
MDIASTNTSNKSDTNMEQVPATNDTIKRLESKLLKNQAKQQSESGRLSLGASRGSSVESLPPTSEGKRMSADMSEIEARIAATTGNGQPRRRSIQDLTVTGTEPGQVSSRSSSPSVRMITTSGPTSEKPTRSHPWTPDDSTDTNGSDNSIPMAYLTLDHQLQPLAPCPNSKESMAVFEQHCKMAQEYMKVQTEIALLLQRKQELVAELDQDEKDQQNTSRLVQEHKKLLDENKSLSTYYQQCKKQLEVIRSQQQKRQGTS

SEQ ID NO: 52581 - protein, 518 aa, Homo sapiens
  Payload ID: 10478
  Gene Symbol: MAP3K7
  Gene Name: mitogen-activated protein kinase kinase kinase 7
  Uniprot ID: O43318
  ENSP ID: ENSP00000358331
MSTASAASSSSSSSAGEMIEAPSQVLNFEEIDYKEIEVEEVVGRGAFGVVCKAKWRAKDVAIKQIESESERKAFIVELRQLSRVNHPNIVKLYGACLNPVCLVMEYAEGGSLYNVLHGAEPLPYYTAAHAMSWCLQCSQGVAYLHSMQPKALIHRDLKPPNLLLVAGGTVLKICDFGTACDIQTHMTNNKGSAAWMAPEVFEGSNYSEKCDVFSWGIILWEVITRRKPFDEIGGPAFRIMWAVHNGTRPPLIKNLPKPIESLMTRCWSKDPSQRPSMEEIVKIMTHLMRYFPGADEPLQYPCQYSDEGQSNSATSTGSFMDIASTNTSNKSDTNMEQVPATNDTIKRLESKLLKNQAKQQSESGRLSLGASRGSSVESLPPTSEGKRMSADMSEIEARIAATTAYSKPKRGHRKTASFGNILDVPEIVISGNGQPRRRSIQDLTVTGTEPGQVSSRSSSPSVRMITTSGPTSEKPTRSHPWTPDDSTDTNGSDNSIPMAYLTLDHQLQARTSCRTGPG

SEQ ID NO: 52582 - protein, 491 aa, Homo sapiens
  Payload ID: 10478
  Gene Symbol: MAP3K7
  Gene Name: mitogen-activated protein kinase kinase kinase 7
  Uniprot ID: O43318
  ENSP ID: ENSP00000358333
MSTASAASSSSSSSAGEMIEAPSQVLNFEEIDYKEIEVEEVVGRGAFGVVCKAKWRAKDVAIKQIESESERKAFIVELRQLSRVNHPNIVKLYGACLNPVCLVMEYAEGGSLYNVLHGAEPLPYYTAAHAMSWCLQCSQGVAYLHSMQPKALIHRDLKPPNLLLVAGGTVLKICDFGTACDIQTHMTNNKGSAAWMAPEVFEGSNYSEKCDVFSWGIILWEVITRRKPFDEIGGPAFRIMWAVHNGTRPPLIKNLPKPIESLMTRCWSKDPSQRPSMEEIVKIMTHLMRYFPGADEPLQYPCQYSDEGQSNSATSTGSFMDIASTNTSNKSDTNMEQVPATNDTIKRLESKLLKNQAKQQSESGRLSLGASRGSSVESLPPTSEGKRMSADMSEIEARIAATTGNGQPRRRSIQDLTVTGTEPGQVSSRSSSPSVRMITTSGPTSEKPTRSHPWTPDDSTDTNGSDNSIPMAYLTLDHQLQARTSCRTGPG

SEQ ID NO: 52583 - protein, 606 aa, Homo sapiens
  Payload ID: 10478
  Gene Symbol: MAP3K7
  Gene Name: mitogen-activated protein kinase kinase kinase 7
  Uniprot ID: O43318
  ENSP ID: ENSP00000358335
MSTASAASSSSSSSAGEMIEAPSQVLNFEEIDYKEIEVEEVVGRGAFGVVCKAKWRAKDVAIKQIESESERKAFIVELRQLSRVNHPNIVKLYGACLNPVCLVMEYAEGGSLYNVLHGAEPLPYYTAAHAMSWCLQCSQGVAYLHSMQPKALIHRDLKPPNLLLVAGGTVLKICDFGTACDIQTHMTNNKGSAAWMAPEVFEGSNYSEKCDVFSWGIILWEVITRRKPFDEIGGPAFRIMWAVHNGTRPPLIKNLPKPIESLMTRCWSKDPSQRPSMEEIVKIMTHLMRYFPGADEPLQYPCQYSDEGQSNSATSTGSFMDIASTNTSNKSDTNMEQVPATNDTIKRLESKLLKNQAKQQSESGRLSLGASRGSSVESLPPTSEGKRMSADMSEIEARIAATTAYSKPKRGHRKTASFGNILDVPEIVISGNGQPRRRSIQDLTVTGTEPGQVSSRSSSPSVRMITTSGPTSEKPTRSHPWTPDDSTDTNGSDNSIPMAYLTLDHQLQPLAPCPNSKESMAVFEQHCKMAQEYMKVQTEIALLLQRKQELVAELDQDEKDQQNTSRLVQEHKKLLDENKSLSTYYQQCKKQLEVIRSQQQKRQGTS

SEQ ID NO: 52584 - protein, 579 aa, Homo sapiens
  Payload ID: 10478
  Gene Symbol: MAP3K7
  Gene Name: mitogen-activated protein kinase kinase kinase 7
  Uniprot ID: O43318
  ENSP ID: ENSP00000358338
MSTASAASSSSSSSAGEMIEAPSQVLNFEEIDYKEIEVEEVVGRGAFGVVCKAKWRAKDVAIKQIESESERKAFIVELRQLSRVNHPNIVKLYGACLNPVCLVMEYAEGGSLYNVLHGAEPLPYYTAAHAMSWCLQCSQGVAYLHSMQPKALIHRDLKPPNLLLVAGGTVLKICDFGTACDIQTHMTNNKGSAAWMAPEVFEGSNYSEKCDVFSWGIILWEVITRRKPFDEIGGPAFRIMWAVHNGTRPPLIKNLPKPIESLMTRCWSKDPSQRPSMEEIVKIMTHLMRYFPGADEPLQYPCQYSDEGQSNSATSTGSFMDIASTNTSNKSDTNMEQVPATNDTIKRLESKLLKNQAKQQSESGRLSLGASRGSSVESLPPTSEGKRMSADMSEIEARIAATTGNGQPRRRSIQDLTVTGTEPGQVSSRSSSPSVRMITTSGPTSEKPTRSHPWTPDDSTDTNGSDNSIPMAYLTLDHQLQPLAPCPNSKESMAVFEQHCKMAQEYMKVQTEIALLLQRKQELVAELDQDEKDQQNTSRLVQEHKKLLDENKSLSTYYQQCKKQLEVIRSQQQKRQGTS

SEQ ID NO: 52585 - protein, 467 aa, Homo sapiens
  Payload ID: 10479
  Gene Symbol: MAP3K8
  Gene Name: mitogen-activated protein kinase kinase kinase 8
  Uniprot ID: P41279
  ENSP ID: ENSP00000263056
MEYMSTGSDNKEEIDLLIKHLNVSDVIDIMENLYASEEPAVYEPSLMTMCQDSNQNDERSKSLLLSGQEVPWLSSVRYGTVEDLLAFANHISNTAKHFYGQRPQESGILLNMVITPQNGRYQIDSDVLLIPWKLTYRNIGSDFIPRGAFGKVYLAQDIKTKKRMACKLIPVDQFKPSDVEIQACFRHENIAELYGAVLWGETVHLFMEAGEGGSVLEKLESCGPMREFEIIWVTKHVLKGLDFLHSKKVIHHDIKPSNIVFMSTKAVLVDFGLSVQMTEDVYFPKDLRGTEIYMSPEVILCRGHSTKADIYSLGATLIHMQTGTPPWVKRYPRSAYPSYLYIIHKQAPPLEDIADDCSPGMRELIEASLERNPNHRPRAADLLKHEALNPPREDQPRCQSLDSALLERKRLLSRKELELPENIADSSCTGSTEESEMLKRQRSLYIDLGALAGYFNLVRGPPTLEYG

SEQ ID NO: 52586 - protein, 467 aa, Homo sapiens; identical to SEQ ID NO: 52585
  Payload ID: 10479
  Gene Symbol: MAP3K8
  Gene Name: mitogen-activated protein kinase kinase kinase 8
  Uniprot ID: P41279
  ENSP ID: ENSP00000364470

SEQ ID NO: 52587 - protein, 132 aa, Homo sapiens
  Payload ID: 10479
  Gene Symbol: MAP3K8
  Gene Name: mitogen-activated protein kinase kinase kinase 8
  ENSP ID: ENSP00000364471
MEYMSTGSDNKEEIDLLIKHLNVSDVIDIMENLYASEEPAVYEPSLMTMCQDSNQNDERSKSLLLSGQEVPWLSSVRYGTVEDLLAFANHISNTAKHFYGQRPQESGILLNMVRFFPISWVLCAQLSYCSFI

SEQ ID NO: 52588 - protein, 223 aa, Homo sapiens
  Payload ID: 10479
  Gene Symbol: MAP3K8
  Gene Name: mitogen-activated protein kinase kinase kinase 8
  ENSP ID: ENSP00000391275
MEYMSTGSDNKEEIDLLIKHLNVSDVIDIMENLYASEEPAVYEPSLMTMCQDSNQNDERSKSLLLSGQEVPWLSSVRYGTVEDLLAFANHISNTAKHFYGQRPQESGILLNMVITPQNGRYQIDSDVLLIPWKLTYRNIGSDFIPRGAFGKVYLAQDIKTKKRMACKLIPVDQFKPSDVEIQACFRHENIAELYGAVLWGETVHLFMEAGEGGSVLEKLESCG

SEQ ID NO: 52589 - protein, 255 aa, Homo sapiens
  Payload ID: 10479
  Gene Symbol: MAP3K8
  Gene Name: mitogen-activated protein kinase kinase kinase 8
  ENSP ID: ENSP00000409653
MEYMSTGSDNKEEIDLLIKHLNVSDVIDIMENLYASEEPAVYEPSLMTMCQDSNQNDERSKSLLLSGQEVPWLSSVRYGTVEDLLAFANHISNTAKHFYGQRPQESGILLNMVITPQNGRYQIDSDVLLIPWKLTYRNIGSDFIPRGAFGKVYLAQDIKTKKRMACKLIPVDQFKPSDVEIQACFRHENIAELYGAVLWGETVHLFMEAGEGGSVLEKLESCGPMREFEIIWVTKHVLKGLDFLHSKKVIHHDIK

SEQ ID NO: 52590 - protein, 467 aa, Homo sapiens; identical to SEQ ID NO: 52585
  Payload ID: 10479
  Gene Symbol: MAP3K8
  Gene Name: mitogen-activated protein kinase kinase kinase 8
  Uniprot ID: P41279
  ENSP ID: ENSP00000443610

SEQ ID NO: 52591 - protein, 1081 aa, Homo sapiens
  Payload ID: 10480
  Gene Symbol: MAP3K9
  Gene Name: mitogen-activated protein kinase kinase kinase 9
  ENSP ID: ENSP00000370649
MEPSRALLGCLASAAAAAPPGEDGAGAGAEEEEEEEEEAAAAVGPGELGCDAPLPYWTAVFEYEAAGEDELTLRLGDVVEVLSKDSQVSGDEGWWTGQLNQRVGIFPSNYVTPRSAFSSRCQPGGEDPSCYPPIQLLEIDFAELTLEEIIGIGGFGKVYRAFWIGDEVAVKAARHDPDEDISQTIENVRQEAKLFAMLKHPNIIALRGVCLKEPNLCLVMEFARGGPLNRVLSGKRIPPDILVNWAVQIARGMNYLHDEAIVPIIHRDLKSSNILILQKVENGDLSNKILKITDFGLAREWHRTTKMSAAGTYAWMAPEVIRASMFSKGSDVWSYGVLLWELLTGEVPFRGIDGLAVAYGVAMNKLALPIPSTCPEPFAKLMEDCWNPDPHSRPSFTNILDQLTTIEESGFFEMPKDSFHCLQDNWKHEIQEMFDQLRAKEKELRTWEEELTRAALQQKNQEELLRRREQELAEREIDILERELNIIIHQLCQEKPRVKKRKGKFRKSRLKLKDGNRISLPSDFQHKFTVQASPTMDKRKSLINSRSSPPASPTIIPRLRAIQLTPGESSKTWGRSSVVPKEEGEEEEKRAPKKKGRTWGPGTLGQKELASGDEGLKSLVDGYKQWSSSAPNLVKGPRSSPALPGFTSLMEMEDEDSEGPGSGESRLQHSPSQSYLCIPFPRGEDGDGPSSDGIHEEPTPVNSATSTPQLTPTNSLKRGGAHHRRCEVALLGCGAVLAATGLGFDLLEAGKCQLLPLEEPEPPAREEKKRREGLFQRSSRPRRSTSPPSRKLFKKEEPMLLLGDPSASLTLLSLSSISECNSTRSLLRSDSDEIVVYEMPVSPVEAPPLSPCTHNPLVNVRVERFKRDPNQSLTPTHVTLTTPSQPSSHRRTPSDGALKPETLLASRSPSSNGLSPSPGAGMLKTPSPSRDPGEFPRLPDPNVVFPPTPRRWNTQQDSTLERPKTLEFLPRPRPSANRQRLDPWWFVSPSHARSTSPANSSSTETPSNLDSCFASSSSTVEERPGLPALLPFQAGPLPPTERTLLDLDAEGQSQDSTVPLCRAELNTHRPAPYEIQQEFWS

SEQ ID NO: 52592 - protein, 837 aa, Homo sapiens
  Payload ID: 10480
  Gene Symbol: MAP3K9
  Gene Name: mitogen-activated protein kinase kinase kinase 9
  ENSP ID: ENSP00000451038
MSAAGTYAWMAPEVIRASMFSKGSDVWSYGVLLWELLTGEVPFRGIDGLAVAYGVAMNKLALPIPSTCPEPFAKLMEDCWNPDPHSRPSFTNILDQLTTIEESGFFEMPKDSFHCLQDNWKHEIQEMFDQLRAKEKELRTWEEELTRAALQQKNQEELLRRREQELAEREIDILERELNIIIHQLCQEKPRVKKRKGKFRKSRLKLKDGNRISLPSDFQHKFTVQASPTMDKRKSLINSRSSPPASPTIIPRLRAIQCETVSQISWGQNTQGHLSPALSSHRLVQACSIHNFCHLSSTMCIYMHILTPGESSKTWGRSSVVPKEEGEEEEKRAPKKKGRTWGPGTLGQKELASGDEGLKSLVDGYKQWSSSAPNLVKGPRSSPALPGFTSLMEMALLAASWVVPIDIEEDEDSEGPGSGESRLQHSPSQSYLCIPFPRGEDGDGPSSDGIHEEPTPVNSATSTPQLTPTNSLKRGGAHHRRCEVALLGCGAVLAATGLGFDLLEAGKCQLLPLEEPEPPAREEKKRREGLFQRSSRPRRSTSPPSRKLFKKEEPMLLLGDPSASLTLLSLSSISECNSTRSLLRSDSDEIVVYEMPVSPVEAPPLSPCTHNPLVNVRVERFKRDPNQSLTPTHVTLTTPSQPSSHRRTPSDGALKPETLLASRSPSSNGLSPSPGAGMLKTPSPSRDPGEFPRLPDPNVVFPPTPRRWNTQQDSTLERPKTLEFLPRPRPSANRQRLDPWWFVSPSHARSTSPANSSSTETPSNLDSCFASSSSTVEERPGLPALLPFQAGPLPPTERTLLDLDAEGQSQDSTVPLCRAELNTHRPAPYEIQQEFWS

SEQ ID NO: 52593 - protein, 1118 aa, Homo sapiens
  Payload ID: 10480
  Gene Symbol: MAP3K9
  Gene Name: mitogen-activated protein kinase kinase kinase 9
  Uniprot ID: P80192
  ENSP ID: ENSP00000451263
MEPSRALLGCLASAAAAAPPGEDGAGAGAEEEEEEEEEAAAAVGPGELGCDAPLPYWTAVFEYEAAGEDELTLRLGDVVEVLSKDSQVSGDEGWWTGQLNQRVGIFPSNYVTPRSAFSSRCQPGGEDPSCYPPIQLLEIDFAELTLEEIIGIGGFGKVYRAFWIGDEVAVKAARHDPDEDISQTIENVRQEAKLFAMLKHPNIIALRGVCLKEPNLCLVMEFARGGPLNRVLSGKRIPPDILVNWAVQIARGMNYLHDEAIVPIIHRDLKSSNILILQKVENGDLSNKILKITDFGLAREWHRTTKMSAAGTYAWMAPEVIRASMFSKGSDVWSYGVLLWELLTGEVPFRGIDGLAVAYGVAMNKLALPIPSTCPEPFAKLMEDCWNPDPHSRPSFTNILDQLTTIEESGFFEMPKDSFHCLQDNWKHEIQEMFDQLRAKEKELRTWEEELTRAALQQKNQEELLRRREQELAEREIDILERELNIIIHQLCQEKPRVKKRKGKFRKSRLKLKDGNRISLPSDFQHKFTVQASPTMDKRKSLINSRSSPPASPTIIPRLRAIQLTPGESSKTWGRSSVVPKEEGEEEEKRAPKKKGRTWGPGTLGQKELASGDEGSPQRREKANGLSTPSESPHFHLGLKSLVDGYKQWSSSAPNLVKGPRSSPALPGFTSLMEMALLAASWVVPIDIEEDEDSEGPGSGESRLQHSPSQSYLCIPFPRGEDGDGPSSDGIHEEPTPVNSATSTPQLTPTNSLKRGGAHHRRCEVALLGCGAVLAATGLGFDLLEAGKCQLLPLEEPEPPAREEKKRREGLFQRSSRPRRSTSPPSRKLFKKEEPMLLLGDPSASLTLLSLSSISECNSTRSLLRSDSDEIVVYEMPVSPVEAPPLSPCTHNPLVNVRVERFKRDPNQSLTPTHVTLTTPSQPSSHRRTPSDGALKPETLLASRSPSSNGLSPSPGAGMLKTPSPSRDPGEFPRLPDPNVVFPPTPRRWNTQQDSTLERPKTLEFLPRPRPSANRQRLDPWWFVSPSHARSTSPANSSSTETPSNLDSCFASSSSTVEERPGLPALLPFQAGPLPPTERTLLDLDAEGQSQDSTVPLCRAELNTHRPAPYEIQQEFWS

SEQ ID NO: 52594 - protein, 1104 aa, Homo sapiens
  Payload ID: 10480
  Gene Symbol: MAP3K9
  Gene Name: mitogen-activated protein kinase kinase kinase 9
  Uniprot ID: P80192
  ENSP ID: ENSP00000451612
MEPSRALLGCLASAAAAAPPGEDGAGAGAEEEEEEEEEAAAAVGPGELGCDAPLPYWTAVFEYEAAGEDELTLRLGDVVEVLSKDSQVSGDEGWWTGQLNQRVGIFPSNYVTPRSAFSSRCQPGGEDPSCYPPIQLLEIDFAELTLEEIIGIGGFGKVYRAFWIGDEVAVKAARHDPDEDISQTIENVRQEAKLFAMLKHPNIIALRGVCLKEPNLCLVMEFARGGPLNRVLSGKRIPPDILVNWAVQIARGMNYLHDEAIVPIIHRDLKSSNILILQKVENGDLSNKILKITDFGLAREWHRTTKMSAAGTYAWMAPEVIRASMFSKGSDVWSYGVLLWELLTGEVPFRGIDGLAVAYGVAMNKLALPIPSTCPEPFAKLMEDCWNPDPHSRPSFTNILDQLTTIEESGFFEMPKDSFHCLQDNWKHEIQEMFDQLRAKEKELRTWEEELTRAALQQKNQEELLRRREQELAEREIDILERELNIIIHQLCQEKPRVKKRKGKFRKSRLKLKDGNRISLPSDFQHKFTVQASPTMDKRKSLINSRSSPPASPTIIPRLRAIQLTPGESSKTWGRSSVVPKEEGEEEEKRAPKKKGRTWGPGTLGQKELASGDEGSPQRREKANGLSTPSESPHFHLGLKSLVDGYKQWSSSAPNLVKGPRSSPALPGFTSLMEMEDEDSEGPGSGESRLQHSPSQSYLCIPFPRGEDGDGPSSDGIHEEPTPVNSATSTPQLTPTNSLKRGGAHHRRCEVALLGCGAVLAATGLGFDLLEAGKCQLLPLEEPEPPAREEKKRREGLFQRSSRPRRSTSPPSRKLFKKEEPMLLLGDPSASLTLLSLSSISECNSTRSLLRSDSDEIVVYEMPVSPVEAPPLSPCTHNPLVNVRVERFKRDPNQSLTPTHVTLTTPSQPSSHRRTPSDGALKPETLLASRSPSSNGLSPSPGAGMLKTPSPSRDPGEFPRLPDPNVVFPPTPRRWNTQQDSTLERPKTLEFLPRPRPSANRQRLDPWWFVSPSHARSTSPANSSSTETPSNLDSCFASSSSTVEERPGLPALLPFQAGPLPPTERTLLDLDAEGQSQDSTVPLCRAELNTHRPAPYEIQQEFWS

SEQ ID NO: 52595 - protein, 832 aa, Homo sapiens
  Payload ID: 10480
  Gene Symbol: MAP3K9
  Gene Name: mitogen-activated protein kinase kinase kinase 9
  ENSP ID: ENSP00000451921
MELTGLEVALVLILQKVENGDLSNKILKITDFGLAREWHRTTKMSAAGTYAWMAPEVIRASMFSKGSDVWSYGVLLWELLTGEVPFRGIDGLAVAYGVAMNKLALPIPSTCPEPFAKLMEDCWNPDPHSRPSFTNILDQLTTIEESGFFEMPKDSFHCLQDNWKHEIQEMFDQLRAKEKELRTWEEELTRAALQQKNQEELLRRREQELAEREIDILERELNIIIHQLCQEKPRVKKRKGKFRKSRLKLKDGNRISLPSDFQHKFTVQASPTMDKRKSLINSRSSPPASPTIIPRLRAIQLTPGESSKTWGRSSVVPKEEGEEEEKRAPKKKGRTWGPGTLGQKELASGDEGLKSLVDGYKQWSSSAPNLVKGPRSSPALPGFTSLMEMALLAASWVVPIDIEEDEDSEGPGSGESRLQHSPSQSYLCIPFPRGEDGDGPSSDGIHEEPTPVNSATSTPQLTPTNSLKRGGAHHRRCEVALLGCGAVLAATGLGFDLLEAGKCQLLPLEEPEPPAREEKKRREGLFQRSSRPRRSTSPPSRKLFKKEEPMLLLGDPSASLTLLSLSSISECNSTRSLLRSDSDEIVVYEMPVSPVEAPPLSPCTHNPLVNVRVERFKRDPNQSLTPTHVTLTTPSQPSSHRRTPSDGALKPETLLASRSPSSNGLSPSPGAGMLKTPSPSRDPGEFPRLPDPNVVFPPTPRRWNTQQDSTLERPKTLEFLPRPRPSANRQRLDPWWFVSPSHARSTSPANSSSTETPSNLDSCFASSSSTVEERPGLPALLPFQAGPLPPTERTLLDLDAEGQSQDSTVPLCRAELNTHRPAPYEIQQEFWS

SEQ ID NO: 52596 - protein, 880 aa, Homo sapiens
  Payload ID: 10480
  Gene Symbol: MAP3K9
  Gene Name: mitogen-activated protein kinase kinase kinase 9
  ENSP ID: ENSP00000480011
MELTGLEVALVLILQKVENGDLSNKILKITDFGLAREWHRTTKMSAAGTYAWMAPEVIRASMFSKGSDVWSYGVLLWELLTGEVPFRGIDGLAVAYGVAMNKLALPIPSTCPEPFAKLMEDCWNPDPHSRPSFTNILDQLTTIEESGFFEMPKDSFHCLQDNWKHEIQEMFDQLRAKEKELRTWEEELTRAALQQKNQEELLRRREQELAEREIDILERELNIIIHQLCQEKPRVKKRKGKFRKSRLKLKDGNRISLPSDFQHKFTVQASPTMDKRKSLINSRSSPPASPTIIPRLRAIQCETVSQISWGQNTQGHLSPALSSHRLVQACSIHNFCHLSSTMCIYMHILTPGESSKTWGRSSVVPKEEGEEEEKRAPKKKGRTWGPGTLGQKELASGDEGLKSLVDGYKQWSSSAPNLVKGPRSSPALPGFTSLMEMALLAASWVVPIDIEEDEDSEGPGSGESRLQHSPSQSYLCIPFPRGEDGDGPSSDGIHEEPTPVNSATSTPQLTPTNSLKRGGAHHRRCEVALLGCGAVLAATGLGFDLLEAGKCQLLPLEEPEPPAREEKKRREGLFQRSSRPRRSTSPPSRKLFKKEEPMLLLGDPSASLTLLSLSSISECNSTRSLLRSDSDEIVVYEMPVSPVEAPPLSPCTHNPLVNVRVERFKRDPNQSLTPTHVTLTTPSQPSSHRRTPSDGALKPETLLASRSPSSNGLSPSPGAGMLKTPSPSRDPGEFPRLPDPNVVFPPTPRRWNTQQDSTLERPKTLEFLPRPRPSANRQRLDPWWFVSPSHARSTSPANSSSTETPSNLDSCFASSSSTVEERPGLPALLPFQAGPLPPTERTLLDLDAEGQSQDSTVPLCRAELNTHRPAPYEIQQEFWS

SEQ ID NO: 52597 - protein, 821 aa, Homo sapiens
  Payload ID: 10481
  Gene Symbol: MAP4K1
  Gene Name: mitogen-activated protein kinase kinase kinase kinase 1
  Uniprot ID: Q92918
  ENSP ID: ENSP00000380066
MDVVDPDIFNRDPRDHYDLLQRLGGGTYGEVFKARDKVSGDLVALKMVKMEPDDDVSTLQKEILILKTCRHANIVAYHGSYLWLQKLWICMEFCGAGSLQDIYQVTGSLSELQISYVCREVLQGLAYLHSQKKIHRDIKGANILINDAGEVRLADFGISAQIGATLARRLSFIGTPYWMAPEVAAVALKGGYNELCDIWSLGITAIELAELQPPLFDVHPLRVLFLMTKSGYQPPRLKEKGKWSAAFHNFIKVTLTKSPKKRPSATKMLSHQLVSQPGLNRGLILDLLDKLKNPGKGPSIGDIEDEEPELPPAIPRRIRSTHRSSSLGIPDADCCRRHMEFRKLRGMETRPPANTARLQPPRDLRSSSPRKQLSESSDDDYDDVDIPTPAEDTPPPLPPKPKFRSPSDEGPGSMGDDGQLSPGVLVRCASGPPPNSPRPGPPPSTSSPHLTAHSEPSLWNPPSRELDKPPLLPPKKEKMKRKGCALLVKLFNGCPLRIHSTAAWTHPSTKDQHLLLGAEEGIFILNRNDQEATLEMLFPSRTTWVYSINNVLMSLSGKTPHLYSHSILGLLERKETRAGNPIAHISPHRLLARKNMVSTKIQDTKGCRACCVAEGASSGGPFLCGALETSVVLLQWYQPMNKFLLVRQVLFPLPTPLSVFALLTGPGSELPAVCIGVSPGRPGKSVLFHTVRFGALSCWLGEMSTEHRGPVQVTQVEEDMVMVLMDGSVKLVTPEGSPVRGLRTPEIPMTEAVEAVAMVGGQLQAFWKHGVQVWALGSDQLLQELRDPTLTFRLLGSPRPVVVETRPVDDPTAPSNLYIQE

SEQ ID NO: 52598 - protein, 833 aa, Homo sapiens
  Payload ID: 10481
  Gene Symbol: MAP4K1
  Gene Name: mitogen-activated protein kinase kinase kinase kinase 1
  Uniprot ID: Q92918
  ENSP ID: ENSP00000465039
MDVVDPDIFNRDPRDHYDLLQRLGGGTYGEVFKARDKVSGDLVALKMVKMEPDDDVSTLQKEILILKTCRHANIVAYHGSYLWLQKLWICMEFCGAGSLQDIYQVTGSLSELQISYVCREVLQGLAYLHSQKKIHRDIKGANILINDAGEVRLADFGISAQIGATLARRLSFIGTPYWMAPEVAAVALKGGYNELCDIWSLGITAIELAELQPPLFDVHPLRVLFLMTKSGYQPPRLKEKGKWSAAFHNFIKVTLTKSPKKRPSATKMLSHQLVSQPGLNRGLILDLLDKLKNPGKGPSIGDIEDEEPELPPAIPRRIRSTHRSSSLGIPDADCCRRHMEFRKLRGMETRPPANTARLQPPRDLRSSSPRKQLSESSDDDYDDVDIPTPAEDTPPPLPPKPKFRSPSDEGPGSMGDDGQLSPGVLVRCASGPPPNSPRPGPPPSTSSPHLTAHSEPSLWNPPSRELDKPPLLPPKKEKMKRKGCALLVKLFNGCPLRIHSTAAWTHPSTKDQHLLLGAEEGIFILNRNDQEATLEMLFPSRTTWVYSINNVLMSLSGKTPHLYSHSILGLLERKETRAGNPIAHISPHRLLARKNMVSTKIQDTKGCRACCVAEGASSGGPFLCGALETSVVLLQWYQPMNKFLLVRQVLFPLPTPLSVFALLTGPGSELPAVCIGVSPGRPGKSVLFHTVRFGALSCWLGEMSTEHRGPVQVTQVEEDMVMVLMDGSVKLVTPEGSPVRGLRTPEIPMTEAVEAVAMVGGQLQAFWKHGVQVWALGSDQLLQELRDPTLTFRLLGSPRLECSGTISPHCNLLLPGSSNSPASASRVAGITGL

SEQ ID NO: 52599 - protein, 525 aa, Homo sapiens
  Payload ID: 10481
  Gene Symbol: MAP4K1
  Gene Name: mitogen-activated protein kinase kinase kinase kinase 1
  ENSP ID: ENSP00000465303
  MOD_RES (1)..(1): Any amino acid
XSSSLGIPDADCCRRHMEFRKLRGMETRPPANTARLQPPRDLRSSSPRSGTPGRMGRGLECGQGPQGSYLSPFRKQLSESSDDDYDDVDIPTPAEDTPPPLPPKPKFRSPSDEGPGSMGDDGQLSPGVLVRCASGPPPNSPRPGPPPSTSSPHLTAHSEPSLWNPPSRELDKPPLLPPKKEKMKRKGCALLVKLFNGCPLRIHSTAAWTHPSTKDQHLLLGAEEGIFILNRNDQEATLEMLFPSRTTWVYSINNVLMSLSGKTPHLYSHSILGLLERKETRAGNPIAHISPHRLLARKNMVSTKIQDTKGCRACCVAEGASSGGPFLCGALETSVVLLQWYQPMNKFLLVRQVLFPLPTPLSVFALLTGPGSELPAVCIGVSPGRPGKSVLFHTVRFGALSCWLGEMSTEHRGPVQVTQVEEDMVMVLMDGSVKLVTPEGSPVRGLRTPEIPMTEAVEAVAMVGGQLQAFWKHGVQVWALGSDQLLQELRDPTLTFRLLGSPRPVVVETRPVDDPTAPSNLYIQE

SEQ ID NO: 52600 - protein, 395 aa, Homo sapiens
  Payload ID: 10481
  Gene Symbol: MAP4K1
  Gene Name: mitogen-activated protein kinase kinase kinase kinase 1
  ENSP ID: ENSP00000465774
MDVVDPDIFNRDPRDHYDLLQRLGGGTYGEVFKARDKVSGDLVALKMVKMEPDDDVSTLQKEILILKTCRHANIVAYHGSYLWLQKLWICMEFCGAGSLQDIYQVTGSLSELQISYVCREVLQGLAYLHSQKKIHRDIKGANILINDAGEVRLADFGISAQIGATLARRLSFIGTPYWMAPEVAAVALKGGYNELCDIWSLGITAIELAELQPPLFDVHPLRVLFLMTKSGYQPPRLKEKGKWSAAFHNFIKVTLTKSPKKRPSATKMLSHQLVSQPGLNRGLILDLLDKLKNPGKGPSIGDIEDEEPELPPAIPRRIRSTHRSSSLGIPDADCCQLQAFWKHGVQVWALGSDQLLQELRDPTLTFRLLGSPRPVVVETRPVDDPTAPSNLYIQE

SEQ ID NO: 52601 - protein, 817 aa, Homo sapiens
  Payload ID: 10481
  Gene Symbol: MAP4K1
  Gene Name: mitogen-activated protein kinase kinase kinase kinase 1
  ENSP ID: ENSP00000468164
MAKFRGRDPRDHYDLLQRLGGGTYGEVFKARDKVSGDLVALKMVKMEPDDDVSTLQKEILILKTCRHANIVAYHGSYLWLQKLWICMEFCGAGSLQDIYQVTGSLSELQISYVCREVLQGLAYLHSQKKIHRDIKGANILINDAGEVRLADFGISAQIGATLARRLSFIGTPYWMAPEVAAVALKGGYNELCDIWSLGITAIELAELQPPLFDVHPLRVLFLMTKSGYQPPRLKEKGKWSAAFHNFIKVTLTKSPKKRPSATKMLSHQLVSQPGLNRGLILDLLDKLKNPGKGPSIGDIEDEEPELPPAIPRRIRSTHRSSSLGIPDADCCRRHMEFRKLRGMETRPPANTARLQPPRDLRSSSPRKQLSESSDDDYDDVDIPTPAEDTPPPLPPKPKFRSPSDEGPGSMGDDGQLSPGVLVRCASGPPPNSPRPGPPPSTSSPHLTAHSEPSLWNPPSRELDKPPLLPPKKEKMKRKGCALLVKLFNGCPLRIHSTAAWTHPSTKDQHLLLGAEEGIFILNRNDQEATLEMLFPSRTTWVYSINNVLMSLSGKTPHLYSHSILGLLERKETRAGNPIAHISPHRLLARKNMVSTKIQDTKGCRACCVAEGASSGGPFLCGALETSVVLLQWYQPMNKFLLVRQVLFPLPTPLSVFALLTGPGSELPAVCIGVSPGRPGKSVLFHTVRFGALSCWLGEMSTEHRGPVQVTQVEEDMVMVLMDGSVKLVTPEGSPVRGLRTPEIPMTEAVEAVAMVGGQLQAFWKHGVQVWALGSDQLLQELRDPTLTFRLLGSPRPVVVETRPVDDPTAPSNLYIQE

SEQ ID NO: 52602 - protein, 69 aa, Homo sapiens
  Payload ID: 10481
  Gene Symbol: MAP4K1
  Gene Name: mitogen-activated protein kinase kinase kinase kinase 1
  ENSP ID: ENSP00000468396
  MOD_RES (1)..(1): Any amino acid
XGATLARRLSFIGTPYWMAPEVAAVALKGGYNELCDIWSLGITAIELAELQPPLFDVHPLSINWYPSLG

SEQ ID NO: 52603 - protein, 817 aa, Homo sapiens; identical to SEQ ID NO: 52601
  Payload ID: 10481
  Gene Symbol: MAP4K1
  Gene Name: mitogen-activated protein kinase kinase kinase kinase 1
  ENSP ID: ENSP00000488949

SEQ ID NO: 52604 - protein, 833 aa, Homo sapiens; identical to SEQ ID NO: 52598
  Payload ID: 10481
  Gene Symbol: MAP4K1
  Gene Name: mitogen-activated protein kinase kinase kinase kinase 1
  ENSP ID: ENSP00000489001

SEQ ID NO: 52605 - protein, 395 aa, Homo sapiens; identical to SEQ ID NO: 52600
  Payload ID: 10481
  Gene Symbol: MAP4K1
  Gene Name: mitogen-activated protein kinase kinase kinase kinase 1
  ENSP ID: ENSP00000489009

SEQ ID NO: 52606 - protein, 69 aa, Homo sapiens; identical to SEQ ID NO: 52602
  Payload ID: 10481
  Gene Symbol: MAP4K1
  Gene Name: mitogen-activated protein kinase kinase kinase kinase 1
  ENSP ID: ENSP00000489075
  MOD_RES (1)..(1): Any amino acid

SEQ ID NO: 52607 - protein, 821 aa, Homo sapiens; identical to SEQ ID NO: 52597
  Payload ID: 10481
  Gene Symbol: MAP4K1
  Gene Name: mitogen-activated protein kinase kinase kinase kinase 1
  ENSP ID: ENSP00000489158

SEQ ID NO: 52608 - protein, 525 aa, Homo sapiens; identical to SEQ ID NO: 52599
  Payload ID: 10481
  Gene Symbol: MAP4K1
  Gene Name: mitogen-activated protein kinase kinase kinase kinase 1
  ENSP ID: ENSP00000489418
  MOD_RES (1)..(1): Any amino acid

SEQ ID NO: 52609 - protein, 820 aa, Homo sapiens
  Payload ID: 10482
  Gene Symbol: MAP4K2
  Gene Name: mitogen-activated protein kinase kinase kinase kinase 2
  Uniprot ID: Q12851
  ENSP ID: ENSP00000294066
MALLRDVSLQDPRDRFELLQRVGAGTYGDVYKARDTVTSELAAVKIVKLDPGDDISSLQQEITILRECRHPNVVAYIGSYLRNDRLWICMEFCGGGSLQEIYHATGPLEERQIAYVCREALKGLHHLHSQGKIHRDIKGANLLLTLQGDVKLADFGVSGELTASVAKRRSFIGTPYWMAPEVAAVERKGGYNELCDVWALGITAIELGELQPPLFHLHPMRALMLMSKSSFQPPKLRDKTRWTQNFHHFLKLALTKNPKKRPTAEKLLQHPFTTQQLPRALLTQLLDKASDPHLGTPSPEDCELETYDMFPDTIHSRGQHGPAERTPSEIQFHQVKFGAPRRKETDPLNEPWEEEWTLLGKEELSGSLLQSVQEALEERSLTIRSASEFQELDSPDDTMGTIKRAPFLGPLPTDPPAEEPLSSPPGTLPPPPSGPNSSPLLPTAWATMKQREDPERSSCHGLPPTPKVHMGACFSKVFNGCPLRIHAAVTWIHPVTRDQFLVVGAEEGIYTLNLHELHEDTLEKLISHRCSWLYCVNNVLLSLSGKSTHIWAHDLPGLFEQRRLQQQVPLSIPTNRLTQRIIPRRFALSTKIPDTKGCLQCRVVRNPYTGATFLLAALPTSLLLLQWYEPLQKFLLLKNFSSPLPSPAGMLEPLVLDGKELPQVCVGAEGPEGPGCRVLFHVLPLEAGLTPDILIPPEGIPGSAQQVIQVDRDTILVSFERCVRIVNMQGEPTATLAPELTFDFPIETVVCLQDSVLAFWSHGMQGRSLDTNEVTQEITDETRIFRVLGAHRDIILESIPTDNPEAHSNLYILTGHQSTY

SEQ ID NO: 52610 - protein, 812 aa, Homo sapiens
  Payload ID: 10482
  Gene Symbol: MAP4K2
  Gene Name: mitogen-activated protein kinase kinase kinase kinase 2
  Uniprot ID: Q12851
  ENSP ID: ENSP00000366567
MALLRDVSLQDPRDRFELLQRVGAGTYGDVYKARDTVTSELAAVKIVKLDPGDDISSLQQEITILRECRHPNVVAYIGSYLRNDRLWICMEFCGGGSLQEIYHATGPLEERQIAYVCREALKGLHHLHSQGKIHRDIKGANLLLTLQGDVKLADFGVSGELTASVAKRRSFIGTPYWMAPEVAAVERKGGYNELCDVWALGITAIELGELQPPLFHLHPMRALMLMSKSSFQPPKLRDKTRWTQNFHHFLKLALTKNPKKRPTAEKLLQHPFTTQQLPRALLTQLLDKASDPHLGTPSPEDCELETYDMFPDTIHSRGQHGPAERTPSEIQFHQVKFGAPRRKETDPLNEPWEEEWTLLGKEELSGSLLQSVQEALEERSLTIRSASEFQELDSPDDTMGTIKRAPFLGPLPTDPPAEEPLSSPPGPNSSPLLPTAWATMKQREDPERSSCHGLPPTPKVHMGACFSKVFNGCPLRIHAAVTWIHPVTRDQFLVVGAEEGIYTLNLHELHEDTLEKLISHRCSWLYCVNNVLLSLSGKSTHIWAHDLPGLFEQRRLQQQVPLSIPTNRLTQRIIPRRFALSTKIPDTKGCLQCRVVRNPYTGATFLLAALPTSLLLLQWYEPLQKFLLLKNFSSPLPSPAGMLEPLVLDGKELPQVCVGAEGPEGPGCRVLFHVLPLEAGLTPDILIPPEGIPGSAQQVIQVDRDTILVSFERCVRIVNMQGEPTATLAPELTFDFPIETVVCLQDSVLAFWSHGMQGRSLDTNEVTQEITDETRIFRVLGAHRDIILESIPTDNPEAHSNLYILTGHQSTY

SEQ ID NO: 52611 - protein, 57 aa, Homo sapiens
  Payload ID: 10482
  Gene Symbol: MAP4K2
  Gene Name: mitogen-activated protein kinase kinase kinase kinase 2
  ENSP ID: ENSP00000400594
MALLRDVSLQDPRDRFELLQRVGAGTYGDVYKARDTVTSELAAVKIVKLDPGNHHPA

SEQ ID NO: 52612 - protein, 144 aa, Homo sapiens
  Payload ID: 10482
  Gene Symbol: MAP4K2
  Gene Name: mitogen-activated protein kinase kinase kinase kinase 2
  ENSP ID: ENSP00000403410
  MOD_RES (1)..(1): Any amino acid
XSGKSTHIWAHDLPGLFEQRRLQQQVPLSIPTNRLTQRIIPRRFALSTKIPDTKGCLQCRVVRNPYTGATFLLAALPTSLLLLQWYEPLQKFLLLKNFSSPLPSPAGMLEPLVLDGKELPQVCVGAEGPEGPGCRVLFHARPSR

SEQ ID NO: 52613 - protein, 307 aa, Homo sapiens
  Payload ID: 10482
  Gene Symbol: MAP4K2
  Gene Name: mitogen-activated protein kinase kinase kinase kinase 2
  ENSP ID: ENSP00000403563
MALLRDVSLQDPRDRFELLQRVGAGTYGDVYKARDTVTSELAAVKIVKLDPGDDISSLQQEITILRECRHPNVVAYIGSYLRNDRLWICMEFCGGGSLQEIYHATGPLEERQIAYVCREALKGLHHLHSQGKIHRDIKGANLLLTLQGDVKLADFGVSGELTASVAKRRSFIGTPYWALMLMSKSSFQPPKLRDKTRWTQNFHHFLKLALTKNPKKRPTAEKLLQHPFTTQQLPRALLTQLLDKASDPHLGTPSPEDCELETYDMFPDTIHSRGQHGPAERTPSEIQFHQVKFGAPRRKETDPLNEP

SEQ ID NO: 52614 - protein, 58 aa, Homo sapiens
  Payload ID: 10482
  Gene Symbol: MAP4K2
  Gene Name: mitogen-activated protein kinase kinase kinase kinase 2
  ENSP ID: ENSP00000404534
MALLRDVSLQDPRDRFELLQRVGAGTYGDVYKARDTVTSELAAVKIVKLDPAGNHHPA

SEQ ID NO: 52615 - protein, 57 aa, Homo sapiens; identical to SEQ ID NO: 52611
  Payload ID: 10482
  Gene Symbol: MAP4K2
  Gene Name: mitogen-activated protein kinase kinase kinase kinase 2
  ENSP ID: ENSP00000413167

SEQ ID NO: 52616 - protein, 894 aa, Homo sapiens
  Payload ID: 10483
  Gene Symbol: MAP4K3
  Gene Name: mitogen-activated protein kinase kinase kinase kinase 3
  Uniprot ID: Q8IVH8
  ENSP ID: ENSP00000263881
MNPGFDLSRRNPQEDFELIQRIGSGTYGDVYKARNVNTGELAAIKVIKLEPGEDFAVVQQEIIMMKDCKHPNIVAYFGSYLRRDKLWICMEFCGGGSLQDIYHVTGPLSELQIAYVSRETLQGLYYLHSKGKMHRDIKGANILLTDNGHVKLADFGVSAQITATIAKRKSFIGTPYWMAPEVAAVERKGGYNQLCDLWAVGITAIELAELQPPMFDLHPMRALFLMTKSNFQPPKLKDKMKWSNSFHHFVKMALTKNPKKRPTAEKLLQHPFVTQHLTRSLAIELLDKVNNPDHSTYHDFDDDDPEPLVAVPHRIHSTSRNVREEKTRSEITFGQVKFDPPLRKETEPHHELPDSDGFLDSSEEIYYTARSNLDLQLEYGQGHQGGYFLGANKSLLKSVEEELHQRGHVAHLEDDEGDDDESKHSTLKAKIPPPLPPKPKSIFIPQEMHSTEDENQGTIKRCPMSGSPAKPSQVPPRPPPPRLPPHKPVALGNGMSSFQLNGERDGSLCQQQNEHRGTNLSRKEKKDVPKPISNGLPPTPKVHMGACFSKVFNGCPLKIHCASSWINPDTRDQYLIFGAEEGIYTLNLNELHETSMEQLFPRRCTWLYVMNNCLLSISGKASQLYSHNLPGLFDYARQMQKLPVAIPAHKLPDRILPRKFSVSAKIPETKWCQKCCVVRNPYTGHKYLCGALQTSIVLLEWVEPMQKFMLIKHIDFPIPCPLRMFEMLVVPEQEYPLVCVGVSRGRDFNQVVRFETVNPNSTSSWFTESDTPQTNVTHVTQLERDTILVCLDCCIKIVNLQGRLKSSRKLSSELTFDFQIESIVCLQDSVLAFWKHGMQGRSFRSNEVTQEISDSTRIFRLLGSDRVVVLESRPTDNPTANSNLYILAGHENSY

SEQ ID NO: 52617 - protein, 873 aa, Homo sapiens
  Payload ID: 10483
  Gene Symbol: MAP4K3
  Gene Name: mitogen-activated protein kinase kinase kinase kinase 3
  Uniprot ID: Q8IVH8
  ENSP ID: ENSP00000345434
MNPGFDLSRRNPQEDFELIQRIGSGTYGDVYKARNVNTGELAAIKVIKLEPGEDFAVVQQEIIMMKDCKHPNIVAYFGSYLRRDKLWICMEFCGGGSLQDIYHVTGPLSELQIAYVSRETLQGLYYLHSKGKMHRDIKGANILLTDNGHVKLADFGVSAQITATIAKRKSFIGTPYWMAPEVAAVERKGGYNQLCDLWAVGITAIELAELQPPMFDLHPMRALFLMTKSNFQPPKLKDKMKWSNSFHHFVKMALTKNPKKRPTAEKLLQHPFVTQHLTRSLAIELLDKVNNPDHSTYHDFDDDDPEPLVAVPHRIHSTSRNVREEKTRSEITFGQVKFDPPLRKETEPHHELDLQLEYGQGHQGGYFLGANKSLLKSVEEELHQRGHVAHLEDDEGDDDESKHSTLKAKIPPPLPPKPKSIFIPQEMHSTEDENQGTIKRCPMSGSPAKPSQVPPRPPPPRLPPHKPVALGNGMSSFQLNGERDGSLCQQQNEHRGTNLSRKEKKDVPKPISNGLPPTPKVHMGACFSKVFNGCPLKIHCASSWINPDTRDQYLIFGAEEGIYTLNLNELHETSMEQLFPRRCTWLYVMNNCLLSISGKASQLYSHNLPGLFDYARQMQKLPVAIPAHKLPDRILPRKFSVSAKIPETKWCQKCCVVRNPYTGHKYLCGALQTSIVLLEWVEPMQKFMLIKHIDFPIPCPLRMFEMLVVPEQEYPLVCVGVSRGRDFNQVVRFETVNPNSTSSWFTESDTPQTNVTHVTQLERDTILVCLDCCIKIVNLQGRLKSSRKLSSELTFDFQIESIVCLQDSVLAFWKHGMQGRSFRSNEVTQEISDSTRIFRLLGSDRVVVLESRPTDNPTANSNLYILAGHENSY

SEQ ID NO: 52618 - protein, 143 aa, Homo sapiens
  Payload ID: 10483
  Gene Symbol: MAP4K3
  Gene Name: mitogen-activated protein kinase kinase kinase kinase 3
  ENSP ID: ENSP00000399228
FQPPKLKDKMKWSNSFHHFVKMALTKNPKKRPTAEKLLQHPFVTQHLTRSLAIELLDKVNNPDHSTYHDFDDDDPEPLVAVPHRIHSTSRNVREEKTRSEITFGQVKFDPPLRKETEPHHELPDSDGFLDSSEEIYYTARSNL

SEQ ID NO: 52619 - protein, 131 aa, Homo sapiens
  Payload ID: 10483
  Gene Symbol: MAP4K3
  Gene Name: mitogen-activated protein kinase kinase kinase kinase 3
  ENSP ID: ENSP00000405137
MNPGFDLSRRNPQEDFELIQRIGSGTYGDVYKARNVNTGELAAIKVIKLEPGEDFAVVQQEIIMMKDCKHPNIVAYFGSYLRRDKLWICMEFCGGGSLQDIYHGWLQKLQLLRGRGVTINSVISGQWESLP

SEQ ID NO: 52620 - protein, 44 aa, Homo sapiens
  Payload ID: 10483
  Gene Symbol: MAP4K3
  Gene Name: mitogen-activated protein kinase kinase kinase kinase 3
  ENSP ID: ENSP00000410183
MNPGFDLSRRNPQEDFELIQRIGSGTYGDVYKEKTLQLCSKKLL

SEQ ID NO: 52621 - protein, 810 aa, Homo sapiens
  Payload ID: 10483
  Gene Symbol: MAP4K3
  Gene Name: mitogen-activated protein kinase kinase kinase kinase 3
  ENSP ID: ENSP00000416958
MMKDCKHPNIVAYFGSYLRRDKLWICMEFCGGGSLQDIYHVTGPLSELQIAYVSRETLQGLYYLHSKGKMHRDIKGANILLTDNGHVKLADFGVSAQITATIAKRKSFIGTPYWMAPEVAAVERKGGYNQLCDLWAVGITAIELAELQPPMFDLHPMRALFLMTKSNFQPPKLKDKMKWSNSFHHFVKMALTKNPKKRPTAEKLLQHPFVTQHLTRSLAIELLDKVNNPDHSTYHDFDDDDPEPLVAVPHRIHSTSRNVREEKTRSEITFGQVKFDPPLRKETEPHHELDLQLEYGQGHQGGYFLGANKSLLKSVEEELHQRGHVAHLEDDEGDDDESKHSTLKAKIPPPLPPKPKSIFIPQEMHSTEDENQGTIKRCPMSGSPAKPSQVPPRPPPPRLPPHKPVALGNGMSSFQLNGERDGSLCQQQNEHRGTNLSRKEKKDVPKPISNGLPPTPKVHMGACFSKVFNGCPLKIHCASSWINPDTRDQYLIFGAEEGIYTLNLNELHETSMEQLFPRRCTWLYVMNNCLLSISGKASQLYSHNLPGLFDYARQMQKLPVAIPAHKLPDRILPRKFSVSAKIPETKWCQKCCVVRNPYTGHKYLCGALQTSIVLLEWVEPMQKFMLIKHIDFPIPCPLRMFEMLVVPEQEYPLVCVGVSRGRDFNQVVRFETVNPNSTSSWFTESDTPQTNVTHVTQLERDTILVCLDCCIKIVNLQGRLKSSRKLSSELTFDFQIESIVCLQDSVLAFWKHGMQGRSFRSNEVTQEISDSTRIFRLLGSDRVVVLESRPTDNPTANSNLYILAGHENSY

SEQ ID NO: 52622 - protein, 92 aa, Homo sapiens
  Payload ID: 10483
  Gene Symbol: MAP4K3
  Gene Name: mitogen-activated protein kinase kinase kinase kinase 3
  ENSP ID: ENSP00000476533
MNPGFDLSRRNPQEDFELIQRIGSGTYGDVYKARNVNTGELAAIKVIKLEPGEDFAVVQQEIIMMKDCKHPNIVAYFGSYLRYTVCFPFEKQ

SEQ ID NO: 52623 - protein, 1165 aa, Homo sapiens [sequence omitted]

SEQ ID NO: 52624 - protein, 987 aa, Homo sapiens
  Payload ID: 10484
  Gene Symbol: MAP4K4
  Gene Name: mitogen-activated protein kinase kinase kinase kinase 4
  ENSP ID: ENSP00000303600
MDVTEDEEEEIKLEINMLKKYSHHRNIATYYGAFIKKSPPGHDDQLWLVMEFCGAGSITDLVKNTKGNTLKEDWIAYISREILRGLAHLHIHHVIHRDIKGQNVLLTENAEVKLDETEYEYSGSEEEEEEVPEQEGEPSSIVNVPGESTLRRDFLRLQQENKERSEALRRQQLLQEQQLREQEEYKRQLLAERQKRIEQQKEQRRRLEEQQRREREARRQQEREQRRREQEEKRRLEELERRRKEEEERRRAEEEKRRVEREQEYIRRQLEEEQRHLEVLQQQLLQEQAMLLECRWREMEEHRQAERLQRQLQQEQAYLLSLQHDHRRPHPQHSQQPPPPQQERSKPSFHAPEPKAHYEPADRAREVPVRTTSRSPVLSRRDSPLQGSGQQNSQAGQRNSTSSIEPRLLWERVEKLVPRPGSGSSSGSSNSGSQPGSHPGSQSGSGERFRVRSSSKSEGSPSQRLENAVKKPEDKKEVFRPLKPAGEVDLTALAKELRAVEDVRPPHKVTDYSSSSEESGTTDEEDDDVEQEGADESTSGPEDTRAASSLNLSNGETESVKTMIVHDDVESEPAMTPSKEGTLIVRQTQSASSTLQKHKSSSSFTPFIDPRLLQISPSSGTTVTSVVGFSCDGMRPEAIRQDPTRKGSVVNVNPTNTRPQSDTPEIRKYKKRFNSEILCAALWGVNLLVGTESGLMLLDRSGQGKVYPLINRRRFQQMDVLEGLNVLVTISGKKDKLRVYYLSWLRNKILHNDPEVEKKQGWTTVGDLEGCVHYKVVKYERIKFLVIALKSSVEVYAWAPKPYHKFMAFKSFGELVHKPLLVDLTVEEGQRLKVIYGSCAGFHAVDVDSGSVYDIYLPTHIQCSIKPHAIIILPNTDGMELLVCYEDEGVYVNTYGRITKDVVLQWGEMPTSVAYIRSNQTMGWGEKAIEIRSVETGHLDGVFMHKRAQRLKFLCERNDKVFFASVRSGGSSQVYFMTLGRTSLLSW

SEQ ID NO: 52625 - protein, 1235 aa, Homo sapiens
  Payload ID: 10484
  Gene Symbol: MAP4K4
  Gene Name: mitogen-activated protein kinase kinase kinase kinase 4
  ENSP ID: ENSP00000313644
MANDSPAKSLVDIDLSSLRDPAGIFELVEVVGNGTYGQVYKGRHVKTGQLAAIKVMDVTEDEEEEIKLEINMLKKYSHHRNIATYYGAFIKKSPPGHDDQLWLVMEFCGAGSITDLVKNTKGNTLKEDWIAYISREILRGLAHLHIHHVIHRDIKGQNVLLTENAEVKLVDFGVSAQLDRTVGRRNTFIGTPYWMAPEVIACDENPDATYDYRSDLWSCGITAIEMAEGAPPLCDMHPMRALFLIPRNPPPRLKSKKWSKKFFSFIEGCLVKNYMQRPSTEQLLKHPFIRDQPNERQVRIQLKDHIDRTRKKRGEKDETEYEYSGSEEEEEEVPEQEGEPSSIVNVPGESTLRRDFLRLQQENKERSEALRRQQLLQEQQLREQEEYKRQLLAERQKRIEQQKEQRRRLEEQQRREREARRQQEREQRRREQEEKRRLEELERRRKEEEERRRAEEEKRRVEREQEYIRRQLEEEQRHLEVLQQQLLQEQAMLLHDHRRPHPQHSQQPPPPQQERSKPSFHAPEPKAHYEPADRAREVQWSHLASLKNNVSPVSRSHSFSDPSPKFAHHHLRSQDPCPPSRSEVLSQSSDSKSEAPDPTQKAWSRSDSDEVPPRVPVRTTSRSPVLSRRDSPLQGSGQQNSQAGQRNSTSSIEPRLLWERVEKLVPRPGSGSSSGSSNSGSQPGSHPGSQSGSGERFRVRSSSKSEGSPSQRLENAVKKPEDKKEVFRPLKPAVRIDLTALAKELRAVEDVRPPHKVTDYSSSSEESGTTDEEDDDVEQEGADESTSGPEDTRAASSLNLSNGETESVKTMIVHDDVESEPAMTPSKEGTLIVRQTQSASSTLQKHKSSSSFTPFIDPRLLQISPSSGTTVTSVVGFSCDGMRPEAIRQDPTRKGSVVNVNPTNTRPQSDTPEIRKYKKRFNSEILCAALWGVNLLVGTESGLMLLDRSGQGKVYPLINRRRFQQMDVLEGLNVLVTISGKKDKLRVYYLSWLRNKILHNDPEVEKKQGWTTVGDLEGCVHYKVVKYERIKFLVIALKSSVEVYAWAPKPYHKFMAFKSFGELVHKPLLVDLTVEEGQRLKVIYGSCAGFHAVDVDSGSVYDIYLPTHIQCSIKPHAIIILPNTDGMELLVCYEDEGVYVNTYGRITKDVVLQWGEMPTSVAYIRSNQTMGWGEKAIEIRSVETGHLDGVFMHKRAQRLKFLCERNDKVFFASVRSGGSSQVYFMTLGRTSLLSW

SEQ ID NO: 52626 - protein, 1239 aa, Homo sapiens
  Payload ID: 10484
  Gene Symbol: MAP4K4
  Gene Name: mitogen-activated protein kinase kinase kinase kinase 4
  Uniprot ID: O95819
  ENSP ID: ENSP00000314363
MANDSPAKSLVDIDLSSLRDPAGIFELVEVVGNGTYGQVYKGRHVKTGQLAAIKVMDVTEDEEEEIKLEINMLKKYSHHRNIATYYGAFIKKSPPGHDDQLWLVMEFCGAGSITDLVKNTKGNTLKEDWIAYISREILRGLAHLHIHHVIHRDIKGQNVLLTENAEVKLVDFGVSAQLDRTVGRRNTFIGTPYWMAPEVIACDENPDATYDYRSDLWSCGITAIEMAEGAPPLCDMHPMRALFLIPRNPPPRLKSKKWSKKFFSFIEGCLVKNYMQRPSTEQLLKHPFIRDQPNERQVRIQLKDHIDRTRKKRGEKDETEYEYSGSEEEEEEVPEQEGEPSSIVNVPGESTLRRDFLRLQQENKERSEALRRQQLLQEQQLREQEEYKRQLLAERQKRIEQQKEQRRRLEEQQRREREARRQQEREQRRREQEEKRRLEELERRRKEEEERRRAEEEKRRVEREQEYIRRQLEEEQRHLEVLQQQLLQEQAMLLECRWREMEEHRQAERLQRQLQQEQAYLLSLQHDHRRPHPQHSQQPPPPQQERSKPSFHAPEPKAHYEPADRAREVEDRFRKTNHSSPEAQSKQTGRVLEPPVPSRSESFSNGNSESVHPALQRPAEPQVPVRTTSRSPVLSRRDSPLQGSGQQNSQAGQRNSTSIEPRLLWERVEKLVPRPGSGSSSGSSNSGSQPGSHPGSQSGSGERFRVRSSSKSEGSPSQRLENAVKKPEDKKEVFRPLKPADLTALAKELRAVEDVRPPHKVTDYSSSSEESGTTDEEDDDVEQEGADESTSGPEDTRAASSLNLSNGETESVKTMIVHDDVESEPAMTPSKEGTLIVRQTQSASSTLQKHKSSSSFTPFIDPRLLQISPSSGTTVTSVVGFSCDGMRPEAIRQDPTRKGSVVNVNPTNTRPQSDTPEIRKYKKRFNSEILCAALWGVNLLVGTESGLMLLDRSGQGKVYPLINRRRFQQMDVLEGLNVLVTISGKKDKLRVYYLSWLRNKILHNDPEVEKKQGWTTVGDLEGCVHYKVVKYERIKFLVIALKSSVEVYAWAPKPYHKFMAFKSFGELVHKPLLVDLTVEEGQRLKVIYGSCAGFHAVDVDSGSVYDIYLPTHIQCSIKPHAIIILPNTDGMELLVCYEDEGVYVNTYGRITKDVVLQWGEMPTSVAYIRSNQTMGWGEKAIEIRSVETGHLDGVFMHKRAQRLKFLCERNDKVFFASVRSGGSSQVYFMTLGRTSLLSW

SEQ ID NO: 52627 - protein, 1273 aa, Homo sapiens
  Payload ID: 10484
  Gene Symbol: MAP4K4
  Gene Name: mitogen-activated protein kinase kinase kinase kinase 4
  ENSP ID: ENSP00000343658
MANDSPAKSLVDIDLSSLRDPAGIFELVEVVGNGTYGQVYKGRHVKTGQLAAIKVMDVTEDEEEEIKLEINMLKKYSHHRNIATYYGAFIKKSPPGHDDQLWLVMEFCGAGSITDLVKNTKGNTLKEDWIAYISREILRGLAHLHIHHVIHRDIKGQNVLLTENAEVKLVDFGVSAQLDRTVGRRNTFIGTPYWMAPEVIACDENPDATYDYRSDLWSCGITAIEMAEGAPPLCDMHPMRALFLIPRNPPPRLKSKKWSKKFFSFIEGCLVKNYMQRPSTEQLLKHPFIRDQPNERQVRIQLKDHIDRTRKKRGEKDETEYEYSGSEEEEEEVPEQEGEPSSIVNVPGESTLRRDFLRLQQENKERSEALRRQQLLQEQQLREQEEYKRQLLAERQKRIEQQKEQRRRLEEQQRREREARRQQEREQRRREQEEKRRLEELERRRKEEEERRRAEEEKRRVEREQEYIRRQLEEEQRHLEVLQQQLLQEQAMLLHDHRRPHPQHSQQPPPPQQERSKPSFHAPEPKAHYEPADRAREVEDRFRKTNHSSPEAQSKQTGRVLEPPVPSRSESFSNGNSESVHPALQRPAEPQVPVRTTSRSPVLSRRDSPLQGSGQQNSQAGQRNSTSSIEPRLLWERVEKLVPRPGSGSSSGSSNSGSQPGSHPGSQSGSGERFRVRSSSKSEGSPSQRLENAVKKPEDKKEVFRPLKPADLTALAKELRAVEDVRPPHKVTDYSSSSEESGTTDEEDDDVEQEGADESTSGPEDTRAASSLNLSNGETESVKTMIVHDDVESEPAMTPSKEGTLIVRQSTVDQKRASHHESNGFAGRIHLLPDLLQQSHSSSTSSTSSSPSSSQPTPTMSPQTPQDKLTANETQSASSTLQKHKSSSSFTPFIDPRLLQISPSSGTTVTSVVGFSCDGMRPEAIRQDPTRKGSVVNVNPTNTRPQSDTPEIRKYKKRFNSEILCAALWGVNLLVGTESGLMLLDRSGQGKVYPLINRRRFQQMDVLEGLNVLVTISGKKDKLRVYYLSWLRNKILHNDPEVEKKQGWTTVGDLEGCVHYKVVKYERIKFLVIALKSSVEVYAWAPKPYHKFMAFKSFGELVHKPLLVDLTVEEGQRLKVIYGSCAGFHAVDVDSGSVYDIYLPTHIQCSIKPHAIIILPNTDGMELLVCYEDEGVYVNTYGRITKDVVLQWGEMPTSVAYIRSNQTMGWGEKAIEIRSVETGHLDGVFMHKRAQRLKFLCERNDKVFFASVRSGGSSQVYFMTLGRTSLLSW

SEQ ID NO: 52628 - protein, 1038 aa, Homo sapiens
  Payload ID: 10484
  Gene Symbol: MAP4K4
  Gene Name: mitogen-activated protein kinase kinase kinase kinase 4
  ENSP ID: ENSP00000387370
MANDSPAKSLVDIDLSSLRDPAGIFELVEVVGNGTYGQVYKGRHVKTGQLAAIKVMDVTEDEEEEIKLEINMLKKYSHHRNIATYYGAFIKKSPPGHDDQLWLVMEFCGAGSITDLVKNTKGNTLKEDWIAYISREILRGLAHLHIHHVIHRDIKGQNVLLTENAEVKLDETEYEYSGSEEEEEEVPEQEGEPSSIVNVPGESTLRRDFLRLQQENKERSEALRRQQLLQEQQLREQEEYKRQLLAERQKRIEQQKEQRRRLEEQQRREREARRQQEREQRRREQEEKRRLEELERRRKEEEERRRAEEEKRRVEREQEYIRRQLEEEQRHLEVLQQQLLQEQAMLLECRWREMEEHRQAERLQRQLQQEQAYLLSLQHDHRRPHPQHSQQPPPPQQERSKPSFHAPEPKAHYEPADRAREVPVRTTSRSPVLSRRDSPLQGSGQQNSQAGQRNSTSIEPRLLWERVEKLVPRPGSGSSSGSSNSGSQPGSHPGSQSGSGERFRVRSSSKSEGSPSQRLENAVKKPEDKKEVFRPLKPADLTALAKELRAVEDVRPPHKVTDYSSSSEESGTTDEEDDDVEQEGADESTSGPEDTRAASSLNLSNGETESVKTMIVHDDVESEPAMTPSKEGTLIVRQTQSASSTLQKHKSSSSFTPFIDPRLLQISPSSGTTVTSVVGFSCDGMRPEAIRQDPTRKGSVVNVNPTNTRPQSDTPEIRKYKKRFNSEILCAALWGVNLLVGTESGLMLLDRSGQGKVYPLINRRRFQQMDVLEGLNVLVTISGKKDKLRVYYLSWLRNKILHNDPEVEKKQGWTTVGDLEGCVHYKVVKYERIKFLVIALKSSVEVYAWAPKPYHKFMAFKSFGELVHKPLLVDLTVEEGQRLKVIYGSCAGFHAVDVDSGSVYDIYLPTHIQCSIKPHAIIILPNTDGMELLVCYEDEGVYVNTYGRITKDVVLQWGEMPTSVAYIRSNQTMGWGEKAIEIRSVETGHLDGVFMHKRAQRLKFLCERNDKVFFASVRSGGSSQVYFMTLGRTSLLSW

SEQ ID NO: 52629 - protein, 1154 aa, Homo sapiens
  Payload ID: 10484
  Gene Symbol: MAP4K4
  Gene Name: mitogen-activated protein kinase kinase kinase kinase 4
  ENSP ID: ENSP00000389752
MANDSPAKSLVDIDLSSLRDPAGIFELVEVVGNGTYGQVYKGRHVKTGQLAAIKVMDVTEDEEEEIKLEINMLKKYSHHRNIATYYGAFIKKSPPGHDDQLWLVMEFCGAGSITDLVKNTKGNTLKEDWIAYISREILRGLAHLHIHHVIHRDIKGQNVLLTENAEVKLVDFGVSAQLDRTVGRRNTFIGTPYWMAPEVIACDENPDATYDYRSDLWSCGITAIEMAEGAPPLCDMHPMRALFLIPRNPPPRLKSKKWSKKFFSFIEGCLVKNYMQRPSTEQLLKHPFIRDQPNERQVRIQLKDHIDRTRKKRGEKDETEYEYSGSEEEEEEVPEQEGEPSSIVNVPGESTLRRDFLRLQQENKERSEALRRQQLLQEQQLREQEEYKRQLLAERQKRIEQQKEQRRRLEEQQRREREARRQQEREQRRREQEEKRRLEELERRRKEEEERRRAEEEKRRVEREQEYIRRQLEEEQRHLEVLQQQLLQEQAMLLHDHRRPHPQHSQQPPPPQQERSKPSFHAPEPKAHYEPADRAREVPVRTTSRSPVLSRRDSPLQGSGQQNSQAGQRNSTSIEPRLLWERVEKLVPRPGSGSSSGSSNSGSQPGSHPGSQSGSGERFRVRSSSKSEGSPSQRLENAVKKPEDKKEVFRPLKPADLTALAKELRAVEDVRPPHKVTDYSSSSEESGTTDEEDDDVEQEGADESTSGPEDTRAASSLNLSNGETESVKTMIVHDDVESEPAMTPSKEGTLIVRQTQSASSTLQKHKSSSSFTPFIDPRLLQISPSSGTTVTSVVGFSCDGMRPEAIRQDPTRKGSVVNVNPTNTRPQSDTPEIRKYKKRFNSEILCAALWGVNLLVGTESGLMLLDRSGQGKVYPLINRRRFQQMDVLEGLNVLVTISGKKDKLRVYYLSWLRNKILHNDPEVEKKQGWTTVGDLEGCVHYKVVKYERIKFLVIALKSSVEVYAWAPKPYHKFMAFKSFGELVHKPLLVDLTVEEGQRLKVIYGSCAGFHAVDVDSGSVYDIYLPTHIQCSIKPHAIIILPNTDGMELLVCYEDEGVYVNTYGRITKDVVLQWGEMPTSVAYIRSNQTMGWGEKAIEIRSVETGHLDGVFMHKRAQRLKFLCERNDKVFFASVRSGGSSQVYFMTLGRTSLLSW

SEQ ID NO: 52630 - protein, 1272 aa, Homo sapiens
  Payload ID: 10484
  Gene Symbol: MAP4K4
  Gene Name: mitogen-activated protein kinase kinase kinase kinase 4
  ENSP ID: ENSP00000392830
MANDSPAKSLVDIDLSSLRDPAGIFELVEVVGNGTYGQVYKGRHVKTGQLAAIKVMDVTEDEEEEIKLEINMLKKYSHHRNIATYYGAFIKKSPPGHDDQLWLVMEFCGAGSITDLVKNTKGNTLKEDWIAYISREILRGLAHLHIHHVIHRDIKGQNVLLTENAEVKLVDFGVSAQLDRTVGRRNTFIGTPYWMAPEVIACDENPDATYDYRSDLWSCGITAIEMAEGAPPLCDMHPMRALFLIPRNPPPRLKSKKWSKKFFSFIEGCLVKNYMQRPSTEQLLKHPFIRDQPNERQVRIQLKDHIDRTRKKRGEKDETEYEYSGSEEEEEEVPEQEGEPSSIVNVPGESTLRRDFLRLQQENKERSEALRRQQLLQEQQLREQEEYKRQLLAERQKRIEQQKEQRRRLEEQQRREREARRQQEREQRRREQEEKRRLEELERRRKEEEERRRAEEEKRRVEREQEYIRRQLEEEQRHLEVLQQQLLQEQAMLLHDHRRPHPQHSQQPPPPQQERSKPSFHAPEPKAHYEPADRAREVEDRFRKTNHSSPEAQSKQTGRVLEPPVPSRSESFSNGNSESVHPALQRPAEPQVPVRTTSRSPVLSRRDSPLQGSGQQNSQAGQRNSTSIEPRLLWERVEKLVPRPGSGSSSGSSNSGSQPGSHPGSQSGSGERFRVRSSSKSEGSPSQRLENAVKKPEDKKEVFRPLKPADLTALAKELRAVEDVRPPHKVTDYSSSSEESGTTDEEDDDVEQEGADESTSGPEDTRAASSLNLSNGETESVKTMIVHDDVESEPAMTPSKEGTLIVRQSTVDQKRASHHESNGFAGRIHLLPDLLQQSHSSSTSSTSSSPSSSQPTPTMSPQTPQDKLTANETQSASSTLQKHKSSSSFTPFIDPRLLQISPSSGTTVTSVVGFSCDGMRPEAIRQDPTRKGSVVNVNPTNTRPQSDTPEIRKYKKRFNSEILCAALWGVNLLVGTESGLMLLDRSGQGKVYPLINRRRFQQMDVLEGLNVLVTISGKKDKLRVYYLSWLRNKILHNDPEVEKKQGWTTVGDLEGCVHYKVVKYERIKFLVIALKSSVEVYAWAPKPYHKFMAFKSFGELVHKPLLVDLTVEEGQRLKVIYGSCAGFHAVDVDSGSVYDIYLPTHIQCSIKPHAIIILPNTDGMELLVCYEDEGVYVNTYGRITKDVVLQWGEMPTSVAYIRSNQTMGWGEKAIEIRSVETGHLDGVFMHKRAQRLKFLCERNDKVFFASVRSGGSSQVYFMTLGRTSLLSW

SEQ ID NO: 52631 - protein, 1056 aa, Homo sapiens
  Payload ID: 10484
  Gene Symbol: MAP4K4
  Gene Name: mitogen-activated protein kinase kinase kinase kinase 4
  ENSP ID: ENSP00000396066
  MOD_RES (1)..(1): Any amino acid
XFFSFIEGCLVKNYMQRPSTEQLLKHPFIRDQPNERQVRIQLKDHIDRTRKKRGEKDETEYEYSGSEEEEEEVPEQEGEPSSIVNVPGESTLRRDFLRLQQENKERSEALRRQQLLQEQQLREQEEYKRQLLAERQKRIEQQKEQRRRLEEQQRREREARRQQEREQRRREQEEKRRLEELERRRKEEEERRRAEEEKRRVEREQEYIRRQLEEEQRHLEVLQQQLLQEQAMLLECRWREMEEHRQAERLQRQLQQEQAYLLSLQHDHRRPHPQHSQQPPPPQQERSKPSFHAPEPKAHYEPADRAREVEDRFRKTNHSSPEAQSKQTGRVLEPPVPSRSESFSNGNSESVHPALQRPAEPQVQWSHLASLKNNVSPVSRSHSFSDPSPKFAHHHLRSQDPCPPSRSEVLSQSSDSKSEAPDPTQKAWSRSDSDEVPPRVPVRTTSRSPVLSRRDSPLQGSGQQNSQAGQRNSTSIEPRLLWERVEKLVPRPGSGSSSGSSNSGSQPGSHPGSQSGSGERFRVRSSSKSEGSPSQRLENAVKKPEDKKEVFRPLKPADLTALAKELRAVEDVRPPHKVTDYSSSSEESGTTDEEDDDVEQEGADESTSGPEDTRAASSLNLSNGETESVKTMIVHDDVESEPAMTPSKEGTLIVRQTQSASSTLQKHKSSSSFTPFIDPRLLQISPSSGTTVTSVVGFSCDGMRPEAIRQDPTRKGSVVNVNPTNTRPQSDTPEIRKYKKRFNSEILCAALWGVNLLVGTESGLMLLDRSGQGKVYPLINRRRFQQMDVLEGLNVLVTISGKKDKLRVYYLSWLRNKILHNDPEVEKKQGWTTVGDLEGCVHYKVVKYERIKFLVIALKSSVEVYAWAPKPYHKFMAFKSFGELVHKPLLVDLTVEEGQRLKVIYGSCAGFHAVDVDSGSVYDIYLPTHIQCSIKPHAIIILPNTDGMELLVCYEDEGVYVNTYGRITKDVVLQWGEMPTSVAYIRSNQTMGWGEKAIEIRSVETGHLDGVFMHKRAQRLKFLCERNDKVFFASVRSGGSSQVYFMTLGRTSLLSW

SEQ ID NO: 52632 - protein, 102 aa, Homo sapiens
  Payload ID: 10484
  Gene Symbol: MAP4K4
  Gene Name: mitogen-activated protein kinase kinase kinase kinase 4
  ENSP ID: ENSP00000403016
MANDSPAKSLVDIDLSSLRDPAGIFELVEVVGNGTYGQVYKGRHVKTGQLAAIKVMDVTEDEEEEIKLEINMLKKYSHHRNIATYYGAFIKKSPPGHDDQLW

SEQ ID NO: 52633 - protein, 1170 aa, Homo sapiens
  Payload ID: 10484
  Gene Symbol: MAP4K4
  Gene Name: mitogen-activated protein kinase kinase kinase kinase 4
  ENSP ID: ENSP00000409720
VYKGRHVKTGQLAAIKVMDVTEDEEEEIKLEINMLKKYSHHRNIATYYGAFIKKSPPGHDDQLWLVMEFCGAGSITDLVKNTKGNTLKEDWIAYISREILRGLAHLHIHHVIHRDIKGQNVLLTENAEVKLVDFGVSAQLDRTVGRRNTFIGTPYWMAPEVIACDENPDATYDYRSDLWSCGITAIEMAEGAPPLCDMHPMRALFLIPRNPPPRLKSKKWSKKFFSFIEGCLVKNYMQRPSTEQLLKHPFIRDQPNERQVRIQLKDHIDRTRKKRGEKDETEYEYSGSEEEEEEVPEQEGEPSSIVNVPGESTLRRDFLRLQQENKERSEALRRQQLLQEQQLREQEEYKRQLLAERQKRIEQQKEQRRRLEEQQRREREARRQQEREQRRREQEEKRRLEELERRRKEEEERRRAEEEKRRVEREQEYIRRQLEEEQRHLEVLQQQLLQEQAMLLHDHRRPHPQHSQQPPPPQQERSKPSFHAPEPKAHYEPADRAREVEDRFRKTNHSSPEAQSKQTGRVLEPPVPSRSESFSNGNSESVHPALQRPAEPQVPVRTTSRSPVLSRRDSPLQGSGQQNSQAGQRNSTSIEPRLLWERVEKLVPRPGSGSSSGSSNSGSQPGSHPGSQSGSGERFRVRSSSKSEGSPSQRLENAVKKPEDKKEVFRPLKPADLTALAKELRAVEDVRPPHKVTDYSSSSEESGTTDEEDDDVEQEGADESTSGPEDTRAASSLNLSNGETESVKTMIVHDDVESEPAMTPSKEGTLIVRQTQSASSTLQKHKSSSSFTPFIDPRLLQISPSSGTTVTSVVGFSCDGMRPEAIRQDPTRKGSVVNVNPTNTRPQSDTPEIRKYKKRFNSEILCAALWGVNLLVGTESGLMLLDRSGQGKVYPLINRRRFQQMDVLEGLNVLVTISGKKDKLRVYYLSWLRNKILHNDPEVEKKQGWTTVGDLEGCVHYKVVKYERIKFLVIALKSSVEVYAWAPKPYHKFMAFKSFGELVHKPLLVDLTVEEGQRLKVIYGSCAGFHAVDVDSGSVYDIYLPTHIQCSIKPHAIIILPNTDGMELLVCYEDEGVYVNTYGRITKDVVLQWGEMPTSVAYIRSNQTMGWGEKAIEIRSVETGHLDGVFMHKRAQRLKFLCERNDKVFFASVRSGGSSQVYFMTLGRTSLLSW

SEQ ID NO: 52634 - protein, 258 aa, Homo sapiens
  Payload ID: 10484
  Gene Symbol: MAP4K4
  Gene Name: mitogen-activated protein kinase kinase kinase kinase 4
  ENSP ID: ENSP00000414766
QQRREREARRQQEREQRRREQEEKRRLEELERRRKEEEERRRAEEEKRRVEREQEYIRRQLEEEQRHLEVLQQQLLQEQAMLLECRWREMEEHRQAERLQRQLQQEQAYLLSLQHDHRRPHPQHSQQPPPPQQERSKPSFHAPEPKAHYEPADRAREVQWSHLASLKNNVSPVSRSHSFSDPSPKFAHHHLRSQDPCPPSRSEVLSQSSDSKSEAPDPTQKAWSRSDSDEVPPRVPVRTTSRSPVLSRRDSPLQGSGQ

SEQ ID NO: 52635 - protein, 1320 aa, Homo sapiens
  Payload ID: 10484
  Gene Symbol: MAP4K4
  Gene Name: mitogen-activated protein kinase kinase kinase kinase 4
  ENSP ID: ENSP00000486116
MANDSPAKSLVDIDLSSLRDPAGIFELVEVVGNGTYGQVYKGRHVKTGQLAAIKVMDVTEDEEEEIKLEINMLKKYSHHRNIATYYGAFIKKSPPGHDDQLWLVMEFCGAGSITDLVKNTKGNTLKEDWIAYISREILRGLAHLHIHHVIHRDIKGQNVLLTENAEVKLVDFGVSAQLDRTVGRRNTFIGTPYWMAPEVIACDENPDATYDYRSDLWSCGITAIEMAEGAPPLCDMHPMRALFLIPRNPPPRLKSKKWSKKFFSFIEGCLVKNYMQRPSTEQLLKHPFIRDQPNERQVRIQLKDHIDRTRKKRGEKDETEYEYSGSEEEEEEVPEQEGEPSSIVNVPGESTLRRDFLRLQQENKERSEALRRQQLLQEQQLREQEEYKRQLLAERQKRIEQQKEQRRRLEEQQRREREARRQQEREQRRREQEEKRRLEELERRRKEEEERRRAEEEKRRVEREQEYIRRQLEEEQRHLEVLQQQLLQEQAMLLECRWREMEEHRQAERLQRQLQQEQAYLLSLQHDHRRPHPQHSQQPPPPQQERSKPSFHAPEPKAHYEPADRAREVEDRFRKTNHSSPEAQSKQTGRVLEPPVPSRSESFSNGNSESVHPALQRPAEPQVQWSHLASLKNNVSPVSRSHSFSDPSPKFAHHHLRSQDPCPPSRSEVLSQSSDSKSEAPDPTQKAWSRSDSDEVPPRVPVRTTSRSPVLSRRDSPLQGSGQQNSQAGQRNSTSSIEPRLLWERVEKLVPRPGSGSSSGSSNSGSQPGSHPGSQSGSGERFRVRSSSKSEGSPSQRLENAVKKPEDKKEVFRPLKPAVRIDLTALAKELRAVEDVRPPHKVTDYSSSSEESGTTDEEDDDVEQEGADESTSGPEDTRAASSLNLSNGETESVKTMIVHDDVESEPAMTPSKEGTLIVRQTQSASSTLQKHKSSSSFTPFIDPRLLQISPSSGTTVTSVVGFSCDGMRPEAIRQDPTRKGSVVNVNPTNTRPQSDTPEIRKYKKRFNSEILCAALWGVNLLVGTESGLMLLDRSGQGKVYPLINRRRFQQMDVLEGLNVLVTISGKKDKLRVYYLSWLRNKILHNDPEVEKKQGWTTVGDLEGCVHYKVVKYERIKFLVIALKSSVEVYAWAPKPYHKFMAFKSFGELVHKPLLVDLTVEEGQRLKVIYGSCAGFHAVDVDSGSVYDIYLPTHIQCSIKPHAIIILPNTDGMELLVCYEDEGVYVNTYGRITKDVVLQWGEMPTSVAYIRSNQTMGWGEKAIEIRSVETGHLDGVFMHKRAQRLKFLCERNDKVFFASVRSGGSSQVYFMTLGRTSLLSW

SEQ ID NO: 52636 - protein, 1044 aa, Homo sapiens [sequence omitted]

SEQ ID NO: 52637 - protein, 1165 aa, Homo sapiens
  Payload ID: 10484
  Gene Symbol: MAP4K4
  Gene Name: mitogen-activated protein kinase kinase kinase kinase 4
  ENSP ID: ENSP00000489579
MANDSPAKSLVDIDLSSLRDPAGIFELVEVVGNGTYGQVYKGRHVKTGQLAAIKVMDVTEDEEEEIKLEINMLKKYSHHRNIATYYGAFIKKSPPGHDDQLWLVMEFCGAGSITDLVKNTKGNTLKEDWIAYISREILRGLAHLHIHHVIHRDIKGQNVLLTENAEVKLVDFGVSAQLDRTVGRRNTFIGTPYWMAPEVIACDENPDATYDYRSDLWSCGITAIEMAEGAPPLCDMHPMRALFLIPRNPPPRLKSKKWSKKFFSFIEGCLVKNYMQRPSTEQLLKHPFIRDQPNERQVRIQLKDHIDRTRKKRGEKDETEYEYSGSEEEEEEVPEQEGEPSSIVNVPGESTLRRDFLRLQQENKERSEALRRQQLLQEQQLREQEEYKRQLLAERQKRIEQQKEQRRRLEEQQRREREARRQQEREQRRREQEEKRRLEELERRRKEEEERRRAEEEKRRVEREQEYIRRQLEEEQRHLEVLQQQLLQEQAMLLHDHRRPHPQHSQQPPPPQQERSKPSFHAPEPKAHYEPADRAREVPVRTTSRSPVLSRRDSPLQGSGQQNSQAGQRNSTSIEPRLLWERVEKLVPRPGSGSSSGSSNSGSQPGSHPGSQSGSGERFRVRSSSKSEGSPSQRLENAVKKPEDKKEVFRPLKPAGEVDLTALAKELRAVEDVRPPHKVTDYSSSSEESGTTDEEDDDVEQEGADESTSGPEDTRAASSLNLSNGETESVKTMIVHDDVESEPAMTPSKEGTLIVRQTQSASSTLQKHKSSSSFTPFIDPRLLQISPSSGTTVTSVVGFSCDGMRPEAIRQDPTRKGSVVNVNPTNTRPQSDTPEIRKYKKRFNSEILCAALWGVNLLVGTESGLMLLDRSGQGKVYPLINRRRFQQMDVLEGLNVLVTISGKKDKLRVYYLSWLRNKILHNDPEVEKKQGWTTVGDLEGCVHYKVVKYERIKFLVIALKSSVEVYAWAPKPYHKFMAFKSFGELVHKPLLVDLTVEEGQRLKVIYGSCAGFHAVDVDSGSVYDIYLPTHVRKNPHSMIQCSIKPHAIIILPNTDGMELLVCYEDEGVYVNTYGRITKDVVLQWGEMPTSVAYIRSNQTMGWGEKAIEIRSVETGHLDGVFMHKRAQRLKFLCERNDKVFFASVRSGGSSQVYFMTLGRTSLLSW

SEQ ID NO: 52638 - protein, 846 aa, Homo sapiens
  Payload ID: 10485
  Gene Symbol: MAP4K5
  Gene Name: mitogen-activated protein kinase kinase kinase kinase 5
  ENSP ID: ENSP00000013125
MEAPLRPAADILRRNPQQDYELVQRVGSGTYGDVYKARNVHTGELAAVKIIKLEPGDDFSLIQQEIFMVKECKHCNIVAYFGSYLSREKLWICMEYCGGGSLQDIYHVTGPLSELQIAYVCRETLQGLAYLHTKGKMHRDIKGANILLTDHGDVKLADFGVAAKITATIAKRKSFIGTPYWMAPEVAAVEKNGGYNQLCDIWAVGITAIELGELQPPMFDLHPMRALFLMSKSNFQPPKLKDKTKWSSTFHNFVKIALTKNPKKRPTAERLLTHTFVAQPGLSRALAVELLDKVNNPDNHAHYTEADDDDFEPHAIIRHTIRSTNRNARAERTASEINFDKLQFEPPLRKETEARDEMGLSSDPNFMLQWNPFVDGANTGKSTSKRAIPPPLPPKPRISSYPEDNFPDEEKASTIKHCPDSESRAPQILRRQSSPSCGPVAETSSIGNGDGISKLMSENTEGSAQAPQLPRKKDKRDFPKPAINGLPPTPKVLMGACFSKVFDGCPLKINCATSWIHPDTKDQYIIFGTEDGIYTLNLNELHEATMEQLFPRKCTWLYVINNTLMSLSVGKTFQLYSHNLIALFEHAKKPGLAAHIQTHRFPDRILPRKFALTTKIPDTKGCHKCCIVRNPYTGHKYLCGALQSGIVLLQWYEPMQKFMLIKHFDFPLPSPLNVFEMLVIPEQEYPMVCVAISKGTESNQVVQFETINLNSASSWFTEIGAGSQQLDSIHVTQLERDTVLVCLDKFVKIVNLQGKLKSSKKLASELSFDFRIESVVCLQDSVLAFWKHGMQGKSFKSDEVTQEISDETRVFRLLGSDRVVVLESRPTENPTAHSNLYILAGHENSY

SEQ ID NO: 52639 - protein, 55 aa, Homo sapiens
  Payload ID: 10485
  Gene Symbol: MAP4K5
  Gene Name: mitogen-activated protein kinase kinase kinase kinase 5
  ENSP ID: ENSP00000451452
MEAPLRPAADILRRNPQQDYELVQRVGSGTYGDVYKARNVHTGELAAVKIIKLEP

SEQ ID NO: 52640 - protein, 62 aa, Homo sapiens
  Payload ID: 10485
  Gene Symbol: MAP4K5
  Gene Name: mitogen-activated protein kinase kinase kinase kinase 5
  ENSP ID: ENSP00000451926
MEAPLRPAADILRRNPQQDYELVQRVGSGTYGDVYKARNVHTGELAAVKIIKLEPGSCLFAY

SEQ ID NO: 52641 - protein, 137 aa, Homo sapiens
  Payload ID: 10485
  Gene Symbol: MAP4K5
  Gene Name: mitogen-activated protein kinase kinase kinase kinase 5
  ENSP ID: ENSP00000451980
MEAPLRPAADILRRNPQQDYELVQRVGSGTYGDVYKARNVHTGELAAVKIIKLEPGDDFSLIQQEIFMVKECKHCNIVAYFGSYLSREKLWICMEYCGGGSLQDIYHVTGPLSELQIAYVCRETLQGLAYLHTKGKM

SEQ ID NO: 52642 - protein, 108 aa, Homo sapiens
  Payload ID: 10485
  Gene Symbol: MAP4K5
  Gene Name: mitogen-activated protein kinase kinase kinase kinase 5
  ENSP ID: ENSP00000452289
MVKECKHCNIVAYFGSYLSREKLWICMEYCGGGSLQDIYHVTGPLSELQIAYVCRETLQGLAYLHTKGKMHRDIKGANILLTDHGDVKLADFGVAAKITATIAKRKSF

SEQ ID NO: 52643 - protein, 482 aa, Homo sapiens
  Payload ID: 10486
  Gene Symbol:
  Gene Name: Mitogen-activated protein kinase kinase kinase MLK4  [Source:UniProtKB/Swiss-Prot
  Acc:Q5TCX8]
  ENSP ID: ENSP00000355581
MFFLVTSDESNKTWGRNTVFRQEEFEDVKRNFKKKGCTWGPNSIQMKDRTDCKERIRPLSDGNSPWSTILIKNQKTMPLASLFVDQPGSCEEPKLSPDGLEHRKPKQIKLPSQAYIDLPLGKDAQRENPAEAESWEEAASANAATVSIEMTPTNSLSRSPQRKKTESALYGCTVLLASVALGLDLRELHKAQAAEEPLPKEEKKKREGIFQRASKSRRSASPPTSLPSTCGEASSPPSLPLSSALGILSTPSFSTKCLLQMDSEDPLVDSAPVTCDSEMLTPDFCPTAPGSGREPALMPRLDTDCSVSRNLPSSFLQQTCGNVPYCASSKHRPSHHRRTMSDGNPTPTGATIISATGASALPLCPSPAPHSHLPREVSPKKHSTVHIVPQRRPASLRSRSDLPQAYPQTAVSQLAQTACVVGRPGPHPTQFLAAKERTKSHVPSLLDADVEGQSRDYTVPLCRMRSKTSRPSIYELEKEFLS

SEQ ID NO: 52644 - protein, 570 aa, Homo sapiens
  Payload ID: 10486
  Gene Symbol:
  Gene Name: Mitogen-activated protein kinase kinase kinase MLK4  [Source:UniProtKB/Swiss-Prot
  Acc:Q5TCX8]
  ENSP ID: ENSP00000355582
MALRGAAGATDTPVSSAGGAPGGSASSSSTSSGGSASAGAGLWAALYDYEARGEDELSLRRGQLVEVLSQDAAVSGDEGWWAGQVQRRLGIFPANYVAPCRPAASPAPPPSRPSSPVHVAFERLELKELIGAGGFGQVYRATWQGQEVAVKAARQDPEQDAAAAAESVRREARLFAMLRHPNIIELRGVCLQQPHLCLVLEFARGGALNRALAAANAAPDPRAPGPRRARRIPPHVLVNWAVQIARGMLYLHEEAFVPILHRDLKSSNILLLEKIEHDDICNKTLKITDFGLAREWHRTTKMSTAGTYAWMAPEVIKSSLFSKGSDIWSYGVLLWELLTGEVPYRGIDGLAVAYGVAVNKLTLPIPSTCPEPFAKLMKECWQQDPHIRPSFALILEQLTAIEGAVMTEMPQESFHSMQDDWKLEIQQMFDELRTKEKELRSREEELTRAALQQKSQEELLKRREQQLAEREIDVLERELNILIFQLNQEKPKVKKRKGKFKRSRLKLKDGHRISLPSDFQHKITVQASPNLDKRRSLNSSSSSPPSSPTMMPRLRAIQCELSALPRGLLC

SEQ ID NO: 52645 - protein, 1036 aa, Homo sapiens
  Payload ID: 10486
  Gene Symbol:
  Gene Name: Mitogen-activated protein kinase kinase kinase MLK4  [Source:UniProtKB/Swiss-Prot
  Acc:Q5TCX8]
  Uniprot ID: Q5TCX8
  ENSP ID: ENSP00000355583
MALRGAAGATDTPVSSAGGAPGGSASSSSTSSGGSASAGAGLWAALYDYEARGEDELSLRRGQLVEVLSQDAAVSGDEGWWAGQVQRRLGIFPANYVAPCRPAASPAPPPSRPSSPVHVAFERLELKELIGAGGFGQVYRATWQGQEVAVKAARQDPEQDAAAAAESVRREARLFAMLRHPNIIELRGVCLQQPHLCLVLEFARGGALNRALAAANAAPDPRAPGPRRARRIPPHVLVNWAVQIARGMLYLHEEAFVPILHRDLKSSNILLLEKIEHDDICNKTLKITDFGLAREWHRTTKMSTAGTYAWMAPEVIKSSLFSKGSDIWSYGVLLWELLTGEVPYRGIDGLAVAYGVAVNKLTLPIPSTCPEPFAKLMKECWQQDPHIRPSFALILEQLTAIEGAVMTEMPQESFHSMQDDWKLEIQQMFDELRTKEKELRSREEELTRAALQQKSQEELLKRREQQLAEREIDVLERELNILIFQLNQEKPKVKKRKGKFKRSRLKLKDGHRISLPSDFQHKITVQASPNLDKRRSLNSSSSSPPSSPTMMPRLRAIQLTSDESNKTWGRNTVFRQEEFEDVKRNFKKKGCTWGPNSIQMKDRTDCKERIRPLSDGNSPWSTILIKNQKTMPLASLFVDQPGSCEEPKLSPDGLEHRKPKQIKLPSQAYIDLPLGKDAQRENPAEAESWEEAASANAATVSIEMTPTNSLSRSPQRKKTESALYGCTVLLASVALGLDLRELHKAQAAEEPLPKEEKKKREGIFQRASKSRRSASPPTSLPSTCGEASSPPSLPLSSALGILSTPSFSTKCLLQMDSEDPLVDSAPVTCDSEMLTPDFCPTAPGSGREPALMPRLDTDCSVSRNLPSSFLQQTCGNVPYCASSKHRPSHHRRTMSDGNPTPTGATIISATGASALPLCPSPAPHSHLPREVSPKKHSTVHIVPQRRPASLRSRSDLPQAYPQTAVSQLAQTACVVGRPGPHPTQFLAAKERTKSHVPSLLDADVEGQSRDYTVPLCRMRSKTSRPSIYELEKEFLS

SEQ ID NO: 52646 - protein, 455 aa, Homo sapiens
  Payload ID: 10487
  Gene Symbol:
  Gene Name: Mitogen-activated protein kinase kinase kinase MLT  [Source:UniProtKB/Swiss-Prot
  Acc:Q9NYL2]
  ENSP ID: ENSP00000340257
MSSLGASFVQIKFDDLQFFENCGGGSFGSVYRAKWISQDKEVAVKKLLKIEKEAEILSVLSHRNIIQFYGVILEPPNYGIVTEYASLGSLYDYINSNRSEEMDMDHIMTWATDVAKGMHYLHMEAPVKVIHRDLKSRNVVIAADGVLKICDFGASRFHNHTTHMSLVGTFPWMAPEVIQSLPVSETCDTYSYGVVLWEMLTREVPFKGLEGLQVAWLVVEKNERLTIPSSCPRSFAELLHQCWEADAKKRPSFKQIISILESMSNDTSLPDKCNSFLHNKAEWRCEIEATLERLKKLERDLSFKEQELKERERRLKMWEQKLTEQSNTPLLLPLAARMSEESYFESKTEESNSAEMSCQITATSNGEGHGMNPSLQAMMLMGFGDIFSMNKAGAVMHSGMQINMQAKQNSSKTTSKRRGKKVNMALGFSDFDLSEGDDDDDDDGEEEDNDMDNSE

SEQ ID NO: 52647 - protein, 800 aa, Homo sapiens
  Payload ID: 10487
  Gene Symbol:
  Gene Name: Mitogen-activated protein kinase kinase kinase MLT  [Source:UniProtKB/Swiss-Prot
  Acc:Q9NYL2]
  Uniprot ID: Q9NYL2
  ENSP ID: ENSP00000364361
MSSLGASFVQIKFDDLQFFENCGGGSFGSVYRAKWISQDKEVAVKKLLKIEKEAEILSVLSHRNIIQFYGVILEPPNYGIVTEYASLGSLYDYINSNRSEEMDMDHIMTWATDVAKGMHYLHMEAPVKVIHRDLKSRNVVIAADGVLKICDFGASRFHNHTTHMSLVGTFPWMAPEVIQSLPVSETCDTYSYGVVLWEMLTREVPFKGLEGLQVAWLVVEKNERLTIPSSCPRSFAELLHQCWEADAKKRPSFKQIISILESMSNDTSLPDKCNSFLHNKAEWRCEIEATLERLKKLERDLSFKEQELKERERRLKMWEQKLTEQSNTPLLPSFEIGAWTEDDVYCWVQQLVRKGDSSAEMSVYASLFKENNITGKRLLLLEEEDLKDMGIVSKGHIIHFKSAIEKLTHDYINLFHFPPLIKDSGGEPEENEEKIVNLELVFGFHLKPGTGPQDCKWKMYMEMDGDEIAITYIKDVTFNTNLPDAEILKMTKPPFVMEKWIVGIAKSQTVECTVTYESDVRTPKSTKHVHSIQWSRTKPQDEVKAVQLAIQTLFTNSDGNPGSRSDSSADCQWLDTLRMRQIASNTSLQRSQSNPILGSPFFSHFDGQDSYAAAVRRPQVPIKYQQITPVNQSRSSSPTQYGLTKNFSSLHLNSRDSGFSSGNTDTSSERGRYSDRSRNKYGRGSISLNSSPRGRYSGKSQHSTPSRGRYPGKFYRVSQSALNPHQSPDFKRSPRDLHQPNTIPGMPLHPETDSRASEEDSKVSEGGWTKVEYRKKPHRPSPAKTNKERARGDHRGWRNF

SEQ ID NO: 52648 - protein, 800 aa, Homo sapiens; identical to SEQ ID NO: 52647
  Payload ID: 10487
  Gene Symbol:
  Gene Name: Mitogen-activated protein kinase kinase kinase MLT  [Source:UniProtKB/Swiss-Prot
  Acc:Q9NYL2]
  Uniprot ID: Q9NYL2
  ENSP ID: ENSP00000387259

SEQ ID NO: 52649 - protein, 138 aa, Homo sapiens
  Payload ID: 10487
  Gene Symbol:
  Gene Name: Mitogen-activated protein kinase kinase kinase MLT  [Source:UniProtKB/Swiss-Prot
  Acc:Q9NYL2]
  ENSP ID: ENSP00000411923
MSSLGASFVQIKFDDLQFFENCGGGSFGSVYRAKWISQDKEVAVKKLLKIEKEAEILSVLSHRNIIQFYGVILEPPNYGIVTEYASLGSLYDYINSNRSEEMDMDHIMTWATDVAKGMHYLHMEAPVKVIHRDLKSRN

SEQ ID NO: 52650 - protein, 455 aa, Homo sapiens; identical to SEQ ID NO: 52646
  Payload ID: 10487
  Gene Symbol:
  Gene Name: Mitogen-activated protein kinase kinase kinase MLT  [Source:UniProtKB/Swiss-Prot
  Acc:Q9NYL2]
  ENSP ID: ENSP00000439414

SEQ ID NO: 52651 - protein, 370 aa, Homo sapiens
  Payload ID: 10488
  Gene Symbol: MAPKAPK2
  Gene Name: mitogen-activated protein kinase-activated protein kinase 2
  Uniprot ID: P49137
  ENSP ID: ENSP00000294981
MLSNSQGQSPPVPFPAPAPPPQPPTPALPHPPAQPPPPPPQQFPQFHVKSGLQIKKNAIIDDYKVTSQVLGLGINGKVLQIFNKRTQEKFALKMLQDCPKARREVELHWRASQCPHIVRIVDVYENLYAGRKCLLIVMECLDGGELFSRIQDRGDQAFTEREASEIMKSIGEAIQYLHSINIAHRDVKPENLLYTSKRPNAILKLTDFGFAKETTSHNSLTTPCYTPYYVAPEVLGPEKYDKSCDMWSLGVIMYILLCGYPPFYSNHGLAISPGMKTRIRMGQYEFPNPEWSEVSEEVKMLIRNLLKTEPTQRMTITEFMNHPWIMQSTKVPQTPLHTSRVLKEDKERWEDVKGCLHDKNSDQATWLTRL

SEQ ID NO: 52652 - protein, 400 aa, Homo sapiens
  Payload ID: 10488
  Gene Symbol: MAPKAPK2
  Gene Name: mitogen-activated protein kinase-activated protein kinase 2
  Uniprot ID: P49137
  ENSP ID: ENSP00000356070
MLSNSQGQSPPVPFPAPAPPPQPPTPALPHPPAQPPPPPPQQFPQFHVKSGLQIKKNAIIDDYKVTSQVLGLGINGKVLQIFNKRTQEKFALKMLQDCPKARREVELHWRASQCPHIVRIVDVYENLYAGRKCLLIVMECLDGGELFSRIQDRGDQAFTEREASEIMKSIGEAIQYLHSINIAHRDVKPENLLYTSKRPNAILKLTDFGFAKETTSHNSLTTPCYTPYYVAPEVLGPEKYDKSCDMWSLGVIMYILLCGYPPFYSNHGLAISPGMKTRIRMGQYEFPNPEWSEVSEEVKMLIRNLLKTEPTQRMTITEFMNHPWIMQSTKVPQTPLHTSRVLKEDKERWEDVKEEMTSALATMRVDYEQIKIKKIEDASNPLLLKRRKKARALEAAALAH

SEQ ID NO: 52653 - protein, 382 aa, Homo sapiens
  Payload ID: 10489
  Gene Symbol: MAPKAPK3
  Gene Name: mitogen-activated protein kinase-activated protein kinase 3
  Uniprot ID: Q16644
  ENSP ID: ENSP00000350639
MDGETAEEQGGPVPPPVAPGGPGLGGAPGGRREPKKYAVTDDYQLSKQVLGLGVNGKVLECFHRRTGQKCALKLLYDSPKARQEVDHHWQASGGPHIVCILDVYENMHHGKRCLLIIMECMEGGELFSRIQERGDQAFTEREAAEIMRDIGTAIQFLHSHNIAHRDVKPENLLYTSKEKDAVLKLTDFGFAKETTQNALQTPCYTPYYVAPEVLGPEKYDKSCDMWSLGVIMYILLCGFPPFYSNTGQAISPGMKRRIRLGQYGFPNPEWSEVSEDAKQLIRLLLKTDPTERLTITQFMNHPWINQSMVVPQTPLHTARVLQEDKDHWDEVKEEMTSALATMRVDYDQVKIKDLKTSNNRLLNKRRKKQAGSSSASQGCNNQ

SEQ ID NO: 52654 - protein, 97 aa, Homo sapiens
  Payload ID: 10489
  Gene Symbol: MAPKAPK3
  Gene Name: mitogen-activated protein kinase-activated protein kinase 3
  ENSP ID: ENSP00000394894
  MOD_RES (1)..(1): Any amino acid
XLGQYGFPNPEWSEVSEDAKQLIRLLLKTDPTERLTITQFMNHPWINEEMTSALATMRVDYDQVKIKDLKTSNNRLLNKRRKKQAGSSSASQGCNNQ

SEQ ID NO: 52655 - protein, 382 aa, Homo sapiens; identical to SEQ ID NO: 52653
  Payload ID: 10489
  Gene Symbol: MAPKAPK3
  Gene Name: mitogen-activated protein kinase-activated protein kinase 3
  Uniprot ID: Q16644
  ENSP ID: ENSP00000396467

SEQ ID NO: 52656 - protein, 119 aa, Homo sapiens
  Payload ID: 10489
  Gene Symbol: MAPKAPK3
  Gene Name: mitogen-activated protein kinase-activated protein kinase 3
  ENSP ID: ENSP00000402045
MDGETAEEQGGPVPPPVAPGGPGLGGAPGGRREPKKYAVTDDYQLSKQVLGLGVNGKVLECFHRRTGQKCALKLLYDSPKARQEVDHHWQASGGPHIVCILDVYENMHHGKRCLLIIME

SEQ ID NO: 52657 - protein, 332 aa, Homo sapiens
  Payload ID: 10489
  Gene Symbol: MAPKAPK3
  Gene Name: mitogen-activated protein kinase-activated protein kinase 3
  ENSP ID: ENSP00000410970
MDGETAEEQGGPVPPPVAPGGPGLGGAPGGRREPKKYAVTDDYQLSKQVLGLGVNGKVLECFHRRTGQKCALKLLYDSPKARQEVDHHWQASGGPHIVCILDVYENMHHGKRCLLIIMECMEGGELFSRIQERGDQAFTEREAAEIMRDIGTAIQFLHSHNIAHRDVKPENLLYTSKEKDAVLKLTDFGFAKETTQNALQTPCYTPYYVAPEVLGPEKYDKSCDMWSLGVIMYILLCGFPPFYSNTGQAISPGMKRRIRLGQYGFPNPEWSEVSEDAKQLIRLLLKTDPTERLTITQFMNHPWINQSMVVPQTPLHTARVLQEDKDHWDEVK

SEQ ID NO: 52658 - protein, 382 aa, Homo sapiens; identical to SEQ ID NO: 52653
  Payload ID: 10489
  Gene Symbol: MAPKAPK3
  Gene Name: mitogen-activated protein kinase-activated protein kinase 3
  Uniprot ID: Q16644
  ENSP ID: ENSP00000478922

SEQ ID NO: 52659 - protein, 74 aa, Homo sapiens
  Payload ID: 10490
  Gene Symbol: MAPKAPK5
  Gene Name: mitogen-activated protein kinase-activated protein kinase 5
  ENSP ID: ENSP00000448408
MSEESDMDKAIKDAPVKLCDFGFAKIDQGDLMTPQFTPYYVAPQVLEAQRRHQKEKSGIIPTSPTPYTYNKSSP

SEQ ID NO: 52660 - protein, 473 aa, Homo sapiens
  Payload ID: 10490
  Gene Symbol: MAPKAPK5
  Gene Name: mitogen-activated protein kinase-activated protein kinase 5
  Uniprot ID: Q8IW41
  ENSP ID: ENSP00000449381
MSEESDMDKAIKETSILEEYSINWTQKLGAGISGPVRVCVKKSTQERFALKILLDRPKARNEVRLHMMCATHPNIVQIIEVFANSVQFPHESSPRARLLIVMEMMEGGELFHRISQHRHFTEKQASQVTKQIALALRHCHLLNIAHRDLKPENLLFKDNSLDAPVKLCDFGFAKIDQGDLMTPQFTPYYVAPQVLEAQRRHQKEKSGIIPTSPTPYTYNKSCDLWSLGVIIYVMLCGYPPFYSKHHSRTIPKDMRRKIMTGSFEFPEEEWSQISEMAKDVVRKLLKVKPEERLTIEGVLDHPWLNSTEALDNVLPSAQLMMDKAVVAGIQQAHAEQLANMRIQDLKVSLKPLHSVNNPILRKRKLLGTKPKDSVYIHDHENGAEDSNVALEKLRDVIAQCILPQAGKGENEDEKLNEVMQEAWKYNRECKLLRDTLQSFSWNGRGFTDKVDRLKLAEIVKQVIEEQTTSHESQ

SEQ ID NO: 52661 - protein, 471 aa, Homo sapiens
  Payload ID: 10490
  Gene Symbol: MAPKAPK5
  Gene Name: mitogen-activated protein kinase-activated protein kinase 5
  Uniprot ID: Q8IW41
  ENSP ID: ENSP00000449667
MSEESDMDKAIKETSILEEYSINWTQKLGAGISGPVRVCVKKSTQERFALKILLDRPKARNEVRLHMMCATHPNIVQIIEVFANSVQFPHESSPRARLLIVMEMMEGGELFHRISQHRHFTEKQASQVTKQIALALRHCHLLNIAHRDLKPENLLFKDNSLDAPVKLCDFGFAKIDQGDLMTPQFTPYYVAPQVLEAQRRHQKEKSGIIPTSPTPYTYNKSCDLWSLGVIIYVMLCGYPPFYSKHHSRTIPKDMRRKIMTGSFEFPEEEWSQISEMAKDVVRKLLKVKPEERLTIEGVLDHPWLNSTEALDNVLPSAQLMMDKAVVAGIQQAHAEQLANMRIQDLKVSLKPLHSVNNPILRKRKLLGTKPKDSVYIHDHENGAEDSNVALEKLRDVIAQCILPQAGENEDEKLNEVMQEAWKYNRECKLLRDTLQSFSWNGRGFTDKVDRLKLAEIVKQVIEEQTTSHESQ

SEQ ID NO: 52662 - protein, 324 aa, Homo sapiens
  Payload ID: 10490
  Gene Symbol: MAPKAPK5
  Gene Name: mitogen-activated protein kinase-activated protein kinase 5
  ENSP ID: ENSP00000473467
MSEESDMDKAIKDAPVKLCDFGFAKIDQGDLMTPQFTPYYVAPQVLEAQRRHQKEKSGIIPTSPTPYTYNKSCDLWSLGVIIYVMLCGYPPFYSKHHSRTIPKDMRRKIMTGSFEFPEEEWSQISEMAKDVVRKLLKVKPEERLTIEGVLDHPWLNSTEALDNVLPSAQLMMDKAVVAGIQQAHAEQLANMRIQDLKVSLKPLHSVNNPILRKRKLLGTKPKDSVYIHDHENGAEDSNVALEKLRDVIAQCILPQAGKGENEDEKLNEVMQEAWKYNRECKLLRDTLQSFSWNGRGFTDKVDRLKLAEIVKQVIEEQTTSHESQ

SEQ ID NO: 52663 - protein, 51 aa, Homo sapiens
  Payload ID: 10490
  Gene Symbol: MAPKAPK5
  Gene Name: mitogen-activated protein kinase-activated protein kinase 5
  ENSP ID: ENSP00000473541
MSEESDMDKAIKAASICFRMVYRTWRVGIYPSLPICLKSAFWKSAVGKRKH

SEQ ID NO: 52664 - protein, 82 aa, Homo sapiens
  Payload ID: 10491
  Gene Symbol: MZT1
  Gene Name: mitotic spindle organizing protein 1
  Uniprot ID: Q08AG7
  ENSP ID: ENSP00000367049
MASSSGAGAAAAAAAANLNAVRETMDVLLEISRILNTGLDMETLSICVRLCEQGINPEALSSVIKELRKATEALKAAENMTS

SEQ ID NO: 52665 - protein, 158 aa, Homo sapiens
  Payload ID: 10492
  Gene Symbol: MZT2A
  Gene Name: mitotic spindle organizing protein 2A
  Uniprot ID: Q6P582
  ENSP ID: ENSP00000311500
MAAQGVGPGPGSAAPPGLEAARQKLALRRKKVLSTEEMELYELAQAAGGGIDPDVFKILVDLLKLNVAPLAVFQMLKSMCAGQRLASEPQDPAAVSLPTSSVPETRGRDKGSAALGGVLALAERSNHEGSSQRMPRQPSATRLPKGGGPGKSPTQGST

SEQ ID NO: 52666 - protein, 140 aa, Homo sapiens
  Payload ID: 10492
  Gene Symbol: MZT2A
  Gene Name: mitotic spindle organizing protein 2A
  ENSP ID: ENSP00000403353
  MOD_RES (1)..(1): Any amino acid
XPPGLEAARQKLALRRKKVLSTEEMELYELAQAAGGGIDPDVFKILVDLLKLNVAPLAVFQMLKSMCAGQRLASEPQDPAAVSLPTSSVPETRGLSDNLRTRRRLNKISHSSYGGQRSSTAWCGRRRRTCTSNWLKLQRH

SEQ ID NO: 52667 - protein, 158 aa, Homo sapiens
  Payload ID: 10493
  Gene Symbol: MZT2B
  Gene Name: mitotic spindle organizing protein 2B
  Uniprot ID: Q6NZ67
  ENSP ID: ENSP00000281871
MAAQGVGPGPGSAAPPGLEAARQKLALRRKKVLSTEEMELYELAQAAGGAIDPDVFKILVDLLKLNVAPLAVFQMLKSMCAGQRLASEPQDPAAVSLPTSSVPETRGRNKGSAALGGALALAERSSREGSSQRMPRQPSATRLPKGGGPGKSPTRGST

SEQ ID NO: 52668 - protein, 218 aa, Homo sapiens
  Payload ID: 10493
  Gene Symbol: MZT2B
  Gene Name: mitotic spindle organizing protein 2B
  ENSP ID: ENSP00000386419
MAAQGVGPGPGSAAPPGLEAARQKLALRRKKVLSTEEMELYELAQAAGGAIDPDVFKILVDLLKLNVAPLAVFQMLKSMCAGQRLASEPQDPAAVSLPTSSVPETREASFLSARNSSPPARPSFSSSPQPAASPVLLHSPAATHSPLSPGPPGSLRLSCCLFSPFAGRNKGSAALGGALALAERSSREGSSQRMPRQPSATRLPKGGGPGKSPTRGST

SEQ ID NO: 52669 - protein, 121 aa, Homo sapiens
  Payload ID: 10493
  Gene Symbol: MZT2B
  Gene Name: mitotic spindle organizing protein 2B
  ENSP ID: ENSP00000387805
VVAASGAPRYFLPSKESACAILVDLLKLNVAPLAVFQMLKSMCAGQRLASEPQDPAAVSLPTSSVPETRGRNKGSAALGGALALAERSSREGSSQRMPRQPSATRLPKGGGPGKSPTRGST

SEQ ID NO: 52670 - protein, 122 aa, Homo sapiens
  Payload ID: 10493
  Gene Symbol: MZT2B
  Gene Name: mitotic spindle organizing protein 2B
  ENSP ID: ENSP00000398749
  MOD_RES (1)..(1): Any amino acid
XGREWSLAECACVVAASGAPRILVDLLKLNVAPLAVFQMLKSMCAGQRLASEPQDPAAVSLPTSSVPETRGRNKGSAALGGALALAERSSREGSSQRMPRQPSATRLPKGGGPGKSPTRGST

SEQ ID NO: 52671 - protein, 120 aa, Homo sapiens
  Payload ID: 10493
  Gene Symbol: MZT2B
  Gene Name: mitotic spindle organizing protein 2B
  ENSP ID: ENSP00000404629
GSAAPPGLEAARQKLALRRKKVLSTEEMELYELAQAAGGAIDPDVFKEKQRQRCPRGSIGPGGTQQPRRIQPEDATPAQRYQAAQGGRAWEEPYTGQHLGWGRDLLHLCPQQRLHVTSFN

SEQ ID NO: 52672 - protein, 679 aa, Homo sapiens
  Payload ID: 10494
  Gene Symbol: MISP
  Gene Name: mitotic spindle positioning
  Uniprot ID: Q8IVT2
  ENSP ID: ENSP00000215582
MDRVTRYPILGIPQAHRGTGLVLDGDTSYTYHLVCMGPEASGWGQDEPQTWPTDHRAQQGVQRQGVSYSVHAYTGQPSPRGLHSENREDEGWQVYRLGARDAHQGRPTWALRPEDGEDKEMKTYRLDAGDADPRRLCDLERERWAVIQGQAVRKSSTVATLQGTPDHGDPRTPGPPRSTPLEENVVDREQIDFLAARQQFLSLEQANKGAPHSSPARGTPAGTTPGASQAPKAFNKPHLANGHVVPIKPQVKGVVREENKVRAVPTWASVQVVDDPGSLASVESPGTPKETPIEREIRLAQEREADLREQRGLRQATDHQELVEIPTRPLLTKLSLITAPRRERGRPSLYVQRDIVQETQREEDHRREGLHVGRASTPDWVSEGPQPGLRRALSSDSILSPAPDARAADPAPEVRKVNRIPPDAYQPYLSPGTPQLEFSAFGAFGKPSSLSTAEAKAATSPKATMSPRHLSESSGKPLSTKQEASKPPRGCPQANRGVVRWEYFRLRPLRFRAPDEPQQAQVPHVWGWEVAGAPALRLQKSQSSDLLERERESVLRREQEVAEERRNALFPEVFSPTPDENSDQNSRSSSQASGITGSYSVSESPFFSPIHLHSNVAWTVEDPVDSAPPGQRKKEQWYAGINPSDGINSEVLEAIRVTRHKNAMAERWESRIYASEEDD

SEQ ID NO: 52673 - protein, 232 aa, Homo sapiens
  Payload ID: 10495
  Gene Symbol: MIXL1
  Gene Name: Mix paired-like homeobox
  Uniprot ID: Q9H2W2
  ENSP ID: ENSP00000355775
MATAESRALQFAEGAAFPAYRAPHAGGALLPPPSPAAALLPAPPAGPGPATFAGFLGRDPGPAPPPPASLGSPAPPKGAAAPSASQRRKRTSFSAEQLQLLELVFRRTRYPDIHLRERLAALTLLPESRIQVWFQNRRAKSRRQSGKSFQPLARPEIILNHCAPGTETKCLKPQLPLEVDVNCLPEPNGVGGGISDSSSQGQNFETCSPLSEDIGSKLDSWEEHIFSAFGNF

SEQ ID NO: 52674 - protein, 240 aa, Homo sapiens
  Payload ID: 10495
  Gene Symbol: MIXL1
  Gene Name: Mix paired-like homeobox
  Uniprot ID: Q9H2W2
  ENSP ID: ENSP00000442439
MATAESRALQFAEGAAFPAYRAPHAGGALLPPPSPAAALLPAPPAGPGPATFAGFLGRDPGPAPPPPASLGSPAPPKGAAAPSASQRRKRTSFSAEQLQLLELVFRRTRYPDIHLRERLAALTLLPESRIQLLFSPLFQVWFQNRRAKSRRQSGKSFQPLARPEIILNHCAPGTETKCLKPQLPLEVDVNCLPEPNGVGGGISDSSSQGQNFETCSPLSEDIGSKLDSWEEHIFSAFGNF

SEQ ID NO: 52675 - protein, 263 aa, Homo sapiens
  Payload ID: 10496
  Gene Symbol: MLKL
  Gene Name: mixed lineage kinase domain-like
  Uniprot ID: Q8NB16
  ENSP ID: ENSP00000303118
MENLKHIITLGQVIHKRCEEMKYCKKQCRRLGHRVLGLIKPLEMLQDQGKRSVPSEKLTTAMNRFKAALEEANGEIEKFSNRSNICRFLTASQDKILFKDVNRKLSDVWKELSLLLQVEQRMPVSPISQGASWAQEDQQDADEDRRAFQMLRRDNEKIEASLRRLEINMKEIKETLRQSLESSSGKSPLEISRFKVKNVKTGSASGCNSEKIRKLVAVKRQQEPLGEDCPSELREIIDECRAHDPSVRPSVDEILKKLSTFSK

SEQ ID NO: 52676 - protein, 471 aa, Homo sapiens
  Payload ID: 10496
  Gene Symbol: MLKL
  Gene Name: mixed lineage kinase domain-like
  Uniprot ID: Q8NB16
  ENSP ID: ENSP00000308351
MENLKHIITLGQVIHKRCEEMKYCKKQCRRLGHRVLGLIKPLEMLQDQGKRSVPSEKLTTAMNRFKAALEEANGEIEKFSNRSNICRFLTASQDKILFKDVNRKLSDVWKELSLLLQVEQRMPVSPISQGASWAQEDQQDADEDRRAFQMLRRDNEKIEASLRRLEINMKEIKETLRQYLPPKCMQEIPQEQIKEIKKEQLSGSPWILLRENEVSTLYKGEYHRAPVAIKVFKKLQAGSIAIVRQTFNKEIKTMKKFESPNILRIFGICIDETVTPPQFSIVMEYCELGTLRELLDREKDLTLGKRMVLVLGAARGLYRLHHSEAPELHGKIRSSNFLVTQGYQVKLAGFELRKTQTSMSLGTTREKTDRVKSTAYLSPQELEDVFYQYDVKSEIYSFGIVLWEIATGDIPFQGCNSEKIRKLVAVKRQQEPLGEDCPSELREIIDECRAHDPSVRPSVDEILKKLSTFSK

SEQ ID NO: 52677 - protein, 211 aa, Homo sapiens
  Payload ID: 10496
  Gene Symbol: MLKL
  Gene Name: mixed lineage kinase domain-like
  ENSP ID: ENSP00000459920
MENLKHIITLGQVIHKRCEEMKYCKKQCRRLGHRVLGLIKPLEMLQDQGKRSVPSEKLTTAMNRFKAALEEANGEIEKFSNRSNICRFLTASQDKILFKDVNRKLSDVWKELSLLLQVEQRMPVSPISQGASWAQEDQQDADEDRRAFQMLRRDNEKIEASLRRLEINMKEIKETLRQYLPPKCMQEIPQEQIKEIKKEQLSGSPWILLRE

SEQ ID NO: 52678 - protein, 102 aa, Homo sapiens
  Payload ID: 10496
  Gene Symbol: MLKL
  Gene Name: mixed lineage kinase domain-like
  ENSP ID: ENSP00000459935
  MOD_RES (1)..(1): Any amino acid
XKNQKLKLPGNSRLPSEALESSSGKSPLEISRFKVKNVKTGSASGCNSEKIRKLVAVKRQQEPLGEDCPSELREIIDECRAHDPSVRPSVDEILKKLSTFSK

SEQ ID NO: 52679 - protein, 175 aa, Homo sapiens
  Payload ID: 10496
  Gene Symbol: MLKL
  Gene Name: mixed lineage kinase domain-like
  ENSP ID: ENSP00000461110
  MOD_RES (1)..(1): Any amino acid
XSDLPPKCMQEIPQEQIKEIKKEQLSGSPWILLRENEVSTLYKGEYHRAPVAIKVFKKLQAGSIAIVRQTFNKEIKTMKKFESPNILRIFGICIDETVTPPQFSIVMEYCELGTLRELLDREKDLTLGKRMVLVLGAARGLYRLHHSEAPELHGKIRSSNFLVTQGYQVKIWVPG

SEQ ID NO: 52680 - protein, 62 aa, Homo sapiens
  Payload ID: 10496
  Gene Symbol: MLKL
  Gene Name: mixed lineage kinase domain-like
  ENSP ID: ENSP00000461666
MKYCKKQCRRLGHRVLGLIKPLEMLQDQGKRSVPSEKLTTAMNRFKAALEEANGEIEKFSNR

SEQ ID NO: 52681 - protein, 1049 aa, Homo sapiens
  Payload ID: 10497
  Gene Symbol: MKL2
  Gene Name: MKL/myocardin-like 2
  Uniprot ID: Q9ULH7
  ENSP ID: ENSP00000339086
MDHTGAIDTEDEVGPLAHLAPSPQSEAVAHEFQELSLQSSQNLPPLNERKNVLQLRLQQRRTREQLVDQGIMPPLKSPAAFHEQIKSLERARTENFLKHKIRSRPDRSELVRMHILEETFAEPSLQATQMKLKRARLADDLNEKIAQRPGPMELVEKNILPVDSSVKEAIIGVGKEDYPHTQGDFSFDEDSSDALSPDQPASQESQGSAASPSEPKVSESPSPVTTNTPAQFASVSPTVPEFLKTPPTADQPPPRPAAPVLPTNTVSSAKPGPALVKQSHPKNPNDKHRSKKCKDPKPRVKKLKYHQYIPPDQKGEKNEPQMDSNYARLLQQQQLFLQLQILSQQKQHYNYQTILPAPFKPLNDKNSNSGNSALNNATPNTPRQNTSTPVRKPGPLPSSLDDLKVSELKTELKLRGLPVSGTKPDLIERLKPYQEVNSSGLAAGGIVAVSSSAIVTSNPEVTVALPVTTLHNTVTSSVSTLKAELPPTGTSNATRVENVHSPLPISPSPSEQSSLSTDDTNMADTFTEIMTMMSPSQFLSSSPLRMTNNEDSLSPTSSTLSNLELDAAEKDRKLQEKEKQIEELKRKLEQEQKLVEVLKMQLEVEKRGQQQRPLEAQPSAPGHSVKSDQKHGSLGSSIKDEASLPDCSSSRQPIPVASHAVGQPVSTGGQTLVAKKAVVIKQEVPVGQAEQQSVVSQFYTSPQAGMQTQPQIATAAQIPTAALASGLAPTVPQTQDTFPQHVLSQPQQVRKVFTNSASSNTVLPYQRHPAPAVQQPFINKASNSVLQSRNAPLPSLQNGPNTPNKPSSPPPPQQFVVQHSLFGSPVAKTKDPPRYEEAIKQTRSTQAPLPEISNAHSQQMDDLFDILIKSGEISLPIKEEPSPISKMRPVTASITTMPVNTVVSRPPPQVQMAPPVSLEPMGSLSASLENQLEAFLDGTLPSANEIPPLQSSSEDREPFSLIEDLQNDLLSHSGMLDHSHSPMETSETQFAAGTPCLSLDLSDSNLDNMEWLDITMPNSSSGLTPLSTTAPSMFSADFLDPQDLPLPWD

SEQ ID NO: 52682 - protein, 70 aa, Homo sapiens
  Payload ID: 10497
  Gene Symbol: MKL2
  Gene Name: MKL/myocardin-like 2
  ENSP ID: ENSP00000458340
MDHTGAIDTEDEVGPLAHLAPSPQSEAVAHEFQELSLQSSQNLPPLNERKNVLQLRLQQRRTREQLVDQG

SEQ ID NO: 52683 - protein, 1049 aa, Homo sapiens; identical to SEQ ID NO: 52681
  Payload ID: 10497
  Gene Symbol: MKL2
  Gene Name: MKL/myocardin-like 2
  Uniprot ID: Q9ULH7
  ENSP ID: ENSP00000459205

SEQ ID NO: 52684 - protein, 191 aa, Homo sapiens
  Payload ID: 10497
  Gene Symbol: MKL2
  Gene Name: MKL/myocardin-like 2
  ENSP ID: ENSP00000459518
  MOD_RES (1)..(1): Any amino acid
XMDDLFDILIKSGEISLPIKEEPSPISKMRPVTASITTMPVNTVVSRPPPQVQMAPPVSLEPMGSLSASLENQLEAFLDGTLPSANEIPPLQSSSEDREPFSLIEDLQNDLLSHSGMLDHSHSPMETSETQFAAGTPCLSLDLSDSNLDNMEWLDITMPNSSSGLTPLSTTAPSMFSADFLDPQDLPLPWD

SEQ ID NO: 52685 - protein, 1099 aa, Homo sapiens
  Payload ID: 10497
  Gene Symbol: MKL2
  Gene Name: MKL/myocardin-like 2
  Uniprot ID: Q9ULH7
  ENSP ID: ENSP00000459626
MDHTGAIDTEDEVGPLAHLAPSPQSEAVAHEFQELSLQSSQNLPPLNERKNVLQLRLQQRRTREQLVDQGIMPPLKSPAAFHEQIKSLERARTENFLKHKIRSRPDRSELVRMHILEETFAEPSLQATQMKLKRARLADDLNEKIAQRPGPMELVEKNILPVDSSVKEAIIGVGKEDYPHTQGDFSFDEDSSDALSPDQPASQESQGSAASPSEPKVSESPSPVTTNTPAQFASVSPTVPEFLKTPPTADQPPPRPAAPVLPTNTVSSAKPGPALVKQSHPKNPNDKHRSKKCKDPKPRVKKLKYHQYIPPDQKGEKNEPQMDSNYARLLQQQQLFLQLQILSQQKQHYNYQTILPAPFKPLNDKNSNSGNSALNNATPNTPRQNTSTPVRKPGPLPSSLDDLKVSELKTELKLRGLPVSGTKPDLIERLKPYQEVNSSGLAAGGIVAVSSSAIVTSNPEVTVALPVTTLHNTVTSSVSTLKAELPPTGTSNATRVENVHSPLPISPSPSEQSSLSTDDTNMADTFTEIMTMMSPSQFLSSSPLRMTNNEDSLSPTSSTLSNLELDAAEKDRKLQEKEKQIEELKRKLEQEQKLVEVLKMQLEVEKRGQQQRPLEAQPSAPGHSVKSDQKHGSLGSSIKDEASLPDCSSSRQPIPVASHAVGQPVSTGGQTLVAKKAVVIKQEVPVGQAEQQSVVSQFYVSSQGQPPPAVVAQPQALLTTQTAQLLLPVSIQGSSVTSVQLPVGSLKLQTSPQAGMQTQPQIATAAQIPTAALASGLAPTVPQTQDTFPQHVLSQPQQVRKVFTNSASSNTVLPYQRHPAPAVQQPFINKASNSVLQSRNAPLPSLQNGPNTPNKPSSPPPPQQFVVQHSLFGSPVAKTKDPPRYEEAIKQTRSTQAPLPEISNAHSQQMDDLFDILIKSGEISLPIKEEPSPISKMRPVTASITTMPVNTVVSRPPPQVQMAPPVSLEPMGSLSASLENQLEAFLDGTLPSANEIPPLQSSSEDREPFSLIEDLQNDLLSHSGMLDHSHSPMETSETQFAAGTPCLSLDLSDSNLDNMEWLDITMPNSSSGLTPLSTTAPSMFSADFLDPQDLPLPWD

SEQ ID NO: 52686 - protein, 369 aa, Homo sapiens
  Payload ID: 10497
  Gene Symbol: MKL2
  Gene Name: MKL/myocardin-like 2
  ENSP ID: ENSP00000459879
MIDSSKKQQQGFPEILTAGDFEPLKEKECLEGSNQKSLKEVLQLRLQQRRTREQLVDQGIMPPLKSPAAFHEQIKSLERARTENFLKHKIRSRPDRSELVRMHILEETFAEPSLQATQMKLKRARLADDLNEKIAQRPGPMELVEKNILPVDSSVKEAIIGVGKEDYPHTQGDFSFDEDSSDALSPDQPASQESQGSAASPSEPKVSESPSPVTTNTPAQFASVSPTVPEFLKTPPTADQPPPRPAAPVLPTNTVSSAKPGPALVKQSHPKNPNDKHRSKKCKDPKPRVKKLKYHQYIPPDQKGEKNEPQMDSNYARLLQQQQLFLQLQILSQQKQHYNYQTILPAPFKYGGAHAILNAGFSVVFYEEL

SEQ ID NO: 52687 - protein, 378 aa, Homo sapiens
  Payload ID: 10497
  Gene Symbol: MKL2
  Gene Name: MKL/myocardin-like 2
  Uniprot ID: Q9ULH7
  ENSP ID: ENSP00000460589
MLQLRLQQRRTREQLVDQGIMPPLKSPAAFHEQIKSLERARTENFLKHKIRSRPDRSELVRMHILEETFAEPSLQATQMKLKRARLADDLNEKIAQRPGPMELVEKNILPVDSSVKEAIIGVGKEDYPHTQGDFSFDEDSSDALSPDQPASQESQGSAASPSEPKVSESPSPVTTNTPAQFASVSPTVPEFLKTPPTADQPPPRPAAPVLPTNTVSSAKPGPALVKQSHPKNPNDKHRSKKCKDPKPRVKKLKYHQYIPPDQKGEKNEPQMDSNYARLLQQQQLFLQLQILSQQKQHYNYQTILPAPFKAYHTVSEVHMVRVACIPFQFLSSKIGSEFLQVRNAFSQLFIQICLLLEHQNSTRCSEKSVSSIIPGINS

SEQ ID NO: 52688 - protein, 52 aa, Homo sapiens
  Payload ID: 10497
  Gene Symbol: MKL2
  Gene Name: MKL/myocardin-like 2
  ENSP ID: ENSP00000460848
IDTEDEVGPLAHLAPSPQSEAVAHEFQELSLQSSQNLPPLNERKNVNIPPCY

SEQ ID NO: 52689 - protein, 223 aa, Homo sapiens
  Payload ID: 10498
  Gene Symbol: MKRN2OS
  Gene Name: MKRN2 opposite strand
  Uniprot ID: H3BPM6
  ENSP ID: ENSP00000455385
MHCAEAGKALIKFNHCEKYIYSFSVPQCCPLCQQDLGSRKLEDAPVSIANPFTNGHQEKCSFLLRPTQGTFLREYDGRSDLHVGITNTNGVVYNYSAHGVQRDGEGWEESISIPLLQPNMYGMMEQWDKYLEDFSTSGAWLPHRYEDNHHNCYSYALTFINCVLMAEGRQQLDKGEFTEKYVVPRTRLASKFITLYRAIREHGFYVTDCPQQQAQPPEGGGLC

SEQ ID NO: 52690 - protein, 76 aa, Homo sapiens
  Payload ID: 10498
  Gene Symbol: MKRN2OS
  Gene Name: MKRN2 opposite strand
  ENSP ID: ENSP00000456723
MHCAEAGKALIKFNHCEKYIYSFSVPQCCPLCQQDLGSRKLEDAPVSIANPFTNGHQEKCSFLLRPTQGTFLRGCV

SEQ ID NO: 52691 - protein, 919 aa, Homo sapiens
  Payload ID: 10499
  Gene Symbol: MLXIP
  Gene Name: MLX interacting protein
  Uniprot ID: Q9HAP2
  ENSP ID: ENSP00000312834
MAADVFMCSPRRPRSRGRQVLLKPQVSEDDDDSDTDEPSPPPASGAATPARAHASAAPPPPRAGPGREEPPRRQQIIHSGHFMVSSPHREHPPKKGYDFDTVNKQTCQTYSFGKTSSCHLSIDASLTKLFECMTLAYSGKLVSPKWKNFKGLKLQWRDKIRLNNAIWRAWYMQYLEKRKNPVCHFVTPLDGSVDVDEHRRPEAITTEGKYWKSRIEIVIREYHKWRTYFKKRLQQHKDEDLSSLVQDDDMLYWHKHGDGWKTPVPMEEDPLLDTDMLMSEFSDTLFSTLSSHQPVAWPNPREIAHLGNADMIQPGLIPLQPNLDFMDTFEPFQDLFSSSRSIFGSMLPASASAPVPDPNNPPAQESILPTTALPTVSLPDSLIAPPTAPSLAHMDEQGCEHTSRTEDPFIQPTDFGPSEPPLSVPQPFLPVFTMPLLSPSPAPPPISPVLPLVPPPATALNPPAPPTFHQPQKFAGVNKAPSVITHTASATLTHDAPATTFSQSQGLVITTHHPAPSAAPCGLALSPVTRPPQPRLTFVHPKPVSLTGGRPKQPHKIVPAPKPEPVSLVLKNARIAPAAFSGQPQAVIMTSGPLKREGMLASTVSQSNVVIAPAAIARAPGVPEFHSSILVTDLGHGTSSPPAPVSRLFPSTAQDPLGKGEQVPLHGGSPQVTVTGPSRDCPNSGQASPCASEQSPSPQSPQNNCSGKSDPKNVAALKNRQMKHISAEQKRRFNIKMCFDMLNSLISNNSKLTSHAITLQKTVEYITKLQQERGQMQEEARRLREEIEELNATIISCQQLLPATGVPVTRRQFDHMKDMFDEYVKTRTLQNWKFWIFSIIIKPLFESFKGMVSTSSLEELHRTALSWLDQHCSLPILRPMVLSTLRQLSTSTSILTDPAQLPEQASKAVTRIGKRLGES

SEQ ID NO: 52692 - protein, 217 aa, Homo sapiens
  Payload ID: 10499
  Gene Symbol: MLXIP
  Gene Name: MLX interacting protein
  Uniprot ID: Q9HAP2
  ENSP ID: ENSP00000366236
MDEQGCEHTSRTEDPFIQPTDFGPSEPPLSVPPPISPVLPLVPPPATALNPPAPPTFHQPQKFAGVNKAPSVITHTASATLTHDAPATTFSQSQGLVITTHHPAPSAAPCGLALSPVTRPPQPRLTFVHPKPVSLTGGRPKQPHKIVPAPKPEPVSLVLKNARIAPGEPGGETQCGAPPDPEGCFPIPKAFKLVTTTTTLVCTCMRTHIHLNETKVS

SEQ ID NO: 52693 - protein, 73 aa, Homo sapiens
  Payload ID: 10499
  Gene Symbol: MLXIP
  Gene Name: MLX interacting protein
  ENSP ID: ENSP00000438206
MLYWHKHGDGWKTPVPMEEDPLLDTDMLMSEFSDTLFSTLSSHQPVAWPNPREIAHLGNADMIQPGLIPLQPN

SEQ ID NO: 52694 - protein, 526 aa, Homo sapiens
  Payload ID: 10499
  Gene Symbol: MLXIP
  Gene Name: MLX interacting protein
  Uniprot ID: Q9HAP2
  ENSP ID: ENSP00000440769
MDEQGCEHTSRTEDPFIQPTDFGPSEPPLSVPQPFLPVFTMPLLSPSPAPPPISPVLPLVPPPATALNPPAPPTFHQPQKFAGVNKAPSVITHTASATLTHDAPATTFSQSQGLVITTHHPAPSAAPCGLALSPVTRPPQPRLTFVHPKPVSLTGGRPKQPHKIVPAPKPEPVSLVLKNARIAPAAFSGQPQAVIMTSGPLKREGMLASTVSQSNVVIAPAAIARAPGVPEFHSSILVTDLGHGTSSPPAPVSRLFPSTAQDPLGKGEQVPLHGGSPQVTVTGPSRDCPNSGQASPCASEQSPSPQSPQNNCSGKSDPKNVAALKNRQMKHISAEQKRRFNIKMCFDMLNSLISNNSKLTSHAITLQKTVEYITKLQQERGQMQEEARRLREEIEELNATIISCQQLLPATGVPVTRRQFDHMKDMFDEYVKTRTLQNWKFWIFSIIIKPLFESFKGMVSTSSLEELHRTALSWLDQHCSLPILRPMVLSTLRQLSTSTSILTDPAQLPEQASKAVTRIGKRLGES

SEQ ID NO: 52695 - protein, 171 aa, Homo sapiens
  Payload ID: 10499
  Gene Symbol: MLXIP
  Gene Name: MLX interacting protein
  ENSP ID: ENSP00000444507
  MOD_RES (1)..(1): Any amino acid
XHGGSPQVTVTGPSRDCPNSGQASPCASEQSPSPQSPQNNCSGKSDPKNVAALKNRQMKHISAEQKRRFNIKMCFDMLNSLISNNSKLTSHAITLQKTVEYITKLQQERGQMQEEARRLREEIEELNATIIDPFSVGRYFPAPGERSTPVQPPSGLQSPAPLRACLFFNHT

SEQ ID NO: 52696 - protein, 308 aa, Homo sapiens
  Payload ID: 10499
  Gene Symbol: MLXIP
  Gene Name: MLX interacting protein
  ENSP ID: ENSP00000445891
MVLGALVALSSCPLGLRTSCLTGREAASAGWARPCGPGLHLNILLILAAAFSGQPQAVIMTSGPLKREGMLASTVSQSNVVIAPAAIARAPGVPEFHSSILVTDLGHGTSSPPAPVSRLFPSTAQDPLGKGEQVPLHGGSPQVTVTGPSRDCPNSGQASPCASEQSPSPQSPQNNCSGKSDPKNVAALKNRQMKHISAEQKRRFNIKMCFDMLNSLISNNSKLTSHAITLQKTVEYITKLQQERGQMQEEARRLREEIEELNATIISCQQLLPATGVPVTRRQFDHMKDMFDEYVKTRTLQNWKFWIV

SEQ ID NO: 52697 - protein, 217 aa, Homo sapiens; identical to SEQ ID NO: 52692
  Payload ID: 10499
  Gene Symbol: MLXIP
  Gene Name: MLX interacting protein
  ENSP ID: ENSP00000486016

SEQ ID NO: 52698 - protein, 171 aa, Homo sapiens; identical to SEQ ID NO: 52695
  Payload ID: 10499
  Gene Symbol: MLXIP
  Gene Name: MLX interacting protein
  ENSP ID: ENSP00000486259
  MOD_RES (1)..(1): Any amino acid

SEQ ID NO: 52699 - protein, 308 aa, Homo sapiens; identical to SEQ ID NO: 52696
  Payload ID: 10499
  Gene Symbol: MLXIP
  Gene Name: MLX interacting protein
  ENSP ID: ENSP00000486484

SEQ ID NO: 52700 - protein, 526 aa, Homo sapiens; identical to SEQ ID NO: 52694
  Payload ID: 10499
  Gene Symbol: MLXIP
  Gene Name: MLX interacting protein
  ENSP ID: ENSP00000486569

SEQ ID NO: 52701 - protein, 73 aa, Homo sapiens; identical to SEQ ID NO: 52693
  Payload ID: 10499
  Gene Symbol: MLXIP
  Gene Name: MLX interacting protein
  ENSP ID: ENSP00000486990

SEQ ID NO: 52702 - protein, 919 aa, Homo sapiens; identical to SEQ ID NO: 52691
  Payload ID: 10499
  Gene Symbol: MLXIP
  Gene Name: MLX interacting protein
  ENSP ID: ENSP00000487003

SEQ ID NO: 52703 - protein, 852 aa, Homo sapiens
  Payload ID: 10500
  Gene Symbol: MLXIPL
  Gene Name: MLX interacting protein-like
  Uniprot ID: Q9NP71
  ENSP ID: ENSP00000320886
MAGALAGLAAGLQVPRVAPSPDSDSDTDSEDPSLRRSAGGLLRSQVIHSGHFMVSSPHSDSLPRRRDQEGSVGPSDFGPRSIDPTLTRLFECLSLAYSGKLVSPKWKNFKGLKLLCRDKIRLNNAIWRAWYIQYVKRRKSPVCGFVTPLQGPEADAHRKPEAVVLEGNYWKRRIEVVMREYHKWRIYYKKRLRKPSREDDLLAPKQAEGRWPPPEQWCKQLFSSVVPVLLGDPEEEPGGRQLLDLNCFLSDISDTLFTMTQSGPSPLQLPPEDAYVGNADMIQPDLTPLQPSLDDFMDISDFFTNSRLPQPPMPSNFPEPPSFSPVVDSLFSSGTLGPEVPPASSAMTHLSGHSRLQARNSCPGPLDSSAFLSSDFLLPEDPKPRLPPPPVPPPLLHYPPPAKVPGLEPCPPPPFPPMAPPTALLQEEPLFSPRFPFPTVPPAPGVSPLPAPAAFPPTPQSVPSPAPTPFPIELLPLGYSEPAFGPCFSMPRGKPPAPSPRGQKASPPTLAPATASPPTTAGSNNPCLTQLLTAAKPEQALEPPLVSSTLLRSPGSPQETVPEFPCTFLPPTPAPTPPRPPPGPATLAPSRPLLVPKAERLSPPAPSGSERRLSGDLSSMPGPGTLSVRVSPPQPILSRGRPDSNKTENRRITHISAEQKRRFNIKLGFDTLHGLVSTLSAQPSLKVSKATTLQKTAEYILMLQQERAGLQEEAQQLRDEIEELNAAINLCQQQLPATGVPITHQRFDQMRDMFDDYVRTRTLHNWKFWVFSILIRPLFESFNGMVSTASVHTLRQTSLAWLDQYCSLPALRPTVLNSLRQLGTSTSILTDPGRIPEQATRAVTEGTLGKPL

SEQ ID NO: 52704 - protein, 575 aa, Homo sapiens
  Payload ID: 10500
  Gene Symbol: MLXIPL
  Gene Name: MLX interacting protein-like
  Uniprot ID: Q9NP71
  ENSP ID: ENSP00000343767
MAGALAGLAAGLQVPRVAPSPDSDSDTDSEDPSLRRSAGGLLRSQVIHSGHFMVSSPHSDSLPRRRDQEGSVGPSDFGPRSIDPTLTRLFECLSLAYSGKLVSPKWKNFKGLKLLCRDKIRLNNAIWRAWYIQYVKRRKSPVCGFVTPLQGPEADAHRKPEAVVLEGNYWKRRIEVVMREYHKWRIYYKKRLRKPSREDDLLAPKQAEGRWPPPEQWCKQLFSSVVPVLLGDPEEEPGGRQLLDLNCFLSDISDTLFTMTQSGPSPLQLPPEDAYVGNADMIQPDLTPLQPSLDDFMDISDFFTNSRLPQPPMPSNFPEPPSFSPVVDSLFSSGTLGPEVPPASSAMTHLSGHSRLQARNSCPGPLDSSAFLSSDFLLPEDPKPRLPPPPVPPPLLHYPPPAKVPGLEPCPPPPFPPMAPPTALLQEEPLFSPRFPFPTVPPAPGVSPLPAPAAFPPTPQSVPSPAPTPFPIELLPLGYSEPAFGPCFSMPRGKPPAPSPRGQKASPPTLAPATASPPTTAGSNNPCLTQLLTAAKPEQALEPPLVSSTLLRSPGSPAVNGGCQGTSAPCQALGL

SEQ ID NO: 52705 - protein, 831 aa, Homo sapiens
  Payload ID: 10500
  Gene Symbol: MLXIPL
  Gene Name: MLX interacting protein-like
  Uniprot ID: Q9NP71
  ENSP ID: ENSP00000346629
MAGALAGLAAGLQVPRVAPSPDSDSDTDSEDPSLRRSAGGLLRSQVIHSGHFMVSSPHSDSLPRRRDQEGSVGPSDFGPRSIDPTLTRLFECLSLAYSGKLVSPKWKNFKGLKLLCRDKIRLNNAIWRAWYIQYVKRRKSPVCGFVTPLQGPEADAHRKPEAVVLEGNYWKRRIEVVMREYHKWRIYYKKRLRKPSREDDLLAPKQAEGRWPPPEQWCKQLFSSVVPVLLGDPEEEPGGRQLLDLNCFLSDISDTLFTMTQSGPSPLQLPPEDAYVGNADMIQPDLTPLQPSLDDFMDISDFFTNSRLPQPPMPSNFPEPPSFSPVVDSLFSSGTLGPEVPPASSAMTHLSGHSRLQARNSCPGPLDSSAFLSSDFLLPEDPKPRLPPPPVPPPLLHYPPPAKVPGLEPCPPPPFPPMAPPTALLQEEPLFSPRFPFPTVPPAPGVSPLPAPAAFPPTPQSVPSPAPTPFPIELLPLGYSEPAFGPCFSMPRGKPPAPSPRGQKASPPTLAPATASPPTTAGSNNPCLTQLLTAAKPEQALEPPLVSSTLLRSPGSPQETVPEFPCTFLPPTPAPTPPRPPPGPATLAPSRPLLVPKAERLSPPAPSGSERRLSGDLSSMPGPGTLSVRVSPPQPILSRGRPDSNKNRRITHISAEQKRRFNIKLGFDTLHGLVSTLSAQPSLKERAGLQEEAQQLRDEIEELNAAINLCQQQLPATGVPITHQRFDQMRDMFDDYVRTRTLHNWKFWVFSILIRPLFESFNGMVSTASVHTLRQTSLAWLDQYCSLPALRPTVLNSLRQLGTSTSILTDPGRIPEQATRAVTEGTLGKPL

SEQ ID NO: 52706 - protein, 721 aa, Homo sapiens
  Payload ID: 10500
  Gene Symbol: MLXIPL
  Gene Name: MLX interacting protein-like
  ENSP ID: ENSP00000392636
MAGALAGLAAGLQVPRVAPSPDSDSDTDSEDPSLRRSAGGLLRSQVIHSGHFMVSSPHSDSLPRRRDQEGSVGPSDFGPRSIDPTLTRLFECLSLAYSGKLVSPKWKNFKGLKLLCRDKIRLNNAIWRAWYIQYVKRRKSPVCGFVTPLQGPEADAHRKPEAVVLEGNYWKRRIELPPEDAYVGNADMIQPDLTPLQPSLDDFMDISDFFTNSRLPQPPMPSNFPEPPSFSPVVDSLFSSGTLGPEVPPASSAMTHLSGHSRLQARNSCPGPLDSSAFLSSDFLLPEDPKPRLPPPPVPPPLLHYPPPAKVPGLEPCPPPPFPPMAPPTALLQEEPLFSPRFPFPTVPPAPGVSPLPAPAAFPPTPQSVPSPAPTPFPIELLPLGYSEPAFGPCFSMPRGKPPAPSPRGQKASPPTLAPATASPPTTAGSNNPCLTQLLTAAKPEQALEPPLVSSTLLRSPGSPETVPEFPCTFLPPTPAPTPPRPPPGPATLAPSRPLLVPKAERLSPPAPSGSERRLSGDLSSMPGPGTLSVRVSPPQPILSRGRPDSNKTENRRITHISAEQKRRFNIKLGFDTLHGLVSTLSAQPSLKVSKATTLQKTAEYILMLQQERAGLQEEAQQLRDEIEELNAAINLCQQQLPATGVPITHQRFDQMRDMFDDYVRTRTLHNWKFWVFSILIRPLFESFNGMVSTASVHTLRQTSLAWLDQYCSLPALRPST

SEQ ID NO: 52707 - protein, 213 aa, Homo sapiens
  Payload ID: 10500
  Gene Symbol: MLXIPL
  Gene Name: MLX interacting protein-like
  ENSP ID: ENSP00000395172
MAGALAGLAAGLQVPRVAPSPDSDSDTDSEDPSLRRSAGGLLRSQVIHSGHFMVSSPHSDSLPRRRDQEGSVGPSDFGPRSIDPTLTRLFECLSLAYSGKLVSPKWKNFKGLKLLCRDKIRLNNAIWRAWYIQYFFTNSRLPQPPMPSNFPEPPSFSPVVDSLFSSGTLGPEVPPASSAMTHLSGHSRLQARNSCPGPLDSSAFLSSDFLLPE

SEQ ID NO: 52708 - protein, 235 aa, Homo sapiens
  Payload ID: 10500
  Gene Symbol: MLXIPL
  Gene Name: MLX interacting protein-like
  ENSP ID: ENSP00000402615
PKWKNFKGLKLLCRDKIRLNNAIWRAWYIQYVKRRKSPVCGFVTPLQGPEADAHRKPEAVVLEGNYWKRRIEVVMREYHKWRIYYKKRVSGGGPGRPQSFPPAAAGYRPPRKIPGKGILTPELAPLGPSIQSRADSATVWPQRLLAASLPRGRLRKPSREDDLLAPKQAEGRWPPPEQWCKQLFSSVVPVLLGDPEEEPGGRQLLDLNCFLSDISDTLFTMTQSGPSPLQLPPED

SEQ ID NO: 52709 - protein, 833 aa, Homo sapiens
  Payload ID: 10500
  Gene Symbol: MLXIPL
  Gene Name: MLX interacting protein-like
  Uniprot ID: Q9NP71
  ENSP ID: ENSP00000406296
MAGALAGLAAGLQVPRVAPSPDSDSDTDSEDPSLRRSAGGLLRSQVIHSGHFMVSSPHSDSLPRRRDQEGSVGPSDFGPRSIDPTLTRLFECLSLAYSGKLVSPKWKNFKGLKLLCRDKIRLNNAIWRAWYIQYVKRRKSPVCGFVTPLQGPEADAHRKPEAVVLEGNYWKRRIEVVMREYHKWRIYYKKRLRKPSREDDLLAPKQAEGRWPPPEQWCKQLFSSVVPVLLGDPEEEPGGRQLLDLNCFLSDISDTLFTMTQSGPSPLQLPPEDAYVGNADMIQPDLTPLQPSLDDFMDISDFFTNSRLPQPPMPSNFPEPPSFSPVVDSLFSSGTLGPEVPPASSAMTHLSGHSRLQARNSCPGPLDSSAFLSSDFLLPEDPKPRLPPPPVPPPLLHYPPPAKVPGLEPCPPPPFPPMAPPTALLQEEPLFSPRFPFPTVPPAPGVSPLPAPAAFPPTPQSVPSPAPTPFPIELLPLGYSEPAFGPCFSMPRGKPPAPSPRGQKASPPTLAPATASPPTTAGSNNPCLTQLLTAAKPEQALEPPLVSSTLLRSPGSPQETVPEFPCTFLPPTPAPTPPRPPPGPATLAPSRPLLVPKAERLSPPAPSGSERRLSGDLSSMPGPGTLSVRVSPPQPILSRGRPDSNKTENRRITHISAEQKRRFNIKLGFDTLHGLVSTLSAQPSLKERAGLQEEAQQLRDEIEELNAAINLCQQQLPATGVPITHQRFDQMRDMFDDYVRTRTLHNWKFWVFSILIRPLFESFNGMVSTASVHTLRQTSLAWLDQYCSLPALRPTVLNSLRQLGTSTSILTDPGRIPEQATRAVTEGTLGKPL

SEQ ID NO: 52710 - protein, 850 aa, Homo sapiens
  Payload ID: 10500
  Gene Symbol: MLXIPL
  Gene Name: MLX interacting protein-like
  Uniprot ID: Q9NP71
  ENSP ID: ENSP00000412330
MAGALAGLAAGLQVPRVAPSPDSDSDTDSEDPSLRRSAGGLLRSQVIHSGHFMVSSPHSDSLPRRRDQEGSVGPSDFGPRSIDPTLTRLFECLSLAYSGKLVSPKWKNFKGLKLLCRDKIRLNNAIWRAWYIQYVKRRKSPVCGFVTPLQGPEADAHRKPEAVVLEGNYWKRRIEVVMREYHKWRIYYKKRLRKPSREDDLLAPKQAEGRWPPPEQWCKQLFSSVVPVLLGDPEEEPGGRQLLDLNCFLSDISDTLFTMTQSGPSPLQLPPEDAYVGNADMIQPDLTPLQPSLDDFMDISDFFTNSRLPQPPMPSNFPEPPSFSPVVDSLFSSGTLGPEVPPASSAMTHLSGHSRLQARNSCPGPLDSSAFLSSDFLLPEDPKPRLPPPPVPPPLLHYPPPAKVPGLEPCPPPPFPPMAPPTALLQEEPLFSPRFPFPTVPPAPGVSPLPAPAAFPPTPQSVPSPAPTPFPIELLPLGYSEPAFGPCFSMPRGKPPAPSPRGQKASPPTLAPATASPPTTAGSNNPCLTQLLTAAKPEQALEPPLVSSTLLRSPGSPQETVPEFPCTFLPPTPAPTPPRPPPGPATLAPSRPLLVPKAERLSPPAPSGSERRLSGDLSSMPGPGTLSVRVSPPQPILSRGRPDSNKNRRITHISAEQKRRFNIKLGFDTLHGLVSTLSAQPSLKVSKATTLQKTAEYILMLQQERAGLQEEAQQLRDEIEELNAAINLCQQQLPATGVPITHQRFDQMRDMFDDYVRTRTLHNWKFWVFSILIRPLFESFNGMVSTASVHTLRQTSLAWLDQYCSLPALRPTVLNSLRQLGTSTSILTDPGRIPEQATRAVTEGTLGKPL

SEQ ID NO: 52711 - protein, 298 aa, Homo sapiens
  Payload ID: 10501
  Gene Symbol: MLX
  Gene Name: MLX, MAX dimerization protein
  Uniprot ID: Q9UH92
  ENSP ID: ENSP00000246912
MTEPGASPEDPWVKASPVGAHAGEGRAGRARARRGAGRRGASLLSPKSPTLSVPRGCREDSSHPACAKVEYAYSDNSLDPGLFVESTRKGSVVSRANSIGSTSASSVPNTDDEDSDYHQEAYKESYKDRRRRAHTQAEQKRRDAIKRGYDDLQTIVPTCQQQDFSIGSQKLSKAIVLQKTIDYIQFLHKEKKKQEEEVSTLRKDVTALKIMKVNYEQIVKAHQDNPHEGEDQVSDQVKFNVFQGIMDSLFQSFNASISVASFQELSACVFSWIEEHCKPQTLREIVIGVLHQLKNQLY

SEQ ID NO: 52712 - protein, 214 aa, Homo sapiens
  Payload ID: 10501
  Gene Symbol: MLX
  Gene Name: MLX, MAX dimerization protein
  Uniprot ID: Q9UH92
  ENSP ID: ENSP00000320913
MTEPGASPEDPWVKVEYAYSDNSLDPDDEDSDYHQEAYKESYKDRRRRAHTQAEQKRRDAIKRGYDDLQTIVPTCQQQDFSIGSQKLSKAIVLQKTIDYIQFLHKEKKKQEEEVSTLRKDVTALKIMKVNYEQIVKAHQDNPHEGEDQVSDQVKFNVFQGIMDSLFQSFNASISVASFQELSACVFSWIEEHCKPQTLREIVIGVLHQLKNQLY

SEQ ID NO: 52713 - protein, 244 aa, Homo sapiens
  Payload ID: 10501
  Gene Symbol: MLX
  Gene Name: MLX, MAX dimerization protein
  Uniprot ID: Q9UH92
  ENSP ID: ENSP00000416627
MTEPGASPEDPWVKVEYAYSDNSLDPGLFVESTRKGSVVSRANSIGSTSASSVPNTDDEDSDYHQEAYKESYKDRRRRAHTQAEQKRRDAIKRGYDDLQTIVPTCQQQDFSIGSQKLSKAIVLQKTIDYIQFLHKEKKKQEEEVSTLRKDVTALKIMKVNYEQIVKAHQDNPHEGEDQVSDQVKFNVFQGIMDSLFQSFNASISVASFQELSACVFSWIEEHCKPQTLREIVIGVLHQLKNQLY

SEQ ID NO: 52714 - protein, 248 aa, Homo sapiens
  Payload ID: 10501
  Gene Symbol: MLX
  Gene Name: MLX, MAX dimerization protein
  ENSP ID: ENSP00000464697
MTEPGASPEDPWVKASPVGAHAGEGRAGRARARRGAGRRGASLLSPKSPTLSVPRGCREDSSHPACAKVEYAYSDNSLDPDDEDSDYHQEAYKESYKDRRRRAHTQAEQKRRDAIKRGYDDLQTIVPTCQQQDFSIGSQKLSKAIVLQKTIDYIQFLHKEKKKQEEEVSTLRKDVTALKIMKVNYEQIVKAHQDNPHEGEDQVSDQVKFNVFQGIMDSLFQSFNASISVASFQELSACVFSWIEEHCK

SEQ ID NO: 52715 - protein, 71 aa, Homo sapiens
  Payload ID: 10502
  Gene Symbol: MMP24-AS1
  Gene Name: MMP24 antisense RNA 1
  ENSP ID: ENSP00000488948
MGAQLSGGRGAPEPAQTQPQPQPQPAAPEGPEQPRHPPQPQPQPQPQPQPEPSPWGPLDDVRFLIACTSWY

SEQ ID NO: 52716 - protein, 71 aa, Homo sapiens; identical to SEQ ID NO: 52715
  Payload ID: 10502
  Gene Symbol: MMP24-AS1
  Gene Name: MMP24 antisense RNA 1
  ENSP ID: ENSP00000489182

SEQ ID NO: 52717 - protein, 71 aa, Homo sapiens; identical to SEQ ID NO: 52715
  Payload ID: 10502
  Gene Symbol: MMP24-AS1
  Gene Name: MMP24 antisense RNA 1
  ENSP ID: ENSP00000489588

SEQ ID NO: 52718 - protein, 932 aa, Homo sapiens
  Payload ID: 10503
  Gene Symbol: MMS19
  Gene Name: MMS19 homolog, cytosolic iron-sulfur assembly component
  Uniprot ID: Q96T76
  ENSP ID: ENSP00000320059
MAAAAAVEAAAPMGALWGLVHDFVVGQQEGPADQVAADVKSGNYTVLQVVEALGSSLENPEPRTRARAIQLLSQVLLHCHTLLLEKEVVHLILFYENRLKDHHLVIPSVLQGLKALSLCVALPPGLAVSVLKAIFQEVHVQSLPQVDRHTVYNIITNFMRTREEELKSLGADFTFGFIQVMDGEKDPRNLLVAFRIVHDLISRDYSLGPFVEELFEVTSCYFPIDFTPPPNDPHGIQREDLILSLRAVLASTPRFAEFLLPLLIEKVDSEVLSAKLDSLQTLNACCAVYGQKELKDFLPSLWASIRRESSQRRTILEMLLGFLKLQQKWSYEDKDQRPLNGFKDQLCSLVFMALTDPSTQLQLVGIRTLTVLGAQPDLLSYEDLELAVGHLYRLSFLKEDSQSCRVAALEASGTLAALYPVAFSSHLVPKLAEELRVGESNLTNGDEPTQCSRHLCCLQALSAVSTHPSIVKETLPLLLQHLWQVNRGNMVAQSSDVIAVCQSLRQMAEKCQQDPESCWYFHQTAIPCLLALAVQASMPEKEPSVLRKVLLEDEVLAAMVSVIGTATTHLSPELAAQSVTHIVPLFLDGNVSFLPENSFPSRFQPFQDGSSGQRRLIALLMAFVCSLPRNVEIPQLNQLMRELLELSCCHSCPFSSTAAAKCFAGLLNKHPAGQQLDEFLQLAVDKVEAGLGSGPCRSQAFTLLLWVTKALVLRYHPLSSCLTARLMGLLSDPELGPAAADGFSLLMSDCTDVLTRAGHAEVRIMFRQRFFTDNVPALVQGFHAAPQDVKPNYLKGLSHVLNRLPKPVLLPELPTLLSLLLEALSCPDCVVQLSTLSCLQPLLLEAPQVMSLHVDTLVTKFLNLSSSPSMAVRIAALQCMHALTRLPTPVLLPYKPQVIRALAKPLDDKKRLVRKEAVSARGEWFLLGSPGS

SEQ ID NO: 52719 - protein, 987 aa, Homo sapiens
  Payload ID: 10503
  Gene Symbol: MMS19
  Gene Name: MMS19 homolog, cytosolic iron-sulfur assembly component
  Uniprot ID: Q96T76
  ENSP ID: ENSP00000348097
MAAAAAVEAAAPMGALWGLVHDFVVGQQEGPADQVAADVKSGNYTVLQVVEALGSSLENPEPRTRARAIQLLSQVLLHCHTLLLEKEVVHLILFYENRLKDHHLVIPSVLQGLKALSLCVALPPGLAVSVLKAIFQEVHVQSLPQVDRHTVYNIITNFMRTREEGPFVEELFEVTSCYFPIDFTPPPNDPHGIQREDLILSLRAVLASTPRFAEFLLPLLIEKVDSEVLSAKLDSLQTLNACCAVYGQKELKDFLPSLWASIRREVFQTASERVEAEGLAALHSLTACLSRSVLRADAEDLLDSFLSNILQDCRHHLCEPDMKLVWPSAKLLQAAAGASARACDSVTSNVLPLLLEQFHKHSQSSQRRTILEMLLGFLKLQQKWSYEDKDQRPLNGFKDQLCSLVFMALTDPSTQLQLVGIRTLTVLGAQPDLLSYEDLELAVGHLYRLSFLKEDSQSCRVAALEASGTLAALYPVAFSSHLVPKLAEELRVGESNLTNGDEPTQCSRHLCCLQALSAVSTHPSIVKETLPLLLQHLWQVNRGNMVAQSSDVIAVCQSLRQMAEKCQQDPESCWYFHQTAIPCLLALAVQASMPEKEPSVLRKVLLEDEVLAAMVSVIGTATTHLSPELAAQSVTHIVPLFLDGNVSFLPENSFPSRFQPFQDGSSGQRRLIALLMAFVCSLPRNVEIPQLNQLMRELLELSCCHSCPFSSTAAAKCFAGLLNKHPAGQQLDEFLQLAVDKVEAGLGSGPCRSQAFTLLLWVTKALVLRYHPLSSCLTARLMGLLSDPELGPAAADGFSLLMSDCTDVLTRAGHAEVRIMFRQRFFTDNVPALVQGFHAAPQDVKPNYLKGLSHVLNRLPKPVLLPELPTLLSLLLEALSCPDCVVQLSTLSCLQPLLLEAPQVMSLHVDTLVTKFLNLSSSPSMAVRIAALQCMHALTRLPTPVLLPYKPQVIRALAKPLDDKKRLVRKEAVSARGEWFLLGSPGS

SEQ ID NO: 52720 - protein, 1030 aa, Homo sapiens
  Payload ID: 10503
  Gene Symbol: MMS19
  Gene Name: MMS19 homolog, cytosolic iron-sulfur assembly component
  Uniprot ID: Q96T76
  ENSP ID: ENSP00000359818
MAAAAAVEAAAPMGALWGLVHDFVVGQQEGPADQVAADVKSGNYTVLQVVEALGSSLENPEPRTRARAIQLLSQVLLHCHTLLLEKEVVHLILFYENRLKDHHLVIPSVLQGLKALSLCVALPPGLAVSVLKAIFQEVHVQSLPQVDRHTVYNIITNFMRTREEELKSLGADFTFGFIQVMDGEKDPRNLLVAFRIVHDLISRDYSLGPFVEELFEVTSCYFPIDFTPPPNDPHGIQREDLILSLRAVLASTPRFAEFLLPLLIEKVDSEVLSAKLDSLQTLNACCAVYGQKELKDFLPSLWASIRREVFQTASERVEAEGLAALHSLTACLSRSVLRADAEDLLDSFLSNILQDCRHHLCEPDMKLVWPSAKLLQAAAGASARACDSVTSNVLPLLLEQFHKHSQSSQRRTILEMLLGFLKLQQKWSYEDKDQRPLNGFKDQLCSLVFMALTDPSTQLQLVGIRTLTVLGAQPDLLSYEDLELAVGHLYRLSFLKEDSQSCRVAALEASGTLAALYPVAFSSHLVPKLAEELRVGESNLTNGDEPTQCSRHLCCLQALSAVSTHPSIVKETLPLLLQHLWQVNRGNMVAQSSDVIAVCQSLRQMAEKCQQDPESCWYFHQTAIPCLLALAVQASMPEKEPSVLRKVLLEDEVLAAMVSVIGTATTHLSPELAAQSVTHIVPLFLDGNVSFLPENSFPSRFQPFQDGSSGQRRLIALLMAFVCSLPRNVEIPQLNQLMRELLELSCCHSCPFSSTAAAKCFAGLLNKHPAGQQLDEFLQLAVDKVEAGLGSGPCRSQAFTLLLWVTKALVLRYHPLSSCLTARLMGLLSDPELGPAAADGFSLLMSDCTDVLTRAGHAEVRIMFRQRFFTDNVPALVQGFHAAPQDVKPNYLKGLSHVLNRLPKPVLLPELPTLLSLLLEALSCPDCVVQLSTLSCLQPLLLEAPQVMSLHVDTLVTKFLNLSSSPSMAVRIAALQCMHALTRLPTPVLLPYKPQVIRALAKPLDDKKRLVRKEAVSARGEWFLLGSPGS

SEQ ID NO: 52721 - protein, 277 aa, Homo sapiens
  Payload ID: 10503
  Gene Symbol: MMS19
  Gene Name: MMS19 homolog, cytosolic iron-sulfur assembly component
  ENSP ID: ENSP00000391765
MAAAAAVEAAAPMGALWGLVHDFVVGQQEGPADQVAADVKSGNYTVLQVVEALGSSLENPEPRTRARAIQLLSQVLLHCHTLLLEKEGAESLIGKKEGRRKKLPCTETERGSKAKRGNSACHRYQLVVHLILFYENRLKDHHLVIPSVLQGLKALSLCVALPPGLAVSVLKAIFQEVHVQSLPQVDRHTVYNIITNFMRTREEELKSLGADFTFGFIQVMDGEKDPRNLLVAFRIVHDLISRDYSLGPFVEELFEVTSCYFPIDFTPPPNDPHGIQR

SEQ ID NO: 52722 - protein, 98 aa, Homo sapiens
  Payload ID: 10503
  Gene Symbol: MMS19
  Gene Name: MMS19 homolog, cytosolic iron-sulfur assembly component
  ENSP ID: ENSP00000393929
AAAAVEAAAPMGALWGLVHDFVVGQQEGPADQVAADVKSGNYTVLQVVEALGSSLENPEPRTRARAIQLLSQVLLHCHTLLLEKEGTGVTNRNVFLDC

SEQ ID NO: 52723 - protein, 40 aa, Homo sapiens
  Payload ID: 10503
  Gene Symbol: MMS19
  Gene Name: MMS19 homolog, cytosolic iron-sulfur assembly component
  Uniprot ID: Q96T76
  ENSP ID: ENSP00000395045
MAAAAAVEAAAPMGALWGLVHDFVVGQQEGPADQVAAGPL

SEQ ID NO: 52724 - protein, 173 aa, Homo sapiens
  Payload ID: 10503
  Gene Symbol: MMS19
  Gene Name: MMS19 homolog, cytosolic iron-sulfur assembly component
  ENSP ID: ENSP00000400028
MAAAAAVEAAAPMGALWGLVHDFVVGQQEGPADQVAADVKSGNYTVLQVVEALGSSLENPEPRTRARAIQLLSQVLLHCHTLLLEKEVVHLILFYENRLKDHHLVIPSVLQGLKALSLCVALPPGLAVSVLKAIFQEVHVQSLPQVDRHTVYNIITNFMRTREEGDGWGKGSP

SEQ ID NO: 52725 - protein, 149 aa, Homo sapiens
  Payload ID: 10503
  Gene Symbol: MMS19
  Gene Name: MMS19 homolog, cytosolic iron-sulfur assembly component
  ENSP ID: ENSP00000402819
LQTLNACCAVYGQKELKDFLPSLWASIRREVFQTASERVEAEGLAALHSLTACLSRSVLRADAEDLLDSFLSNILQDCRHHLCEPDMKLVWPSAKLLQAAAGASARACDSVTSNVLPLLLEQFHKHSQYPLKRYRAASGGQSLKCSWVS

SEQ ID NO: 52726 - protein, 302 aa, Homo sapiens
  Payload ID: 10503
  Gene Symbol: MMS19
  Gene Name: MMS19 homolog, cytosolic iron-sulfur assembly component
  ENSP ID: ENSP00000409425
MAAAAAVEAAAPMGALWGLVHDFVVGQQEGPADQVAADVKSGNYTVLQVVEALGSSLENPEPRTRARAIQLLSQVLLHCHTLLLEKEVVHLILFYENRLKDHHLVIPSVLQGLKALSLCVALPPGLAVSVLKAIFQEVHVQSLPQVDRHTVYNIITNFMRTREEELKSLGADFTFGFIQVMDGEKDPRNLLVAFRIVHDLISRDYSLGPFVEELFEVTSCYFPIDFTPREDLILSLRAVLASTPRFAEFLLPLLIEKVDSEVLSAKLDSLQTLNACCAVYGQKELKDFLPSLWASIRREVFQ

SEQ ID NO: 52727 - protein, 598 aa, Homo sapiens
  Payload ID: 10503
  Gene Symbol: MMS19
  Gene Name: MMS19 homolog, cytosolic iron-sulfur assembly component
  ENSP ID: ENSP00000410008
  MOD_RES (1)..(1): Any amino acid
XWSYEDKDQRPLNGFKDQLCSLVFMALTDPSTQLQLVGIRTLTVLGAQPDLLSYEDLELAVGHLYRLSFLKEDSQSCRVAALEASGTLAALYPVAFSSHLVPKLAEELRVGESNLTNGDEPTQCSRHLCCLQALSAVSTHPSIVKETLPLLLQHLWQVNRGNMVAQSSDVIAVCQSLRQMAEKCQQDPESCWYFHQTAIPCLLALAVQASMPEKEPSVLRKVLLEDEVLAAMVSVIGTATTHLSPELAAQSVTHIVPLFLDGNVSFLPENSFPSRFQPFQDGSSGQRRLIALLMAFVCSLPRNVEIPQLNQLMRELLELSCCHSCPFSSTAAAKCFAGLLNKHPAGQQLDEFLQLAVDKVEAGLGSGPCRSQAFTLLLWVTKALVLRYHPLSSCLTARLMGLLSDPELGPAAADGFSLLMSDCTDVLTRAGHAEVRIMFRQRFFTDNVPALVQGFHAAPQDVKPNYLKGLSHVLNRLPKPVLLPELPTALSCPDCVVQLSTLSCLQPLLLEAPQVMSLHVDTLVTKFLNLSSSPSMAVRIAALQCMHALTRLPTPVLLPYKPQVIRALAKPLDDKKRLVRKEAVSARGEWFLLGSPGS

SEQ ID NO: 52728 - protein, 1030 aa, Homo sapiens; identical to SEQ ID NO: 52720
  Payload ID: 10503
  Gene Symbol: MMS19
  Gene Name: MMS19 homolog, cytosolic iron-sulfur assembly component
  Uniprot ID: Q96T76
  ENSP ID: ENSP00000412698

SEQ ID NO: 52729 - protein, 40 aa, Homo sapiens; identical to SEQ ID NO: 52723
  Payload ID: 10503
  Gene Symbol: MMS19
  Gene Name: MMS19 homolog, cytosolic iron-sulfur assembly component
  Uniprot ID: Q96T76
  ENSP ID: ENSP00000413801

SEQ ID NO: 52730 - protein, 90 aa, Homo sapiens
  Payload ID: 10503
  Gene Symbol: MMS19
  Gene Name: MMS19 homolog, cytosolic iron-sulfur assembly component
  ENSP ID: ENSP00000415326
  MOD_RES (1)..(1): Any amino acid
XVKPNYLKGLSHVLNRLPKPVLLPELPTAVRIAALQCMHALTRLPTPVLLPYKPQVIRALAKPLDDKKRLVRKEAVSARGEWFLLGSPGS

SEQ ID NO: 52731 - protein, 1243 aa, Homo sapiens
  Payload ID: 10504
  Gene Symbol: MMS22L
  Gene Name: MMS22-like, DNA repair protein
  Uniprot ID: Q6ZRQ5
  ENSP ID: ENSP00000275053
MENCSAASTFLTDSLELELGTEWCKPPYFSCAVDNRGGGKHFSGESYLCSGALKRLILNLDPLPTNFEEDTLEIFGIQWVTETALVNSSRELFHLFRQQLYNLETLLQSSCDFGKVSTLHCKADNIRQQCVLFLHYVKVFIFRYLKVQNAESHVPVHPYEALEAQLPSVLIDELHGLLLYIGHLSELPSVNIGAFVNQNQIKLFPPSWHLLHLHLDIHWLVLEILYMLGEKLKQVVYGHQFMNLASDNLTNISLFEEHCETLLCDLISLSLNRYDKVRSSESLMSDQCPCLCIKELWVLLIHLLDHRSKWFVSESFWNWLNKLLKTLLEKSSDRRRSSMPVIQSRDPLGFSWWIITHVASFYKFDRHGVPDEMRKVESNWNFVEELLKKSISVQGVILEEQLRMYLHCCLTLCDFWEPNIAIVTILWEYYSKNLNSSFSISWLPFKGLANTMKSPLSMLEMVKTCCCDKQDQELYKSSSSYTIFLCILAKVVKKAMKSNGPHPWKQVKGRIYSKFHQKRMEELTEVGLQNFFSLFLLLAAVAEVEDVASHVLDLLNFLKPAFVTSQRALIWKGHMAFLLMYAQKNLDIGVLAEKFSCAFREKAKEFLVSKNEEMVQRQTIWTLLSIYIDGVQEVFETSYCLYPSHEKLLNDGFSMLLRACRESELRTVLSFLQAVLARIRSMHQQLCQELQRDNVDLFVQSSLSAKERHLAAVASALWRHFFSFLKSQRMSQVVPFSQLADAAADFTLLAMDMPSTAPSDFQPQPVISIIQLFGWDDIICPQVVARYLSHVLQNSTLCEALSHSGYVSFQALTVRSWIRCVLQMYIKNLSGPDDLLIDKNLEEAVEKEYMKQLVKLTRLLFNLSEVKSIFSKAQVEYLSISEDPKKALVRFFEAVGVTYGNVQTLSDKSAMVTKSLEYLGEVLKYIKPYLGKKVFSAGLQLTYGMMGILVKSWAQIFATSKAQKLLFRIIDCLLLPHAVLQQEKELPAPMLSAIQKSLPLYLQGMCIVCCQSQNPNAYLNQLLGNVIEQYIGRFLPASPYVSDLGQHPVLLALRNTATIPPISSLKKCIVQVIRKSYLEYKGSSPPPRLASILAFILQLFKETNTDIYEVELLLPGILKCLVLVSEPQVKRLATENLQYMVKACQVGSEEEPSSQLTSVFRQFIQDYGMRYYYQVYSILETVATLDQQVVIHLISTLTQSLKDSEQKWGLGRNIAQREAYSKLLSHLGQMGQDEMQRLENDNT

SEQ ID NO: 52732 - protein, 1203 aa, Homo sapiens
  Payload ID: 10504
  Gene Symbol: MMS22L
  Gene Name: MMS22-like, DNA repair protein
  ENSP ID: ENSP00000358254
MENCSAASTFLTDSLELELGTEWCKPPYFSCAVDNRGGGKHFSGESYLCSGALKRLILNLDPLPTNFEEDTLEIFGIQWVTETALVNSSRELFHLFRQQLYNLETLLQSSCDFGKVSTLHCKADNIRQQCVLFLHYVKVFIFRYLKVQNAESHVPVHPYEALEAQLPSVLIDELHGLLLYIGHLSELPSVNIGAFVNQNQIKLFPPSWHLLHLHLDIHWLVLEILYMLGEKLKQVVYGHQFMNLASDNLTNISLFEEHCETLLCDLISLSLNRYDKVRSSESLMSDQCPCLCIKELWVLLIHLLDHRSKWFVSESFWNWLNKLLKTLLEKSSDRRRSSMPVIQSRDPLGFSWWIITHVASFYKFDRHGVPDEMRKVESNWNFVEELLKKSISVQNSSFSISWLPFKGLANTMKSPLSMLEMVKTCCCDKQDQELYKSSSSYTIFLCILAKVVKKAMKSNGPHPWKQVKGRIYSKFHQKRMEELTEVGLQNFFSLFLLLAAVAEVEDVASHVLDLLNFLKPAFVTSQRALIWKGHMAFLLMYAQKNLDIGVLAEKFSCAFREKAKEFLVSKNEEMVQRQTIWTLLSIYIDGVQEVFETSYCLYPSHEKLLNDGFSMLLRACRESELRTVLSFLQAVLARIRSMHQQLCQELQRDNVDLFVQSSLSAKERHLAAVASALWRHFFSFLKSQRMSQVVPFSQLADAAADFTLLAMDMPSTAPSDFQPQPVISIIQLFGWDDIICPQVVARYLSHVLQNSTLCEALSHSGYVSFQALTVRSWIRCVLQMYIKNLSGPDDLLIDKNLEEAVEKEYMKQLVKLTRLLFNLSEVKSIFSKAQVEYLSISEDPKKALVRFFEAVGVTYGNVQTLSDKSAMVTKSLEYLGEVLKYIKPYLGKKVFSAGLQLTYGMMGILVKSWAQIFATSKAQKLLFRIIDCLLLPHAVLQQEKELPAPMLSAIQKSLPLYLQGMCIVCCQSQNPNAYLNQLLGNVIEQYIGRFLPASPYVSDLGQHPVLLALRNTATIPPISSLKKCIVQVIRKSYLEYKGSSPPPRLASILAFILQLFKETNTDIYEVELLLPGILKCLVLVSEPQVKRLATENLQYMVKACQVGSEEEPSSQLTSVFRQFIQDYGMRYYYQVYSILETVATLDQQVVIHLISTLTQSLKDSEQKWGLGRNIAQREAYSKLLSHLGQMGQDEMQRLENDNT

SEQ ID NO: 52733 - protein, 88 aa, Homo sapiens
  Payload ID: 10504
  Gene Symbol: MMS22L
  Gene Name: MMS22-like, DNA repair protein
  ENSP ID: ENSP00000421225
KWFVSESFWNWLNKLLKTLLEKSSDRRRSSMPVIQSRDPLGFSWWIITHVASFYKFDRHGVPDEMRKVESNWNFVEELLKKSISVQSC

SEQ ID NO: 52734 - protein, 140 aa, Homo sapiens
  Payload ID: 10504
  Gene Symbol: MMS22L
  Gene Name: MMS22-like, DNA repair protein
  ENSP ID: ENSP00000422045
MENCSAASTFLTDSLELELGTEWCKPPYFSCAVDNRGGGKHFSGESYLCSGALKRLILNLDPLPTNFEEDTLEIFGIQWVTETALVNSSRELFHLFRQQLYNLETLLQSSCDFAFSTVMAFITSPLGYTLAGARNSLHAG

SEQ ID NO: 52735 - protein, 203 aa, Homo sapiens
  Payload ID: 10504
  Gene Symbol: MMS22L
  Gene Name: MMS22-like, DNA repair protein
  ENSP ID: ENSP00000422627
MENCSAASTFLTDSLELELGTEWCKPPYFSCAVDNRGGGKHFSGESYLCSGALKRLILNLDPLPTNFEEDTLEIFGIQWVTETALVNSSRELFHLFRQQLYNLETLLQSSCDFGKVSTLHCKADNIRQQCVLFLHYVKVFIFRYLKVQNAESHVPVHPYEALEAQLPSVLIDELHGLLLYIGHLSELPSVNIGAFVNQNQIKL

SEQ ID NO: 52736 - protein, 322 aa, Homo sapiens
  Payload ID: 10504
  Gene Symbol: MMS22L
  Gene Name: MMS22-like, DNA repair protein
  ENSP ID: ENSP00000427288
FGIQWVTETALVNSSRELFHLFRQQLYNLETLLQSSCDFGKVSTLHCKADNIRQQCVLFLHYVKVFIFRYLKVQNAESHVPVHPYEALEAQLPSVLIDELHGLLLYIGHLSELPSVNIGAFVNQNQIKLFPPSWHLLHLHLDIHWLVLEILYMLGEKLKQVVYGHQFMNLASDNLTNISLFEEHCETLLCDLISLSLNRYDKSFWNWLNKLLKTLLEKSSDRRRSSMPVIQSRDPLGFSWWIITHVASFYKFDRHGVPDEMRKVESNWNFVEELLKKSISVQGVILEEQLRMYLHCCLTLCDFWEPNIAIVTILWEYYSKNL

SEQ ID NO: 52737 - protein, 309 aa, Homo sapiens
  Payload ID: 10505
  Gene Symbol: MNAT1
  Gene Name: MNAT CDK-activating kinase assembly factor 1
  Uniprot ID: P51948
  ENSP ID: ENSP00000261245
MDDQGCPRCKTTKYRNPSLKLMVNVCGHTLCESCVDLLFVRGAGNCPECGTPLRKSNFRVQLFEDPTVDKEVEIRKKVLKIYNKREEDFPSLREYNDFLEEVEEIVFNLTNNVDLDNTKKKMEIYQKENKDVIQKNKLKLTREQEELEEALEVERQENEQRRLFIQKEEQLQQILKRKNKQAFLDELESSDLPVALLLAQHKDRSTQLEMQLEKPKPVKPVTFSTGIKMGQHISLAPIHKLEEALYEYQPLQIETYGPHVPELEMLGRLGYLNHVRAASPQDLAGGYTSSLACHRALQDAFSGLFWQPS

SEQ ID NO: 52738 - protein, 267 aa, Homo sapiens
  Payload ID: 10505
  Gene Symbol: MNAT1
  Gene Name: MNAT CDK-activating kinase assembly factor 1
  Uniprot ID: P51948
  ENSP ID: ENSP00000446437
MDDQGCPRCKTTKYRNPSLKLMVNVCGHTLCESCVDLLFVRGAGNCPECGTPLRKSNFRVQLFEDPTVDKEVEIRKKVLKIYNKREEDFPSLREYNDFLEEVEEIVFNLTNNVDLDNTKKKMEIYQKENKDVIQKNKLKLTREQEELEEALEVERQENEQRRLFIQKEEQLQQILKRKNKQAFLDELGQHISLAPIHKLEEALYEYQPLQIETYGPHVPELEMLGRLGYLNHVRAASPQDLAGGYTSSLACHRALQDAFSGLFWQPS

SEQ ID NO: 52739 - protein, 169 aa, Homo sapiens
  Payload ID: 10505
  Gene Symbol: MNAT1
  Gene Name: MNAT CDK-activating kinase assembly factor 1
  ENSP ID: ENSP00000451017
TREQEELEEALEVERQENEQRRLFIQKEEQLQQILKRKNKQAFLDELESSDLPVALLLAQHKDRSTQLEMQLEKPKPVKPVTFSTGIKMGQHISLAPIHKLEEALYEYQPLQIETYGPHVPELEMLGRLGYLNHVRAASPQDLAGGYTSSLACHRALQDAFSGLFWQPS

SEQ ID NO: 52740 - protein, 173 aa, Homo sapiens
  Payload ID: 10505
  Gene Symbol: MNAT1
  Gene Name: MNAT CDK-activating kinase assembly factor 1
  ENSP ID: ENSP00000451379
VFNLTNNVDLDNTKKKMEIYQKENKDVIQKNKLKLTREQEELEEALEVERQENEQRRLFIQKEEQLQQILKRKNKQAFLDELESSDLPVALLLAQHKDRSTQLEMQLEKPKPVKPVTFSTGIKMGQHISLAPIHKLEEALYEYQPLQIETYGPHVPELEMLGRLGGFDTISLI

SEQ ID NO: 52741 - protein, 193 aa, Homo sapiens
  Payload ID: 10506
  Gene Symbol: MOB4
  Gene Name: MOB family member 4, phocein
  Uniprot ID: Q9Y3A3
  ENSP ID: ENSP00000233892
MDSTLAVQQYIQQNIRADCSNIDKILEPPEGQDEGVWKYEHLRQFCLELNGLAVKLQSECHPDTCTQMTATEQWIFLCAAHKTPKECPAIDYTRHTLDGAACLLNSNKYFPSRVSIKESSVAKLGSVCRRIYRIFSHAYFHHRQIFDEYENETFLCHRFTKFVMKYNLMSKDNLIVPILEEEVQNSVSGESEA

SEQ ID NO: 52742 - protein, 225 aa, Homo sapiens
  Payload ID: 10506
  Gene Symbol: MOB4
  Gene Name: MOB family member 4, phocein
  Uniprot ID: Q9Y3A3
  ENSP ID: ENSP00000315702
MVMAEGTAVLRRNRPGTKAQDFYNWPDESFDEMDSTLAVQQYIQQNIRADCSNIDKILEPPEGQDEGVWKYEHLRQFCLELNGLAVKLQSECHPDTCTQMTATEQWIFLCAAHKTPKECPAIDYTRHTLDGAACLLNSNKYFPSRVSIKESSVAKLGSVCRRIYRIFSHAYFHHRQIFDEYENETFLCHRFTKFVMKYNLMSKDNLIVPILEEEVQNSVSGESEA

SEQ ID NO: 52743 - protein, 51 aa, Homo sapiens
  Payload ID: 10506
  Gene Symbol: MOB4
  Gene Name: MOB family member 4, phocein
  ENSP ID: ENSP00000387043
MVMAEGTAVLRRNRPGTKAQYIQQNIRADCSNIDKILEPPEGQDEGSSALS

SEQ ID NO: 52744 - protein, 126 aa, Homo sapiens
  Payload ID: 10506
  Gene Symbol: MOB4
  Gene Name: MOB family member 4, phocein
  ENSP ID: ENSP00000387240
MTATEQWIFLCAAHKTPKECPAIDYTRHTLDGAACLLNSNKYFPSRVSIKESSVAKLGSVCRRIYRIFSHAYFHHRQIFDEYENETFLCHRFTKFVMKYNLMSKDNLIVPILEEEVQNSVSGESEA

SEQ ID NO: 52745 - protein, 193 aa, Homo sapiens; identical to SEQ ID NO: 52741
  Payload ID: 10506
  Gene Symbol: MOB4
  Gene Name: MOB family member 4, phocein
  Uniprot ID: Q9Y3A3
  ENSP ID: ENSP00000387289

SEQ ID NO: 52746 - protein, 45 aa, Homo sapiens
  Payload ID: 10506
  Gene Symbol: MOB4
  Gene Name: MOB family member 4, phocein
  ENSP ID: ENSP00000397052
MVMAEGTAVLRRNRPGTKAQDFYNWPDESFDEMDSTLAVQQAVLP

SEQ ID NO: 52747 - protein, 204 aa, Homo sapiens
  Payload ID: 10506
  Gene Symbol: MOB4
  Gene Name: MOB family member 4, phocein
  Uniprot ID: Q9Y3A3
  ENSP ID: ENSP00000405354
MVMAEGTAVLRRNRPGTKAQYIQQNIRADCSNIDKILEPPEGQDEGVWKYEHLRQFCLELNGLAVKLQSECHPDTCTQMTATEQWIFLCAAHKTPKECPAIDYTRHTLDGAACLLNSNKYFPSRVSIKESSVAKLGSVCRRIYRIFSHAYFHHRQIFDEYENETFLCHRFTKFVMKYNLMSKDNLIVPILEEEVQNSVSGESEA

SEQ ID NO: 52748 - protein, 216 aa, Homo sapiens
  Payload ID: 10507
  Gene Symbol: MOB1A
  Gene Name: MOB kinase activator 1A
  Uniprot ID: Q9H8S9
  ENSP ID: ENSP00000379364
MSFLFSSRSSKTFKPKKNIPEGSHQYELLKHAEATLGSGNLRQAVMLPEGEDLNEWIAVNTVDFFNQINMLYGTITEFCTEASCPVMSAGPRYEYHWADGTNIKKPIKCSAPKYIDYLMTWVQDQLDDETLFPSKIGVPFPKNFMSVAKTILKRLFRVYAHIYHQHFDSVMQLQEEAHLNTSFKHFIFFVQEFNLIDRRELAPLQELIEKLGSKDR

SEQ ID NO: 52749 - protein, 216 aa, Homo sapiens
  Payload ID: 10508
  Gene Symbol: MOB1B
  Gene Name: MOB kinase activator 1B
  Uniprot ID: Q7L9L4
  ENSP ID: ENSP00000310189
MSFLFGSRSSKTFKPKKNIPEGSHQYELLKHAEATLGSGNLRMAVMLPEGEDLNEWVAVNTVDFFNQINMLYGTITDFCTEESCPVMSAGPKYEYHWADGTNIKKPIKCSAPKYIDYLMTWVQDQLDDETLFPSKIGVPFPKNFMSVAKTILKRLFRVYAHIYHQHFDPVIQLQEEAHLNTSFKHFIFFVQEFNLIDRRELAPLQELIEKLTSKDR

SEQ ID NO: 52750 - protein, 221 aa, Homo sapiens
  Payload ID: 10508
  Gene Symbol: MOB1B
  Gene Name: MOB kinase activator 1B
  Uniprot ID: Q7L9L4
  ENSP ID: ENSP00000379366
MEGATDVNESGSRSSKTFKPKKNIPEGSHQYELLKHAEATLGSGNLRMAVMLPEGEDLNEWVAVNTVDFFNQINMLYGTITDFCTEESCPVMSAGPKYEYHWADGTNIKKPIKCSAPKYIDYLMTWVQDQLDDETLFPSKIGVPFPKNFMSVAKTILKRLFRVYAHIYHQHFDPVIQLQEEAHLNTSFKHFIFFVQEFNLIDRRELAPLQELIEKLTSKDR

SEQ ID NO: 52751 - protein, 130 aa, Homo sapiens
  Payload ID: 10508
  Gene Symbol: MOB1B
  Gene Name: MOB kinase activator 1B
  ENSP ID: ENSP00000427216
MEGATDVNESGSRSSKTFKPKKNIPEGSHQYELLKHAEATLGSGNLRMAVMLPEGEDLNEWVAVNTVDFFNQINMLYGTITDFCTEESCPVMSAGPKYEYHWADGTNIKKPIKCSAPKYIDYLMTWVQDQ

SEQ ID NO: 52752 - protein, 268 aa, Homo sapiens
  Payload ID: 10509
  Gene Symbol: MOB2
  Gene Name: MOB kinase activator 2
  Uniprot ID: Q70IA6
  ENSP ID: ENSP00000328694
MLGDHCSLPEDQARPGQSLQSGLCCKMVLQAVSKVLRKSKAKPNGKKPAAEERKAYLEPEHTKARITDFQFKELVVLPREIDLNEWLASNTTTFFHHINLQYSTISEFCTGETCQTMAVCNTQYYWYDERGKKVKCTAPQYVDFVMSSVQKLVTDEDVFPTKYGREFPSSFESLVRKICRHLFHVLAHIYWAHFKETLALELHGHLNTLYVHFILFAREFNLLDPKETAIMDDLTEVLCSGAGGVHSGGSGDGAGSGGPGAQNHVKER

SEQ ID NO: 52753 - protein, 236 aa, Homo sapiens
  Payload ID: 10509
  Gene Symbol: MOB2
  Gene Name: MOB kinase activator 2
  ENSP ID: ENSP00000479647
GWRTWKSKAKPNGKKPAAEERKAYLEPEHTKARITDFQFKELVVLPREIDLNEWLASNTTTFFHHINLQYSTISEFCTGETCQTMAVCNTQYYWYDERGKKVKCTAPQYVDFVMSSVQKLVTDEDVFPTKYGREFPSSFESLVRKICRHLFHVLAHIYWAHFKETLALELHGHLNTLYVHFILFAREFNLLDPKETAIMDDLTEVLCSGAGGVHSGGSGDGAGSGGPGAQNHVKER

SEQ ID NO: 52754 - protein, 217 aa, Homo sapiens
  Payload ID: 10510
  Gene Symbol: MOB3A
  Gene Name: MOB kinase activator 3A
  Uniprot ID: Q96BX8
  ENSP ID: ENSP00000349575
MSNPFLKQVFNKDKTFRPKRKFEPGTQRFELHKKAQASLNAGLDLRLAVQLPPGEDLNDWVAVHVVDFFNRVNLIYGTISDGCTEQSCPVMSGGPKYEYRWQDEHKFRKPTALSAPRYMDLLMDWIEAQINNEDLFPTNVGTPFPKNFLQTVRKILSRLFRVFVHVYIHHFDRIAQMGSEAHVNTCYKHFYYFVKEFGLIDTKELEPLKEMTARMCH

SEQ ID NO: 52755 - protein, 62 aa, Homo sapiens
  Payload ID: 10510
  Gene Symbol: MOB3A
  Gene Name: MOB kinase activator 3A
  ENSP ID: ENSP00000465662
MSNPFLKQVFNKDKTFRPKRKFEPGTQRFELHKKAQASLNAGLDLRLAVQLPPGEDLNDWVA

SEQ ID NO: 52756 - protein, 16 aa, Homo sapiens
  Payload ID: 10510
  Gene Symbol: MOB3A
  Gene Name: MOB kinase activator 3A
  ENSP ID: ENSP00000466080
MSNPFLKQVFNKDKTF

SEQ ID NO: 52757 - protein, 63 aa, Homo sapiens
  Payload ID: 10510
  Gene Symbol: MOB3A
  Gene Name: MOB kinase activator 3A
  ENSP ID: ENSP00000466199
MSNPFLKQVFNKDKTFRPKRKFEPGTQRFELHKKAQASLNAGLDLRLAVQLPPGEDLNDWVAV

SEQ ID NO: 52758 - protein, 217 aa, Homo sapiens; identical to SEQ ID NO: 52754
  Payload ID: 10510
  Gene Symbol: MOB3A
  Gene Name: MOB kinase activator 3A
  Uniprot ID: Q96BX8
  ENSP ID: ENSP00000466249

SEQ ID NO: 52759 - protein, 54 aa, Homo sapiens [sequence omitted]

SEQ ID NO: 52760 - protein, 76 aa, Homo sapiens
  Payload ID: 10510
  Gene Symbol: MOB3A
  Gene Name: MOB kinase activator 3A
  ENSP ID: ENSP00000468628
MSNPFLKQVFNKDKTFRPKRKFEPGTQRFELHKKAQASLNAGLDLRLAVQLPPGEDLNDWVAVHVVDFFNRVNLIY

SEQ ID NO: 52761 - protein, 38 aa, Homo sapiens
  Payload ID: 10510
  Gene Symbol: MOB3A
  Gene Name: MOB kinase activator 3A
  ENSP ID: ENSP00000468726
MSNPFLKQVFNKDKTFRPKRKFEPGTQRFELHKKAQAS

SEQ ID NO: 52762 - protein, 216 aa, Homo sapiens
  Payload ID: 10511
  Gene Symbol: MOB3B
  Gene Name: MOB kinase activator 3B
  Uniprot ID: Q86TA1
  ENSP ID: ENSP00000262244
MSIALKQVFNKDKTFRPKRKFEPGTQRFELHKRAQASLNSGVDLKAAVQLPSGEDQNDWVAVHVVDFFNRINLIYGTICEFCTERTCPVMSGGPKYEYRWQDDLKYKKPTALPAPQYMNLLMDWIEVQINNEEIFPTCVGVPFPKNFLQICKKILCRLFRVFVHVYIHHFDRVIVMGAEAHVNTCYKHFYYFVTEMNLIDRKELEPLKEMTSRMCH

SEQ ID NO: 52763 - protein, 268 aa, Homo sapiens
  Payload ID: 10512
  Gene Symbol: MOB3C
  Gene Name: MOB kinase activator 3C
  ENSP ID: ENSP00000271139
MKRRNLFALETGVPPWGLLWVRSRRVGMDEMTFHIWYPQVRAPGQQPQAQLAMALCLKQVFAKDKTFRPRKRFEPGTQRFELYKKAQASLKSGLDLRSVVRLPPGENIDDWIAVHVVDFFNRINLIYGTMAERCSETSCPVMAGGPRYEYRWQDERQYRRPAKLSAPRYMALLMDWIEGLINDEEVFPTRVGVPFPKNFQQVCTKILTRLFRVFVHVYIHHFDSILSMGAEAHVNTCYKHFYYFIREFSLVDQRELEPLREMTERICH

SEQ ID NO: 52764 - protein, 216 aa, Homo sapiens
  Payload ID: 10512
  Gene Symbol: MOB3C
  Gene Name: MOB kinase activator 3C
  Uniprot ID: Q70IA8
  ENSP ID: ENSP00000315113
MALCLKQVFAKDKTFRPRKRFEPGTQRFELYKKAQASLKSGLDLRSVVRLPPGENIDDWIAVHVVDFFNRINLIYGTMAERCSETSCPVMAGGPRYEYRWQDERQYRRPAKLSAPRYMALLMDWIEGLINDEEVFPTRVGVPFPKNFQQVCTKILTRLFRVFVHVYIHHFDSILSMGAEAHVNTCYKHFYYFIREFSLVDQRELEPLREMTERICH

SEQ ID NO: 52765 - protein, 216 aa, Homo sapiens; identical to SEQ ID NO: 52764
  Payload ID: 10512
  Gene Symbol: MOB3C
  Gene Name: MOB kinase activator 3C
  Uniprot ID: Q70IA8
  ENSP ID: ENSP00000361008

SEQ ID NO: 52766 - protein, 351 aa, Homo sapiens
  Payload ID: 10513
  Gene Symbol: MOAP1
  Gene Name: modulator of apoptosis 1
  Uniprot ID: Q96BY2
  ENSP ID: ENSP00000298894
MTLRLLEDWCRGMDMNPRKALLIAGISQSCSVAEIEEALQAGLAPLGEYRLLGRMFRRDENRKVALVGLTAETSHALVPKEIPGKGGIWRVIFKPPDPDNTFLSRLNEFLAGEGMTVGELSRALGHENGSLDPEQGMIPEMWAPMLAQALEALQPALQCLKYKKLRVFSGRESPEPGEEEFGRWMFHTTQMIKAWQVPDVEKRRRLLESLRGPALDVIRVLKINNPLITVDECLQALEEVFGVTDNPRELQVKYLTTYQKDEEKLSAYVLRLEPLLQKLVQRGAIERDAVNQARLDQVIAGAVHKTIRRELNLPEDGPAPGFLQLLVLIKDYEAAEEEEALLQAILEGNFT

SEQ ID NO: 52767 - protein, 351 aa, Homo sapiens; identical to SEQ ID NO: 52766
  Payload ID: 10513
  Gene Symbol: MOAP1
  Gene Name: modulator of apoptosis 1
  Uniprot ID: Q96BY2
  ENSP ID: ENSP00000451594

SEQ ID NO: 52768 - protein, 351 aa, Homo sapiens; identical to SEQ ID NO: 52766
  Payload ID: 10513
  Gene Symbol: MOAP1
  Gene Name: modulator of apoptosis 1
  Uniprot ID: Q96BY2
  ENSP ID: ENSP00000482284

SEQ ID NO: 52769 - protein, 351 aa, Homo sapiens; identical to SEQ ID NO: 52766
  Payload ID: 10513
  Gene Symbol: MOAP1
  Gene Name: modulator of apoptosis 1
  Uniprot ID: Q96BY2
  ENSP ID: ENSP00000486260

SEQ ID NO: 52770 - protein, 577 aa, Homo sapiens
  Payload ID: 10514
  Gene Symbol: MSN
  Gene Name: moesin
  Uniprot ID: P26038
  ENSP ID: ENSP00000353408
MPKTISVRVTTMDAELEFAIQPNTTGKQLFDQVVKTIGLREVWFFGLQYQDTKGFSTWLKLNKKVTAQDVRKESPLLFKFRAKFYPEDVSEELIQDITQRLFFLQVKEGILNDDIYCPPETAVLLASYAVQSKYGDFNKEVHKSGYLAGDKLLPQRVLEQHKLNKDQWEERIQVWHEEHRGMLREDAVLEYLKIAQDLEMYGVNYFSIKNKKGSELWLGVDALGLNIYEQNDRLTPKIGFPWSEIRNISFNDKKFVIKPIDKKAPDFVFYAPRLRINKRILALCMGNHELYMRRRKPDTIEVQQMKAQAREEKHQKQMERAMLENEKKKREMAEKEKEKIEREKEELMERLKQIEEQTKKAQQELEEQTRRALELEQERKRAQSEAEKLAKERQEAEEAKEALLQASRDQKKTQEQLALEMAELTARISQLEMARQKKESEAVEWQQKAQMVQEDLEKTRAELKTAMSTPHVAEPAENEQDEQDENGAEASADLRADAMAKDRSEEERTTEAEKNERVQKHLKALTSELANARDESKKTANDMIHAENMRLGRDKYKTLRQIRQGNTKQRIDEFESM

SEQ ID NO: 52771 - protein, 103 aa, Homo sapiens
  Payload ID: 10514
  Gene Symbol: MSN
  Gene Name: moesin
  ENSP ID: ENSP00000477441
MDAELEFAIQPNTTGKQLFDQVVKTIGLREVWFFGLQYQDTKGFSTWLKLNKKVTAQDVRKESPLLFKFRAKFYPEDVSEELIQDITQRLFFLQVKEGILNDD

SEQ ID NO: 52772 - protein, 352 aa, Homo sapiens
  Payload ID: 10515
  Gene Symbol: MKX
  Gene Name: mohawk homeobox
  Uniprot ID: Q8IYA7
  ENSP ID: ENSP00000364946
MNTIVFNKLSGAVLFEDGGASERERGGRPYSGVLDSPHARPEVGIPDGPPLKDNLGLRHRRTGARQNGGKVRHKRQALQDMARPLKQWLYKHRDNPYPTKTEKILLALGSQMTLVQVSNWFANARRRLKNTVRQPDLSWALRIKLYNKYVQGNAERLSVSSDDSCSEDGENPPRTHMNEGGYNTPVHHPVIKSENSVIKAGVRPESRASEDYVAPPKYKSSLLNRYLNDSLRHVMATNTTMMGKTRQRNHSGSFSSNEFEEELVSPSSSETEGNFVYRTDTLENGSNKGESAANRKGPSKDDTYWKEINAAMALTNLAQGKDKLQGTTSCIIQKSSHIAEVKTVKVPLVQQF

SEQ ID NO: 52773 - protein, 352 aa, Homo sapiens; identical to SEQ ID NO: 52772
  Payload ID: 10515
  Gene Symbol: MKX
  Gene Name: mohawk homeobox
  Uniprot ID: Q8IYA7
  ENSP ID: ENSP00000400896

SEQ ID NO: 52774 - protein, 290 aa, Homo sapiens
  Payload ID: 10515
  Gene Symbol: MKX
  Gene Name: mohawk homeobox
  ENSP ID: ENSP00000452751
MNTIVFNKLSGAVLFEDGGASERERGGRPYSGVLDSPHARPEVGIPDGPPLKDNLGLRHRRTGARQNGGKVRHKRQALQDMARPLKQWLYKHRDNPYPTKTEKILLALGSQMTLVQVSNWFANARRRLKNTVRQPDLSWALRIKLYNKYVQGNAERLSVSSDDSCSEDGENPPRTHMNEGGYNTPVHHPVIKSENSVIKAGVRPESRASEDYVAPPKYKSSLLNRYLNDSLRHVMATNTTMMGKTRQRNHSGSFSSNEFEEELVSPSSSETEGNFVYRTVENLGSLSEDS

SEQ ID NO: 52775 - protein, 58 aa, Homo sapiens
  Payload ID: 10515
  Gene Symbol: MKX
  Gene Name: mohawk homeobox
  ENSP ID: ENSP00000453746
MNTIVFNKLSGAVLFEDGGASERERGGRPYSGVLDSPHARPEVGIPDGPPLKDNLGLR

SEQ ID NO: 52776 - protein, 418 aa, Homo sapiens
  Payload ID: 10516
  Gene Symbol: MOK
  Gene Name: MOK protein kinase
  ENSP ID: ENSP00000193029
IKNYKAIGKIGEGTFSEVMKMQSLRDGNYYACKQMKQRFESIEQVNNLREIQALRRLNPHPNILMLHEVVFDRKSGSLALICELMDMNIYELIRGRRYPLSEKKIMHYMYQLCKSLDHIHRNGIFHRDVKPENILIKDVLKLGDFGSCRSVYSKQPYTEYISTRWYRAPECLLTDGFYTYKMDLWSAGCVFYEIASLQPLFPGVNELDQISKIHDVIGTPAQKILTKFKQSRAMNFDFPFKKGSGIPLLTTNLSPQCLSLLHAMVAYDPDERIAAHQALQHPYFQEQRKTEKRALGSHRKAGFPEHPVAPEPLSNSCQISKEGRKQKQSLKQEEDRPKRRGPAYVMELPKLKLSGVVRLSSYSSPTLQSVLGSGTNGRVPVLRPLKCIPASKKTDPQKDLKPAPQQCRLPTIVRKGGR

SEQ ID NO: 52777 - protein, 419 aa, Homo sapiens
  Payload ID: 10516
  Gene Symbol: MOK
  Gene Name: MOK protein kinase
  Uniprot ID: Q9UQ07
  ENSP ID: ENSP00000355304
MKNYKAIGKIGEGTFSEVMKMQSLRDGNYYACKQMKQRFESIEQVNNLREIQALRRLNPHPNILMLHEVVFDRKSGSLALICELMDMNIYELIRGRRYPLSEKKIMHYMYQLCKSLDHIHRNGIFHRDVKPENILIKQDVLKLGDFGSCRSVYSKQPYTEYISTRWYRAPECLLTDGFYTYKMDLWSAGCVFYEIASLQPLFPGVNELDQISKIHDVIGTPAQKILTKFKQSRAMNFDFPFKKGSGIPLLTTNLSPQCLSLLHAMVAYDPDERIAAHQALQHPYFQEQRKTEKRALGSHRKAGFPEHPVAPEPLSNSCQISKEGRKQKQSLKQEEDRPKRRGPAYVMELPKLKLSGVVRLSSYSSPTLQSVLGSGTNGRVPVLRPLKCIPASKKTDPQKDLKPAPQQCRLPTIVRKGGR

SEQ ID NO: 52778 - protein, 44 aa, Homo sapiens
  Payload ID: 10516
  Gene Symbol: MOK
  Gene Name: MOK protein kinase
  ENSP ID: ENSP00000427884
MKNYKAIGKIGEGTFSEVMKMQSLRDGNYYACKQMKQRFERLGN

SEQ ID NO: 52779 - protein, 59 aa, Homo sapiens
  Payload ID: 10516
  Gene Symbol: MOK
  Gene Name: MOK protein kinase
  ENSP ID: ENSP00000428206
MKNYKAIGKIGEGTFSEVMKMQSLRDGNYYACKQMKQRFEREKIPIIRKKNYALYVPVM

SEQ ID NO: 52780 - protein, 389 aa, Homo sapiens
  Payload ID: 10516
  Gene Symbol: MOK
  Gene Name: MOK protein kinase
  Uniprot ID: Q9UQ07
  ENSP ID: ENSP00000428942
MKNYKAIGKIGEGTFSEVMKMQSLRDGNYYACKQMKQRFESDRKSGSLALICELMDMNIYELIRGRRYPLSEKKIMHYMYQLCKSLDHIHRNGIFHRDVKPENILIKQDVLKLGDFGSCRSVYSKQPYTEYISTRWYRAPECLLTDGFYTYKMDLWSAGCVFYEIASLQPLFPGVNELDQISKIHDVIGTPAQKILTKFKQSRAMNFDFPFKKGSGIPLLTTNLSPQCLSLLHAMVAYDPDERIAAHQALQHPYFQEQRKTEKRALGSHRKAGFPEHPVAPEPLSNSCQISKEGRKQKQSLKQEEDRPKRRGPAYVMELPKLKLSGVVRLSSYSSPTLQSVLGSGTNGRVPVLRPLKCIPASKKTDPQKDLKPAPQQCRLPTIVRKGGR

SEQ ID NO: 52781 - protein, 44 aa, Homo sapiens; identical to SEQ ID NO: 52778
  Payload ID: 10516
  Gene Symbol: MOK
  Gene Name: MOK protein kinase
  ENSP ID: ENSP00000428957

SEQ ID NO: 52782 - protein, 59 aa, Homo sapiens; identical to SEQ ID NO: 52779
  Payload ID: 10516
  Gene Symbol: MOK
  Gene Name: MOK protein kinase
  ENSP ID: ENSP00000429348

SEQ ID NO: 52783 - protein, 44 aa, Homo sapiens; identical to SEQ ID NO: 52778
  Payload ID: 10516
  Gene Symbol: MOK
  Gene Name: MOK protein kinase
  ENSP ID: ENSP00000429428

SEQ ID NO: 52784 - protein, 418 aa, Homo sapiens
  Payload ID: 10516
  Gene Symbol: MOK
  Gene Name: MOK protein kinase
  Uniprot ID: Q9UQ07
  ENSP ID: ENSP00000429469
MKNYKAIGKIGEGTFSEVMKMQSLRDGNYYACKQMKQRFESIEQVNNLREIQALRRLNPHPNILMLHEVVFDRKSGSLALICELMDMNIYELIRGRRYPLSEKKIMHYMYQLCKSLDHIHRNGIFHRDVKPENILIKDVLKLGDFGSCRSVYSKQPYTEYISTRWYRAPECLLTDGFYTYKMDLWSAGCVFYEIASLQPLFPGVNELDQISKIHDVIGTPAQKILTKFKQSRAMNFDFPFKKGSGIPLLTTNLSPQCLSLLHAMVAYDPDERIAAHQALQHPYFQEQRKTEKRALGSHRKAGFPEHPVAPEPLSNSCQISKEGRKQKQSLKQEEDRPKRRGPAYVMELPKLKLSGVVRLSSYSSPTLQSVLGSGTNGRVPVLRPLKCIPASKKTDPQKDLKPAPQQCRLPTIVRKGGR

SEQ ID NO: 52785 - protein, 151 aa, Homo sapiens
  Payload ID: 10516
  Gene Symbol: MOK
  Gene Name: MOK protein kinase
  ENSP ID: ENSP00000429511
MKNYKAIGKIGEGTFSEVMKMQSLRDGNYYACKQMKQRFESIEQVNNLREIQALRRLNPHPNILMLHEVVFDRKSGSLALICELMDMNIYELIRGRRYPLSEKKIMHYMYQLCKSLDHIHRNGIFHRDVKPENILIKVVKNGLFNKCHQHN

SEQ ID NO: 52786 - protein, 59 aa, Homo sapiens; identical to SEQ ID NO: 52779
  Payload ID: 10516
  Gene Symbol: MOK
  Gene Name: MOK protein kinase
  ENSP ID: ENSP00000429570

SEQ ID NO: 52787 - protein, 125 aa, Homo sapiens
  Payload ID: 10516
  Gene Symbol: MOK
  Gene Name: MOK protein kinase
  ENSP ID: ENSP00000429672
MIPMRESPPTRPCSTPTSKNRETVPKARGGPSQETRTGLCHGTAQTKAFGSGQTVVLLQPHAAVRAWIWNKWKSAGAETLEVHPCEQEGSAEPASLTALLFDPAQAATEFCVCNFSLTDRSAEGP

SEQ ID NO: 52788 - protein, 113 aa, Homo sapiens
  Payload ID: 10516
  Gene Symbol: MOK
  Gene Name: MOK protein kinase
  ENSP ID: ENSP00000430416
  MOD_RES (1)..(1): Any amino acid
XKTEKRALGSHRKAGFPEHPVAPEPLSNSCQISKEGRKQKQSLKQEEDRPKRRGPAYVMELPKLKLSGVVRLSSYSSPTLQSVLGSGTNGRVPVLRPLKCIPASKKVARNQLL

SEQ ID NO: 52789 - protein, 59 aa, Homo sapiens; identical to SEQ ID NO: 52779
  Payload ID: 10516
  Gene Symbol: MOK
  Gene Name: MOK protein kinase
  ENSP ID: ENSP00000430775

SEQ ID NO: 52790 - protein, 95 aa, Homo sapiens
  Payload ID: 10516
  Gene Symbol: MOK
  Gene Name: MOK protein kinase
  ENSP ID: ENSP00000452978
MIPMRESPPTRPCSTPTSKNRETVPKARGGPSQETRTGLCHGTAQTKAFGSGQTVVLLQPHAAVRAWIWNKWKSAGAETLEVHPCEQEDRSAEGP

SEQ ID NO: 52791 - protein, 95 aa, Homo sapiens; identical to SEQ ID NO: 52790
  Payload ID: 10516
  Gene Symbol: MOK
  Gene Name: MOK protein kinase
  ENSP ID: ENSP00000453224

SEQ ID NO: 52792 - protein, 47 aa, Homo sapiens
  Payload ID: 10516
  Gene Symbol: MOK
  Gene Name: MOK protein kinase
  ENSP ID: ENSP00000453401
MIPMRESPPTRPCSTPTSKNREPRTEARMRPQPSSSPFKHVHPSTLC

SEQ ID NO: 52793 - protein, 173 aa, Homo sapiens
  Payload ID: 10516
  Gene Symbol: MOK
  Gene Name: MOK protein kinase
  ENSP ID: ENSP00000453449
  MOD_RES (1)..(1): Any amino acid
XNGIFHRDVKPENILIKQDVLKLGDFGSCRSVYSKQPYTEYISTRWYRAPECLLTDGFYTYKMDLWSAGCVFYEIASLQPLFPGVNELDQISKIHDVIGTPAQKILTKFKQSRAMNFDFPFKKGSGIPLLTTNLSPQCLSLLHAMVAYDPDERIAAHQALQHPYFQEQRRLTP

SEQ ID NO: 52794 - protein, 95 aa, Homo sapiens; identical to SEQ ID NO: 52790
  Payload ID: 10516
  Gene Symbol: MOK
  Gene Name: MOK protein kinase
  ENSP ID: ENSP00000453762

SEQ ID NO: 52795 - protein, 96 aa, Homo sapiens
  Payload ID: 10516
  Gene Symbol: MOK
  Gene Name: MOK protein kinase
  ENSP ID: ENSP00000453799
MIPMRESPPTRPCSTPTSKNRETVPKARGGPSQETRTGLCHGTAQTKAFGSGQTVVLLQPHAAVRAWIWNKWKSAGAETLEVHPCEQEGSAEPASL

SEQ ID NO: 52796 - protein, 47 aa, Homo sapiens; identical to SEQ ID NO: 52792
  Payload ID: 10516
  Gene Symbol: MOK
  Gene Name: MOK protein kinase
  ENSP ID: ENSP00000453950

SEQ ID NO: 52797 - protein, 95 aa, Homo sapiens; identical to SEQ ID NO: 52790
  Payload ID: 10516
  Gene Symbol: MOK
  Gene Name: MOK protein kinase
  ENSP ID: ENSP00000454098

SEQ ID NO: 52798 - protein, 125 aa, Homo sapiens; identical to SEQ ID NO: 52787
  Payload ID: 10516
  Gene Symbol: MOK
  Gene Name: MOK protein kinase
  ENSP ID: ENSP00000454203

SEQ ID NO: 52799 - protein, 89 aa, Homo sapiens
  Payload ID: 10516
  Gene Symbol: MOK
  Gene Name: MOK protein kinase
  ENSP ID: ENSP00000454829
MKNYKAIGKIGEGTFSEVMKMQSLRDGNYYACKQMKQRFESIEQVNNLREIQALRRLNPHPNILMLHEVVLEKIPIIRKKNYALYVPVM

SEQ ID NO: 52800 - protein, 888 aa, Homo sapiens
  Payload ID: 10517
  Gene Symbol: MOCOS
  Gene Name: molybdenum cofactor sulfurase
  Uniprot ID: Q96EN8
  ENSP ID: ENSP00000261326
MAGAAAESGRELWTFAGSRDPSAPRLAYGYGPGSLRELRAREFSRLAGTVYLDHAGATLFSQSQLESFTSDLMENTYGNPHSQNISSKLTHDTVEQVRYRILAHFHTTAEDYTVIFTAGSTAALKLVAEAFPWVSQGPESSGSRFCYLTDSHTSVVGMRNVTMAINVISTPVRPEDLWSAEERSASASNPDCQLPHLFCYPAQSNFSGVRYPLSWIEEVKSGRLHPVSTPGKWFVLLDAASYVSTSPLDLSAHQADFVPISFYKIFGFPTGLGALLVHNRAAPLLRKTYFGGGTASAYLAGEDFYIPRQSVAQRFEDGTISFLDVIALKHGFDTLERLTGGMENIKQHTFTLAQYTYVALSSLQYPNGAPVVRIYSDSEFSSPEVQGPIINFNVLDDKGNIIGYSQVDKMASLYNIHLRTGCFCNTGACQRHLGISNEMVRKHFQAGHVCGDNMDLIDGQPTGSVRISFGYMSTLDDVQAFLRFIIDTRLHSSGDWPVPQAHADTGETGAPSADSQADVIPAVMGRRSLSPQEDALTGSRVWNNSSTVNAVPVAPPVCDVARTQPTPSEKAAGVLEGALGPHVVTNLYLYPIKSCAAFEVTRWPVGNQGLLYDRSWMVVNHNGVCLSQKQEPRLCLIQPFIDLRQRIMVIKAKGMEPIEVPLEENSERTQIRQSRVCADRVSTYDCGEKISSWLSTFFGRPCHLIKQSSNSQRNAKKKHGKDQLPGTMATLSLVNEAQYLLINTSSILELHRQLNTSDENGKEELFSLKDLSLRFRANIIINGKRAFEEEKWDEISIGSLRFQVLGPCHRCQMICIDQQTGQRNQHVFQKLSESRETKVNFGMYLMHASLDLSSPCFLSVGSQVLPVLKENVEGHDLPASEKHQDVTS

SEQ ID NO: 52801 - protein, 636 aa, Homo sapiens
  Payload ID: 10518
  Gene Symbol: MOCS1
  Gene Name: molybdenum cofactor synthesis 1
  Uniprot ID: Q9NZB8
  ENSP ID: ENSP00000344794
MAARPLSRMLRRLLRSSARSCSSGAPVTQPCPGESARAASEEVSRRRQFLREHAAPFSAFLTDSFGRQHSYLRISLTEKCNLRCQYCMPEEGVPLTPKANLLTTEEILTLARLFVKEGIDKIRLTGGEPLIRPDVVDIVAQLQRLEGLRTIGVTTNGINLARLLPQLQKAGLSAINISLDTLVPAKFEFIVRRKGFHKVMEGIHKAIELGYNPVKVNCVVMRGLNEDELLDFAALTEGLPLDVRFIEYMPFDGNKWNFKKMVSYKEMLDTVRQQWPELEKVPEEESSTAKAFKIPGFQGQISFITSMSEHFCGTCNRLRITADGNLKVCLFGNSEVSLRDHLRAGASEQELLRIIGAAVGRKKRQHAGMFSISQMKNRPMILIELFLMFPNSPPANPSIFSWDPLHVQGLRPRMSFSSQVATLWKGCRVPQTPPLAQQRLGSGSFQRHYTSRADSDANSKCLSPGSWASAAPSGPQLTSEQLTHVDSEGRAAMVDVGRKPDTERVAVASAVVLLGPVAFKLVQQNQLKKGDALVVAQLAGVQAAKVTSQLIPLCHHVALSHIQVQLELDSTRHAVKIQASCRARGPTGVEMEALTSAAVAALTLYDMCKAVSRDIVLEEIKLISKTGGQRGDFHRA

SEQ ID NO: 52802 - protein, 281 aa, Homo sapiens
  Payload ID: 10518
  Gene Symbol: MOCS1
  Gene Name: molybdenum cofactor synthesis 1
  Uniprot ID: Q9NZB8
  ENSP ID: ENSP00000362277
MPEEGVPLTPKANLLTTEEILTLARLFVKEGIDKIRLTGGEPLIRPDVVDIVAQLQRLEGLRTIGVTTNGINLARLLPQLQKAGLSAINISLDTLVPAKFEFIVRRKGFHKVMEGIHKAIELGYNPVKVNCVVMRGLNEDELLDFAALTEGLPLDVRFIEYMPFDGNKWNFKKMVSYKEMLDTVRQQWPELEKVPEEESSTAKAFKIPGFQGQISFITSMSEHFCGTCNRLRITADGNLKVCLFGNSEVSLRDHLRAGASEQELLRIIGAAVGRKKRQHAE

SEQ ID NO: 52803 - protein, 385 aa, Homo sapiens
  Payload ID: 10518
  Gene Symbol: MOCS1
  Gene Name: molybdenum cofactor synthesis 1
  Uniprot ID: Q9NZB8
  ENSP ID: ENSP00000362282
MWKSWKLRTDVRVREGAGGSPCASSQPGSRGPCFLPGLSSQEVSRRRQFLREHAAPFSAFLTDSFGRQHSYLRISLTEKCNLRCQYCMPEEGVPLTPKANLLTTEEILTLARLFVKEGIDKIRLTGGEPLIRPDVVDIVAQLQRLEGLRTIGVTTNGINLARLLPQLQKAGLSAINISLDTLVPAKFEFIVRRKGFHKVMEGIHKAIELGYNPVKVNCVVMRGLNEDELLDFAALTEGLPLDVRFIEYMPFDGNKWNFKKMVSYKEMLDTVRQQWPELEKVPEEESSTAKAFKIPGFQGQISFITSMSEHFCGTCNRLRITADGNLKVCLFGNSEVSLRDHLRAGASEQELLRIIGAAVGRKKRQHAGMFSISQMKNRPMILIGG

SEQ ID NO: 52804 - protein, 385 aa, Homo sapiens
  Payload ID: 10518
  Gene Symbol: MOCS1
  Gene Name: molybdenum cofactor synthesis 1
  Uniprot ID: Q9NZB8
  ENSP ID: ENSP00000362284
MAARPLSRMLRRLLRSSARSCSSGAPVTQPCPGESARAASEEVSRRRQFLREHAAPFSAFLTDSFGRQHSYLRISLTEKCNLRCQYCMPEEGVPLTPKANLLTTEEILTLARLFVKEGIDKIRLTGGEPLIRPDVVDIVAQLQRLEGLRTIGVTTNGINLARLLPQLQKAGLSAINISLDTLVPAKFEFIVRRKGFHKVMEGIHKAIELGYNPVKVNCVVMRGLNEDELLDFAALTEGLPLDVRFIEYMPFDGNKWNFKKMVSYKEMLDTVRQQWPELEKVPEEESSTAKAFKIPGFQGQISFITSMSEHFCGTCNRLRITADGNLKVCLFGNSEVSLRDHLRAGASEQELLRIIGAAVGRKKRQHAGMFSISQMKNRPMILIGG

SEQ ID NO: 52805 - protein, 533 aa, Homo sapiens
  Payload ID: 10518
  Gene Symbol: MOCS1
  Gene Name: molybdenum cofactor synthesis 1
  Uniprot ID: Q9NZB8
  ENSP ID: ENSP00000362291
MPEEGVPLTPKANLLTTEEILTLARLFVKEGIDKIRLTGGEPLIRPDVVDIVAQLQRLEGLRTIGVTTNGINLARLLPQLQKAGLSAINISLDTLVPAKFEFIVRRKGFHKVMEGIHKAIELGYNPVKVNCVVMRGLNEDELLDFAALTEGLPLDVRFIEYMPFDGNKWNFKKMVSYKEMLDTVRQQWPELEKVPEEESSTAKAFKIPGFQGQISFITSMSEHFCGTCNRLRITADGNLKVCLFGNSEVSLRDHLRAGASEQELLRIIGAAVGRKKRQHAELFLMFPNSPPANPSIFSWDPLHVQGLRPRMSFSSQVATLWKGCRVPQTPPLAQQRLGSGSFQRHYTSRADSDANSKCLSPGSWASAAPSGPQLTSEQLTHVDSEGRAAMVDVGRKPDTERVAVASAVVLLGPVAFKLVQQNQLKKGDALVVAQLAGVQAAKVTSQLIPLCHHVALSHIQVQLELDSTRHAVKIQASCRARGPTGVEMEALTSAAVAALTLYDMCKAVSRDIVLEEIKLISKTGGQRGDFHRA

SEQ ID NO: 52806 - protein, 356 aa, Homo sapiens
  Payload ID: 10518
  Gene Symbol: MOCS1
  Gene Name: molybdenum cofactor synthesis 1
  Uniprot ID: Q9NZB8
  ENSP ID: ENSP00000410809
MWKSWKLRTDVREVSRRRQFLREHAAPFSAFLTDSFGRQHSYLRISLTEKCNLRCQYCMPEEGVPLTPKANLLTTEEILTLARLFVKEGIDKIRLTGGEPLIRPDVVDIVAQLQRLEGLRTIGVTTNGINLARLLPQLQKAGLSAINISLDTLVPAKFEFIVRRKGFHKVMEGIHKAIELGYNPVKVNCVVMRGLNEDELLDFAALTEGLPLDVRFIEYMPFDGNKWNFKKMVSYKEMLDTVRQQWPELEKVPEEESSTAKAFKIPGFQGQISFITSMSEHFCGTCNRLRITADGNLKVCLFGNSEVSLRDHLRAGASEQELLRIIGAAVGRKKRQHAGMFSISQMKNRPMILIGG

SEQ ID NO: 52807 - protein, 636 aa, Homo sapiens
  Payload ID: 10518
  Gene Symbol: MOCS1
  Gene Name: molybdenum cofactor synthesis 1
  Uniprot ID: Q9NZB8
  ENSP ID: ENSP00000416478
MWKSWKLRTDVRVREGAGGSPCASSQPGSRGPCFLPGLSSQEVSRRRQFLREHAAPFSAFLTDSFGRQHSYLRISLTEKCNLRCQYCMPEEGVPLTPKANLLTTEEILTLARLFVKEGIDKIRLTGGEPLIRPDVVDIVAQLQRLEGLRTIGVTTNGINLARLLPQLQKAGLSAINISLDTLVPAKFEFIVRRKGFHKVMEGIHKAIELGYNPVKVNCVVMRGLNEDELLDFAALTEGLPLDVRFIEYMPFDGNKWNFKKMVSYKEMLDTVRQQWPELEKVPEEESSTAKAFKIPGFQGQISFITSMSEHFCGTCNRLRITADGNLKVCLFGNSEVSLRDHLRAGASEQELLRIIGAAVGRKKRQHAGMFSISQMKNRPMILIELFLMFPNSPPANPSIFSWDPLHVQGLRPRMSFSSQVATLWKGCRVPQTPPLAQQRLGSGSFQRHYTSRADSDANSKCLSPGSWASAAPSGPQLTSEQLTHVDSEGRAAMVDVGRKPDTERVAVASAVVLLGPVAFKLVQQNQLKKGDALVVAQLAGVQAAKVTSQLIPLCHHVALSHIQVQLELDSTRHAVKIQASCRARGPTGVEMEALTSAAVAALTLYDMCKAVSRDIVLEEIKLISKTGGQRGDFHRA

SEQ ID NO: 52808 - protein, 98 aa, Homo sapiens
  Payload ID: 10518
  Gene Symbol: MOCS1
  Gene Name: molybdenum cofactor synthesis 1
  ENSP ID: ENSP00000418315
MAARPLSRMLRRLLRSSARSCSSGAPVTQPCPGESARAASEEVSRRRQFLREHAAPFSAFLTDSFGRQHSYLRISLTEKCNLRCESPSWALSGLVSIC

SEQ ID NO: 52809 - protein, 88 aa, Homo sapiens
  Payload ID: 10519
  Gene Symbol: MOCS2
  Gene Name: molybdenum cofactor synthesis 2
  Uniprot ID: O96033
  ENSP ID: ENSP00000355160
MVPLCQVEVLYFAKSAEITGVRSETISVPQEIKALQLWKEIETRHPGLADVRNQIIFAVRQEYVELGDQLLVLQPGDEIAVIPPISGG

SEQ ID NO: 52810 - protein, 188 aa, Homo sapiens
  Payload ID: 10519
  Gene Symbol: MOCS2
  Gene Name: molybdenum cofactor synthesis 2
  Uniprot ID: O96007
  ENSP ID: ENSP00000380157
MSSLEISSSCFSLETKLPLSPPLVEDSAFEPSRKDMDEVEEKSKDVINFTAEKLSVDEVSQLVISPLCGAISLFVGTTRNNFEGKKVISLEYEAYLPMAENEVRKICSDIRQKWPVKHIAVFHRLGLVPVSEASIIIAVSSAHRAASLEAVSYAIDTLKAKVPIWKKEIYEESSTWKGNKECFWASNS

SEQ ID NO: 52811 - protein, 88 aa, Homo sapiens; identical to SEQ ID NO: 52809
  Payload ID: 10519
  Gene Symbol: MOCS2
  Gene Name: molybdenum cofactor synthesis 2
  Uniprot ID: O96033
  ENSP ID: ENSP00000411022

SEQ ID NO: 52812 - protein, 88 aa, Homo sapiens; identical to SEQ ID NO: 52809
  Payload ID: 10519
  Gene Symbol: MOCS2
  Gene Name: molybdenum cofactor synthesis 2
  Uniprot ID: O96033
  ENSP ID: ENSP00000424267

SEQ ID NO: 52813 - protein, 88 aa, Homo sapiens; identical to SEQ ID NO: 52809
  Payload ID: 10519
  Gene Symbol: MOCS2
  Gene Name: molybdenum cofactor synthesis 2
  Uniprot ID: O96033
  ENSP ID: ENSP00000426274

SEQ ID NO: 52814 - protein, 83 aa, Homo sapiens
  Payload ID: 10519
  Gene Symbol: MOCS2
  Gene Name: molybdenum cofactor synthesis 2
  ENSP ID: ENSP00000435326
MVEVLYFAKSAEITGVRSETISVPQEIKALQLWKEIETRHPGLADVRNQIIFAVRQEYVELGDQLLVLQPGDEIAVIPPISGG

SEQ ID NO: 52815 - protein, 88 aa, Homo sapiens; identical to SEQ ID NO: 52809
  Payload ID: 10519
  Gene Symbol: MOCS2
  Gene Name: molybdenum cofactor synthesis 2
  Uniprot ID: O96033
  ENSP ID: ENSP00000462870

SEQ ID NO: 52816 - protein, 88 aa, Homo sapiens; identical to SEQ ID NO: 52809
  Payload ID: 10519
  Gene Symbol: MOCS2
  Gene Name: molybdenum cofactor synthesis 2
  Uniprot ID: O96033
  ENSP ID: ENSP00000464663

SEQ ID NO: 52817 - protein, 460 aa, Homo sapiens
  Payload ID: 10520
  Gene Symbol: MOCS3
  Gene Name: molybdenum cofactor synthesis 3
  Uniprot ID: O95396
  ENSP ID: ENSP00000244051
MASREEVLALQAEVAQREEELNSLKQKLASALLAEQEPQPERLVPVSPLPPKAALSRDEILRYSRQLVLPELGVHGQLRLGTACVLIVGCGGLGCPLAQYLAAAGVGRLGLVDYDVVEMSNLARQVLHGEALAGQAKAFSAAASLRRLNSAVECVPYTQALTPATALDLVRRYDVVADCSDNVPTRYLVNDACVLAGRPLVSASALRFEGQITVYHYDGGPCYRCIFPQPPPAETVTNCADGGVLGVVTGVLGCLQALEVLKIAAGLGPSYSGSLLLFDALRGHFRSIRLRSRRLDCAACGERPTVTDLLDYEAFCGSSATDKCRSLQLLSPEERVSVTDYKRLLDSGAFHLLLDVRPQVEVDICRLPHALHIPLKHLERRDAESLKLLKEAIWEEKQGTQEGAAVPIYVICKLGNDSQKAVKILQSLSAAQELDPLTVRDVVGGLMAWAAKIDGTFPQY

SEQ ID NO: 52818 - protein, 652 aa, Homo sapiens
  Payload ID: 10521
  Gene Symbol: MON1A
  Gene Name: MON1 secretory trafficking family member A
  ENSP ID: ENSP00000296473
MHPGGGPSRAERLELGLGRERPAKAIFLHRRPGEGGGRERCLRCGHVCVRRGPGPREAVPSGRPRPDTLTPPWVRQRAVTGTFCASWTPLRNRRAQRMATDMQRKRSSECLDGTLTPSDGQSMERAESPTPGMAQGMEPGAGQEGAMFVHARSYEDLTESEDGAASGDSHKEGTRGPPPLPTDMRQISQDFSELSTQLTGVARDLQEEMLPGSSEDWLEPPGAVGRPATEPPREGTTEGDEEDATEAWRLHQKHVFVLSEAGKPVYSRYGSEEALSSTMGVMVALVSFLEADKNAIRSIHADGYKVVFVRRSPLVLVAVARTRQSAQELAQELLYIYYQILSLLTGAQLSHIFQQKQNYDLRRLLSGSERITDNLLQLMARDPSFLMGAARCLPLAAAVRDTVSASLQQARARSLVFSILLARNQLVALVRRKDQFLHPIDLHLLFNLISSSSSFREGEAWTPVCLPKFNAAGFFHAHISYLEPDTDLCLLLVSTDREDFFAVSDCRRRFQERLRKRGAHLALREALRTPYYSVAQVGIPDLRHFLYKSKSSGLFTSPEIEAPYTSEEEQERLLGLYQYLHSRAHNASRPLKTIYYTGPNENLLAWVTGAFELYMCYSPLGTKASAVSAIHKLMRWIRKEEDRLFILTPLTY

SEQ ID NO: 52819 - protein, 563 aa, Homo sapiens
  Payload ID: 10521
  Gene Symbol: MON1A
  Gene Name: MON1 secretory trafficking family member A
  ENSP ID: ENSP00000399613
MTPRRAQRMATDMQRKRSSECLDGTLTPSDGQSMERAESPTPGMAQGMEPGAGQEGAMFVHARSYEDLTESEDGAASGDSHKEGTRGPPPLPTDMRQISQDFSELSTQLTGVARDLQEEMLPGSSEDWLEPPGAVGRPATEPPREGTTEGDEEDATEAWRLHQKHVFVLSEAGKPVYSRYGSEEALSSTMGVMVALVSFLEADKNAIRSIHADGYKVVFVRRSPLVLVAVARTRQSAQELAQELLYIYYQILSLLTGAQLSHIFQQKQNYDLRRLLSGSERITDNLLQLMARDPSFLMGAARCLPLAAAVRDTVSASLQQARARSLVFSILLARNQLVALVRRKDQFLHPIDLHLLFNLISSSSSFREGEAWTPVCLPKFNAAGFFHAHISYLEPDTDLCLLLVSTDREDFFAVSDCRRRFQERLRKRGAHLALREALRTPYYSVAQVGIPDLRHFLYKSKSSGLFTSPEIEAPYTSEEEQERLLGLYQYLHSRAHNASRPLKTIYYTGPNENLLAWVTGAFELYMCYSPLGTKASAVSAIHKLMRWIRKEEDRLFILTPLTY

SEQ ID NO: 52820 - protein, 490 aa, Homo sapiens
  Payload ID: 10521
  Gene Symbol: MON1A
  Gene Name: MON1 secretory trafficking family member A
  Uniprot ID: Q86VX9
  ENSP ID: ENSP00000404793
MHPGGGPSRAERLELGLGRERPAKAIFLHRRPGEGGGRERCLRCGHVCVRRGPGPREAVPSGRPRPDTLTPPWVRQRAVTGTFCASWTPLRNRRAQRMATDMQRKRSSECLDGTLTPSDGQSMERAESPTPGMAQGMEPDGYKVVFVRRSPLVLVAVARTRQSAQELAQELLYIYYQILSLLTGAQLSHIFQQKQNYDLRRLLSGSERITDNLLQLMARDPSFLMGAARCLPLAAAVRDTVSASLQQARARSLVFSILLARNQLVALVRRKDQFLHPIDLHLLFNLISSSSSFREGEAWTPVCLPKFNAAGFFHAHISYLEPDTDLCLLLVSTDREDFFAVSDCRRRFQERLRKRGAHLALREALRTPYYSVAQVGIPDLRHFLYKSKSSGLFTSPEIEAPYTSEEEQERLLGLYQYLHSRAHNASRPLKTIYYTGPNENLLAWVTGAFELYMCYSPLGTKASAVSAIHKLMRWIRKEEDRLFILTPLTY

SEQ ID NO: 52821 - protein, 547 aa, Homo sapiens
  Payload ID: 10522
  Gene Symbol: MON1B
  Gene Name: MON1 secretory trafficking family member B
  Uniprot ID: Q7L1V2
  ENSP ID: ENSP00000248248
MEVGGDTAAPAPGGAEDLEDTQFPSEEAREGGGVHAVPPDPEDEGLEETGSKDKDQPPSPSPPPQSEALSSTSRLWSPAAPENSPTCSPESSSGGQGGDPSDEEWRSQRKHVFVLSEAGKPIYSRYGSVEALSATMGVMTALVSFVQSAGDAIRAIYAEDHKLVFLQQGPLLLVAMSRTSQSAAQLRGELLAVHAQIVSTLTRASVARIFAHKQNYDLRRLLAGSERTLDRLLDSMEQDPGALLLGAVRCVPLARPLRDALGALLRRCTAPGLALSVLAVGGRLITAAQERNVLAECRLDPADLQLLLDWVGAPAFAAGEAWAPVCLPRFNPDGFFYAYVARLDAMPVCLLLLGTQREAFHAMAACRRLVEDGMHALGAMRALGEAASFSNASSASAPAYSVQAVGAPGLRHFLYKPLDIPDHHRQLPQFTSPELEAPYSREEERQRLSDLYHRLHARLHSTSRPLRLIYHVAEKETLLAWVTSKFELYTCLSPLVTKAGAILVVTKLLRWVKKEEDRLFIRYPPKYSTPPATSTDQAAHNGLFTGL

SEQ ID NO: 52822 - protein, 438 aa, Homo sapiens
  Payload ID: 10522
  Gene Symbol: MON1B
  Gene Name: MON1 secretory trafficking family member B
  ENSP ID: ENSP00000404053
MEVGGDTAAPAPGGAEDLEDTQFPSEEAREGGGVHAVPPDPEDEGLEETEDHKLVFLQQGPLLLVAMSRTSQSAAQLRGELLAVHAQIVSTLTRASVARIFAHKQNYDLRRLLAGSERTLDRLLDSMEQDPGALLLGAVRCVPLARPLRDALGALLRRCTAPGLALSVLAVGGRLITAAQERNVLAECRLDPADLQLLLDWVGAPAFAAGEAWAPVCLPRFNPDGFFYAYVARLDAMPVCLLLLGTQREAFHAMAACRRLVEDGMHALGAMRALGEAASFSNASSASAPAYSVQAVGAPGLRHFLYKPLDIPDHHRQLPQFTSPELEAPYSREEERQRLSDLYHRLHARLHSTSRPLRLIYHVAEKETLLAWVTSKFELYTCLSPLVTKAGAILVVTKLLRWVKKEEDRLFIRYPPKYSTPPATSTDQAAHNGLFTGL

SEQ ID NO: 52823 - protein, 401 aa, Homo sapiens
  Payload ID: 10522
  Gene Symbol: MON1B
  Gene Name: MON1 secretory trafficking family member B
  Uniprot ID: Q7L1V2
  ENSP ID: ENSP00000444881
MVSGQLRFGVKTEDHKLVFLQQGPLLLVAMSRTSQSAAQLRGELLAVHAQIVSTLTRASVARIFAHKQNYDLRRLLAGSERTLDRLLDSMEQDPGALLLGAVRCVPLARPLRDALGALLRRCTAPGLALSVLAVGGRLITAAQERNVLAECRLDPADLQLLLDWVGAPAFAAGEAWAPVCLPRFNPDGFFYAYVARLDAMPVCLLLLGTQREAFHAMAACRRLVEDGMHALGAMRALGEAASFSNASSASAPAYSVQAVGAPGLRHFLYKPLDIPDHHRQLPQFTSPELEAPYSREEERQRLSDLYHRLHARLHSTSRPLRLIYHVAEKETLLAWVTSKFELYTCLSPLVTKAGAILVVTKLLRWVKKEEDRLFIRYPPKYSTPPATSTDQAAHNGLFTGL

SEQ ID NO: 52824 - protein, 110 aa, Homo sapiens
  Payload ID: 10522
  Gene Symbol: MON1B
  Gene Name: MON1 secretory trafficking family member B
  ENSP ID: ENSP00000455376
MEVGGDTAAPAPGGAEDLEDTQFPSEEAREGGGVHAVPPDPEDEGLEETGSKDKDQPPSPSPPPQSEALSSTSRLWSPAAPENSPTCSPESSSGGQGGDPSDEEWRSQRK

SEQ ID NO: 52825 - protein, 119 aa, Homo sapiens
  Payload ID: 10522
  Gene Symbol: MON1B
  Gene Name: MON1 secretory trafficking family member B
  ENSP ID: ENSP00000455641
MEVGGDTAAPAPGGAEDLEDTQFPSEEAREGGGVHAVPPDPEDEGLEETGAPFQDPRTRTSHPAHHHRPSQRPCQAPLGSGVLQPLRIVPHVALRVALEARAGTPVMRSGAASGSMCLC

SEQ ID NO: 52826 - protein, 167 aa, Homo sapiens
  Payload ID: 10522
  Gene Symbol: MON1B
  Gene Name: MON1 secretory trafficking family member B
  ENSP ID: ENSP00000456038
MEVGGDTAAPAPGGAEDLEDTQFPSEEAREGGGVHAVPPDPEDEGLEETGSKDKDQPPSPSPPPQSEALSSTSRLWSPAAPENSPTCSPESSSGGQGGDPSDEEWRSQRKHVFVLSEAGKPIYSRYGSVEALSATMGVMTALVSFVQSAGDAIRAIYAEDHKLVFLQ

SEQ ID NO: 52827 - protein, 101 aa, Homo sapiens
  Payload ID: 10522
  Gene Symbol: MON1B
  Gene Name: MON1 secretory trafficking family member B
  ENSP ID: ENSP00000457542
MEVGGDTAAPAPGGAEDLEDTQFPSEEAREGGGVHAVPPDPEDEGLEETGSKDKDQPPSPSPPPQSEALSSTSRLWSPAAPENSPTCSPESSSGGQGGDPS

SEQ ID NO: 52828 - protein, 255 aa, Homo sapiens
  Payload ID: 10522
  Gene Symbol: MON1B
  Gene Name: MON1 secretory trafficking family member B
  ENSP ID: ENSP00000457858
MEVGGDTAAPAPGGAEDLEDTQFPSEEAREGGGVHAVPPDPEDEGLEETGSKDKDQPPSPSPPPQSEALSSTSRLWSPAAPENSPTCSPESSSGGQGGDPSDEEWRSQRKHVFVLSEAGKPIYSRYGSVEALSATMGVMTALVSFVQSAGDAIRAIYAEDHKLVFLQQGPLLLVAMSRTSQSAAQLRGELLAVHAQIVSTLTRASVARIFAHKQNYDLRRLLAGSERTLDRLLDSMEQDPGALLLGAVRCVPLAR

SEQ ID NO: 52829 - protein, 1711 aa, Homo sapiens
  Payload ID: 10523
  Gene Symbol: MON2
  Gene Name: MON2 homolog, regulator of endosome-to-Golgi trafficking
  Uniprot ID: Q7Z3U7
  ENSP ID: ENSP00000377249
MSGTSSPEAVKKLLENMQSDLRALSLECKKKFPPVKEAAESGIIKVKTIAARNTEILAALKENSSEVVQPFLMGCGTKEPKITQLCLAAIQRLMSHEVVSETAAGNIINMLWQLMENSLEELKLLQTVLVLLTTNTVVHDEALSKAIVLCFRLHFTKDNITNNTAAATVRQVVTVVFERMVAEDERHRDIIEQPVLVQGNSNRRSVSTLKPCAKDAYMLFQDLCQLVNADAPYWLVGMTEMTRTFGLELLESVLNDFPQVFLQHQEFSFLLKERVCPLVIKLFSPNIKFRQGSSTSSSPAPVEKPYFPICMRLLRVVSVLIKQFYSLLVTECEIFLSLLVKFLDADKPQWLRAVAVESIHRFCVQPQLLRSFCQSYDMKQHSTKVFRDIVNALGSFIQSLFLVPPTGNPATSNQAGNNNLGGSVSAPANSGMVGIGGGVTLLPAFEYRGTWIPILTITVQGSAKATYLEMLDKVEPPTIPEGYAMSVAFHCLLDLVRGITSMIEGELGELETECQTTTEEGSSPTQSTEQQDLQSTSDQMDKEIVSRAVWEEMVNACWCGLLAALSLLLDASTDEAATENILKAELTMAALCGRLGLVTSRDAFITAICKGSLPPHYALTVLNTTTAATLSNKSYSVQGQSVMMISPSSESHQQVVAVGQPLAVQPQGTVMLTSKNIQCMRTLLNLAHCHGAVLGTSWQLVLATLQHLVWILGLKPSSGGALKPGRAVEGPSTVLTTAVMTDLPVISNILSRLFESSQYLDDVSLHHLINALCSLSLEAMDMAYGNNKEPSLFAVAKLLETGLVNMHRIEILWRPLTGHLLEVCQHPNSRMREWGAEALTSLIKAGLTFNHDPPLSQNQRLQLLLLNPLKEMSNINHPDIRLKQLECVLQILQSQGDSLGPGWPLVLGVMGAIRNDQGESLIRTAFQCLQLVVTDFLPTMPCTCLQIVVDVAGSFGLHNQELNISLTSIGLLWNISDYFFQRGETIEKELNKEEAAQQKQAEEKGVVLNRPFHPAPPFDCLWLCLYAKLGELCVDPRPAVRKSAGQTLFSTIGAHGTLLQHSTWHTVIWKVLFHLLDRVRESSTTADKEKIESGGGNILIHHSRDTAEKQWAETWVLTLAGVARIFNTRRYLLQPLGDFSRAWDVLLDHIQSAALSKNNEVSLAALKSFQEILQIVSPVRDSDKPETPPVVNVPVPVLIGPISGMSRPFVRTDSIGEKLGRYSSSEPPIVTDELEDLNLWWAAWNTWYRIGSESTKPPITFDKLTFIPSQPFLTALIQIFPALYQHIKTGFNMDDLQKLGVILHSAISVPISSDASPFILPSYTEAVLTSLQEAVLTALDVLQKAICVGPENMQIMYPAIFDQLLAFVEFSCKPPQYGQLETKHIANAKYNQAEWVALNYVPFAERSLEVVVDLYQKTACHKAVVNEKVLQNIIKTLRVPLSLKYSCPSESTWKLAVSSLLRVLSIGLPVARQHASSGKFDSMWPELANTFEDFLFTKSIPPDNLSIQEFQRNENIDVEVVQLISNEILPYANFIPKEFVGQIMTMLNKGSIHSQSSSFTEAEIDIRLREEFSKMCFETLLQFSFSNKVTTPQEGYISRMALSVLLKRSQDVLHRYIEDERLSGKCPLPRQQVTEIIFVLKAVSTLIDSLKKTQPENVDGNTWAQVIALYPTLVECITCSSSEVCSALKEALVPFKDFMQPPASRVQNGES

SEQ ID NO: 52830 - protein, 1717 aa, Homo sapiens
  Payload ID: 10523
  Gene Symbol: MON2
  Gene Name: MON2 homolog, regulator of endosome-to-Golgi trafficking
  Uniprot ID: Q7Z3U7
  ENSP ID: ENSP00000377250
MSGTSSPEAVKKLLENMQSDLRALSLECKKKFPPVKEAAESGIIKVKTIAARNTEILAALKENSSEVVQPFLMGCGTKEPKITQLCLAAIQRLMSHEVVSETAAGNIINMLWQLMENSLEELKLLQTVLVLLTTNTVVHDEALSKAIVLCFRLHFTKDNITNNTAAATVRQVVTVVFERMVAEDERHRDIIEQPVLVQGNSNRRSVSTLKPCAKDAYMLFQDLCQLVNADAPYWLVGMTEMTRTFGLELLESVLNDFPQVFLQHQEFSFLLKERVCPLVIKLFSPNIKFRQGSSTSSSPAPVEKPYFPICMRLLRVVSVLIKQFYSLLVTECEIFLSLLVKFLDADKPQWLRAVAVESIHRFCVQPQLLRSFCQSYDMKQHSTKVFRDIVNALGSFIQSLFLVPPTGNPATSNQAGNNNLGGSVSAPANSGMVGIGGGVTLLPAFEYRGTWIPILTITVQGSAKATYLEMLDKVEPPTIPEGYAMSVAFHCLLDLVRGITSMIEGELGELETECQTTTEEGSSPTQSTEQQDLQSTSDQMDKEIVSRAVWEEMVNACWCGLLAALSLLLDASTDEAATENILKAELTMAALCGRLGLVTSRDAFITAICKGSLPPHYALTVLNTTTAATLSNKSYSVQGQSVMMISPSSESHQQVVAVGQPLAVQPQGTVMLTSKNIQCMRTLLNLAHCHGAVLGTSWQLVLATLQHLVWILGLKPSSGGALKPGRAVEGPSTVLTTAVMTDLPVISNILSRLFESSQYLDDVSLHHLINALCSLSLEAMDMAYGNNKEPSLFAVAKLLETGLVNMHRIEILWRPLTGHLLEVCQHPNSRMREWGAEALTSLIKAGLTFNHDPPLSQNQRLQLLLLNPLKEMSNINHPDIRLKQLECVLQILQSQGDSLGPGWPLVLGVMGAIRNDQGESLIRTAFQCLQLVVTDFLPTMPCTCLQIVVDVAGSFGLHNQELNISLTSIGLLWNISDYFFQRGETIEKELNKEEAAQQKQAEEKGVVLNRPFHPAPPFDCLWLCLYAKLGELCVDPRPAVRKSAGQTLFSTIGAHGTLLQHSTWHTVIWKVLFHLLDRVRESSTTADKEKIESGGGNILIHHSRDTAEKQWAETWVLTLAGVARIFNTRRYLLQPLGDFSRAWDVLLDHIQSAALSKNNEVSLAALKSFQEILQIVSPVRDSDKPETPPVVNVPVPVLIGPISGMSRPFVRTDSIGEKLGRYSSSEPPIVTDELEDLNLWWAAWNTWYRIGSESTKPPITFDKLTFIPSQPFLTALIQIFPALYQHIKTGFNMDDLQKLGVILHSAISVPISSDASPFILPSYTEAVLTSLQEAVLTALDVLQKAICVGPENMQIMYPAIFDQLLAFVEFSCKPPQYGQLETKHIANAKYNQIQLFAPAEWVALNYVPFAERSLEVVVDLYQKTACHKAVVNEKVLQNIIKTLRVPLSLKYSCPSESTWKLAVSSLLRVLSIGLPVARQHASSGKFDSMWPELANTFEDFLFTKSIPPDNLSIQEFQRNENIDVEVVQLISNEILPYANFIPKEFVGQIMTMLNKGSIHSQSSSFTEAEIDIRLREEFSKMCFETLLQFSFSNKVTTPQEGYISRMALSVLLKRSQDVLHRYIEDERLSGKCPLPRQQVTEIIFVLKAVSTLIDSLKKTQPENVDGNTWAQVIALYPTLVECITCSSSEVCSALKEALVPFKDFMQPPASRVQNGES

SEQ ID NO: 52831 - protein, 43 aa, Homo sapiens
  Payload ID: 10523
  Gene Symbol: MON2
  Gene Name: MON2 homolog, regulator of endosome-to-Golgi trafficking
  ENSP ID: ENSP00000446626
MSGTSSPEAVKKLLENMQSDLRALSLECKKKFPPVKEVQMRGI

SEQ ID NO: 52832 - protein, 1072 aa, Homo sapiens
  Payload ID: 10523
  Gene Symbol: MON2
  Gene Name: MON2 homolog, regulator of endosome-to-Golgi trafficking
  ENSP ID: ENSP00000446635
MSGTSSPEAVKKLLENMQSDLRALSLECKKKFPPVKEAAESGIIKVKTIAARNTEILAALKENSSEVVQPFLMGCGTKEPKITQLCLAAIQRLMSHEVVSETAAGNIINMLWQLMENSLEELKLLQTVLVLLTTNTVVHDEALSKAIVLCFRLHFTKDNITNNTAAATVRQVVTVVFERMVAEDERHRDIIEQPVLVQGNSNRRSVSTLKPCAKDAYMLFQDLCQLVNADAPYWLVGMTEMTRTFGLELLESVLNDFPQVFLQHQEFSFLLKERVCPLVIKLFSPNIKFRQGSSTSSSPAPVEKPYFPICMRLLRVVSVLIKQFYSLLVTECEIFLSLLVKFLDADKPQWLRAVAVESIHRFCVQPQLLRSFCQSYDMKQHSTKVFRDIVNALGSFIQSLFLVPPTGNPATSNQAGNNNLGGSVSAPANSGMVGIGGGVTLLPAFEYRGTWIPILTITVQGSAKATYLEMLDKVEPPTIPEGYAMSVAFHCLLDLVRGITSMIEGELGELETECQTTTEEGSSPTQSTEQQDLQSTSDQMDKEIVSRAVWEEMVNACWCGLLAALSLLLDASTDEAATENILKAELTMAALCGRLGLVTSRDAFITAICKGSLPPHYALTVLNTTTAATLSNKSYSVQGQSVMMISPSSESHQQVVAVGQPLAVQPQGTVMLTSKNIQCMRTLLNLAHCHGAVLGTSWQLVLATLQHLVWILGLKPSSGGALKPGRAVEGPSTVLTTAVMTDLPVISNILSRLFESSQYLDDVSLHHLINALCSLSLEAMDMAYGNNKEPSLFAVAKLLETGLVNMHRIEILWRPLTGHLLEVCQHPNSRMREWGAEALTSLIKAGLTFNHDPPLSQNQRLQLLLLNPLKEMSNINHPDIRLKQLECVLQILQSQGDSLGPGWPLVLGVMGAIRNDQGESLIRTAFQCLQLVVTDFLPTMPCTCLQIVVDVAGSFGLHNQELNISLTSIGLLWNISDYFFQRGETIEKELNKEEAAQQKQAEEKGVVLNRPFHPAPPFDCLWLCLYAKLGELCVDPRPAVRKSAGQTLFSTIGAHGTLLQHSTWHTVIWKVL

SEQ ID NO: 52833 - protein, 1675 aa, Homo sapiens
  Payload ID: 10523
  Gene Symbol: MON2
  Gene Name: MON2 homolog, regulator of endosome-to-Golgi trafficking
  Uniprot ID: Q7Z3U7
  ENSP ID: ENSP00000447407
MSGTSSPEAVKKLLENMQSDLRALSLECKKKFPPVKEAAESGIIKVKTIAARNTEILAALKENSSEVVQPFLMGCGTKEPKITQLCLAAIQRLMSHEVVSETAAGNIINMLWQLMENSLEELKLLQTVLVLLTTNTVVHDEALSKAIVLCFRLHFTKDNITNNTAAATVRQVVTVVFERMVAEDERHRDIIEQPVLVQGNSNRRSVSTLKPCAKDAYMLFQDLCQLVNADAPYWLVGMTEMTRTFGLELLESVLNDFPQVFLQHQEFSFLLKERVCPLVIKLFSPNIKFRQGSSTSSSPAPVEKPYFPICMRLLRVVSVLIKQFYSLLVTECEIFLSLLVKFLDADKPQWLRAVAVESIHRFCVQPQLLRSFCQSYDMKQHSTKVFRDIVNALGSFIQSLFLVPPTGNPATSNQAGNNNLGGSVSAPANSGMVGIGGGVTLLPAFEYRGTWIPILTITVQGSAKATYLEMLDKVEPPTIPEGYAMSVAFHCLLDLVRGITSMIEGELGELETECQTTTEEGSSPTQSTEQQDLQSTSDQMDKEIVSRAVWEEMVNACWCGLLAALSLLLDASTDEAATENILKAELTMAALCGRLGLVTSRDAFITAICKGSLPPHYALTVLNTTTAATLSNKSYSVQGQSVMMISPSSESHQQVVAVGQPLAVQPQGTVMLTSKNIQCMRTLLNLAHCHGAVLGTSWQLVLATLQHLVWILGLKPSSGGALKPGRAVEGPSTVLTTAVMTDLPVISNILSRLFESSQYLDDVSLHHLINALCSLSLEAMDMAYGNNKEPSLFAVAKLLETGLVNMHRIEILWRPLTGHLLEVCQHPNSRMREWGAEALTSLIKAGLTFNHDPPLSQNQRLQLLLLNPLKEMSNINHPDIRLKQLECVLQILQSQGDSLGPGWPLVLGVMGAIRNDQGESLIRTAFQCLQLVVTDFLPTMPCTCLQIVVDVAGSFGLHNQELNISLTSIGLLWNISDYFFQRGETIEKELNKEEAAQQKQAEEKGVVLNRPFHPAPPFDCLWLCLYAKLGELCVDPRPAVRKSAGQTLFSTIGAHGTLLQHSTWHTVIWKVLFHLLDRVRESSTTADKEKIESGGGNILIHHSRDTAEKQWAETWVLTLAGVARIFNTRRYLLQPLGDFSRAWDVLLDHIQSAALSKNNEVSLAALKSFQEILQIVSPVRDSDKPETPPVVNVPVPVLIGPISGMSRPFVRTDSIGEKLGRYSSSEPPIVTDELEDLNLWWAAWNTWYRIGSESTKPPITFDKLTFIPSQPFLTALIQIFPALYQHIKTGFNMDDLQKLGVILHSAISVPISSDASPFILPSYTEAVLTSLQEAVLTALDVLQKAICVGPENMQIMYPAIFDQLLAFVEFSCKPPQYGQLETKHIANAKYNQIQLFAPAEWVALNYVPFAERSLEVVVDLYQKTACHKAVVNEKVLQNIIKTLRVPLSLKYSCPSESTWKLAVSSLLRVLSIGLPVARQHASSGKFDSMWPELANTFEDFLFTKSIPPDNLSIQEFQRNENIDVEVVQLISNEILPYANFIPKEFVGQIMTMLNKGSIHSQSSSFTEAEIDIRLREEFSKMCFETLLQFSFSNKVTTPQEGYISRMALSVLLKRSQDVLHRYIEDERLSGKCPLPRQQVTEIIFVLKAVSTLIDSLKKTQPENACISLFGIPPYF

SEQ ID NO: 52834 - protein, 1688 aa, Homo sapiens
  Payload ID: 10523
  Gene Symbol: MON2
  Gene Name: MON2 homolog, regulator of endosome-to-Golgi trafficking
  Uniprot ID: Q7Z3U7
  ENSP ID: ENSP00000449215
MSGTSSPEAVKKLLENMQSDLRALSLECKKKFPPVKEAAESGIIKVKTIAARNTEILAALKENSSEVVQPFLMGCGTKEPKITQLCLAAIQRLMSHEVVSETAAGNIINMLWQLMENSLEELKLLQTVLVLLTTNTVVHDEALSKAIVLCFRLHFTKDNITNNTAAATVRQVVTVVFERMVAEDERHRDIIEQPVLVQGNSNRRSVSTLKPCAKDAYMLFQDLCQLVNADAPYWLVGMTEMTRTFGLELLESVLNDFPQVFLQHQEFSFLLKERVCPLVIKLFSPNIKFRQGSSTSSSPAPVEKPYFPICMRLLRVVSVLIKQFYSLLVTECEIFLSLLVKFLDADKPQWLRAVAVESIHRFCVQPQLLRSFCQSYDMKQHSTKVFRDIVNALGSFIQSLFLVPPTGNPATSNQAGNNNLGGSVSAPANSGMVGIGGGVTLLPAFEYRGTWIPILTITVQGSAKATYLEMLDKVEPPTIPEGYAMSVAFHCLLDLVRGITSMIEGELGELETECQTTTEEGSSPTQSTEQQDLQSTSDQMDKEIVSRAVWEEMVNACWCGLLAALSLLLDASTDEAATENILKAELTMAALCGRLGLVTSRDAFITAICKAYSVQGQSVMMISPSSESHQQVVAVGQPLAVQPQGTVMLTSKNIQCMRTLLNLAHCHGAVLGTSWQLVLATLQHLVWILGLKPSSGGALKPGRAVEGPSTVLTTAVMTDLPVISNILSRLFESSQYLDDVSLHHLINALCSLSLEAMDMAYGNNKEPSLFAVAKLLETGLVNMHRIEILWRPLTGHLLEVCQHPNSRMREWGAEALTSLIKAGLTFNHDPPLSQNQRLQLLLLNPLKEMSNINHPDIRLKQLECVLQILQSQGDSLGPGWPLVLGVMGAIRNDQGESLIRTAFQCLQLVVTDFLPTMPCTCLQIVVDVAGSFGLHNQELNISLTSIGLLWNISDYFFQRGETIEKELNKEEAAQQKQAEEKGVVLNRPFHPAPPFDCLWLCLYAKLGELCVDPRPAVRKSAGQTLFSTIGAHGTLLQHSTWHTVIWKVLFHLLDRVRESSTTADKEKIESGGGNILIHHSRDTAEKQWAETWVLTLAGVARIFNTRRYLLQPLGDFSRAWDVLLDHIQSAALSKNNEVSLAALKSFQEILQIVSPVRDSDKPETPPVVNVPVPVLIGPISGMSRPFVRTDSIGEKLGRYSSSEPPIVTDELEDLNLWWAAWNTWYRIGSESTKPPITFDKLTFIPSQPFLTALIQIFPALYQHIKTGFNMDDLQKLGVILHSAISVPISSDASPFILPSYTEAVLTSLQEAVLTALDVLQKAICVGPENMQIMYPAIFDQLLAFVEFSCKPPQYGQLETKHIANAKYNQAEWVALNYVPFAERSLEVVVDLYQKTACHKAVVNEKVLQNIIKTLRVPLSLKYSCPSESTWKLAVSSLLRVLSIGLPVARQHASSGKFDSMWPELANTFEDFLFTKSIPPDNLSIQEFQRNENIDVEVVQLISNEILPYANFIPKEFVGQIMTMLNKGSIHSQSSSFTEAEIDIRLREEFSKMCFETLLQFSFSNKVTTPQEGYISRMALSVLLKRSQDVLHRYIEDERLSGKCPLPRQQVTEIIFVLKAVSTLIDSLKKTQPENVDGNTWAQVIALYPTLVECITCSSSEVCSALKEALVPFKDFMQPPASRVQNGES

SEQ ID NO: 52835 - protein, 59 aa, Homo sapiens
  Payload ID: 10523
  Gene Symbol: MON2
  Gene Name: MON2 homolog, regulator of endosome-to-Golgi trafficking
  ENSP ID: ENSP00000450136
MSGTSSPEAVKKLLENMQSDLRALSLECKKKFPPVKEAAESGIIKVKTIAARNTEILAG

SEQ ID NO: 52836 - protein, 335 aa, Homo sapiens
  Payload ID: 10524
  Gene Symbol: MOGAT1
  Gene Name: monoacylglycerol O-acyltransferase 1
  Uniprot ID: Q96PD6
  ENSP ID: ENSP00000406674
MKVEFAPLNIQLARRLQTVAVLQWVLKYLLLGPMSIGITVMLIIHNYLFLYIPYLMWLYFDWHTPERGGRRSSWIKNWTLWKHFKDYFPIHLIKTQDLDPSHNYIFGFHPHGIMAVGAFGNFSVNYSDFKDLFPGFTSYLHVLPLWFWCPVFREYVMSVGLVSVSKKSVSYMVSKEGGGNISVIVLGGAKESLDAHPGKFTLFIRQRKGFVKIALTHGASLVPVVSFGENELFKQTDNPEGSWIRTVQNKLQKIMGFALPLFHARGVFQYNFGLMTYRKAIHTVVGRPIPVRQTLNPTQEQIEELHQTYMEELRKLFEEHKGKYGIPEHETLVLK

SEQ ID NO: 52837 - protein, 334 aa, Homo sapiens
  Payload ID: 10525
  Gene Symbol: MOGAT2
  Gene Name: monoacylglycerol O-acyltransferase 2
  Uniprot ID: Q3SYC2
  ENSP ID: ENSP00000198801
MVEFAPLFMPWERRLQTLAVLQFVFSFLALAEICTVGFIALLFTRFWLLTVLYAAWWYLDRDKPRQGGRHIQAIRCWTIWKYMKDYFPISLVKTAELDPSRNYIAGFHPHGVLAVGAFANLCTESTGFSSIFPGIRPHLMMLTLWFRAPFFRDYIMSAGLVTSEKESAAHILNRKGGGNLLGIIVGGAQEALDARPGSFTLLLRNRKGFVRLALTHGAPLVPIFSFGENDLFDQIPNSSGSWLRYIQNRLQKIMGISLPLFHGRGVFQYSFGLIPYRRPITTVVGKPIEVQKTLHPSEEEVNQLHQRYIKELCNLFEAHKLKFNIPADQHLEFC

SEQ ID NO: 52838 - protein, 252 aa, Homo sapiens
  Payload ID: 10525
  Gene Symbol: MOGAT2
  Gene Name: monoacylglycerol O-acyltransferase 2
  Uniprot ID: Q3SYC2
  ENSP ID: ENSP00000436283
MKDYFPISLVKTAELDPSRNYIAGFHPHGVLAVGAFANLCTESTGFSSIFPGIRPHLMMLTLWFRAPFFRDYIMSAGLVTSEKESAAHILNRKGGGNLLGIIVGGAQEALDARPGSFTLLLRNRKGFVRLALTHGAPLVPIFSFGENDLFDQIPNSSGSWLRYIQNRLQKIMGISLPLFHGRGVFQYSFGLIPYRRPITTVVGKPIEVQKTLHPSEEEVNQLHQRYIKELCNLFEAHKLKFNIPADQHLEFC

SEQ ID NO: 52839 - protein, 284 aa, Homo sapiens
  Payload ID: 10525
  Gene Symbol: MOGAT2
  Gene Name: monoacylglycerol O-acyltransferase 2
  Uniprot ID: Q3SYC2
  ENSP ID: ENSP00000436537
MVEFAPLFMPWERRLQTLAVLQFVFSFLALAEICTVGFIALLFTRFWLLTVLYAAWWYLDRDKPRQGGRHIQAIRCWTIWKYMKDYFPISLVKTAELDPSRNYIAGFHPHGVLAVGAFANLCTESTGFSSIFPGIRPHLMMLTLWFRAPFFRDYIMSAGLVTSEKESAAHILNRKGGGNLLGIIVGGAQEALDARPGSFTLLLRNRKGFVRLALTHGYQASGKSTLGSVGNWQGFYFGGKMAETNADSILVEIFSPFTIKIIFWCLMPKYLEKFPQRRLSDLRN

SEQ ID NO: 52840 - protein, 341 aa, Homo sapiens
  Payload ID: 10526
  Gene Symbol: MOGAT3
  Gene Name: monoacylglycerol O-acyltransferase 3
  Uniprot ID: Q86VF5
  ENSP ID: ENSP00000223114
MGVATTLQPPTTSKTLQKQHLEAVGAYQYVLTFLFMGPFFSLLVFVLLFTSLWPFSVFYLVWLYVDWDTPNQGGRRSEWIRNRAIWRQLRDYYPVKLVKTAELPPDRNYVLGAHPHGIMCTGFLCNFSTESNGFSQLFPGLRPWLAVLAGLFYLPVYRDYIMSFGLCPVSRQSLDFILSQPQLGQAVVIMVGGAHEALYSVPGEHCLTLQKRKGFVRLALRHGASLVPVYSFGENDIFRLKAFATGSWQHWCQLTFKKLMGFSPCIFWGRGLFSATSWGLLPFAVPITTVVGRPIPVPQRLHPTEEEVNHYHALYMTALEQLFEEHKESCGVPASTCLTFI

SEQ ID NO: 52841 - protein, 281 aa, Homo sapiens
  Payload ID: 10526
  Gene Symbol: MOGAT3
  Gene Name: monoacylglycerol O-acyltransferase 3
  Uniprot ID: Q86VF5
  ENSP ID: ENSP00000368734
MGVATTLQPPTTSKTLQKQHLEAVGAYQYVLTFLFMGPFFSLLVFVLLFTSLWPFSVFYLVWLYVDWDTPNQGGRRSEWIRNRAIWRQLRDYYPVKLVKTAELPPDRNYVLGAHPHGIMCTGFLCNFSTESNGFSQLFPGLRPWLAVLAGLFYLPVYRDYIMSFGLCPVSRQSLDFILSQPQLGQAVVIMVGGAHEALYSVPGEHCLTLQKRKGFVRLALRHGGPPHPRPPAPPPHRGGSQSLSRPLHDGPGAALRGAQGKLWGPRFHLPHLHLGLAAAFR

SEQ ID NO: 52842 - protein, 344 aa, Homo sapiens
  Payload ID: 10526
  Gene Symbol: MOGAT3
  Gene Name: monoacylglycerol O-acyltransferase 3
  Uniprot ID: Q86VF5
  ENSP ID: ENSP00000403756
MGVATTLQPPTTSKTLQKQHLEAVGAYQYVLTFLFMGPFFSLLVFVLLFTSLWPFSVFYLVWLYVDWDTPNQGGRRSEWIRNRAIWRQLRDYYPVKLVKTAELPPDRNYVLGAHPHGIMCTGFLCNFSTESNGFSQLFPGLRPWLAVLAGLFYLPVYRDYIMSFGLCPVSRQSLDFILSQPQLGQAVVIMVGGAHEALYSVPGEHCLTLQKRKGFVRLALRHGASLVPVYSFGENDIFRLKAFATGSWQHWCQLTFKKLMGFSPCIFWGRGLFSATSWGLLPFAVPITTVGECPPPGGRPPAAAWASGIPRPPVSLSLQWAAPSPSPSASTPPRRKSITITPST

SEQ ID NO: 52843 - protein, 527 aa, Homo sapiens
  Payload ID: 10527
  Gene Symbol: MAOA
  Gene Name: monoamine oxidase A
  Uniprot ID: P21397
  ENSP ID: ENSP00000340684
MENQEKASIAGHMFDVVVIGGGISGLSAAKLLTEYGVSVLVLEARDRVGGRTYTIRNEHVDYVDVGGAYVGPTQNRILRLSKELGIETYKVNVSERLVQYVKGKTYPFRGAFPPVWNPIAYLDYNNLWRTIDNMGKEIPTDAPWEAQHADKWDKMTMKELIDKICWTKTARRFAYLFVNINVTSEPHEVSALWFLWYVKQCGGTTRIFSVTNGGQERKFVGGSGQVSERIMDLLGDQVKLNHPVTHVDQSSDNIIIETLNHEHYECKYVINAIPPTLTAKIHFRPELPAERNQLIQRLPMGAVIKCMMYYKEAFWKKKDYCGCMIIEDEDAPISITLDDTKPDGSLPAIMGFILARKADRLAKLHKEIRKKKICELYAKVLGSQEALHPVHYEEKNWCEEQYSGGCYTAYFPPGIMTQYGRVIRQPVGRIFFAGTETATKWSGYMEGAVEAGERAAREVLNGLGKVTEKDIWVQEPESKDVPAVEITHTFWERNLPSVSGLLKIIGFSTSVTALGFVLYKYKLLPRS

SEQ ID NO: 52844 - protein, 394 aa, Homo sapiens
  Payload ID: 10527
  Gene Symbol: MAOA
  Gene Name: monoamine oxidase A
  Uniprot ID: P21397
  ENSP ID: ENSP00000440846
MGKEIPTDAPWEAQHADKWDKMTMKELIDKICWTKTARRFAYLFVNINVTSEPHEVSALWFLWYVKQCGGTTRIFSVTNGGQERKFVGGSGQVSERIMDLLGDQVKLNHPVTHVDQSSDNIIIETLNHEHYECKYVINAIPPTLTAKIHFRPELPAERNQLIQRLPMGAVIKCMMYYKEAFWKKKDYCGCMIIEDEDAPISITLDDTKPDGSLPAIMGFILARKADRLAKLHKEIRKKKICELYAKVLGSQEALHPVHYEEKNWCEEQYSGGCYTAYFPPGIMTQYGRVIRQPVGRIFFAGTETATKWSGYMEGAVEAGERAAREVLNGLGKVTEKDIWVQEPESKDVPAVEITHTFWERNLPSVSGLLKIIGFSTSVTALGFVLYKYKLLPRS

SEQ ID NO: 52845 - protein, 520 aa, Homo sapiens
  Payload ID: 10528
  Gene Symbol: MAOB
  Gene Name: monoamine oxidase B
  Uniprot ID: P27338
  ENSP ID: ENSP00000367309
MSNKCDVVVVGGGISGMAAAKLLHDSGLNVVVLEARDRVGGRTYTLRNQKVKYVDLGGSYVGPTQNRILRLAKELGLETYKVNEVERLIHHVKGKSYPFRGPFPPVWNPITYLDHNNFWRTMDDMGREIPSDAPWKAPLAEEWDNMTMKELLDKLCWTESAKQLATLFVNLCVTAETHEVSALWFLWYVKQCGGTTRIISTTNGGQERKFVGGSGQVSERIMDLLGDRVKLERPVIYIDQTRENVLVETLNHEMYEAKYVISAIPPTLGMKIHFNPPLPMMRNQMITRVPLGSVIKCIVYYKEPFWRKKDYCGTMIIDGEEAPVAYTLDDTKPEGNYAAIMGFILAHKARKLARLTKEERLKKLCELYAKVLGSLEALEPVHYEEKNWCEEQYSGGCYTTYFPPGILTQYGRVLRQPVDRIYFAGTETATHWSGYMEGAVEAGERAAREILHAMGKIPEDEIWQSEPESVDVPAQPITTTFLERHLPSVPGLLRLIGLTTIFSATALGFLAHKRGLLVRV

SEQ ID NO: 52846 - protein, 238 aa, Homo sapiens
  Payload ID: 10529
  Gene Symbol: MMD
  Gene Name: monocyte to macrophage differentiation-associated
  Uniprot ID: Q15546
  ENSP ID: ENSP00000262065
MRFKNRFQRFMNHRAPANGRYKPTCYEHAANCYTHAFLIVPAIVGSALLHRLSDDCWEKITAWIYGMGLCALFIVSTVFHIVSWKKSHLRTVEHCFHMCDRMVIYFFIAASYAPWLNLRELGPLASHMRWFIWLMAAGGTIYVFLYHEKYKVVELFFYLTMGFSPALVVTSMNNTDGLQELACGGLIYCLGVVFFKSDGIIPFAHAIWHLFVATAAAVHYYAIWKYLYRSPTDFMRHL

SEQ ID NO: 52847 - protein, 147 aa, Homo sapiens
  Payload ID: 10529
  Gene Symbol: MMD
  Gene Name: monocyte to macrophage differentiation-associated
  ENSP ID: ENSP00000459202
MRFKNRFQRFMNHRAPANGRYKPTCYEHAANCYTHAFLIVPAIVGSALLHRLSDDCWEKITAWIYGMGLCALFIVSTVFHIVSWKKSHLRLNLRELGPLASHMRWFIWLMAAGGTIYVFLYHEKYKVVELFFYLTMGFSPALVVTSM

SEQ ID NO: 52848 - protein, 246 aa, Homo sapiens
  Payload ID: 10530
  Gene Symbol: MMD2
  Gene Name: monocyte to macrophage differentiation-associated 2
  Uniprot ID: Q8IY49
  ENSP ID: ENSP00000384141
MFAPRLLDFQKTKYARFMNHRVPAHKRYQPTEYEHAANCATHAFWIIPSILGSSNLYFLSDDDWETISAWIYGLGLCGLFVVSTVFHTISWKKSHLRMVEHCLHMFDRMVIYFFIAASYAPWLNLRELGPWASHMRWLVWIMASVGTIYVFFFHERYKLVELLCYVVMGFFPALVILSMPNTEGIWELVTGGVFYCLGMVFFKSDGRIPFAHAIWHLFVAFGAGTHYYAIWRYLYLPSTLQTKVSK

SEQ ID NO: 52849 - protein, 270 aa, Homo sapiens
  Payload ID: 10530
  Gene Symbol: MMD2
  Gene Name: monocyte to macrophage differentiation-associated 2
  Uniprot ID: Q8IY49
  ENSP ID: ENSP00000384690
MFAPRLLDFQKTKYARFMNHRVPAHKRYQPTEYEHAANCATHAFWIIPSILGSSNLYFLSDDDWETISAWIYGLGLCGLFVVSTVFHTISWKKSHLRMVEHCLHMFDRMVIYFFIAASYAPWLNLRELGPWASHMRWLVWIMASVGTIYVFFFHERTGSCVQFLRGEACPKAGTACLPARYKLVELLCYVVMGFFPALVILSMPNTEGIWELVTGGVFYCLGMVFFKSDGRIPFAHAIWHLFVAFGAGTHYYAIWRYLYLPSTLQTKVSK

SEQ ID NO: 52850 - protein, 193 aa, Homo sapiens
  Payload ID: 10530
  Gene Symbol: MMD2
  Gene Name: monocyte to macrophage differentiation-associated 2
  Uniprot ID: Q8IY49
  ENSP ID: ENSP00000385963
MFAPRLLDFQKTKYARFMNHRVPAHKRYQPTEYEHAANCATHAFWIIPSILGSSNLYFLSDDDWETISAWIYGLGLCGLFVVSTVFHTISWKKSHLRMVEHCLHMFDRMVIYFFIAASYAPWLNLRELGPWASHMRWLVWIMASVGTIYVFFFHERYKLVELLCYVVMGFFPALVILSMAGKLRPGMTCLKRQ

SEQ ID NO: 52851 - protein, 193 aa, Homo sapiens; identical to SEQ ID NO: 52850
  Payload ID: 10530
  Gene Symbol: MMD2
  Gene Name: monocyte to macrophage differentiation-associated 2
  Uniprot ID: Q8IY49
  ENSP ID: ENSP00000484193

SEQ ID NO: 52852 - protein, 313 aa, Homo sapiens
  Payload ID: 10531
  Gene Symbol: MGLL
  Gene Name: monoglyceride lipase
  ENSP ID: ENSP00000265052
METGPEDPSSMPEESSPRRTPQSIPYQDLPHLVNADGQYLFCRYWKPTGTPKALIFVSHGAGEHSGRYEELARMLMGLDLLVFAHDHVGHGQSEGERMVVSDFHVFVRDVLQHVDSMQKDYPGLPVFLLGHSMGGAIAILTAAERPGHFAGMVLISPLVLANPESATTFKVLAAKVLNLVLPNLSLGPIDSSVLSRNKTEVDIYNSDPLICRAGLKVCFGIQLLNAVSRVERALPKLTVPFLLLQGSADRLCDSKGAYLLMELAKSQDKTLKIYEGAYHVLHKELPEVTNSVFHEINMWVSQRTATAGTASPP

SEQ ID NO: 52853 - protein, 277 aa, Homo sapiens
  Payload ID: 10531
  Gene Symbol: MGLL
  Gene Name: monoglyceride lipase
  ENSP ID: ENSP00000381173
MQTRFRRIFPWKDASTKRMPEFIHFSPLKPYKGREWEKAGSEHVLETHLLPVGHGQSEGERMVVSDFHVFVRDVLQHVDSMQKDYPGLPVFLLGHSMGGAIAILTAAERPGHFAGMVLISPLVLANPESATTFKVLAAKVLNLVLPNLSLGPIDSSVLSRNKTEVDIYNSDPLICRAGLKVCFGIQLLNAVSRVERALPKLTVPFLLLQGSADRLCDSKGAYLLMELAKSQDKTLKIYEGAYHVLHKELPEVTNSVFHEINMWVSQRTATAGTASPP

SEQ ID NO: 52854 - protein, 303 aa, Homo sapiens
  Payload ID: 10531
  Gene Symbol: MGLL
  Gene Name: monoglyceride lipase
  Uniprot ID: Q99685
  ENSP ID: ENSP00000381176
MPEESSPRRTPQSIPYQDLPHLVNADGQYLFCRYWKPTGTPKALIFVSHGAGEHSGRYEELARMLMGLDLLVFAHDHVGHGQSEGERMVVSDFHVFVRDVLQHVDSMQKDYPGLPVFLLGHSMGGAIAILTAAERPGHFAGMVLISPLVLANPESATTFKVLAAKVLNLVLPNLSLGPIDSSVLSRNKTEVDIYNSDPLICRAGLKVCFGIQLLNAVSRVERALPKLTVPFLLLQGSADRLCDSKGAYLLMELAKSQDKTLKIYEGAYHVLHKELPEVTNSVFHEINMWVSQRTATAGTASPP

SEQ ID NO: 52855 - protein, 303 aa, Homo sapiens; identical to SEQ ID NO: 52854
  Payload ID: 10531
  Gene Symbol: MGLL
  Gene Name: monoglyceride lipase
  Uniprot ID: Q99685
  ENSP ID: ENSP00000402798

SEQ ID NO: 52856 - protein, 283 aa, Homo sapiens
  Payload ID: 10531
  Gene Symbol: MGLL
  Gene Name: monoglyceride lipase
  Uniprot ID: Q99685
  ENSP ID: ENSP00000404146
METGPEDPSSMPEESSPRRTPQSIPYQDLPHLVNADGQYLFCRYWKPTGTPKALIFVSHGAGEHSGRYEELARMLMGLDLLVFAHDHVGHGQSEGERMVVSDFHVFVRDVLQHVDSMQKDYPGLPVFLLGHSMGGAIAILTAAERPGHFAGMVLISPLVLANPESATTFKVDIYNSDPLICRAGLKVCFGIQLLNAVSRVERALPKLTVPFLLLQGSADRLCDSKGAYLLMELAKSQDKTLKIYEGAYHVLHKELPEVTNSVFHEINMWVSQRTATAGTASPP

SEQ ID NO: 52857 - protein, 209 aa, Homo sapiens
  Payload ID: 10531
  Gene Symbol: MGLL
  Gene Name: monoglyceride lipase
  ENSP ID: ENSP00000417060
  MOD_RES (1)..(1): Any amino acid
XLQGGAIAILTAAERPGHFAGMVLISPLVLANPESATTFKDYSRILKHLMEKASRMLKFWIPRPFWVLAAKVLNLVLPNLSLGPIDSSVLSRNKTEVDIYNSDPLICRAGLKVCFGIQLLNAVSRVERALPKLTVPFLLLQGSADRLCDSKGAYLLMELAKSQDKTLKIYEGAYHVLHKELPEVTNSVFHEINMWVSQRTATAGTASPP

SEQ ID NO: 52858 - protein, 77 aa, Homo sapiens
  Payload ID: 10531
  Gene Symbol: MGLL
  Gene Name: monoglyceride lipase
  ENSP ID: ENSP00000417489
MPEESSPRRTPQSIPYQDLPHLVNADGQYLFCRYWKPTGTPKALIFVSHGAGEHSGRYEELARMLMGLDLLVFAHDH

SEQ ID NO: 52859 - protein, 89 aa, Homo sapiens
  Payload ID: 10531
  Gene Symbol: MGLL
  Gene Name: monoglyceride lipase
  ENSP ID: ENSP00000417689
MLMGLDLLVFAHDHVGHGQSEGERMVVSDFHVFVRDVLQHVDSMQKDYPGLPVFLLGHSMGGAIAILTAAERPGHFAGMVLISPLVLAN

SEQ ID NO: 52860 - protein, 197 aa, Homo sapiens
  Payload ID: 10531
  Gene Symbol: MGLL
  Gene Name: monoglyceride lipase
  ENSP ID: ENSP00000419340
PVGHGQSEGERMVVSDFHVFVRDVLQHVDSMQKDYPGLPVFLLGHSMGGAIAILTAAERPGHFAGMVLISPLVLANPESATTFKVDIYNSDPLICRAGLKVCFGIQLLNAVSRVERALPKLTVPFLLLQGSADRLCDSKGAYLLMELAKSQDKTLKIYEGAYHVLHKELPEVTNSVFHEINMWVSQRTATAGTASPP

SEQ ID NO: 52861 - protein, 155 aa, Homo sapiens [sequence omitted]

SEQ ID NO: 52862 - protein, 545 aa, Homo sapiens
  Payload ID: 10532
  Gene Symbol: MOXD1
  Gene Name: monooxygenase, DBH-like 1
  Uniprot ID: Q6UVY6
  ENSP ID: ENSP00000336998
MNSFLSVFRYPDFSFPYFPQDYFTNANRELKKDAQQDYHLEYAMENSTHTIIEFTRELHTCDINDKSITDSTVRVIWAYHHEDAGEAGPKYHDSNRGTKSLRLLNPEKTSVLSTALPYFDLVNQDVPIPNKDTTYWCQMFKIPVFQEKHHVIKVEPVIQRGHESLVHHILLYQCSNNFNDSVLESGHECYHPNMPDAFLTCETVIFAWAIGGEGFSYPPHVGLSLGTPLDPHYVLLEVHYDNPTYEEGLIDNSGLRLFYTMDIRKYDAGVIEAGLWVSLFHTIPPGMPEFQSEGHCTLECLEEALEAEKPSGIHVFAVLLHAHLAGRGIRLRHFRKGKEMKLLAYDDDFDFNFQEFQYLKEEQTILPGDNLITECRYNTKDRAEMTWGGLSTRSEMCLSYLLYYPRINLTRCASIPDIMEQLQFIGVKEIYRPVTTWPFIIKSPKQYKNLSFMDAMNKFKWTKKEGLSFNKLVLSLPVNVRCSKTDNAEWSIQGMTALPPDIERPYKAEPLVCGTSSSSSLHRDFSINLLVCLLLLSCTLSTKSL

SEQ ID NO: 52863 - protein, 613 aa, Homo sapiens
  Payload ID: 10532
  Gene Symbol: MOXD1
  Gene Name: monooxygenase, DBH-like 1
  Uniprot ID: Q6UVY6
  ENSP ID: ENSP00000356940
MCCWPLLLLWGLLPGTAAGGSGRTYPHRTLLDSEGKYWLGWSQRGSQIAFRLQVRTAGYVGFGFSPTGAMASADIVVGGVAHGRPYLQDYFTNANRELKKDAQQDYHLEYAMENSTHTIIEFTRELHTCDINDKSITDSTVRVIWAYHHEDAGEAGPKYHDSNRGTKSLRLLNPEKTSVLSTALPYFDLVNQDVPIPNKDTTYWCQMFKIPVFQEKHHVIKVEPVIQRGHESLVHHILLYQCSNNFNDSVLESGHECYHPNMPDAFLTCETVIFAWAIGGEGFSYPPHVGLSLGTPLDPHYVLLEVHYDNPTYEEGLIDNSGLRLFYTMDIRKYDAGVIEAGLWVSLFHTIPPGMPEFQSEGHCTLECLEEALEAEKPSGIHVFAVLLHAHLAGRGIRLRHFRKGKEMKLLAYDDDFDFNFQEFQYLKEEQTILPGDNLITECRYNTKDRAEMTWGGLSTRSEMCLSYLLYYPRINLTRCASIPDIMEQLQFIGVKEIYRPVTTWPFIIKSPKQYKNLSFMDAMNKFKWTKKEGLSFNKLVLSLPVNVRCSKTDNAEWSIQGMTALPPDIERPYKAEPLVCGTSSSSSLHRDFSINLLVCLLLLSCTLSTKSL

SEQ ID NO: 52864 - protein, 115 aa, Homo sapiens
  Payload ID: 10532
  Gene Symbol: MOXD1
  Gene Name: monooxygenase, DBH-like 1
  ENSP ID: ENSP00000376202
MCCWPLLLLWGLLPGTAAGGSGRTYPHRTLLDSEGKYWLGWSQRGSQIAFRLQVRTAGYVGFGFSPTGAMASADIVVGGVAHGRPYLQPCLLVSKTEACDAKCLQQQGNCCRATC

SEQ ID NO: 52865 - protein, 984 aa, Homo sapiens
  Payload ID: 10533
  Gene Symbol: MORC1
  Gene Name: MORC family CW-type zinc finger 1
  Uniprot ID: Q86VD1
  ENSP ID: ENSP00000232603
MDDRYPALQRAQLRLDFIHANSTTHSFLFGALAELLDNARDAGAERLDVFSVDNEKLQGGFMLCFLDDGCGMSPEEASDIIYFGRSKKRLSTLKFIGQYGNGLKSGSMRIGKDFILFTKKEETMTCVFFSQTFCEEESLSEVVVPMPSWLIRTRESVTDDPQKFAMELSIIYKYSPFKTEAELMQQFDVIYGKCGTLLVIYNLKLLLNGEPELDVKTDKEDILMAGALEDFPARWSFRAYTSVLYFNPWMRIFIQAKRVKTKHLCYCLYRPRKYLYVTSSFKGAFKDEVKKAEEAVKIAESILKEAQIKVNQCDRTSLSSAKDVLQRALEDVEAKQKNLKEKQRELKTARTLSLFYGVNVENRSQAGMFIYSNNRLIKMHEKVGSQLKLKSLLGAGVVGIVNIPLEVMEPSHNKQEFLNVQEYNHLLKVMGQYLVQYCKDTGINNRNLTLFCNEFGYQNDIDVEKPLNSFQYQRRQAMGIPFIIQCDLCLKWRVLPSSTNYQEKEFFDIWICANNPNRLENSCHQVECLPSIPLGTMSTISPSKNEKEKQLRESVIKYQNRLAEQQPQPQFIPVDEITVTSTCLTSAHKENTKTQKIRLLGDDLKHESLSSFELSASRRGQKRNIEETDSDVEYISETKIMKKSMEEKMNSQQQRIPVALPENVKLAERSQRSQIANITTVWRAQPTEGCLKNAQAASWEMKRKQSLNFVEECKVLTEDENTSDSDIILVSDKSNTDVSLKQEKKEIPLLNQEKQELCNDVLAMKRSSSLPSWKSLLNVPMEDVNLSSGHIARVSVSGSCKVASSPASSQSTPVKETVRKLKSKLREILLYFFPEHQLPSELEEPALSCELEQCPEQMNKKLKMCFNQIQNTYMVQYEKKIKRKLQSIIYDSNTRGIHNEISLGQCENKRKISEDKLKNLRIKLALLLQKLQLGGPEGDLEQTDTYLEALLKEDNLLFQNNLNKVTIDARHRLPLEKNEKTSEN

SEQ ID NO: 52866 - protein, 963 aa, Homo sapiens
  Payload ID: 10533
  Gene Symbol: MORC1
  Gene Name: MORC family CW-type zinc finger 1
  Uniprot ID: Q86VD1
  ENSP ID: ENSP00000417282
MDDRYPALQRAQLRLDFIHANSTTHSFLFGALAELLDNARDAGAERLDVFSVDNEKLQGGFMLCFLDDGCGMSPEEASDIIYFGRSKKRLSTLKFIGQYGNGLKSGSMRIGKDFILFTKKEETMTCVFFSQTFCEEESLSEVVVPMPSWLIRTRESVTDDPQKFAMELSIIYKYSPFKTEAELMQQFDVIYGKCGTLLVIYNLKLLLNGEPELDVKTDKEDILMAGALEDFPARWSFRAYTSVLYFNPWMRIFIQAKRVKTKHLCYCLYRPRKYLYVTSSFKGAFKDEVKKAEEAVKIAESILKEAQIKVNQCDRTSLSSAKDVLQRALEDVEAKQKNLKEKQRELKTARTLSLFYGVNVENRSQAGMFIYSNNRLIKMHEKVGSQLKLKSLLGAGVVGIVNIPLEVMEPSHNKQEFLNVQEYNHLLKVMGQYLVQYCKDTGINNRNLTLFCNEFGYQNDIDVEKPLNSFQYQRRQAMGIPFIIQCDLCLKWRVLPSSTNYQEKEFFDIWICANNPNRLENSCHQVECLPSIPLGTMSTISPSKNEKEKQLRESVIKYQNRLAEQQPQENTKTQKIRLLGDDLKHESLSSFELSASRRGQKRNIEETDSDVEYISETKIMKKSMEEKMNSQQQRIPVALPENVKLAERSQRSQIANITTVWRAQPTEGCLKNAQAASWEMKRKQSLNFVEECKVLTEDENTSDSDIILVSDKSNTDVSLKQEKKEIPLLNQEKQELCNDVLAMKRSSSLPSWKSLLNVPMEDVNLSSGHIARVSVSGSCKVASSPASSQSTPVKETVRKLKSKLREILLYFFPEHQLPSELEEPALSCELEQCPEQMNKKLKMCFNQIQNTYMVQYEKKIKRKLQSIIYDSNTRGIHNEISLGQCENKRKISEDKLKNLRIKLALLLQKLQLGGPEGDLEQTDTYLEALLKEDNLLFQNNLNKVTIDARHRLPLEKNEKTSEN

SEQ ID NO: 52867 - protein, 970 aa, Homo sapiens
  Payload ID: 10534
  Gene Symbol: MORC2
  Gene Name: MORC family CW-type zinc finger 2
  Uniprot ID: Q9Y6X9
  ENSP ID: ENSP00000215862
MLCFLDDGAGMDPSDAASVIQFGKSAKRTPESTQIGQYGNGLKSGSMRIGKDFILFTKKEDTMTCLFLSRTFHEEEGIDEVIVPLPTWNARTREPVTDNVEKFAIETELIYKYSPFRTEEEVMTQFMKIPGDSGTLVIIFNLKLMDNGEPELDIISNPRDIQMAETSPEGTKPERRSFRAYAAVLYIDPRMRIFIHGHKVQTKRLSCCLYKPRMYKYTSSRFKTRAEQEVKKAEHVARIAEEKAREAESKARTLEVRLGGDLTRDSRVMLRQVQNRAITLRREADVKKRIKEAKQRALKEPKELNFVFGVNIEHRDLDGMFIYNCSRLIKMYEKVGPQLEGGMACGGVVGVVDVPYLVLEPTHNKQDFADAKEYRHLLRAMGEHLAQYWKDIAIAQRGIIKFWDEFGYLSANWNQPPSSELRYKRRRAMEIPTTIQCDLCLKWRTLPFQLSSVEKDYPDTWVCSMNPDPEQDRCEASEQKQKVPLGTFRKDMKTQEEKQKQLTEKIRQQQEKLEALQKTTPIRSQADLKKLPLEVTTRPSTEEPVRRPQRPRSPPLPAVIRNAPSRPPSLPTPRPASQPRKAPVISSTPKLPALAAREEASTSRLLQPPEAPRKPANTLVKTASRPAPLVQQLSPSLLPNSKSPREVPSPKVIKTPVVKKTESPIKLSPATPSRKRSVAVSDEEEVEEEAERRKERCKRGRFVVKEEKKDSNELSDSAGEEDSADLKRAQKDKGLHVEVRVNREWYTGRVTAVEVGKHVVRWKVKFDYVPTDTTPRDRWVEKGSEDVRLMKPPSPEHQSLDTQQEGGEEEVGPVAQQAIAVAEPSTSECLRIEPDTTALSTNHETIDLLVQILRNCLRYFLPPSFPISKKQLSAMNSDELISFPLKEYFKQYEVGLQNLCNSYQSRADSRAKASEESLRTSERKLRETEEKLQKLRTNIVALLQKVQEDIDINTDDELDAYIEDLITKGD

SEQ ID NO: 52868 - protein, 1032 aa, Homo sapiens
  Payload ID: 10534
  Gene Symbol: MORC2
  Gene Name: MORC family CW-type zinc finger 2
  Uniprot ID: Q9Y6X9
  ENSP ID: ENSP00000380763
MAFTNYSSLNRAQLTFEYLHTNSTTHEFLFGALAELVDNARDADATRIDIYAERREDLRGGFMLCFLDDGAGMDPSDAASVIQFGKSAKRTPESTQIGQYGNGLKSGSMRIGKDFILFTKKEDTMTCLFLSRTFHEEEGIDEVIVPLPTWNARTREPVTDNVEKFAIETELIYKYSPFRTEEEVMTQFMKIPGDSGTLVIIFNLKLMDNGEPELDIISNPRDIQMAETSPEGTKPERRSFRAYAAVLYIDPRMRIFIHGHKVQTKRLSCCLYKPRMYKYTSSRFKTRAEQEVKKAEHVARIAEEKAREAESKARTLEVRLGGDLTRDSRVMLRQVQNRAITLRREADVKKRIKEAKQRALKEPKELNFVFGVNIEHRDLDGMFIYNCSRLIKMYEKVGPQLEGGMACGGVVGVVDVPYLVLEPTHNKQDFADAKEYRHLLRAMGEHLAQYWKDIAIAQRGIIKFWDEFGYLSANWNQPPSSELRYKRRRAMEIPTTIQCDLCLKWRTLPFQLSSVEKDYPDTWVCSMNPDPEQDRCEASEQKQKVPLGTFRKDMKTQEEKQKQLTEKIRQQQEKLEALQKTTPIRSQADLKKLPLEVTTRPSTEEPVRRPQRPRSPPLPAVIRNAPSRPPSLPTPRPASQPRKAPVISSTPKLPALAAREEASTSRLLQPPEAPRKPANTLVKTASRPAPLVQQLSPSLLPNSKSPREVPSPKVIKTPVVKKTESPIKLSPATPSRKRSVAVSDEEEVEEEAERRKERCKRGRFVVKEEKKDSNELSDSAGEEDSADLKRAQKDKGLHVEVRVNREWYTGRVTAVEVGKHVVRWKVKFDYVPTDTTPRDRWVEKGSEDVRLMKPPSPEHQSLDTQQEGGEEEVGPVAQQAIAVAEPSTSECLRIEPDTTALSTNHETIDLLVQILRNCLRYFLPPSFPISKKQLSAMNSDELISFPLKEYFKQYEVGLQNLCNSYQSRADSRAKASEESLRTSERKLRETEEKLQKLRTNIVALLQKVQEDIDINTDDELDAYIEDLITKGD

SEQ ID NO: 52869 - protein, 191 aa, Homo sapiens
  Payload ID: 10534
  Gene Symbol: MORC2
  Gene Name: MORC family CW-type zinc finger 2
  ENSP ID: ENSP00000402602
  MOD_RES (1)..(1): Any amino acid
XRWVEKGSEDVRLMKPPSPEHQSLDTQQEGGEEEVGPVAQQAIAVAEPSTSECLRIEPDTTALSTNHETIDLLVQILRNCLRYFLPPSFPISKKQLSAMNSDELISFPLKEYFKQYEVGLQNLCNSYQSRADSRAKASEESLRTSERKLRETEEKLQKLRTNIVALLQKDIDINTDDELDAYIEDLITKGD

SEQ ID NO: 52870 - protein, 89 aa, Homo sapiens
  Payload ID: 10534
  Gene Symbol: MORC2
  Gene Name: MORC family CW-type zinc finger 2
  ENSP ID: ENSP00000412685
LLLCSQQKEYFKQYEVGLQNLCNSYQSRADSRAKASEESLRTSERKLRETEEKLQKLRTNIVALLQKDIDINTDDELDAYIEDLITKGD

SEQ ID NO: 52871 - protein, 939 aa, Homo sapiens
  Payload ID: 10535
  Gene Symbol: MORC3
  Gene Name: MORC family CW-type zinc finger 3
  Uniprot ID: Q14149
  ENSP ID: ENSP00000383333
MAAQPPRGIRLSALCPKFLHTNSTSHTWPFSAVAELIDNAYDPDVNAKQIWIDKTVINDHICLTFTDNGNGMTSDKLHKMLSFGFSDKVTMNGHVPVGLYGNGFKSGSMRLGKDAIVFTKNGESMSVGLLSQTYLEVIKAEHVVVPIVAFNKHRQMINLAESKASLAAILEHSLFSTEQKLLAELDAIIGKKGTRIIIWNLRSYKNATEFDFEKDKYDIRIPEDLDEITGKKGYKKQERMDQIAPESDYSLRAYCSILYLKPRMQIILRGQKVKTQLVSKSLAYIERDVYRPKFLSKTVRITFGFNCRNKDHYGIMMYHRNRLIKAYEKVGCQLRANNMGVGVVGIIECNFLKPTHNKQDFDYTNEYRLTITALGEKLNDYWNEMKVKKNTEYPLNLPVEDIQKRPDQTWVQCDACLKWRKLPDGMDQLPEKWYCSNNPDPQFRNCEVPEEPEDEDLVHPTYEKTYKKTNKEKFRIRQPEMIPRINAELLFRPTALSTPSFSSPKESVPRRHLSEGTNSYATRLLNNHQVPPQSEPESNSLKRRLSTRSSILNAKNRRLSSQFENSVYKGDDDDEDVIILEENSTPKPAVDHDIDMKSEQSHVEQGGVQVEFVGDSEPCGQTGSTSTSSSRCDQGNTAATQTEVPSLVVKKEETVEDEIDVRNDAVILPSCVEAEAKIHETQETTDKSADDAGCQLQELRNQLLLVTEEKENYKRQCHMFTDQIKVLQQRILEMNDKYVKKETCHQSTETDAVFLLESINGKSESPDHMVSQYQQALEEIERLKKQCSALQHVKAECSQCSNNESKSEMDEMAVQLDDVFRQLDKCSIERDQYKSEVELLEMEKSQIRSQCEELKTEVEQLKSTNQQTATDVSTSSNIEESVNHMDGESLKLRSLRVNVGQLLAMIVPDLDLQQVNYDVDVVDEILGQVVEQMSEISST

SEQ ID NO: 52872 - protein, 191 aa, Homo sapiens
  Payload ID: 10535
  Gene Symbol: MORC3
  Gene Name: MORC family CW-type zinc finger 3
  ENSP ID: ENSP00000447562
ETDAVFLLESINGKSESPDHMVSQYQQALEEIERLKKQCSALQHVKAECSQCSNNESKSEMDEMAVQLDDVFRQLDKCSIERDQYKSEVELLEMEKSQIRSQCEELKTEVEQLKSTNQQTATDVSTSSNIEESVNHMDGESLKLRSLRVNVGQLLAMIVPDLDLQQVNYDVDVVDEILGQVVEQMSEISST

SEQ ID NO: 52873 - protein, 191 aa, Homo sapiens; identical to SEQ ID NO: 52872
  Payload ID: 10535
  Gene Symbol: MORC3
  Gene Name: MORC family CW-type zinc finger 3
  ENSP ID: ENSP00000448357

SEQ ID NO: 52874 - protein, 191 aa, Homo sapiens; identical to SEQ ID NO: 52872
  Payload ID: 10535
  Gene Symbol: MORC3
  Gene Name: MORC family CW-type zinc finger 3
  ENSP ID: ENSP00000449467

SEQ ID NO: 52875 - protein, 226 aa, Homo sapiens
  Payload ID: 10535
  Gene Symbol: MORC3
  Gene Name: MORC family CW-type zinc finger 3
  ENSP ID: ENSP00000449966
  MOD_RES (1)..(1): Any amino acid
XETDAVFLLESINGKSESPDHMVSQYQQALEEIERLKKQCSALQHVKAECSQCSNNESKSEMDEMAVQLDDVFRQLDKCSIERDQYKSEVELLEMEKSQIRSQCEELKTEVEQLKSTNQQTATDVSTSSNIEESVNHMDGESLKLRSLRVNVGQLLAMIVPDLDLQQILKYCQDMRLRKCGSQLQTEQLLFNRTTWAFMMSQVFLISHGVPVGSEALGLYCDLNHD

SEQ ID NO: 52876 - protein, 900 aa, Homo sapiens
  Payload ID: 10536
  Gene Symbol: MORC4
  Gene Name: MORC family CW-type zinc finger 4
  Uniprot ID: Q8TE76
  ENSP ID: ENSP00000255495
MLLYRGAPAGPGAPGCGLARPGGGPQAFGIRLSTMSPRYLQSNSSSHTRPFSAIAELLDNAVDPDVSARTVFIDVEEVKNKSCLTFTDDGCGMTPHKLHRMLSFGFTDKVIKKSQCPIGVFGNGFKSGSMRLGKDALVFTKNGGTLTVGLLSQTYLECVQAQAVIVPIVPFNQQNKKMIITEDSLPSLEAILNYSIFNRENDLLAQFDAIPGKKGTRVLIWNIRRNKNGKSELDFDTDQYDILVSDFDTEEKMTGGVTSELPETEYSLRAFCGILYMKPRMKIFLRQKKVTTQMIAKSLANVEYDTYKPTFTNKQVRITFGFSCKNSNQFGIMMYHNNRLIKSFEKVGCQVKPTRGEGVGVIGVIECNFLKPAYNKQDFEYTKEYRLTINALAQKLNAYWKEKTSQDNFETSTVARPIPKVPDQTWVQCDECLKWRKLPGKIDPSMLPARWFCYYNSHPKYRRCSVPEEQELTDEDLCLSKAKKQEQTVEEKKKMPMENENHQVFSNPPKILTVQEMAGLNNKTIGYEGIHSPSVLPSGGEESRSPSLQLKPLDSSVLQFSSKYKWILGEEPVEKRRRLQNEMTTPSLDYSMPAPYRRVEAPVAYPEGENSHDKSSSERSTPPYLFPEYPEASKNTGQNREVSILYPGAKDQRQGSLLPEELEDQMPRLVAEESNRGSTTINKEEVNKGPFVAVVGVAKGVRDSGAPIQLIPFNREELAERRKAVESWNPVPYSVASAAIPAAAIGEKARGYEESEGHNTPKLKNQRELEELKRTTEKLERVLAERNLFQQKVEELEQERNHWQSEFKKVQHELVIYSTQEAEGLYWSKKHMGYRQAEFQILKAELERTKEEKQELKEKLKETETHLEMLQKAQGFGKAYAATYPRQLSPYFCPPSLGAS

SEQ ID NO: 52877 - protein, 937 aa, Homo sapiens
  Payload ID: 10536
  Gene Symbol: MORC4
  Gene Name: MORC family CW-type zinc finger 4
  Uniprot ID: Q8TE76
  ENSP ID: ENSP00000347821
MLLYRGAPAGPGAPGCGLARPGGGPQAFGIRLSTMSPRYLQSNSSSHTRPFSAIAELLDNAVDPDVSARTVFIDVEEVKNKSCLTFTDDGCGMTPHKLHRMLSFGFTDKVIKKSQCPIGVFGNGFKSGSMRLGKDALVFTKNGGTLTVGLLSQTYLECVQAQAVIVPIVPFNQQNKKMIITEDSLPSLEAILNYSIFNRENDLLAQFDAIPGKKGTRVLIWNIRRNKNGKSELDFDTDQYDILVSDFDTEEKMTGGVTSELPETEYSLRAFCGILYMKPRMKIFLRQKKVTTQMIAKSLANVEYDTYKPTFTNKQVRITFGFSCKNSNQFGIMMYHNNRLIKSFEKVGCQVKPTRGEGVGVIGVIECNFLKPAYNKQDFEYTKEYRLTINALAQKLNAYWKEKTSQDNFETSTVARPIPKVPDQTWVQCDECLKWRKLPGKIDPSMLPARWFCYYNSHPKYRRCSVPEEQELTDEDLCLSKAKKQEQTVEEKKKMPMENENHQVFSNPPKILTVQEMAGLNNKTIGYEGIHSPSVLPSGGEESRSPSLQLKPLDSSVLQFSSKYKWILGEEPVEKRRRLQNEMTTPSLDYSMPAPYRRVEAPVAYPEGENSHDKSSSERSTPPYLFPEYPEASKNTGQNREVSILYPGAKDQRQGSLLPEELEDQMPRLVAEESNRGSTTINKEEVNKGPFVAVVGVAKGVRDSGAPIQLIPFNREELAERRKAVESWNPVPYSVASAAIPAAAIGEKARGYEESEGHNTPKLKNQRELEELKRTTEKLERVLAERNLFQQKVEELEQERNHWQSEFKKVQHELVIYSTQEAEGLYWSKKHMGYRQAEFQILKAELERTKEEKQELKEKLKETETHLEMLQKAQVSYRTPEGDDLERALAKLTRLRIHVSYLLTSVLPHLELREIGYDSEQVDGILYTVLEANHILD

SEQ ID NO: 52878 - protein, 38 aa, Homo sapiens
  Payload ID: 10536
  Gene Symbol: MORC4
  Gene Name: MORC family CW-type zinc finger 4
  ENSP ID: ENSP00000474750
  MOD_RES (1)..(1): Any amino acid
XSARTVFIDVEEVKNKSCLTFTDDGCGMTPHKLHRMLS

SEQ ID NO: 52879 - protein, 127 aa, Homo sapiens
  Payload ID: 10537
  Gene Symbol: MRFAP1
  Gene Name: Morf4 family associated protein 1
  Uniprot ID: Q9Y605
  ENSP ID: ENSP00000318352
MRPLDIVELAEPEEVEVLEPEEDFEQFLLPVINEMREDIASLTREHGRAYLRNRSKLWEMDNMLIQIKTQVEASEESALNHLQNPGDAAEGRAAKRCEKAEEKAKEIAKMAEMLVELVRRIEKSESS

SEQ ID NO: 52880 - protein, 127 aa, Homo sapiens; identical to SEQ ID NO: 52879
  Payload ID: 10537
  Gene Symbol: MRFAP1
  Gene Name: Morf4 family associated protein 1
  Uniprot ID: Q9Y605
  ENSP ID: ENSP00000372024

SEQ ID NO: 52881 - protein, 127 aa, Homo sapiens; identical to SEQ ID NO: 52879
  Payload ID: 10537
  Gene Symbol: MRFAP1
  Gene Name: Morf4 family associated protein 1
  Uniprot ID: Q9Y605
  ENSP ID: ENSP00000422065

SEQ ID NO: 52882 - protein, 103 aa, Homo sapiens
  Payload ID: 10537
  Gene Symbol: MRFAP1
  Gene Name: Morf4 family associated protein 1
  ENSP ID: ENSP00000478229
MRPLDIVELAEPEEVEVLEPEEDFEQFLLPVINEMREDIASLTREHGRAYLRNRSKLWEMDNMLIQIKTQVEASEESALNHLQNPGDAAEGRAAKRCEKSESS

SEQ ID NO: 52883 - protein, 127 aa, Homo sapiens
  Payload ID: 10538
  Gene Symbol: MRFAP1L1
  Gene Name: Morf4 family associated protein 1-like 1
  Uniprot ID: Q96HT8
  ENSP ID: ENSP00000318154
MRPLDIDEVEAPEEVEVLEPEEDFEQFLLPVINEMREDIASLIREHGRAYLRTRSKLWEMDNMLIQIKTQVEASEESALNHVQHPSGEADERVSELCEKAEEKAKEIAKMAEMLVELVWRIERSESS

SEQ ID NO: 52884 - protein, 156 aa, Homo sapiens
  Payload ID: 10539
  Gene Symbol: MORN1
  Gene Name: MORN repeat containing 1
  ENSP ID: ENSP00000367786
MAAAGEGTPSSRGPRRDPPRRPPRNGHGKLLFKDGSYYEGAFVDGEITGEGRRHWAWSGDTFSGQFVLGEPQGYGVMEYKAGGCYEGEVSHGMREGHGFLVDRDGQVYQGSFHDNKRHGPGQMLFQNGDKYDGDWVRDRRQGHGVLRCADGSTYKL

SEQ ID NO: 52885 - protein, 350 aa, Homo sapiens
  Payload ID: 10539
  Gene Symbol: MORN1
  Gene Name: MORN repeat containing 1
  Uniprot ID: Q5T089
  ENSP ID: ENSP00000367790
MAAAGEGTPSSRGPRRDPPRRPPRNGYGVYVYPNSFFRYEGEWKAGRKHGHGKLLFKDGSYYEGAFVDGEITGEGRRHWAWSGDTFSGQFVLGEPQGYGVMEYKAGGCYEGEVSHGMREGHGFLVDRDGQVYQGSFHDNKRHGPGQMLFQNGDKYDGDWVRDRRQGHGVLRCADGSTYKGQWHSDVFSGLGSMAHCSGVTYYGLWINGHPAEQATRIVILGPEVMEVAQGSPFSVNVQLLQDHGEIAKSESGRVLQISAGVRYVQLSAYSEVNFFKVDRDNQETLIQTPFGFECIPYPVSSPAAGVPGPRAAKGGAEADVPLPRGDLELHLGALHGQEDTPGGLLGSSLF

SEQ ID NO: 52886 - protein, 497 aa, Homo sapiens
  Payload ID: 10539
  Gene Symbol: MORN1
  Gene Name: MORN repeat containing 1
  Uniprot ID: Q5T089
  ENSP ID: ENSP00000367792
MAAAGEGTPSSRGPRRDPPRRPPRNGYGVYVYPNSFFRYEGEWKAGRKHGHGKLLFKDGSYYEGAFVDGEITGEGRRHWAWSGDTFSGQFVLGEPQGYGVMEYKAGGCYEGEVSHGMREGHGFLVDRDGQVYQGSFHDNKRHGPGQMLFQNGDKYDGDWVRDRRQGHGVLRCADGSTYKGQWHSDVFSGLGSMAHCSGVTYYGLWINGHPAEQATRIVILGPEVMEVAQGSPFSVNVQLLQDHGEIAKSESGRVLQISAGVRYVQLSAYSEVNFFKVDRDNQETLIQTPFGFECIPYPVSSPAAGVPGPRAAKGGAEADVPLPRGDLELHLGALHGQEDTPGGLLARGHAPHCPGACQRVEQGCAEFTDVLLGPPPPGYHPFLFLDSLHKKAGGRSRGGLHPRGTPPTAQEPPGGSRPEGRATEEQAAAAHLGEYVLMIRDVTTPPFLGRRLPPAFKHLRVVAKRAGQPPHVLEEGPEASSSWQAAHSCTPEPPAPR

SEQ ID NO: 52887 - protein, 185 aa, Homo sapiens
  Payload ID: 10539
  Gene Symbol: MORN1
  Gene Name: MORN repeat containing 1
  ENSP ID: ENSP00000390261
VTGSCYLKMAVITKGRLWTERSREKAAGTGPGQETPSLDSLFWESLKATASWSTKPADVMKGRSPTACGKDTGFWWTGMDKCTRAPSMTTRGTALGRCSFRTVTSTTATGSGTGVRDTGCCAAPTAPPTSSDPPIYSRRNSRRHRLLPRHHELRVGEAPPGDLFSLSTAGVFSANRVSCLAASIP

SEQ ID NO: 52888 - protein, 60 aa, Homo sapiens
  Payload ID: 10539
  Gene Symbol: MORN1
  Gene Name: MORN repeat containing 1
  ENSP ID: ENSP00000476189
  MOD_RES (1)..(1): Any amino acid
XYGVYVYPNSFFRYEGEWKAGRKHGHGKLLFKDGSYYEGAFVDGEITGEGRRHWAWSGEL

SEQ ID NO: 52889 - protein, 79 aa, Homo sapiens
  Payload ID: 10540
  Gene Symbol: MORN2
  Gene Name: MORN repeat containing 2
  Uniprot ID: Q502X0
  ENSP ID: ENSP00000344551
MNGFGRLEHFSGAVYEGQFKDNMFHGLGTYTFPNGAKYTGNFNENRVEGEGEYTDIQGLEWSGNFHFTAAPDLKLKLHM

SEQ ID NO: 52890 - protein, 79 aa, Homo sapiens; identical to SEQ ID NO: 52889
  Payload ID: 10540
  Gene Symbol: MORN2
  Gene Name: MORN repeat containing 2
  Uniprot ID: Q502X0
  ENSP ID: ENSP00000386563

SEQ ID NO: 52891 - protein, 79 aa, Homo sapiens; identical to SEQ ID NO: 52889
  Payload ID: 10540
  Gene Symbol: MORN2
  Gene Name: MORN repeat containing 2
  Uniprot ID: Q502X0
  ENSP ID: ENSP00000386874

SEQ ID NO: 52892 - protein, 46 aa, Homo sapiens
  Payload ID: 10540
  Gene Symbol: MORN2
  Gene Name: MORN repeat containing 2
  ENSP ID: ENSP00000387161
MGLSTQEAGKMTRVEGEGEYTDIQGLEWSGNFHFTAAPDLKLKLHM

SEQ ID NO: 52893 - protein, 57 aa, Homo sapiens
  Payload ID: 10540
  Gene Symbol: MORN2
  Gene Name: MORN repeat containing 2
  ENSP ID: ENSP00000387181
MFHGLGTYTFPNGAKYTGNFNENRVEGEGEYTDIQGLEWSGNFHFTAAPDLKLKLHM

SEQ ID NO: 52894 - protein, 68 aa, Homo sapiens
  Payload ID: 10540
  Gene Symbol: MORN2
  Gene Name: MORN repeat containing 2
  ENSP ID: ENSP00000401340
MNGFGRLEHFSGAVYEGQFKDNMFHGLGTYTFPNGAKYTGNFNENRGSQASLLLLFITFKLIQNPDKP

SEQ ID NO: 52895 - protein, 240 aa, Homo sapiens
  Payload ID: 10541
  Gene Symbol: MORN3
  Gene Name: MORN repeat containing 3
  Uniprot ID: Q6PF18
  ENSP ID: ENSP00000347486
MPVSKCPKKSESLWKGWDRKAQRNGLRSQVYAVNGDYYVGEWKDNVKHGKGTQVWKKKGAIYEGDWKFGKRDGYGTLSLPDQQTGKCRRVYSGWWKGDKKSGYGIQFFGPKEYYEGDWCGSQRSGWGRMYYSNGDIYEGQWENDKPNGEGMLRLKNGNRYEGCWERGMKNGAGRFFHLDHGQLFEGFWVDNMAKCGTMIDFGRDEAPEPTQFPIPEVKILDPDGVLAEALAMFRKTEEGD

SEQ ID NO: 52896 - protein, 160 aa, Homo sapiens
  Payload ID: 10541
  Gene Symbol: MORN3
  Gene Name: MORN repeat containing 3
  Uniprot ID: Q6PF18
  ENSP ID: ENSP00000376255
MPVSKCPKKSESLWKGWDRKAQRNGLRSQVYAVNGDYYVGEWKDNVKHGKGTQVWKKKGAIYEGDWKFGKRDGYGTLSLPDQQTGKCRRVYSGWWKGDKKSGYGIQFFGPKEYYEGDWCGSQRSGWGRMYYSNGDIYEGQWENDKPNGEGMLRLSQNPRP

SEQ ID NO: 52897 - protein, 160 aa, Homo sapiens; identical to SEQ ID NO: 52896
  Payload ID: 10541
  Gene Symbol: MORN3
  Gene Name: MORN repeat containing 3
  Uniprot ID: Q6PF18
  ENSP ID: ENSP00000445643

SEQ ID NO: 52898 - protein, 146 aa, Homo sapiens
  Payload ID: 10542
  Gene Symbol: MORN4
  Gene Name: MORN repeat containing 4
  Uniprot ID: Q8NDC4
  ENSP ID: ENSP00000307636
MTLTKGSFTYSSGEEYRGEWKEGRRHGFGQLMFADGGTYLGHFENGLFNGFGVLTFSDGSRYEGEFAQGKFNGVGVFIRYDNMTFEGEFKNGRVDGFGLLTFPDGSHGIPRNEGLFENNKLLRREKCSAIVQRAQSASKSARNLTA

SEQ ID NO: 52899 - protein, 46 aa, Homo sapiens
  Payload ID: 10542
  Gene Symbol: MORN4
  Gene Name: MORN repeat containing 4
  ENSP ID: ENSP00000359669
MTLTKGSFTYSSGEEYRGEWKEGEKDPWGVSMMNTSFAGGQIHQDI

SEQ ID NO: 52900 - protein, 66 aa, Homo sapiens
  Payload ID: 10542
  Gene Symbol: MORN4
  Gene Name: MORN repeat containing 4
  ENSP ID: ENSP00000441070
MTLTKGSFTYSSGEEYRGEWKEGRRHGFGQLMFADGGTYLGHFENGLFNGFGVLTFSDGSRPADFP

SEQ ID NO: 52901 - protein, 161 aa, Homo sapiens
  Payload ID: 10543
  Gene Symbol: MORN5
  Gene Name: MORN repeat containing 5
  Uniprot ID: Q5VZ52
  ENSP ID: ENSP00000362869
MEYTGSKYIGEYVDGRMEGKAKYILPTETIYVGEMKDGMFHGEGTLYFPSGSQYDAIWENGLAIKGTYTFSDGLHYDEKNWHYCDGYDRRFYTEILNGLKPAGMAQLTNMDPPRKIPKGYYDCGDGFYNPVTRVVKDYRNRFLRNADDDEHEWITRTCRKG

SEQ ID NO: 52902 - protein, 110 aa, Homo sapiens
  Payload ID: 10543
  Gene Symbol: MORN5
  Gene Name: MORN repeat containing 5
  ENSP ID: ENSP00000409949
MEGKAKYILPTETIYVGEMKDGMFHGEGTLYFPSGSQYDAIWENGLAIKGTYTFSDGLHYDEKNWHYCDGYDRRFYTEILNGLKPAGMAQLTNMDPPRKIPKGYYDCGDG

SEQ ID NO: 52903 - protein, 96 aa, Homo sapiens
  Payload ID: 10543
  Gene Symbol: MORN5
  Gene Name: MORN repeat containing 5
  ENSP ID: ENSP00000437483
MEYTGSKYIGEYVDGRMEGKAKYILPTETIYVGEMKDGMFHGEGTLYFPSGSQYDAIWENGLAIKVWLNSPIWTHLEKSPRAITIVETASITQSRG

SEQ ID NO: 52904 - protein, 362 aa, Homo sapiens
  Payload ID: 10544
  Gene Symbol: MORF4L1
  Gene Name: mortality factor 4 like 1
  Uniprot ID: Q9UBU8
  ENSP ID: ENSP00000331310
MAPKQDPKPKFQEGERVLCFHGPLLYEAKCVKVAIKDKQVKYFIHYSGWNKKSAVRPRRSEKSLKTHEDIVALFPVPEGAPSVHHPLLTSSWDEWVPESRVLKYVDTNLQKQRELQKANQEQYAEGKMRGAAPGKKTSGLQQKNVEVKTKKNKQKTPGNGDGGSTSETPQPPRKKRARVDPTVENEETFMNRVEVKVKIPEELKPWLVDDWDLITRQKQLFYLPAKKNVDSILEDYANYKKSRGNTDNKEYAVNEVVAGIKEYFNVMLGTQLLYKFERPQYAEILADHPDAPMSQVYGAPHLLRLFVRIGAMLAYTPLDEKSLALLLNYLHDFLKYLAKNSATLFSASDYEVAPPEYHRKAV

SEQ ID NO: 52905 - protein, 348 aa, Homo sapiens
  Payload ID: 10544
  Gene Symbol: MORF4L1
  Gene Name: mortality factor 4 like 1
  ENSP ID: ENSP00000368850
MIPFPHPQVTDALGRYSNYILSSTVESPSLRSMNFEKQGERVLCFHGPLLYEAKCVKVAIKDKQVKYFIHYSGWNKNWDEWVPESRVLKYVDTNLQKQRELQKANQEQYAEGKMRGAAPGKKTSGLQQKNVEVKTKKNKQKTPGNGDGGSTSETPQPPRKKRARVDPTVENEETFMNRVEVKVKIPEELKPWLVDDWDLITRQKQLFYLPAKKNVDSILEDYANYKKSRGNTDNKEYAVNEVVAGIKEYFNVMLGTQLLYKFERPQYAEILADHPDAPMSQVYGAPHLLRLFVRIGAMLAYTPLDEKSLALLLNYLHDFLKYLAKNSATLFSASDYEVAPPEYHRKAV

SEQ ID NO: 52906 - protein, 323 aa, Homo sapiens
  Payload ID: 10544
  Gene Symbol: MORF4L1
  Gene Name: mortality factor 4 like 1
  Uniprot ID: Q9UBU8
  ENSP ID: ENSP00000408880
MAPKQDPKPKFQEGERVLCFHGPLLYEAKCVKVAIKDKQVKYFIHYSGWNKNWDEWVPESRVLKYVDTNLQKQRELQKANQEQYAEGKMRGAAPGKKTSGLQQKNVEVKTKKNKQKTPGNGDGGSTSETPQPPRKKRARVDPTVENEETFMNRVEVKVKIPEELKPWLVDDWDLITRQKQLFYLPAKKNVDSILEDYANYKKSRGNTDNKEYAVNEVVAGIKEYFNVMLGTQLLYKFERPQYAEILADHPDAPMSQVYGAPHLLRLFVRIGAMLAYTPLDEKSLALLLNYLHDFLKYLAKNSATLFSASDYEVAPPEYHRKAV

SEQ ID NO: 52907 - protein, 235 aa, Homo sapiens
  Payload ID: 10544
  Gene Symbol: MORF4L1
  Gene Name: mortality factor 4 like 1
  Uniprot ID: Q9UBU8
  ENSP ID: ENSP00000452717
MRGAAPGKKTSGLQQKNVEVKTKKNKQKTPGNGDGGSTSETPQPPRKKRARVDPTVENEETFMNRVEVKVKIPEELKPWLVDDWDLITRQKQLFYLPAKKNVDSILEDYANYKKSRGNTDNKEYAVNEVVAGIKEYFNVMLGTQLLYKFERPQYAEILADHPDAPMSQVYGAPHLLRLFVRIGAMLAYTPLDEKSLALLLNYLHDFLKYLAKNSATLFSASDYEVAPPEYHRKAV

SEQ ID NO: 52908 - protein, 235 aa, Homo sapiens; identical to SEQ ID NO: 52907
  Payload ID: 10544
  Gene Symbol: MORF4L1
  Gene Name: mortality factor 4 like 1
  Uniprot ID: Q9UBU8
  ENSP ID: ENSP00000452808

SEQ ID NO: 52909 - protein, 269 aa, Homo sapiens
  Payload ID: 10544
  Gene Symbol: MORF4L1
  Gene Name: mortality factor 4 like 1
  ENSP ID: ENSP00000453231
MAPKQDPKPKFQEGERVLCFHGPLLYEAKCVKVAIKDKQVKYFIHYSGWNKNWDEWVPESRVLKYVDTNLQKQRELQKANQKTKKNKQKTPGNGDGGSTSETPQPPRKKRARVDPTVENEETFMNRVEVKVKIPEELKPWLVDDWDLITRQKQLFYLPAKKNVDSILEDYANYKKSRGNTDNKEYAVNEVVAGIKEYFNVMLGTQLLYKFERPQYAEILADHPDAPMSQVYGAPHLLRLFVRIGAMLAYTPLDEKSLALLLNYLHDFLK

SEQ ID NO: 52910 - protein, 113 aa, Homo sapiens
  Payload ID: 10544
  Gene Symbol: MORF4L1
  Gene Name: mortality factor 4 like 1
  ENSP ID: ENSP00000453351
MRGAAPGKKTSGLQQKNVEVKTKKNKQKTPGNGDGGSTSETPQPPRKKRARVDPTVENEETFMNRVEVKVKIPEELKPWLVDDWDLITRQKQLFYLPAKKNVDSILEDYANYK

SEQ ID NO: 52911 - protein, 156 aa, Homo sapiens
  Payload ID: 10544
  Gene Symbol: MORF4L1
  Gene Name: mortality factor 4 like 1
  ENSP ID: ENSP00000453432
MRGAAPGKKTSGLQQKNVEVKTKKNKQKTPGNGDGGSTSETPQPPRKKRARVDPTVENEETFMNRVEVKVKIPEELKPWLVDDWDLITRQKQLFYLPAKKNVDSILEDYANYKKSRGNTDNKEYAVNEVVAGIKEYFNVMLGTQLLYKFERPQYAE

SEQ ID NO: 52912 - protein, 245 aa, Homo sapiens
  Payload ID: 10544
  Gene Symbol: MORF4L1
  Gene Name: mortality factor 4 like 1
  ENSP ID: ENSP00000453625
MEVTGPRFQCTFFSGSSSQGEKNGERVLCFHGPLLYEAKCVKVAIKDKQVKYFIHYSGWNKNWDEWVPESRVLKYVDTNLQKQRELQKANQEQYAEGKMRGAAPGKKTSGLQQKNVEVKTKKNKQKTPGNGDGGSTSETPQPPRKKRARVDPTVENEETFMNRVEVKVKIPEELKPWLVDDWDLITRQKQLFYLPAKKNVDSILEDYANYKKSRGNTDNKEYAVNEVVAGIKEYFNVMLGTQLLY

SEQ ID NO: 52913 - protein, 118 aa, Homo sapiens
  Payload ID: 10544
  Gene Symbol: MORF4L1
  Gene Name: mortality factor 4 like 1
  ENSP ID: ENSP00000453738
MRGAAPGKKTSGLQQKNVEVKTKKNKQKTPGNGDGGSTSETPQPPRKKRARVDPTVENEETFMNRVEVKVKIPEELKPWLVDDWDLITRQKQLFYLPAKKNVDSILEDYANYKKSRGN

SEQ ID NO: 52914 - protein, 213 aa, Homo sapiens
  Payload ID: 10544
  Gene Symbol: MORF4L1
  Gene Name: mortality factor 4 like 1
  ENSP ID: ENSP00000453972
  MOD_RES (1)..(1): Any amino acid
XLLYEAKCVKVAIKDKQVKYFIHYSGWNKNAVRPRRSEKSLKTHEDIVALFPVPEGAPSVHHPLLTSSWDEWVPESRVLKYVDTNLQKQRELQKANQEQYAEGKMRGAAPGKKTSGLQQKNVEVKTKKNKQKTPGNGDGGSTSETPQPPRKKRARVDPTVENEETFMNRVEVKVKIPEELKPWLVDDWDLITRQKQLFYLPAKKNVDSILEDY

SEQ ID NO: 52915 - protein, 58 aa, Homo sapiens
  Payload ID: 10544
  Gene Symbol: MORF4L1
  Gene Name: mortality factor 4 like 1
  ENSP ID: ENSP00000454030
MRGAAPGKKTSGLQQKNVEVKTKKNKQKTPGNGDGGSTSETPQPPRKKRARVDPTVEN

SEQ ID NO: 52916 - protein, 74 aa, Homo sapiens
  Payload ID: 10544
  Gene Symbol: MORF4L1
  Gene Name: mortality factor 4 like 1
  ENSP ID: ENSP00000454191
MRGAAPGKKTSGLQQKNVEVKTKKNKQKTPGNGDGGSTSETPQPPRKKRARVDPTVENEETFMNRVEVKVKIPE

SEQ ID NO: 52917 - protein, 288 aa, Homo sapiens
  Payload ID: 10545
  Gene Symbol: MORF4L2
  Gene Name: mortality factor 4 like 2
  Uniprot ID: Q15014
  ENSP ID: ENSP00000353643
MSSRKQGSQPRGQQSAEEENFKKPTRSNMQRSKMRGASSGKKTAGPQQKNLEPALPGRWGGRSAENPPSGSVRKTRKNKQKTPGNGDGGSTSEAPQPPRKKRARADPTVESEEAFKNRMEVKVKIPEELKPWLVEDWDLVTRQKQLFQLPAKKNVDAILEEYANCKKSQGNVDNKEYAVNEVVAGIKEYFNVMLGTQLLYKFERPQYAEILLAHPDAPMSQVYGAPHLLRLFVRIGAMLAYTPLDEKSLALLLGYLHDFLKYLAKNSASLFTASDYKVASAEYHRKAL

SEQ ID NO: 52918 - protein, 288 aa, Homo sapiens; identical to SEQ ID NO: 52917
  Payload ID: 10545
  Gene Symbol: MORF4L2
  Gene Name: mortality factor 4 like 2
  Uniprot ID: Q15014
  ENSP ID: ENSP00000391969

SEQ ID NO: 52919 - protein, 177 aa, Homo sapiens
  Payload ID: 10545
  Gene Symbol: MORF4L2
  Gene Name: mortality factor 4 like 2
  ENSP ID: ENSP00000393283
MSSRKQGSQPRGQQSAEEENFKKPTRSNMQRSKMRGASSGKKTAGPQQKNLEPALPGRWGGRSAENPPSGSVRKTRKNKQKTPGNGDGGSTSEAPQPPRKKRARADPTVESEEAFKNRMEVKVKIPEELKPWLVEDWDLVTRQKQLFQLPAKKNVDAILEEYANCKKSQGNVDNKEY

SEQ ID NO: 52920 - protein, 288 aa, Homo sapiens; identical to SEQ ID NO: 52917
  Payload ID: 10545
  Gene Symbol: MORF4L2
  Gene Name: mortality factor 4 like 2
  Uniprot ID: Q15014
  ENSP ID: ENSP00000394417

SEQ ID NO: 52921 - protein, 158 aa, Homo sapiens
  Payload ID: 10545
  Gene Symbol: MORF4L2
  Gene Name: mortality factor 4 like 2
  ENSP ID: ENSP00000400938
MSSRKQGSQPRGQQSAEEENFKKPTRSNMQRSKMRGASSGKKTAGPQQKNLEPALPGRWGGRSAENPPSGSVRKTRKNKQKTPGNGDGGSTSEAPQPPRKKRARADPTVESEEAFKNRMEVKVKIPEELKPWLVEDWDLVTRQKQLFQLPAKKNVDAI

SEQ ID NO: 52922 - protein, 67 aa, Homo sapiens
  Payload ID: 10545
  Gene Symbol: MORF4L2
  Gene Name: mortality factor 4 like 2
  ENSP ID: ENSP00000408607
MSSRKQGSQPRGQQSAEEENFKKPTRSNMQRSKMRGASSGKKTAGPQQKNLEPALPGRWGGRSAENP

SEQ ID NO: 52923 - protein, 288 aa, Homo sapiens; identical to SEQ ID NO: 52917
  Payload ID: 10545
  Gene Symbol: MORF4L2
  Gene Name: mortality factor 4 like 2
  Uniprot ID: Q15014
  ENSP ID: ENSP00000410532

SEQ ID NO: 52924 - protein, 177 aa, Homo sapiens; identical to SEQ ID NO: 52919
  Payload ID: 10545
  Gene Symbol: MORF4L2
  Gene Name: mortality factor 4 like 2
  ENSP ID: ENSP00000413664

SEQ ID NO: 52925 - protein, 288 aa, Homo sapiens; identical to SEQ ID NO: 52917
  Payload ID: 10545
  Gene Symbol: MORF4L2
  Gene Name: mortality factor 4 like 2
  Uniprot ID: Q15014
  ENSP ID: ENSP00000415476

SEQ ID NO: 52926 - protein, 237 aa, Homo sapiens
  Payload ID: 10545
  Gene Symbol: MORF4L2
  Gene Name: mortality factor 4 like 2
  ENSP ID: ENSP00000416120
MRGASSGKKTAGPQQKNLESVRKTRKNKQKTPGNGDGGSTSEAPQPPRKKRARADPTVESEEAFKNRMEVKVKIPEELKPWLVEDWDLVTRQKQLFQLPAKKNVDAILEEYANCKKSQGNVDNKEYAVNEVVAGIKEYFNVMLGTQLLYKFERPQYAEILLAHPDAPMSQVYGAPHLLRLFVRIGAMLAYTPLDEKSLALLLGYLHDFLKYLAKNSASLFTASDYKVASAEYHRKAL

SEQ ID NO: 52927 - protein, 214 aa, Homo sapiens
  Payload ID: 10546
  Gene Symbol: MOSPD1
  Gene Name: motile sperm domain containing 1
  Uniprot ID: Q9UJG1
  ENSP ID: ENSP00000359813
MHQQKRQPELVEGNLPVFVFPTELIFYADDQSTHKQVLTLYNPYEFALKFKVLCTTPNKYVVVDAAGAVKPQCCVDIVIRHRDVRSCHYGVIDKFRLQVSEQSQRKALGRKEVVATLLPSAKEQQKEEEEKRLKEHLTESLFFEQSFQPGKNRAVSSGPSLLTVFLGVVCIAALMLPTLGDVESLVPLYLHLSVNQKLVAAYILGLITMAILRT

SEQ ID NO: 52928 - protein, 159 aa, Homo sapiens
  Payload ID: 10546
  Gene Symbol: MOSPD1
  Gene Name: motile sperm domain containing 1
  Uniprot ID: Q9UJG1
  ENSP ID: ENSP00000359815
MHQQKRQPELVEGNLPVFVFPTELIFYADDQSTHKQVLTLYNPYEFALKFKVLCTTPNKYVVVDAAGAVKPQCCVDIVIRHRDVRSCHYGVIDKFRLQVSEQSQRKALGRKEVVATLLPSAKEQQKEEEEKRLKEHLTESLFFEQSFQPGLITMAILRT

SEQ ID NO: 52929 - protein, 213 aa, Homo sapiens
  Payload ID: 10546
  Gene Symbol: MOSPD1
  Gene Name: motile sperm domain containing 1
  Uniprot ID: Q9UJG1
  ENSP ID: ENSP00000359819
MHQQKRQPELVEGNLPVFVFPTELIFYADDQSTHKQVLTLYNPYEFALKFKVLCTTPNKYVVVDAAGAVKPQCCVDIVIRHRDVRSCHYGVIDKFRLQVSEQSQRKALGRKEVVATLLPSAKEQQKEEEEKRLKEHLTESLFFEQSFQPENRAVSSGPSLLTVFLGVVCIAALMLPTLGDVESLVPLYLHLSVNQKLVAAYILGLITMAILRT

SEQ ID NO: 52930 - protein, 518 aa, Homo sapiens
  Payload ID: 10547
  Gene Symbol: MOSPD2
  Gene Name: motile sperm domain containing 2
  Uniprot ID: Q8NHP6
  ENSP ID: ENSP00000369860
MAENHAQNKAKLISETRRRFEAEYVTDKSDKYDARDVERLQQDDNWVESYLSWRHNIVDETLKMLDESFQWRKEISVNDLNESSIPRWLLEIGVIYLHGYDKEGNKLFWIRVKYHVKDQKTILDKKKLIAFWLERYAKRENGKPVTVMFDLSETGINSIDMDFVRFIINCFKVYYPKYLSKIVIFDMPWLMNAAFKIVKTWLGPEAVSLLKFTSKNEVQDYVSVEYLPPHMGGTDPFKYSYPPLVDDDFQTPLCENGPITSEDETSSKEDIESDGKETLETISNEEQTPLLKKINPTESTSKAEENEKVDSKVKAFKKPLSVFKGPLLHISPAEELYFGSTESGEKKTLIVLTNVTKNIVAFKVRTTAPEKYRVKPSNSSCDPGASVDIVVSPHGGLTVSAQDRFLIMAAEMEQSSGTGPAELTQFWKEVPRNKVMEHRLRCHTVESSKPNTLTLKDNAFNMSDKTSEDICLQLSRLLESNRKLEDQVQRCIWFQQLLLSLTMLLLAFVTSFFYLLYS

SEQ ID NO: 52931 - protein, 486 aa, Homo sapiens
  Payload ID: 10547
  Gene Symbol: MOSPD2
  Gene Name: motile sperm domain containing 2
  ENSP ID: ENSP00000473271
MAENHAQNKAKLISETRRRFEAEYVTDKSDKYDARDVERLQQDDNWVESYLSWRHNIVDETLKMLDESFQWRKEISVNDLNESSIPRWLLEIGVIYLHGYDKEGNKLFWIRVKYHVKDQKTILDKKKLIAFWLERYAKRENGKPVTVMFDLSETGINSIDMDFVRFIINCFKVYYPKYLSKIVIFDMPWLMNAAFKIVKTWLGPEAVSLLKFTSKNEVQDYVSVEYLPPHMGGTDPFKYSYPPLVDDDFQTPLCENGPITSEDETSSKEDIESDGKETLETISNEEQTPLLKKINPTESTSKAEENEKVDSKVKAFKKPLSVFKGPLLHISPAEELYFGSTESGEKKTLIVLTNVTKNIVAFKVRTTAPEKYRVKPSNSSCDPGASVDIVVSPHGGLTVSAQDRFLIMAAEMEQSSGTGPAELTQFWKEVPRNKVMEHRLRCHTVESSKPNTLTLKDNAFNMSDKTSEDICLQFATSSCEMDCSPP

SEQ ID NO: 52932 - protein, 157 aa, Homo sapiens
  Payload ID: 10547
  Gene Symbol: MOSPD2
  Gene Name: motile sperm domain containing 2
  ENSP ID: ENSP00000473379
SKNEVQDYVSVEYLPPHMGGTDPFKYSYPPLVDDDFQTPLCENGPITSEDETSSKEDIESDGKETLETISNEEQTPLLKKINPTESTSKAEENEKVDSKVKAFKKPLSVFKGPLLHISPAEELYFGSTESGEKKTLIVLTNVTKNIVAFKGDIPNAK

SEQ ID NO: 52933 - protein, 39 aa, Homo sapiens
  Payload ID: 10547
  Gene Symbol: MOSPD2
  Gene Name: motile sperm domain containing 2
  ENSP ID: ENSP00000473570
MAENHAQNKAKLISETRRRFEAEYVTGGYSVPGIKKGVQ

SEQ ID NO: 52934 - protein, 235 aa, Homo sapiens
  Payload ID: 10548
  Gene Symbol: MOSPD3
  Gene Name: motile sperm domain containing 3
  Uniprot ID: O75425
  ENSP ID: ENSP00000223054
MRRGAPQDQELVGPGPPGRGSRGAPPPLGPVVPVLVFPPDLVFRADQRSGPRQLLTLYNPTGTALRFRVLCTAPAKYTVFDAEGYVKPQSCIDIVIRHVAPIPSHYDVQDRFRIELSEEGAEGRVVGRKDITSILRAPAYPLELQGQPDPAPRPGPPAGTPPPTARHFQEHPRQQLATSSFLLFLLTGIVSVAFLLLPLPDELGSQLPQVLHVSLGQKLVAAYVLGLLTMVFLRT

SEQ ID NO: 52935 - protein, 235 aa, Homo sapiens; identical to SEQ ID NO: 52934
  Payload ID: 10548
  Gene Symbol: MOSPD3
  Gene Name: motile sperm domain containing 3
  Uniprot ID: O75425
  ENSP ID: ENSP00000368842

SEQ ID NO: 52936 - protein, 235 aa, Homo sapiens; identical to SEQ ID NO: 52934
  Payload ID: 10548
  Gene Symbol: MOSPD3
  Gene Name: motile sperm domain containing 3
  Uniprot ID: O75425
  ENSP ID: ENSP00000377522

SEQ ID NO: 52937 - protein, 225 aa, Homo sapiens
  Payload ID: 10548
  Gene Symbol: MOSPD3
  Gene Name: motile sperm domain containing 3
  Uniprot ID: O75425
  ENSP ID: ENSP00000404626
MRRGAPQDQELVGPGPPGRGSRGAPPPLGPVVPVLVFPPDLVFRADQRSGPRQLLTLYNPTGTALRFRVLCTAPAKYTVFDAEGYVKPQSCIDIHYDVQDRFRIELSEEGAEGRVVGRKDITSILRAPAYPLELQGQPDPAPRPGPPAGTPPPTARHFQEHPRQQLATSSFLLFLLTGIVSVAFLLLPLPDELGSQLPQVLHVSLGQKLVAAYVLGLLTMVFLRT

SEQ ID NO: 52938 - protein, 225 aa, Homo sapiens
  Payload ID: 10548
  Gene Symbol: MOSPD3
  Gene Name: motile sperm domain containing 3
  ENSP ID: ENSP00000417276
MRRGAPQDQELVGPGPPGRGSRGAPPPLGPVVPVLVFPPDLVFRADQRSGPRQLLTLYNPTGTALRFRVLCTAPAKYTVFDAEGYVKPQSCIDIVIRHVAPIPSHYDVQDRFRIELSEEGAEGRVVGRKDITSILRAPAYPLELQGQPDPAPRPGPPAGTPPPTARHFQEHPRQQLATSSFLLFLLTGIVSVAFLLLPLPDELGSQLPQVLHVSLGQKLVAAYVL

SEQ ID NO: 52939 - protein, 69 aa, Homo sapiens
  Payload ID: 10548
  Gene Symbol: MOSPD3
  Gene Name: motile sperm domain containing 3
  ENSP ID: ENSP00000419535
MRRGAPQDQELVGPGPPGRGSRGAPPPLGPVVPVLVFPPDLVFRADQRSGPRQLLTLYNPTGTALRFRV

SEQ ID NO: 52940 - protein, 114 aa, Homo sapiens
  Payload ID: 10549
  Gene Symbol: MLN
  Gene Name: motilin
  Uniprot ID: P12872
  ENSP ID: ENSP00000266003
MVSRKAVAALLVVHVAAMLASQTEAFVPIFTYGELQRMQEKERNKGQKKSLSVWQRSGEEGPVDPAEPIREEENEMIKLTAPLEIGMRMNSRQLEKYPATLEGLLSEMLPQHAK

SEQ ID NO: 52941 - protein, 115 aa, Homo sapiens
  Payload ID: 10549
  Gene Symbol: MLN
  Gene Name: motilin
  Uniprot ID: P12872
  ENSP ID: ENSP00000388825
MVSRKAVAALLVVHVAAMLASQTEAFVPIFTYGELQRMQEKERNKGQKKSLSVWQRSGEEGPVDPAEPIREEENEMIKLTAPLEIGMRMNSRQLEKYPATLEGLLSEMLPQHAAK

SEQ ID NO: 52942 - protein, 108 aa, Homo sapiens
  Payload ID: 10549
  Gene Symbol: MLN
  Gene Name: motilin
  Uniprot ID: P12872
  ENSP ID: ENSP00000425467
MVSRKAVAALLVVHVAAMLASQTEAFVPIFTYGELQRMQEKERNKGQKKSLSVWQRSGEEGPVDPAEPIREEENEMIKLTAPLEIGMRMNSRQLEKYPATLEGLLTAK

SEQ ID NO: 52943 - protein, 412 aa, Homo sapiens
  Payload ID: 10550
  Gene Symbol: MLNR
  Gene Name: motilin receptor
  Uniprot ID: O43193
  ENSP ID: ENSP00000218721
MGSPWNGSDGPEGAREPPWPALPPCDERRCSPFPLGALVPVTAVCLCLFVVGVSGNVVTVMLIGRYRDMRTTTNLYLGSMAVSDLLILLGLPFDLYRLWRSRPWVFGPLLCRLSLYVGEGCTYATLLHMTALSVERYLAICRPLRARVLVTRRRVRALIAVLWAVALLSAGPFLFLVGVEQDPGISVVPGLNGTARIASSPLASSPPLWLSRAPPPSPPSGPETAEAAALFSRECRPSPAQLGALRVMLWVTTAYFFLPFLCLSILYGLIGRELWSSRRPLRGPAASGRERGHRQTVRVLLVVVLAFIICWLPFHVGRIIYINTEDSRMMYFSQYFNIVALQLFYLSASINPILYNLISKKYRAAAFKLLLARKSRPRGFHRSRDTAGEVAGDTGGDTVGYTETSANVKTMG

SEQ ID NO: 52944 - protein, 401 aa, Homo sapiens
  Payload ID: 10551
  Gene Symbol: MNX1
  Gene Name: motor neuron and pancreas homeobox 1
  Uniprot ID: P50219
  ENSP ID: ENSP00000252971
MEKSKNFRIDALLAVDPPRAASAQSAPLALVTSLAAAASGTGGGGGGGGASGGTSGSCSPASSEPPAAPADRLRAESPSPPRLLAAHCALLPKPGFLGAGGGGGGTGGGHGGPHHHAHPGAAAAAAAAAAAAAAGGLALGLHPGGAQGGAGLPAQAALYGHPVYGYSAAAAAAALAGQHPALSYSYPQVQGAHPAHPADPIKLGAGTFQLDQWLRASTAGMILPKMPDFNSQAQSNLLGKCRRPRTAFTSQQLLELEHQFKLNKYLSRPKRFEVATSLMLTETQVKIWFQNRRMKWKRSKKAKEQAAQEAEKQKGGGGGAGKGGAEEPGAEELLGPPAPGDKGSGRRLRDLRDSDPEEDEDEDDEDHFPYSNGASVHAASSDCSSEDDSPPPRPSHQPAPQ

SEQ ID NO: 52945 - protein, 82 aa, Homo sapiens
  Payload ID: 10551
  Gene Symbol: MNX1
  Gene Name: motor neuron and pancreas homeobox 1
  ENSP ID: ENSP00000401158
MGGLSTVGACPGILGAQQAQAQSNLLGKCRRPRTAFTSQQLLELEHQFKLNKYLSRPKRFEVATSLMLTETQVKIWFQNRRM

SEQ ID NO: 52946 - protein, 29 aa, Homo sapiens
  Payload ID: 10551
  Gene Symbol: MNX1
  Gene Name: motor neuron and pancreas homeobox 1
  ENSP ID: ENSP00000416458
MGGLSTVGACPGILGAQQGEDLVPEPADE

SEQ ID NO: 52947 - protein, 189 aa, Homo sapiens
  Payload ID: 10551
  Gene Symbol: MNX1
  Gene Name: motor neuron and pancreas homeobox 1
  Uniprot ID: P50219
  ENSP ID: ENSP00000438552
MGGLSTVGACPGILGAQQAQAQSNLLGKCRRPRTAFTSQQLLELEHQFKLNKYLSRPKRFEVATSLMLTETQVKIWFQNRRMKWKRSKKAKEQAAQEAEKQKGGGGGAGKGGAEEPGAEELLGPPAPGDKGSGRRLRDLRDSDPEEDEDEDDEDHFPYSNGASVHAASSDCSSEDDSPPPRPSHQPAPQ

SEQ ID NO: 52948 - protein, 143 aa, Homo sapiens
  Payload ID: 10551
  Gene Symbol: MNX1
  Gene Name: motor neuron and pancreas homeobox 1
  ENSP ID: ENSP00000473965
MGGLSTVGACPGILGAQQGNECPSKVGPREPLFSPPQSRWASGSFLSIRAGHLARGLGPSGFPGTRGLSGLGLRGSGSLGLWLSPLAPSGSATYESGRADVYGSTLSAAEHPNKETPLFLSEWICLDWGDAGRAGEKQKRKQK

SEQ ID NO: 52949 - protein, 31 aa, Homo sapiens
  Payload ID: 10551
  Gene Symbol: MNX1
  Gene Name: motor neuron and pancreas homeobox 1
  ENSP ID: ENSP00000474286
  MOD_RES (1)..(1): Any amino acid
XAGMILPKMPDFNCKEGTDTLTSCTLGSFQN

SEQ ID NO: 52950 - protein, 36 aa, Homo sapiens
  Payload ID: 10551
  Gene Symbol: MNX1
  Gene Name: motor neuron and pancreas homeobox 1
  ENSP ID: ENSP00000475129
MGGLSTVGACPGILGAQQGKEGTDTLTSCTLGSFQN

SEQ ID NO: 52951 - protein, 1003 aa, Homo sapiens
  Payload ID: 10552
  Gene Symbol: MOV10
  Gene Name: Mov10 RISC complex RNA helicase
  Uniprot ID: Q9HCE1
  ENSP ID: ENSP00000350028
MPSKFSCRQLREAGQCFESFLVVRGLDMETDRERLRTIYNRDFKISFGTPAPGFSSMLYGMKIANLAYVTKTRVRFFRLDRWADVRFPEKRRMKLGSDISKHHKSLLAKIFYDRAEYLHGKHGVDVEVQGPHEARDGQLLIRLDLNRKEVLTLRLRNGGTQSVTLTHLFPLCRTPQFAFYNEDQELPCPLGPGECYELHVHCKTSFVGYFPATVLWELLGPGESGSEGAGTFYIARFLAAVAHSPLAAQLKPMTPFKRTRITGNPVVTNRIEEGERPDRAKGYDLELSMALGTYYPPPRLRQLLPMLLQGTSIFTAPKEIAEIKAQLETALKWRNYEVKLRLLLHLEELQMEHDIRHYDLESVPMTWDPVDQNPRLLTLEVPGVTESRPSVLRGDHLFALLSSETHQEDPITYKGFVHKVELDRVKLSFSMSLLSRFVDGLTFKVNFTFNRQPLRVQHRALELTGRWLLWPMLFPVAPRDVPLLPSDVKLKLYDRSLESNPEQLQAMRHIVTGTTRPAPYIIFGPPGTGKTVTLVEAIKQVVKHLPKAHILACAPSNSGADLLCQRLRVHLPSSIYRLLAPSRDIRMVPEDIKPCCNWDAKKGEYVFPAKKKLQEYRVLITTLITAGRLVSAQFPIDHFTHIFIDEAGHCMEPESLVAIAGLMEVKETGDPGGQLVLAGDPRQLGPVLRSPLTQKHGLGYSLLERLLTYNSLYKKGPDGYDPQFITKLLRNYRSHPTILDIPNQLYYEGELQACADVVDRERFCRWAGLPRQGFPIIFHGVMGKDEREGNSPSFFNPEEAATVTSYLKLLLAPSSKKGKARLSPRSVGVISPYRKQVEKIRYCITKLDRELRGLDDIKDLKVGSVEEFQGQERSVILISTVRSSQSFVQLDLDFNLGFLKNPKRFNVAVTRAKALLIIVGNPLLLGHDPDWKVFLEFCKENGGYTGCPFPAKLDLQQGQNLLQGLSKLSPSTSGPHSHDYLPQEREGEGGLSLQVEPEWRNEL

SEQ ID NO: 52952 - protein, 947 aa, Homo sapiens
  Payload ID: 10552
  Gene Symbol: MOV10
  Gene Name: Mov10 RISC complex RNA helicase
  ENSP ID: ENSP00000358658
MLYGMKIANLAYVTKTRVRFFRLDRWADVRFPEKRRMKLGSDISKHHKSLLAKIFYDRAEYLHGKHGVDVEVQGPHEARDGQLLIRLDLNRKEVLTLRLRNGGTQSVTLTHLFPLCRTPQFAFYNEDQELPCPLGPGECYELHVHCKTSFVGYFPATVLWELLGPGESGSEGAGTFYIARFLAAVAHSPLAAQLKPMTPFKRTRITGNPVVTNRIEEGERPDRAKGYDLELSMALGTYYPPPRLRQLLPMLLQGTSIFTAPKEIAEIKAQLETALKWRNYEVKLRLLLHLEELQMEHDIRHYDLESVPMTWDPVDQNPRLLTLEVPGVTESRPSVLRGDHLFALLSSETHQEDPITYKGFVHKVELDRVKLSFSMSLLSRFVDGLTFKVNFTFNRQPLRVQHRALELTGRWLLWPMLFPVAPRDVPLLPSDVKLKLYDRSLESNPEQLQAMRHIVTGTTRPAPYIIFGPPGTGKTVTLVEAIKQVVKHLPKAHILACAPSNSGADLLCQRLRVHLPSSIYRLLAPSRDIRMVPEDIKPCCNWDAKKGEYVFPAKKKLQEYRVLITTLITAGRLVSAQFPIDHFTHIFIDEAGHCMEPESLVAIAGLMEVKETGDPGGQLVLAGDPRQLGPVLRSPLTQKHGLGYSLLERLLTYNSLYKKGPDGYDPQFITKLLRNYRSHPTILDIPNQLYYEGELQACADVVDRERFCRWAGLPRQGFPIIFHGVMGKDEREGNSPSFFNPEEAATVTSYLKLLLAPSSKKGKARLSPRSVGVISPYRKQVEKIRYCITKLDRELRGLDDIKDLKVGSVEEFQGQERSVILISTVRSSQSFVQLDLDFNLGFLKNPKRFNVAVTRAKALLIIVGNPLLLGHDPDWKVFLEFCKENGGYTGCPFPAKLDLQQGQNLLQGLSKLSPSTSGPHSHDYLPQEREGEGGLSLQVEPEWRNEL

SEQ ID NO: 52953 - protein, 1003 aa, Homo sapiens; identical to SEQ ID NO: 52951
  Payload ID: 10552
  Gene Symbol: MOV10
  Gene Name: Mov10 RISC complex RNA helicase
  Uniprot ID: Q9HCE1
  ENSP ID: ENSP00000358659

SEQ ID NO: 52954 - protein, 1003 aa, Homo sapiens; identical to SEQ ID NO: 52951
  Payload ID: 10552
  Gene Symbol: MOV10
  Gene Name: Mov10 RISC complex RNA helicase
  Uniprot ID: Q9HCE1
  ENSP ID: ENSP00000399797

SEQ ID NO: 52955 - protein, 1211 aa, Homo sapiens
  Payload ID: 10553
  Gene Symbol: MOV10L1
  Gene Name: Mov10 RISC complex RNA helicase like 1
  Uniprot ID: Q9BXT6
  ENSP ID: ENSP00000262794
MLSLAAKLVAFFWRTADTPREEAGQLEPELAEGDTKLKTVRGVVTRYCSDYGMIDDMIYFSSDAVTSRVLLNVGQEVIAVVEENKVSNGLKAIRVEAVSDKWEDDSRNHGSPSDCGPRVLIGCVTSLVEGAGCISQTTYFSLESVCEGFEPCKGDWVEAEYRIRPGTWSSEATSVKPLRYKRVDKVCISSLCGRNGVLEESIFFTLDSLKLPDGYTPRRGDVVNAVVVESSQSCYVWRALCMTLVKRRDAAPVHEATHFYGTILLKNKGDIEVTQVTHFGTLKEGRSKTMVIWIENKGDIPQNLVSCKLAGWDKSKQFRFQMLDKDQMCPVVSFVSVPEKENSSDENINSLNSHTKNKTSQMSESSLVNNRGISPGDCTCKGENGEKDNILSRKQMTEPEPGGLVPPGGKTFIVVICDGKNPGRCKELLLLCFSDFLIGRYLEVNVISGEESLIAAREPFSWKKLKSSQALTSAKTTVVVTAQKRNSRRQLPSFLPQYPIPDRLRKCVEQKIDILTFQPLLAELLNMSNYKEKFSTLLWLEEIYAEMELKEYNMSGIILRRNGDLLVLEVPGLAEGRPSLYAGDKLILKTQEYNGHAIEYISYVTEIHEEDVTLKINPEFEQAYNFEPMDVEFTYNRTTSRRCHFALEHVIHLGVKVLFPEEIILQSPQVTGNWNHAQDTKSSGQSTSKKNRKTMTDQAEHGTEERRVGDKDLPVLAPFTAEMSDWVDEIQTPKARKMEFFNPVLNENQKLAVKRILSGDCRPLPYILFGPPGTGKTVTIIEAVLQVHFALPDSRILVCAPSNSAADLVCLRLHESKVLQPATMVRVNATCRFEEIVIDAVKPYCRDGEDIWKASRFRIIITTCSSSGLFYQIGVRVGHFTHVFVDEAGQASEPECLIPLGLMSDISGQIVLAGDPMQLGPVIKSRLAMAYGLNVSFLERLMSRPAYQRDENAFGACGAHNPLLVTKLVKNYRSHEALLMLPSRLFYHRELEVCADPTVVTSLLGWEKLPKKGFPLIFHGVRGSEAREGKSPSWFNPAEAVQVLRYCCLLAHSISSQVSASDIGVITPYRKQVEKIRILLRNVDLMDIKVGSVEEFQGQEYLVIIISTVRSNEDRFEDDRYFLGFLSNSKRFNVAITRPKALLIVLGNPHVLVRDPCFGALLEYSITNGVYMGCDLPPALQSLQNCGEGVADPSYPVVPESTGPEKHQEPS

SEQ ID NO: 52956 - protein, 125 aa, Homo sapiens
  Payload ID: 10553
  Gene Symbol: MOV10L1
  Gene Name: Mov10 RISC complex RNA helicase like 1
  Uniprot ID: Q9BXT6
  ENSP ID: ENSP00000346917
MSDISGQVTKLVKNYRSHEALLMLPSRLFYHRELEVCADPTVVTSLLGWEKLPKKGFPLIFHGVRGSEAREGKSPSWFNPAEAVQVLRYCCLLAHSISSQVSASDIGVITPYRKQVRPAQARLVL

SEQ ID NO: 52957 - protein, 338 aa, Homo sapiens
  Payload ID: 10553
  Gene Symbol: MOV10L1
  Gene Name: Mov10 RISC complex RNA helicase like 1
  Uniprot ID: Q9BXT6
  ENSP ID: ENSP00000379193
MFRVGHFTHVFVDEAGQASEPECLIPLGLMSDISGQIVLAGDPMQLGPVIKSRLAMAYGLNVSFLERLMSRPAYQRDENAFGACGAHNPLLVTKLVKNYRSHEALLMLPSRLFYHRELEVCADPTVVTSLLGWEKLPKKGFPLIFHGVRGSEAREGKSPSWFNPAEAVQVLRYCCLLAHSISSQVSASDIGVITPYRKQVEKIRILLRNVDLMDIKVGSVEEFQGQEYLVIIISTVRSNEDRFEDDRYFLGFLSNSKRFNVAITRPKALLIVLGNPHVLVRDPCFGALLEYSITNGVYMGCDLPPALQSLQNCGEGVADPSYPVVPESTGPEKHQEPS

SEQ ID NO: 52958 - protein, 56 aa, Homo sapiens
  Payload ID: 10553
  Gene Symbol: MOV10L1
  Gene Name: Mov10 RISC complex RNA helicase like 1
  ENSP ID: ENSP00000379195
MLSLAAKLVAFFWRTADTPREEAGQLEPELAEGGSREAAGRRVPGPRVSATREPRP

SEQ ID NO: 52959 - protein, 1165 aa, Homo sapiens
  Payload ID: 10553
  Gene Symbol: MOV10L1
  Gene Name: Mov10 RISC complex RNA helicase like 1
  Uniprot ID: Q9BXT6
  ENSP ID: ENSP00000379199
MLSLAAKLVAFFWRTADTPREEAGQLEPELAEGDTKLKTVRGVVTRYCSDYGMIDDMIYFSSDAVTSRVLLNVGQEVIAVVEENKVSNGLKAIRVEAVSDKWEDDSRNHGSPSDCGPRVLIGCVTSLVEGAGCISQTTYFSLESVCEGFEPCKGDWVEAEYRIRPGTWSSEATSVKPLRYKRVDKVCISSLCGRNGVLEESIFFTLDSLKLPDGYTPRRGDVVNAVVVESSQSCYVWRALCMTLVKRRDAAPVHEATHFYGTILLKNKGDIEVTQVTHFGTLKEGRSKTMVIWIENKGDIPQNLVSCKLAGWDKSKQFRFQMLDKDQMCPVVSFVSVPEKENSSDENINSLNSHTKNKTSQMSESSLVNNRGISPGDCTCKGENGEKDNILSRKQMTEPEPGGLVPPGGKTFIVVICDGKNPGRCKELLLLCFSDFLIGRYLEVNVISGEESLIAAREPFSWKKLKSSQALTSAKTTVVVTAQKRNSRRQLPSFLPQYPIPDRLRKCVEQKIDILTFQPLLAELLNMSNYKEKFSTLLWLEEIYAEMELKEYNMSGIILRRNGDLLVLEVPGLAEGRPSLYAGDKLILKTQEYNGHAIEYISYVTEIHEEDVTLKINPEFEQAYNFEPMDVEFTYNRTTSRRCHFALEHVIHLGVKVLFPEEIILQSPQVTGNWNHAQDTKSSGQSTSKKNRKTMTDQAEHGTEERRVGDKDLPVLAPFTAEMSDWVDEIQTPKARKMEFFNPVLNENQKLAVKRILSGDCRPLPYILFGPPGTGKTVTIIEAVLQVHFALPDSRILVCAPSNSAADLVCLRLHESKVLQPATMVRVNATCRFEEIVIDAVKPYCRDGEDIWKASRFRIIITTCSSSGLFYQIGVRVGHFTHVFVDEAGQASEPECLIPLGLMSDISGQIVLAGDPMQLGPVIKSRLAMAYGLNVSFLERLMSRPAYQRDENAFGACGAHNPLLVTKLVKNYRSHEALLMLPSRLFYHRELEVCADPTVVTSLLGWEKLPKKGFPLIFHGVRGSEAREGKSPSWFNPAEAVQVLRYCCLLAHSISSQVSASDIGVITPYRKQVEKIRILLRNVDLMDIKVGSVEEFQGQEYLVIIISTDPCFGALLEYSITNGVYMGCDLPPALQSLQNCGEGVADPSYPVVPESTGPEKHQEPS

SEQ ID NO: 52960 - protein, 166 aa, Homo sapiens
  Payload ID: 10553
  Gene Symbol: MOV10L1
  Gene Name: Mov10 RISC complex RNA helicase like 1
  ENSP ID: ENSP00000399776
  MOD_RES (1)..(1): Any amino acid
XMLDKDQMCPVVSFVSVPEKENSSDENINSLNSHTKNKTSQMSESSLVNNRGISPGDCTCKGENGEKDNILSRKQMTEPEPGGLVPPGGKTFIVVICDGKNPGRCKELLLLCFSDFLIGRYLEVNVISGEESLIAAREPFSWKKLKSSQALTSAKTTVVVTAQKSF

SEQ ID NO: 52961 - protein, 56 aa, Homo sapiens; identical to SEQ ID NO: 52958
  Payload ID: 10553
  Gene Symbol: MOV10L1
  Gene Name: Mov10 RISC complex RNA helicase like 1
  ENSP ID: ENSP00000410957

SEQ ID NO: 52962 - protein, 1165 aa, Homo sapiens
  Payload ID: 10553
  Gene Symbol: MOV10L1
  Gene Name: Mov10 RISC complex RNA helicase like 1
  Uniprot ID: Q9BXT6
  ENSP ID: ENSP00000438542
MSFLPVRSVIGGGDTKLKTVRGVVTRYCSDYGMIDDMIYFSSDAVTSRVLLNVGQEVIAVVEENKVSNGLKAIRVEAVSDKWEDDSRNHGSPSDCGPRVLIGCVTSLVEGAGCISQTTYFSLESVCEGFEPCKGDWVEAEYRIRPGTWSSEATSVKPLRYKRVDKVCISSLCGRNGVLEESIFFTLDSLKLPDGYTPRRGDVVNAVVVESSQSCYVWRALCMTLVKRRDAAPVHEATHFYGTILLKNKGDIEVTQVTHFGTLKEGRSKTMVIWIENKGDIPQNLVSCKLAGWDKSKQFRFQMLDKDQMCPVVSFVSVPEKENSSDENINSLNSHTKNKTSQMSESSLVNNRGISPGDCTCKGENGEKDNILSRKQMTEPEPGGLVPPGGKTFIVVICDGKNPGRCKELLLLCFSDFLIGRYLEVNVISGEESLIAAREPFSWKKLKSSQALTSAKTTVVVTAQKRNSRRQLPSFLPQYPIPDRLRKCVEQKIDILTFQPLLAELLNMSNYKEKFSTLLWLEEIYAEMELKEYNMSGIILRRNGDLLVLEVPGLAEGRPSLYAGDKLILKTQEYNGHAIEYISYVTEIHEEDVTLKINPEFEQAYNFEPMDVEFTYNRTTSRRCHFALEHVIHLGVKVLFPEEIILQSPQVTGNWNHAQDTKSSGQSTSKKNRKTMTDQAEHGTEERRVGDKDLPVLAPFTAEMSDWVDEIQTPKARKMEFFNPVLNENQKLAVKRILSGDCRPLPYILFGPPGTGKTVTIIEAVLQVHFALPDSRILVCAPSNSAADLVCLRLHESKVLQPATMVRVNATCRFEEIVIDAVKPYCRDGEDIWKASRFRIIITTCSSSGLFYQIGVRVGHFTHVFVDEAGQASEPECLIPLGLMSDISGQIVLAGDPMQLGPVIKSRLAMAYGLNVSFLERLMSRPAYQRDENAFGACGAHNPLLVTKLVKNYRSHEALLMLPSRLFYHRELEVCADPTVVTSLLGWEKLPKKGFPLIFHGVRGSEAREGKSPSWFNPAEAVQVLRYCCLLAHSISSQVSASDIGVITPYRKQVEKIRILLRNVDLMDIKVGSVEEFQGQEYLVIIISTVRSNEDRFEDDRYFLGFLSNSKRFNVAITRPKALLIVLGNPHVLVRLWRGGGRPLLPSGARIHRTREASGAQLICSG

SEQ ID NO: 52963 - protein, 1211 aa, Homo sapiens; identical to SEQ ID NO: 52955
  Payload ID: 10553
  Gene Symbol: MOV10L1
  Gene Name: Mov10 RISC complex RNA helicase like 1
  Uniprot ID: Q9BXT6
  ENSP ID: ENSP00000438978

SEQ ID NO: 52964 - protein, 681 aa, Homo sapiens
  Payload ID: 10554
  Gene Symbol: MPHOSPH10
  Gene Name: M-phase phosphoprotein 10 (U3 small nucleolar ribonucleoprotein)
  Uniprot ID: O00566
  ENSP ID: ENSP00000244230
MAPQVWRRRTLERCLTEVGKATGRPECFLTIQEGLASKFTSLTKVLYDFNKILENGRIHGSPLQKLVIENFDDEQIWQQLELQNEPILQYFQNAVSETINDEDISLLPESEEQEREEDGSEIEADDKEDLEDLEEEEVSDMGNDDPEMGERAENSSKSDLRKSPVFSDEDSDLDFDISKLEQQSKVQNKGQGKPREKSIVDDKFFKLSEMEAYLENIEKEEERKDDNDEEEEDIDFFEDIDSDEDEGGLFGSKKLKSGKSSRNLKYKDFFDPVESDEDITNVHDDELDSNKEDDEIAEEEAEELSISETDEDDDLQENEDNKQHKESLKRVTFALPDDAETEDTGVLNVKKNSDEVKSSFEKRQEKMNEKIASLEKELLEKKPWQLQGEVTAQKRPENSLLEETLHFDHAVRMAPVITEETTLQLEDIIKQRIRDQAWDDVVRKEKPKEDAYEYKKRLTLDHEKSKLSLAEIYEQEYIKLNQQKTAEEENPEHVEIQKMMDSLFLKLDALSNFHFIPKPPVPEIKVVSNLPAITMEEVAPVSVSDAALLAPEEIKEKNKAGDIKTAAEKTATDKKRERRKKKYQKRMKIKEKEKRRKLLEKSSVDQAGKYSKTVASEKLKQLTKTGKASFIKDEGKDKALKSSQAFFSKLQDQVKMQINDAKKTEKKKKKRQDISVHKLKL

SEQ ID NO: 52965 - protein, 462 aa, Homo sapiens
  Payload ID: 10554
  Gene Symbol: MPHOSPH10
  Gene Name: M-phase phosphoprotein 10 (U3 small nucleolar ribonucleoprotein)
  ENSP ID: ENSP00000475545
MAPQVWRRRTLERCLTEVGKATGRPECFLTIQEGLASKFTSLTKVLYDFNKILENGRIHGSPLQKLVIENFDDEQIWQQLELQNEPILQYFQNAVSETINDEDISLLPESEEQEREEDGSEIEADDKEDLEDLEEEEVSDMGNDDPEMGERAENSSKSDLRKSPVFSDEDSDLDFDISKLEQQSKVQNKGQGKPREKSIVDDKFFKLSEMEAYLENIEKEEERKDDNDEEEEDIDFFEDIDSDEDEGGLFGSKKLKSGKSSRNLKYKDFFDPVESDEDITNVHDDELDSNKEDDEIAEEEAEELSISETDEDDDLQENEDNKQHKESLKRVTFALPDDAETEDTGVLNVKKNSDEVKSSFEKRQEKMNEKIASLEKELLEKKPWQLQGEVTAQKRPENSLLEETLHFDHAVRMGMVPSSVVFMSVLFPWFHFIQRFGVVFLFPQLFILKTCKHMAWHGSSHL

SEQ ID NO: 52966 - protein, 160 aa, Homo sapiens
  Payload ID: 10555
  Gene Symbol: MPHOSPH6
  Gene Name: M-phase phosphoprotein 6
  Uniprot ID: Q99547
  ENSP ID: ENSP00000258169
MAAERKTRLSKNLLRMKFMQRGLDSETKKQLEEEEKKIISEEHWYLDLPELKEKESFIIEEQSFLLCEDLLYGRMSFRGFNPEVEKLMLQMNAKHKAEEVEDETVELDVSDEEMARRYETLVGTIGKKFARKRDHANYEEDENGDITPIKAKKMFLKPQD

SEQ ID NO: 52967 - protein, 55 aa, Homo sapiens
  Payload ID: 10555
  Gene Symbol: MPHOSPH6
  Gene Name: M-phase phosphoprotein 6
  ENSP ID: ENSP00000454900
MAAERKTRLSKNLLRMKFMQRGLDSETKKQLEEEEKKIISEEHWYLDLPELKEKE

SEQ ID NO: 52968 - protein, 142 aa, Homo sapiens
  Payload ID: 10555
  Gene Symbol: MPHOSPH6
  Gene Name: M-phase phosphoprotein 6
  ENSP ID: ENSP00000454996
MQRGLDSETKKQLEEEEKKIISEEHWYLDLPELKEKESFIIEEQSFLLCEDLLYGRMSFRGFNPEVEKLMLQMNAKHKAEEVEDETVELDVSDEEMARRYETLVGTIGKKFARKRDHANYEEDENGDITPIKAKKMFLKPQD

SEQ ID NO: 52969 - protein, 131 aa, Homo sapiens
  Payload ID: 10555
  Gene Symbol: MPHOSPH6
  Gene Name: M-phase phosphoprotein 6
  ENSP ID: ENSP00000456626
MQRGLDSETKKQLEEEEKKIISEEHWSFIIEEQSFLLCEDLLYGRMSFRGFNPEVEKLMLQMNAKHKAEEVEDETVELDVSDEEMARRYETLVGTIGKKFARKRDHANYEEDENGDITPIKAKKMFLKPQD

SEQ ID NO: 52970 - protein, 97 aa, Homo sapiens
  Payload ID: 10555
  Gene Symbol: MPHOSPH6
  Gene Name: M-phase phosphoprotein 6
  ENSP ID: ENSP00000457537
MAAERKTRLSKNLLRMKFMQRGLDSETKKQLEEEEKKIISEEHWYLDLPELKEKESFIIEEQSFLLCEDLLYGRMSFRGFNPEVEVFLHQVPFLLII

SEQ ID NO: 52971 - protein, 860 aa, Homo sapiens
  Payload ID: 10556
  Gene Symbol: MPHOSPH8
  Gene Name: M-phase phosphoprotein 8
  Uniprot ID: Q99549
  ENSP ID: ENSP00000355388
MEQVAEGARVTAVPVSAADSTEELAEVEEGVGVVGEDNDAAARGAEAFGDSEEDGEDVFEVEKILDMKTEGGKVLYKVRWKGYTSDDDTWEPEIHLEDCKEVLLEFRKKIAENKAKAVRKDIQRLSLNNDIFEANSDSDQQSETKEDTSPKKKKKKLRQREEKSPDDLKKKKAKAGKLKDKSKPDLESSLESLVFDLRTKKRISEAKEELKESKKPKKDEVKETKELKKVKKGEIRDLKTKTREDPKENRKTKKEKFVESQVESESSVLNDSPFPEDDSEGLHSDSREEKQNTKSARERAGQDMGLEHGFEKPLDSAMSAEEDTDVRGRRKKKTPRKAEDTRENRKLENKNAFLEKKTVPKKQRNQDRSKSAAELEKLMPVSAQTPKGRRLSGEERGLWSTDSAEEDKETKRNESKEKYQKRHDSDKEEKGRKEPKGLKTLKEIRNAFDLFKLTPEEKNDVSENNRKREEIPLDFKTIDDHKTKENKQSLKERRNTRDETDTWAYIAAEGDQEVLDSVCQADENSDGRQQILSLGMDLQLEWMKLEDFQKHLDGKDENFAATDAIPSNVLRDAVKNGDYITVKVALNSNEEYNLDQEDSSGMTLVMLAAAGGQDDLLRLLITKGAKVNGRQKNGTTALIHAAEKNFLTTVAILLEAGAFVNVQQSNGETALMKACKRGNSDIVRLVIECGADCNILSKHQNSALHFAKQSNNVLVYDLLKNHLETLSRVAEETIKDYFEARLALLEPVFPIACHRLCEGPDFSTDFNYKPPQNIPEGSGILLFIFHANFLGKEVIARLCGPCSVQAVVLNDKFQLPVFLDSHFVYSFSPVAGPNKLFIRLTEAPSAKVKLLIGAYRVQLQ

SEQ ID NO: 52972 - protein, 150 aa, Homo sapiens
  Payload ID: 10556
  Gene Symbol: MPHOSPH8
  Gene Name: M-phase phosphoprotein 8
  ENSP ID: ENSP00000405941
  MOD_RES (1)..(1): Any amino acid
XEETIKDYFEARLALLEPVFPIACHRLCEGPDFSTDFNYKPPQNIPEGSGILLFIFHANFLGKEVIARLCGPCSVQAVVLNDKFQLPVFLTGSRSVVQAGVQWRGLQLTGVLTSQAQAILPPQPPNYLGLKMTVILFTHSALLQVPINSS

SEQ ID NO: 52973 - protein, 311 aa, Homo sapiens
  Payload ID: 10556
  Gene Symbol: MPHOSPH8
  Gene Name: M-phase phosphoprotein 8
  ENSP ID: ENSP00000414663
  MOD_RES (1)..(1): Any amino acid
XKKVKKGEIRDLKTKTREDPKENRKTKKEKFVESQVESESSVLNDSPFPEDDSEGLHSDSREEKQNTKSARERAGQDMGLEHGFEKPLDSAMSAEEDTDVRGRRKKKTPRKAEDTRENRKLENKNAFLEKKTVPKKQRNQDRSKSAAELEKLMPVSAQTPKGRRLSGEERGLWSTDSAEEDKETKRNESKEKYQKRHDSDKEEKGRKEPKGLKTLKEIRNAFDLFKLTPEEKNDVSENNRKREEIPLDFKTIDDHKTKENKQSLKERRNTRDETDTWAYIAAEGDQEVLDSVCQADENSGEFGIILQNFSR

SEQ ID NO: 52974 - protein, 840 aa, Homo sapiens
  Payload ID: 10557
  Gene Symbol: MPHOSPH9
  Gene Name: M-phase phosphoprotein 9
  ENSP ID: ENSP00000304096
ASLASCEGNSSNKQVSSESQMGFFSLSSERNESVIHYPESTEPEIQQEMSTSQPDCNVDSCSVSSGYGTFCISELNLYKSKDPKEFMEHIDVPKGQYVAPAVPAESLVDGVKNENFYIQTPEECHVSLKEDVSISPGEFEHNFLGENKVSEVYSGKTNSNAITSWAQKLKQNQPKRAHVEDGGSRSKQGNEQSKKTPIEKSDFAAATHPRAFYLSKPDETPNAWMSDSGTGLTYWKLEEKDMHHSLPETLEKTFISLSSTDVSPNQVLTLDPTLHMKPKQQISGIQPHGLPNALDDRISFSPDSVLEPSMSSPSDIDSFSQASNVTSQLPGFPKYPSHTKASPVDSWKNQTFQNESRTSSTFPSVYTITSNDISVNTVDEENTVMVASASVSQSQLPGTANSVPECISLTSLEDPVILSKIRQNLKEKHARHIADLRAYYESEINSLKQKLEAKEISGVEDWKITNQILVDRCGQLDSALHEATSRVRTLENKNNLLEIEVNDLRERFSAASSASKILQERIEEMRTSSKEKDNTIIRLKSRLQDLEEAFENAYKLSDDKEAQLKQENKMFQDLLGEYESLGKEHRRVKDALNTTENKLLDAYTQISDLKRMISKLEAQVKQVEHENMLSLRHNSRIHVRPSRANTLATSDVSRRKWLIPGAEYSIFTGQPLDTQDSNVDNQLEETCSLGHRSPLEKDSSPGSSSTSLLIKKQRETSDTPIMRALKELDEGKIFKNWGTQTEKEDTSNINPRQTETSVNASRSPEKCAQQRQKRLNSASQRSSSLPPSNRKSSTPTKREIMLTPVTVAYSPKRSPKENLSPGFSHLLSKNESSPIRKNLF

SEQ ID NO: 52975 - protein, 363 aa, Homo sapiens
  Payload ID: 10557
  Gene Symbol: MPHOSPH9
  Gene Name: M-phase phosphoprotein 9
  ENSP ID: ENSP00000440007
  MOD_RES (1)..(1): Any amino acid
XQVVTAIQFGGKTMPRTDSCPAGAVPQPNSKPEIQQEMSTSQPDCNVDSCSVSSGYGTFCISELNLYKSKDPKEFMEHIDVPKGQYVAPAVPAESLVDGVKNENFYIQTPEECHVSLKEDVSISPGEFEHNFLGENKVSEVYSGKTNSNAITSWAQKLKQNQPKRAHVEDGGSRSKQGNEQSKKTPIEKSDFAAATHPRAFYLSKPDETPNAWMSDSGTGLTYWKLEEKDMHHSLPETLEKTFISLSSTDVSPNQSNTSNEMKLPSLKDIYYKKQRENKQLPERNLTSASNPNHPPEVLTLDPTLHMKPKQQISGIQPHGLPNALDDRISFSPDSVLEPSMSSPSDIDSFSQASNVTSQLPGF

SEQ ID NO: 52976 - protein, 48 aa, Homo sapiens
  Payload ID: 10557
  Gene Symbol: MPHOSPH9
  Gene Name: M-phase phosphoprotein 9
  ENSP ID: ENSP00000440664
MEEFDLVKTLHKTSSSVGSDENSLHSLGLNLNTDSNAITSWAQKLKQN

SEQ ID NO: 52977 - protein, 126 aa, Homo sapiens
  Payload ID: 10557
  Gene Symbol: MPHOSPH9
  Gene Name: M-phase phosphoprotein 9
  ENSP ID: ENSP00000441298
MEEFDLVKTLHKTSSSVGSDENSLHSLGLNLNTDRSSPHLSTNGVSSFSGKTRPSVIQGTVEVLTSLMQELQNSGKTDSELWKNCETRWLQLFNLVEKQCQEQIVAQQEQFHNQIQNLKYSKKCPR

SEQ ID NO: 52978 - protein, 675 aa, Homo sapiens
  Payload ID: 10557
  Gene Symbol: MPHOSPH9
  Gene Name: M-phase phosphoprotein 9
  ENSP ID: ENSP00000441764
  MOD_RES (1)..(1): Any amino acid
XQKLKQNQPKRAHVEDGGSRSKQGNEQSKKTPIEKSDFAAATHPRAFYLSKPDETPNAWMSDSGTGLTYWKLEEKDMHHSLPETLEKTFISLSSTDVSPNQVLTLDPTLHMKPKQQISGIQPHGLPNALDDRISFSPDSVLEPSMSSPSDIDSFSQASNVTSQLPGFPKYPSHTKASPVDSWKNQTFQNESRTSSTFPSVYTITSNDISVNTVDEENTVMVASASVSQSQLPGTANSVPECISLTSLEDPVILSKIRQNLKEKHARHIADLRAYYESEINSLKQKLEAKEISGVEDWKITNQILVDRCGQLDSALHEATSRVRTLENKNNLLEIEVNDLRERFSAASSASKILQERIEEMRTSSKEKDNTIIRLKSRLQDLEEAFENAYKLSDDKEAQLKQENKMFQDLLGEYESLGKEHRRVKDALNTTENKLLDAYTQISDLKRMISKLEAQVKQVEHENMLSLRHNSRIHVRPSRANTLATSDVSRRKWLIPGAEYSIFTGQPLDTQDSNVDNQLEETCSLGHRSPLEKDSSPGSSSTSLLIKKQRETSDTPIMRALKELDEGKIFKNWGTQTEKEDTSNINPRQTETSVNASRSPEKCAQQRQKRLNSASQRSSSLPPSNRKSSTPTKREIMLTPVTVAYSPKRSPKENLSPGFSHLLSKNESSPIRKNLF

SEQ ID NO: 52979 - protein, 46 aa, Homo sapiens
  Payload ID: 10557
  Gene Symbol: MPHOSPH9
  Gene Name: M-phase phosphoprotein 9
  ENSP ID: ENSP00000442663
MEEFDLVKTLHKTSSSVGSDENSLHSLGLNLNTDREDQTICNSRYS

SEQ ID NO: 52980 - protein, 1153 aa, Homo sapiens
  Payload ID: 10557
  Gene Symbol: MPHOSPH9
  Gene Name: M-phase phosphoprotein 9
  ENSP ID: ENSP00000445859
MEEFDLVKTLHKTSSSVGSDENSLHSLGLNLNTDRSSPHLSTNGVSSFSGKTRPSVIQGTVEVLTSLMQELQNSGKTDSELWKNCEHIQEEIKNLVKLQTSSASLASCEGNSSNKQVSSESQMGFFSLSSERNESVIHYPESTEPEIQQEMSTSQPDCNVDSCSVSSGYGTFCISELNLYKSKDPKEFMEHIDVPKGQYVAPAVPAESLVDGVKNENFYIQTPEECHVSLKEDVSISPGEFEHNFLGENKVSEVYSGKTNSNAITSWAQKLKQNQPKRAHVEDGGSRSKQGNEQSKKTPIEKSDFAAATHPRAFYLSKPDETPNAWMSDSGTGLTYWKLEEKDMHHSLPETLEKTFISLSSTDVSPNQSNTSNEMKLPSLKDIYYKKQRENKQLPERNLTSASNPNHPPEVLTLDPTLHMKPKQQISGIQPHGLPNALDDRISFSPDSVLEPSMSSPSDIDSFSQASNVTSQLPGFPKYPSHTKASPVDSWKNQTFQNESRTSSTFPSVYTITSNDISVNTVDEENTVMVASASVSQSQLPGTANSVPECISLTSLEDPVILSKIRQNLKEKHARHIADLRAYYESEINSLKQKLEAKEISGVEDWKITNQILVDRCGQLDSALHEATSRVRTLENKNNLLEIEVNDLRERFSAASSASKILQERIEEMRTSSKEKDNTIIRLKSRLQDLEEAFENAYKLSDDKEAQLKQENKMFQDLLGEYESLGKEHRRVKDALNTTENKLLDAYTQISDLKRMISKLEAQVKQVEHENMLSLRHNSRIHVRPSRANTLATSDVSRRKWLIPGAEYSIFTGQPLDTQDSNVDNQLEETCSLGHRSPLEKDSSPGSSSTSLLIKKQRETSDTPIMRALKELDEGKIFKNWGTQTEKEDTSNINPRQTETSVNASRSPEKCAQQRQKRLNSASQRSSSLPPSNRKSSTPTKREIMLTPVTVAYSPKRSPKENLSPGFSHLLSKNESSPIRFDILLDDLDTVPVSTLQRTNPRKQLQFLPLDDSEEKTYSEKATDNHVNHSSCPEPVPNGVKKVSVRTAWEKNKSVSYEQCKPVSVTPQGNDFEYTAKIRTLAETERFFDELTKEKDQIEAALSRMPSPGGRITLQTRLNQEALEDRLERINRELGSVRMTLKKFHVLRTSANL

SEQ ID NO: 52981 - protein, 89 aa, Homo sapiens
  Payload ID: 10557
  Gene Symbol: MPHOSPH9
  Gene Name: M-phase phosphoprotein 9
  ENSP ID: ENSP00000446249
MEEFDLVKTLHKTSSSVGSDENSLHSLGLNLNTDRSSPHLSTNGVSSFSGKTRPSVIQGTVEVLTSLMQELQNSGKTDSELWKNCENVE

SEQ ID NO: 52982 - protein, 84 aa, Homo sapiens
  Payload ID: 10557
  Gene Symbol: MPHOSPH9
  Gene Name: M-phase phosphoprotein 9
  ENSP ID: ENSP00000446334
MEEFDLVKTLHKTSSSVGSDENSLHSLGLNLNTDRSSPHLSTNGVSSFSGKTRPSVIQGTVEVLTSLMQELQNSGKTDSELWKN

SEQ ID NO: 52983 - protein, 215 aa, Homo sapiens
  Payload ID: 10557
  Gene Symbol: MPHOSPH9
  Gene Name: M-phase phosphoprotein 9
  ENSP ID: ENSP00000446362
  MOD_RES (1)..(1): Any amino acid
XSTPTKREIMLTPVTVAYSPKRSPKENLSPGFSHLLSKNESSPIRFDILLDDLDTVPVSTLQRTNPRKQLQFLPLDDSEEKTYSEKATDNHVNHSSCPEPVPNGVKKVSVRTAWEKNKSVSYEQCKPVSVTPQGNDFEYTAKIRTLAETERFFDELTKEKDQIEAALSRMPSPGGRITLQTRLNQTPQICEESSHKCAFAGHYVPCHLYDYRFQG

SEQ ID NO: 52984 - protein, 1183 aa, Homo sapiens
  Payload ID: 10557
  Gene Symbol: MPHOSPH9
  Gene Name: M-phase phosphoprotein 9
  Uniprot ID: Q99550
  ENSP ID: ENSP00000475489
MEEFDLVKTLHKTSSSVGSDENSLHSLGLNLNTDRSSPHLSTNGVSSFSGKTRPSVIQGTVEVLTSLMQELQNSGKTDSELWKNCETRWLQLFNLVEKQCQEQIVAQQEQFHNQIQHIQEEIKNLVKLQTSSASLASCEGNSSNKQVSSESQMGFFSLSSERNESVIHYPESTEPEIQQEMSTSQPDCNVDSCSVSSGYGTFCISELNLYKSKDPKEFMEHIDVPKGQYVAPAVPAESLVDGVKNENFYIQTPEECHVSLKEDVSISPGEFEHNFLGENKVSEVYSGKTNSNAITSWAQKLKQNQPKRAHVEDGGSRSKQGNEQSKKTPIEKSDFAAATHPRAFYLSKPDETPNAWMSDSGTGLTYWKLEEKDMHHSLPETLEKTFISLSSTDVSPNQSNTSNEMKLPSLKDIYYKKQRENKQLPERNLTSASNPNHPPEVLTLDPTLHMKPKQQISGIQPHGLPNALDDRISFSPDSVLEPSMSSPSDIDSFSQASNVTSQLPGFPKYPSHTKASPVDSWKNQTFQNESRTSSTFPSVYTITSNDISVNTVDEENTVMVASASVSQSQLPGTANSVPECISLTSLEDPVILSKIRQNLKEKHARHIADLRAYYESEINSLKQKLEAKEISGVEDWKITNQILVDRCGQLDSALHEATSRVRTLENKNNLLEIEVNDLRERFSAASSASKILQERIEEMRTSSKEKDNTIIRLKSRLQDLEEAFENAYKLSDDKEAQLKQENKMFQDLLGEYESLGKEHRRVKDALNTTENKLLDAYTQISDLKRMISKLEAQVKQVEHENMLSLRHNSRIHVRPSRANTLATSDVSRRKWLIPGAEYSIFTGQPLDTQDSNVDNQLEETCSLGHRSPLEKDSSPGSSSTSLLIKKQRETSDTPIMRALKELDEGKIFKNWGTQTEKEDTSNINPRQTETSVNASRSPEKCAQQRQKRLNSASQRSSSLPPSNRKSSTPTKREIMLTPVTVAYSPKRSPKENLSPGFSHLLSKNESSPIRFDILLDDLDTVPVSTLQRTNPRKQLQFLPLDDSEEKTYSEKATDNHVNHSSCPEPVPNGVKKVSVRTAWEKNKSVSYEQCKPVSVTPQGNDFEYTAKIRTLAETERFFDELTKEKDQIEAALSRMPSPGGRITLQTRLNQEALEDRLERINRELGSVRMTLKKFHVLRTSANL

SEQ ID NO: 52985 - protein, 30 aa, Homo sapiens
  Payload ID: 10557
  Gene Symbol: MPHOSPH9
  Gene Name: M-phase phosphoprotein 9
  ENSP ID: ENSP00000475578
KNESSPIRYCSCVYITTYQSKKATPVSSSR

SEQ ID NO: 52986 - protein, 54 aa, Homo sapiens
  Payload ID: 10557
  Gene Symbol: MPHOSPH9
  Gene Name: M-phase phosphoprotein 9
  ENSP ID: ENSP00000475785
NQTFQNESRTSSTFPSVYTITSNDISVNTVDEENTVMVASASVSQSQLPGLGRI

SEQ ID NO: 52987 - protein, 163 aa, Homo sapiens
  Payload ID: 10557
  Gene Symbol: MPHOSPH9
  Gene Name: M-phase phosphoprotein 9
  ENSP ID: ENSP00000475923
RIHVRPSRANTLATSDVSRRKWLIPGAEYSIFTGQPLDTQDSNVDNQLEETCSLGHRSPLEKDSSPGSSSTSLLIKKQRETSDTPIMRALKELDEGKIFKNWGTQTEKEDTSNINPRQTETSVNASRSPEKCAQQRQKRLNSASQRSSSLPPSNRKSSTPSKS

SEQ ID NO: 52988 - protein, 179 aa, Homo sapiens
  Payload ID: 10558
  Gene Symbol: MPLKIP
  Gene Name: M-phase specific PLK1 interacting protein
  Uniprot ID: Q8TAP9
  ENSP ID: ENSP00000304553
MQRQNFRPPTPPYPGPGGGGWGSGSSFRGTPGGGGPRPPSPRDGYGSPHHTPPYGPRSRPYGSSHSPRHGGSFPGGRFGSPSPGGYPGSYSRSPAGSQQQFGYSPGQQQTHPQGSPRTSTPFGSGRVREKRMSNELENYFKPSMLEDPWAGLEPVSVVDISQQYSNTQTFTGKKGRYFC

SEQ ID NO: 52989 - protein, 635 aa, Homo sapiens
  Payload ID: 10559
  Gene Symbol: MPL
  Gene Name: MPL proto-oncogene, thrombopoietin receptor
  Uniprot ID: P40238
  ENSP ID: ENSP00000361548
MPSWALFMVTSCLLLAPQNLAQVSSQDVSLLASDSEPLKCFSRTFEDLTCFWDEEEAAPSGTYQLLYAYPREKPRACPLSSQSMPHFGTRYVCQFPDQEEVRLFFPLHLWVKNVFLNQTRTQRVLFVDSVGLPAPPSIIKAMGGSQPGELQISWEEPAPEISDFLRYELRYGPRDPKNSTGPTVIQLIATETCCPALQRPHSASALDQSPCAQPTMPWQDGPKQTSPSREASALTAEGGSCLISGLQPGNSYWLQLRSEPDGISLGGSWGSWSLPVTVDLPGDAVALGLQCFTLDLKNVTCQWQQQDHASSQGFFYHSRARCCPRDRYPIWENCEEEEKTNPGLQTPQFSRCHFKSRNDSIIHILVEVTTAPGTVHSYLGSPFWIHQAVRLPTPNLHWREISSGHLELEWQHPSSWAAQETCYQLRYTGEGHQDWKVLEPPLGARGGTLELRPRSRYRLQLRARLNGPTYQGPWSSWSDPTRVETATETAWISLVTALHLVLGLSAVLGLLLLRWQFPAHYRRLRHALWPSLPDLHRVLGQYLRDTAALSPPKATVSDTCEEVEPSLLEILPKSSERTPLPLCSSQAQMDYRRLQPSCLGTMPLSVCPPMAESGSCCTTHIANHSYLPLSYWQQP

SEQ ID NO: 52990 - protein, 549 aa, Homo sapiens
  Payload ID: 10559
  Gene Symbol: MPL
  Gene Name: MPL proto-oncogene, thrombopoietin receptor
  ENSP ID: ENSP00000414004
MPSWALFMVTSCLLLAPQNLAQVSSQDVSLLASDSEPLKCFSRTFEDLTCFWDEEEAAPSGTYQLLYAYPREKPRACPLSSQSMPHFGTRYVCQFPDQEEVRLFFPLHLWVKNVFLNQTRTQRVLFVDSVGLPAPPSIIKAMGGSQPGELQISWEEPAPEISDFLRYELRYGPRDPKNSTGPTVIQLIATETCCPALQRPHSASALDQSPCAQPTMPWQDGPKQTSPSREASALTAEGGSCLISGLQPGNSYWLQLRSEPDGISLGGSWGSWSLPVTVDLPGDAVALGLQCFTLDLKNVTCQWQQQDHASSQGFFYHSRARCCPRDRYPIWENCEEEEKTNPGLQTPQFSRCHFKSRNDSIIHILVEVTTAPGTVHSYLGSPFWIHQAVRLPTPNLHWREISSGHLELEWQHPSSWAAQETCYQLRYTGEGHQDWKVLEPPLGARGGTLELRPRSRYRLQLRARLNGPTYQGPWSSWSDPTRVETATETAWISLVTALHLVLGLSAVLGLLLLRWQFPAHYRYRPRQAGDWRWTRWSRRPVNRHSWFAL

SEQ ID NO: 52991 - protein, 579 aa, Homo sapiens
  Payload ID: 10559
  Gene Symbol: MPL
  Gene Name: MPL proto-oncogene, thrombopoietin receptor
  ENSP ID: ENSP00000480273
MPSWALFMVTSCLLLAPQNLAQVSSQDVSLLASDSEPLKCFSRTFEDLTCFWDEEEAAPSGTYQLLYAYPREKPRACPLSSQSMPHFGTRYVCQFPDQEEVRLFFPLHLWVKNVFLNQTRTQRVLFVDSVGLPAPPSIIKAMGGSQPGELQISWEEPAPEISDFLRYELRYGPRDPKNSTGPTVIQLIATETCCPALQRPHSASALDQSPCAQPTMPWQDGPKQTSPSREASALTAEGGSCLISGLQPGNSYWLQLRSEPDGISLGGSWGSWSLPVTVDLPGDAVALGLQCFTLDLKNVTCQWQQQDHASSQGFFYHSRARCCPRDRYPIWENCEEEEKTNPGLQTPQFSRCHFKSRNDSIIHILVEVTTAPGTVHSYLGSPFWIHQAVRLPTPNLHWREISSGHLELEWQHPSSWAAQETCYQLRYTGEGHQDWKVLEPPLGARGGTLELRPRSRYRLQLRARLNGPTYQGPWSSWSDPTRVETATETAWISLVTALHLVLGLSAVLGLLLLRWQFPAHYRYRPRQAGDWRWTRWSRRCKQAFLVRSVTPDLRPPPVRTYGFALPARHLWDSPRLLTL

SEQ ID NO: 52992 - protein, 471 aa, Homo sapiens
  Payload ID: 10560
  Gene Symbol: MPND
  Gene Name: MPN domain containing
  Uniprot ID: Q8N594
  ENSP ID: ENSP00000262966
MAAPEPLSPAGGAGEEAPEEDEDEAEAEDPERPNAGAGGGRSGGGGSSVSGGGGGGGAGAGGCGGPGGALTRRAVTLRVLLKDALLEPGAGVLSIYYLGKKFLGDLQPDGRIMWQETGQTFNSPSAWATHCKKLVNPAKKSGCGWASVKYKGQKLDKYKATWLRLHQLHTPATAADESPASEGEEEELLMEEEEEDVLAGVSAEDKSRRPLGKSPSEPAHPEATTPGKRVDSKIRVPVRYCMLGSRDLARNPHTLVEVTSFAAINKFQPFNVAVSSNVLFLLDFHSHLTRSEVVGYLGGRWDVNSQMLTVLRAFPCRSRLGDAETAAAIEEEIYQSLFLRGLSLVGWYHSHPHSPALPSLQDIDAQMDYQLRLQGSSNGFQPCLALLCSPYYSGNPGPESKISPFWVMPPPEMLLVEFYKGSPDLVRLQEPWSQEHTYLDKLKISLASRTPKDQSLCHVLEQVCGVLKQGS

SEQ ID NO: 52993 - protein, 451 aa, Homo sapiens
  Payload ID: 10560
  Gene Symbol: MPND
  Gene Name: MPN domain containing
  Uniprot ID: Q8N594
  ENSP ID: ENSP00000353015
MAAPEPLSPAGGAGEEAPEEDEDEAEAEDPERPNAGAGGGRSGGGGSSVSGGGGGGGAGAGGCGGPGGALTRRAVTLRVLLKDALLEPGAGVLSIYYLGKKFLGDLQPDGRIMWQETGQTFNSPSAWATHCKKLVNPAKKSGCGWASVKYKGQKLDKYKATWLRLHQLHTPATAADESPASEGEEEELLMEEEEEDVLAGVSAEDKSRRPLGKSPSEPAHPEATTPGKRVDSKIRVPVRYCMLGSRDLARNPHTLVEVTSFAAINKFQPFNVAVSSNVLFLLIYQSLFLRGLSLVGWYHSHPHSPALPSLQDIDAQMDYQLRLQGSSNGFQPCLALLCSPYYSGNPGPESKISPFWVMPPPEQRPSDYGIPMDVEMAYVQDSFLTNDILHEMMLLVEFYKGSPDLVRLQEPWSQEHTYLDKLKISLASRTPKDQSLCHVLEQVCGVLKQGS

SEQ ID NO: 52994 - protein, 109 aa, Homo sapiens
  Payload ID: 10560
  Gene Symbol: MPND
  Gene Name: MPN domain containing
  ENSP ID: ENSP00000469057
DFHSHLTRSEVVGYLGGRWDVNSQMLTVLRAFPCRSRLGDAETAAAIEEEMLLVEFYKGSPDLVRLQEPWSQEHTYLDKLKISLASRTPKDQSLCHVLEQVCGVLKQGS

SEQ ID NO: 52995 - protein, 121 aa, Homo sapiens
  Payload ID: 10560
  Gene Symbol: MPND
  Gene Name: MPN domain containing
  ENSP ID: ENSP00000469230
RPLGKSPSEPAHPEATTPGKRVDSKIRVPVRYCMLGSRDLARNPHTLVEVTSFAAINKFQPFNVAVSSNVLFLLVCGPPCLGARGSGAQSVGSGRGSPAYQLHESWGLVCFVCYWYTVGAQ

SEQ ID NO: 52996 - protein, 419 aa, Homo sapiens
  Payload ID: 10560
  Gene Symbol: MPND
  Gene Name: MPN domain containing
  ENSP ID: ENSP00000470987
MAAPEPLSPAGGAGEEAPEEDEDEAEAEDPERPNAGAGGGRSGGGGSSVSGGGGGGGAGAGGCGGPGGALTRRAVTLRVLLKDALLEPGAGVLSIYYLGKKFLGDLQPDGRIMWQETGQTFNSPSAWATHCKKLVNPAKKSGCGWASVKYKGQKLDKYKATWLRLHQLHTPATAADESPASEGEEEELLMEEEEEDVLAGVSAEDKSRRPLGKSPSEPAHPEATTPGKRVDSKIRVPVRYCMLGSRDLARNPHTLVEVTSFAAINKFQPFNVAVSSNVLFLLDFHSHLTRSEVVGYLGGRWDVNSQMLTVLRAFPCRSRLGDAETAAAIEEEIYQSLFLRGLSLVGWYHSHPHSPALPSLQDIDAQMDYQLRLQGSSNGFQPCLALLCSPYYSGNPGPESKISPFWVMPPPEVPIPVQS

SEQ ID NO: 52997 - protein, 469 aa, Homo sapiens
  Payload ID: 10560
  Gene Symbol: MPND
  Gene Name: MPN domain containing
  ENSP ID: ENSP00000471189
  MOD_RES (1)..(1): Any amino acid
XEPLSPAGGAGEEAPEEDEDEAEAEDPERPNAGAGGGRSGGGGSSVSGGGGGGGAGAGGCGGPGGALTRRAVTLRVLLKDALLEPGAGVLSIYYLGKKFLGDLQPDGRIMWQETGQTFNSPSAWATHCKKLVNPAKKSGCGWASVKYKGQKLDKYKATWLRLHQLHTPATAADESPASEGEEEELLMEEEEEDVLAGVSAEDKSRRPLGKSPSEPAHPEATTPGKRVDSKIRVPVRYCMLGSRDLARNPHTLVEVTSFAAINKFQPFNVAVSSNVLFLLDFHSHLTRSEVVGYLGGRWDVNSQMLTVLRAFPCRSRLGDAETAAAIEEEDIDAQMDYQLRLQGSSNGFQPCLALLCSPYYSGNPGPESKISPFWVMPPPEQRPSDYGIPMDVEMAYVQDSFLTNDILHEMMLLVEFYKGSPDLVRLQEPWSQEHTYLDKLKISLASRTPKDQSLCHVLEQVCGVLKQGS

SEQ ID NO: 52998 - protein, 503 aa, Homo sapiens
  Payload ID: 10560
  Gene Symbol: MPND
  Gene Name: MPN domain containing
  ENSP ID: ENSP00000471715
GGPSGAEARGAGLQGRGAAEPWGERPPCSLSLSAAPEPLSPAGGAGEEAPEEDEDEAEAEDPERPNAGAGGGRSGGGGSSVSGGGGGGGAGAGGCGGPGGALTRRAVTLRVLLKDALLEPGAGVLSIYYLGKKFLGDLQPDGRIMWQETGQTFNSPSAWATHCKKLVNPAKKSGCGWASVKYKGQKLDKYKATWLRLHQLHTPATAADESPASEGEEEELLMEEEEEDVLAGVSAEDKSRRPLGKSPSEPAHPEATTPGKRVDSKIRVPVRYCMLGSRDLARNPHTLVEVTSFAAINKFQPFNVAVSSNVLFLLDFHSHLTRSEVVGYLGGRWDVNSQMLTVLRAFPCRSRLGDAETAAAIEEEIYQSLFLRGLSLVGWYHSHPHSPALPSLQDIDAQMDYQLRLQGSSNGFQPCLALLCSPYYSGNPGPESKISPFWVMPPPEMLLVEFYKGSPDLVRLQEPWSQEHTYLDKLKISLASRTPKDQSLCHVLEQVCGVLKQGS

SEQ ID NO: 52999 - protein, 501 aa, Homo sapiens
  Payload ID: 10560
  Gene Symbol: MPND
  Gene Name: MPN domain containing
  ENSP ID: ENSP00000471735
MAAPEPLSPAGGAGEEAPEEDEDEAEAEDPERPNAGAGGGRSGGGGSSVSGGGGGGGAGAGGCGGPGGALTRRAVTLRVLLKDALLEPGAGVLSIYYLGKKFLGDLQPDGRIMWQETGQTFNSPSAWATHCKKLVNPAKKSGCGWASVKYKGQKLDKYKATWLRLHQLHTPATAADESPASEGEEEELLMEEEEEDVLAGVSAEDKSRRPLGKSPSEPAHPEATTPGKRVDSKIRVPVRYCMLGSRDLARNPHTLVEVTSFAAINKFQPFNVAVSSNVLFLLDFHSHLTRSEVVGYLGGRWDVNSQMLTVLRAFPCRSRLGDAETAAAIEEEIYQSLFLRGLSLVGWYHSHPHSPALPSLQDIDAQMDYQLRLQGSSNGFQPCLALLCSPYYSGNPGPESKISPFWVMPPPEQRPSDYGIPMDVEMAYVQDSFLTNDILHEMMLLVEFYKGSPDLVRLQEPWSQEHTYLDKLKISLASRTPKDQSLCHVLEQVCGVLKQGS

SEQ ID NO: 53000 - protein, 176 aa, Homo sapiens
  Payload ID: 10561
  Gene Symbol: MPV17
  Gene Name: MpV17 mitochondrial inner membrane protein
  Uniprot ID: P39210
  ENSP ID: ENSP00000233545
MALWRAYQRALAAHPWKVQVLTAGSLMGLGDIISQQLVERRGLQEHQRGRTLTMVSLGCGFVGPVVGGWYKVLDRFIPGTTKVDALKKMLLDQGGFAPCFLGCFLPLVGALNGLSAQDNWAKLQRDYPDALITNYYLWPAVQLANFYLVPLHYRLAVVQCVAVIWNSYLSWKAHRL

SEQ ID NO: 53001 - protein, 120 aa, Homo sapiens
  Payload ID: 10561
  Gene Symbol: MPV17
  Gene Name: MpV17 mitochondrial inner membrane protein
  ENSP ID: ENSP00000349713
MCHLYEGPVVGGWYKVLDRFIPGTTKVDALKKMLLDQGGFAPCFLGCFLPLVGALNGLSAQDNWAKLQRDYPDALITNYYLWPAVQLANFYLVPLHYRLAVVQCVAVIWNSYLSWKAHRL

SEQ ID NO: 53002 - protein, 176 aa, Homo sapiens; identical to SEQ ID NO: 53000
  Payload ID: 10561
  Gene Symbol: MPV17
  Gene Name: MpV17 mitochondrial inner membrane protein
  Uniprot ID: P39210
  ENSP ID: ENSP00000369383

SEQ ID NO: 53003 - protein, 110 aa, Homo sapiens
  Payload ID: 10561
  Gene Symbol: MPV17
  Gene Name: MpV17 mitochondrial inner membrane protein
  ENSP ID: ENSP00000382006
MALWRAYQRALAAHPWKVQVLTADFWGGRQHCWPHASSYTCRPRPPGLKDTLPAPHSKKPLLAPLPSAHETQKPQKNIAVCHPHEVTRSRMMEFGGVKTERKCISLGNVL

SEQ ID NO: 53004 - protein, 170 aa, Homo sapiens
  Payload ID: 10561
  Gene Symbol: MPV17
  Gene Name: MpV17 mitochondrial inner membrane protein
  ENSP ID: ENSP00000383955
MALWRAYQRALAAHPWKVQVLTAGSLMGLGDIISQQLVERRGLQEHQRGRTLTMVSLGCGFVGPVVGGWYKVLDRFIPGTTKVDALKKMLLDQGGFAPCFLGCFLPLVGALNGLSAQDNWAKLQRDYPDALITNYYVGRCPMCCCYLELLPVLEGTSALSLPHSIVSTLQ

SEQ ID NO: 53005 - protein, 191 aa, Homo sapiens
  Payload ID: 10561
  Gene Symbol: MPV17
  Gene Name: MpV17 mitochondrial inner membrane protein
  ENSP ID: ENSP00000384586
MALWRAYQRALAAHPWKVQVLTAAHPRRCPDNTCVPCIGSLMGLGDIISQQLVERRGLQEHQRGRTLTMVSLGCGFVGPVVGGWYKVLDRFIPGTTKVDALKKMLLDQGGFAPCFLGCFLPLVGALNGLSAQDNWAKLQRDYPDALITNYYLWPAVQLANFYLVPLHYRLAVVQCVAVIWNSYLSWKAHRL

SEQ ID NO: 53006 - protein, 113 aa, Homo sapiens
  Payload ID: 10561
  Gene Symbol: MPV17
  Gene Name: MpV17 mitochondrial inner membrane protein
  ENSP ID: ENSP00000385175
MALWRAYQRALAAHPWKVQVLTAGSLMGLGDIISQQLVERRGLQEHQRGRTLTMVSLGCGFVDYPDALITNYYLWPAVQLANFYLVPLHYRLAVVQCVAVIWNSYLSWKAHRL

SEQ ID NO: 53007 - protein, 171 aa, Homo sapiens
  Payload ID: 10561
  Gene Symbol: MPV17
  Gene Name: MpV17 mitochondrial inner membrane protein
  ENSP ID: ENSP00000385671
MALWRAYQRALAAHPWKVQVLTAGSLMGLGDIISQQLVERRGLQEHQRGRTLTMVSLGCGFVGPVVGGWYKVLDRFIPGTTKVDALKKMLLDQGGFAPCFLGCFLPLVGALNGLSAQDNWAKLQRDYPDALITNYYLWPAVQLANFYLVPLHYREDPASTTLVSIPPELRL

SEQ ID NO: 53008 - protein, 99 aa, Homo sapiens
  Payload ID: 10561
  Gene Symbol: MPV17
  Gene Name: MpV17 mitochondrial inner membrane protein
  ENSP ID: ENSP00000386000
MALWRAYQRALAAHPWKVQVLTAAAGGEAGSAGTPERPDSDHGVPGLWLCGPCGRRLVQGFGSVHPWHHQSGCTEEDVVGSGGLCPVFSRLLSPTGRGT

SEQ ID NO: 53009 - protein, 79 aa, Homo sapiens
  Payload ID: 10561
  Gene Symbol: MPV17
  Gene Name: MpV17 mitochondrial inner membrane protein
  ENSP ID: ENSP00000388043
MALWRAYQRALAAHPWKVQVLTADFWGGRQHCWPHASSYTCRPRPPGLKDTLPAPHSKKPLLAPLPSAHETQKPQKALW

SEQ ID NO: 53010 - protein, 99 aa, Homo sapiens; identical to SEQ ID NO: 53008
  Payload ID: 10561
  Gene Symbol: MPV17
  Gene Name: MpV17 mitochondrial inner membrane protein
  ENSP ID: ENSP00000403824

SEQ ID NO: 53011 - protein, 115 aa, Homo sapiens
  Payload ID: 10561
  Gene Symbol: MPV17
  Gene Name: MpV17 mitochondrial inner membrane protein
  ENSP ID: ENSP00000405235
MGLGDIISQQLVERRGLQEHQRGRTLTMVSLGCGFVGPVVGGWYKVLDRFIPGTTKVDALKKMLLDQGGFAPCFLGCFLPLVGALNGLSAQDNWAKLQRDYPDALITNYYLWPAV

SEQ ID NO: 53012 - protein, 121 aa, Homo sapiens
  Payload ID: 10561
  Gene Symbol: MPV17
  Gene Name: MpV17 mitochondrial inner membrane protein
  ENSP ID: ENSP00000406441
  MOD_RES (1)..(1): Any amino acid
XSLMGLGDIISQQLVERRGLQEHQRGRTLTMVSLGCGFVGPVVGGWYKVLDRFIPGTTKVDALKKMLLDQDYPDALITNYYLWPAVQLANFYLVPLHYRLAVVQCVAVIWNSYLSWKAHRL

SEQ ID NO: 53013 - protein, 147 aa, Homo sapiens
  Payload ID: 10562
  Gene Symbol: MPV17L
  Gene Name: MPV17 mitochondrial membrane protein-like
  Uniprot ID: Q2QL34
  ENSP ID: ENSP00000287594
MAGWWPALSRAARRHPWPTNVLLYGSLVSAGDALQQRLQGREANWRQTRRVATLVVTFHANFNYVWLRLLERALPGRAPHALLAKLLCDQVVGAPIAVSAFYVEWTDVLALCTADQLQPCSCSMENSLRWSLWFSLGHLHLFFPAEW

SEQ ID NO: 53014 - protein, 196 aa, Homo sapiens
  Payload ID: 10562
  Gene Symbol: MPV17L
  Gene Name: MPV17 mitochondrial membrane protein-like
  Uniprot ID: Q2QL34
  ENSP ID: ENSP00000379669
MAGWWPALSRAARRHPWPTNVLLYGSLVSAGDALQQRLQGREANWRQTRRVATLVVTFHANFNYVWLRLLERALPGRAPHALLAKLLCDQVVGAPIAVSAFYVGMSILQGKDDIFLDLKQKFWNTYLSGLMYWPFVQLTNFSLVPVQWRTAYAGVCGFLWATFICFSQQSGDGTFKSAFTILYTKGTSATEGYPKK

SEQ ID NO: 53015 - protein, 52 aa, Homo sapiens
  Payload ID: 10562
  Gene Symbol: MPV17L
  Gene Name: MPV17 mitochondrial membrane protein-like
  ENSP ID: ENSP00000457012
NYVWLRLLERALPGRAPHALLAKLLCDQVVGAPIAVSAFYVGSHSIPQAEVQ

SEQ ID NO: 53016 - protein, 147 aa, Homo sapiens; identical to SEQ ID NO: 53013
  Payload ID: 10562
  Gene Symbol: MPV17L
  Gene Name: MPV17 mitochondrial membrane protein-like
  Uniprot ID: Q2QL34
  ENSP ID: ENSP00000483043

SEQ ID NO: 53017 - protein, 196 aa, Homo sapiens; identical to SEQ ID NO: 53014
  Payload ID: 10562
  Gene Symbol: MPV17L
  Gene Name: MPV17 mitochondrial membrane protein-like
  Uniprot ID: Q2QL34
  ENSP ID: ENSP00000484675

SEQ ID NO: 53018 - protein, 52 aa, Homo sapiens; identical to SEQ ID NO: 53015
  Payload ID: 10562
  Gene Symbol: MPV17L
  Gene Name: MPV17 mitochondrial membrane protein-like
  ENSP ID: ENSP00000488434

SEQ ID NO: 53019 - protein, 206 aa, Homo sapiens
  Payload ID: 10563
  Gene Symbol: MPV17L2
  Gene Name: MPV17 mitochondrial membrane protein-like 2
  Uniprot ID: Q567V2
  ENSP ID: ENSP00000469836
MARGGWRRLRRLLSAGQLLFQGRALLVTNTLGCGALMAAGDGVRQSWEIRARPGQVFDPRRSASMFAVGCSMGPFLHYWYLSLDRLFPASGLRGFPNVLKKVLVDQLVASPLLGVWYFLGLGCLEGQTVGESCQELREKFWEFYKADWCVWPAAQFVNFLFVPPQFRVTYINGLTLGWDTYLSYLKYRSPVPLTPPGCVALDTRAD

SEQ ID NO: 53020 - protein, 708 aa, Homo sapiens
  Payload ID: 10564
  Gene Symbol: MRE11A
  Gene Name: MRE11 homolog A, double strand break repair nuclease
  Uniprot ID: P49959
  ENSP ID: ENSP00000325863
MSTADALDDENTFKILVATDIHLGFMEKDAVRGNDTFVTLDEILRLAQENEVDFILLGGDLFHENKPSRKTLHTCLELLRKYCMGDRPVQFEILSDQSVNFGFSKFPWVNYQDGNLNISIPVFSIHGNHDDPTGADALCALDILSCAGFVNHFGRSMSVEKIDISPVLLQKGSTKIALYGLGSIPDERLYRMFVNKKVTMLRPKEDENSWFNLFVIHQNRSKHGSTNFIPEQFLDDFIDLVIWGHEHECKIAPTKNEQQLFYISQPGSSVVTSLSPGEAVKKHVGLLRIKGRKMNMHKIPLHTVRQFFMEDIVLANHPDIFNPDNPKVTQAIQSFCLEKIEEMLENAERERLGNSHQPEKPLVRLRVDYSGGFEPFSVLRFSQKFVDRVANPKDIIHFFRHREQKEKTGEEINFGKLITKPSEGTTLRVEDLVKQYFQTAEKNVQLSLLTERGMGEAVQEFVDKEEKDAIEELVKYQLEKTQRFLKERHIDALEDKIDEEVRRFRETRQKNTNEEDDEVREAMTRARALRSQSEESASAFSADDLMSIDLAEQMANDSDDSISAATNKGRGRGRGRRGGRGQNSASRGGSQRGRADTGLETSTRSRNSKTAVSASRNMSIIDAFKSTRQQPSRNVTTKNYSEVIEVDESDVEEDIFPTTSKTDQRWSSTSSSKIMSQSQVSKGVDFESSEDDDDDPFMNTSSLRRNRR

SEQ ID NO: 53021 - protein, 680 aa, Homo sapiens
  Payload ID: 10564
  Gene Symbol: MRE11A
  Gene Name: MRE11 homolog A, double strand break repair nuclease
  Uniprot ID: P49959
  ENSP ID: ENSP00000326094
MSTADALDDENTFKILVATDIHLGFMEKDAVRGNDTFVTLDEILRLAQENEVDFILLGGDLFHENKPSRKTLHTCLELLRKYCMGDRPVQFEILSDQSVNFGFSKFPWVNYQDGNLNISIPVFSIHGNHDDPTGADALCALDILSCAGFVNHFGRSMSVEKIDISPVLLQKGSTKIALYGLGSIPDERLYRMFVNKKVTMLRPKEDENSWFNLFVIHQNRSKHGSTNFIPEQFLDDFIDLVIWGHEHECKIAPTKNEQQLFYISQPGSSVVTSLSPGEAVKKHVGLLRIKGRKMNMHKIPLHTVRQFFMEDIVLANHPDIFNPDNPKVTQAIQSFCLEKIEEMLENAERERLGNSHQPEKPLVRLRVDYSGGFEPFSVLRFSQKFVDRVANPKDIIHFFRHREQKEKTGEEINFGKLITKPSEGTTLRVEDLVKQYFQTAEKNVQLSLLTERGMGEAVQEFVDKEEKDAIEELVKYQLEKTQRFLKERHIDALEDKIDEEVRRFRETRQKNTNEEDDEVREAMTRARALRSQSEESASAFSADDLMSIDLAEQMANDSDDSISAATNKGRGRGRGRRGGRGQNSASRGGSQRGRAFKSTRQQPSRNVTTKNYSEVIEVDESDVEEDIFPTTSKTDQRWSSTSSSKIMSQSQVSKGVDFESSEDDDDDPFMNTSSLRRNRR

SEQ ID NO: 53022 - protein, 707 aa, Homo sapiens
  Payload ID: 10564
  Gene Symbol: MRE11A
  Gene Name: MRE11 homolog A, double strand break repair nuclease
  ENSP ID: ENSP00000376933
MSTADALDDENTFKILVATDIHLGFMEKDAVRGNDTFVTLDEILRLAQENEVDFILLGGDLFHENKPSRKTLHTCLELLRKYCMGDRPVQFEILSDQSVNFGFSKFPWVNYQDGNLNISIPVFSIHGNHDDPTGADALCALDILSCAGFVNHFGRSMSVEKIDISPVLLQKGSTKIALYGLGSIPDERLYRMFVNKKVTMLRPKEDENSWFNLFVIHQNRSKHGSTNFIPEQFLDDFIDLVIWGHEHECKIAPTKNEQQLFYISQPGSSVVTSLSPGEAVKKHVGLLRIKGRKMNMHKIPLHTVRQFFMEDIVLANHPDIFNPDNPKVTQAIQSFCLEKIEEMLENAERERLGNSHQPEKPLVRLRVDYSGGFEPFSVLRFSQKFVDRVANPKDIIHFFRHREQKEKTGEEINFGKLITKPSEGTTLRVEDLVKQYFQTAEKNVQLSLLTERGMGEAVQEFVDKEEKDAIEELVKYQLEKTQRFLKERHIDALEDKIDEEVRRFRETRQKNTNEEDDEVREAMTRARALRSQSEESASAFSADDLMSIDLAEQMANDSDDSISAATNKGRGRGRGRRGGRGQNSASRGGSQRGRDTGLETSTRSRNSKTAVSASRNMSIIDAFKSTRQQPSRNVTTKNYSEVIEVDESDVEEDIFPTTSKTDQRWSSTSSSKIMSQSQVSKGVDFESSEDDDDDPFMNTSSLRRNRR

SEQ ID NO: 53023 - protein, 711 aa, Homo sapiens
  Payload ID: 10564
  Gene Symbol: MRE11A
  Gene Name: MRE11 homolog A, double strand break repair nuclease
  Uniprot ID: P49959
  ENSP ID: ENSP00000385614
MNRNISHQKGDDENTFKILVATDIHLGFMEKDAVRGNDTFVTLDEILRLAQENEVDFILLGGDLFHENKPSRKTLHTCLELLRKYCMGDRPVQFEILSDQSVNFGFSKFPWVNYQDGNLNISIPVFSIHGNHDDPTGADALCALDILSCAGFVNHFGRSMSVEKIDISPVLLQKGSTKIALYGLGSIPDERLYRMFVNKKVTMLRPKEDENSWFNLFVIHQNRSKHGSTNFIPEQFLDDFIDLVIWGHEHECKIAPTKNEQQLFYISQPGSSVVTSLSPGEAVKKHVGLLRIKGRKMNMHKIPLHTVRQFFMEDIVLANHPDIFNPDNPKVTQAIQSFCLEKIEEMLENAERERLGNSHQPEKPLVRLRVDYSGGFEPFSVLRFSQKFVDRVANPKDIIHFFRHREQKEKTGEEINFGKLITKPSEGTTLRVEDLVKQYFQTAEKNVQLSLLTERGMGEAVQEFVDKEEKDAIEELVKYQLEKTQRFLKERHIDALEDKIDEEVRRFRETRQKNTNEEDDEVREAMTRARALRSQSEESASAFSADDLMSIDLAEQMANDSDDSISAATNKGRGRGRGRRGGRGQNSASRGGSQRGRADTGLETSTRSRNSKTAVSASRNMSIIDAFKSTRQQPSRNVTTKNYSEVIEVDESDVEEDIFPTTSKTDQRWSSTSSSKIMSQSQVSKGVDFESSEDDDDDPFMNTSSLRRNRR

SEQ ID NO: 53024 - protein, 127 aa, Homo sapiens
  Payload ID: 10564
  Gene Symbol: MRE11A
  Gene Name: MRE11 homolog A, double strand break repair nuclease
  ENSP ID: ENSP00000439511
MSTADALDDENTFKILVATDIHLGFMEKDAVRGNDTFVTLDEILRLAQENEVDFILLGGDLFHENKPSRKTLHTCLELLRKYCMGDRPVQFEILSDQSVNFGFSKFPWVNYQDGNLNISIPVFSIHG

SEQ ID NO: 53025 - protein, 221 aa, Homo sapiens
  Payload ID: 10564
  Gene Symbol: MRE11A
  Gene Name: MRE11 homolog A, double strand break repair nuclease
  ENSP ID: ENSP00000440986
MSTADALDDENTFKILVATDIHLGFMEKDAVRGNDTFVTLDEILRLAQENEVDFILLGGDLFHENKPSRKTLHTCLELLRKYCMGDRPVQFEILSDQSVNFGFSKFPWVNYQDGNLNISIPVFSIHGNHDDPTGADALCALDILSCAGFVNHFGRSMSVEKIDISPVLLQKGSTKIALYGLGSIPDERLYRMFVNKKVTMLRPKEDENSWFNLFVIHQNRV

SEQ ID NO: 53026 - protein, 111 aa, Homo sapiens
  Payload ID: 10564
  Gene Symbol: MRE11A
  Gene Name: MRE11 homolog A, double strand break repair nuclease
  ENSP ID: ENSP00000442809
MSTADALDDENTFKILVATDIHLGFMEKDAVRGNDTFVTLDEILRLAQENEVDFILLGGDLFHENKPSRKTLHTCLELLRKYCMGDRPVQFEILSDQSVNFGFSKFPWVNY

SEQ ID NO: 53027 - protein, 204 aa, Homo sapiens
  Payload ID: 10565
  Gene Symbol: MRGBP
  Gene Name: MRG/MORF4L binding protein
  Uniprot ID: Q9NV56
  ENSP ID: ENSP00000359518
MGEAEVGGGGAAGDKGPGEAATSPAEETVVWSPEVEVCLFHAMLGHKPVGVNRHFHMICIRDKFSQNIGRQVPSKVIWDHLSTMYDMQALHESEILPFPNPERNFVLPEEIIQEVREGKVMIEEEMKEEMKEDVDPHNGADDVFSSSGSLGKASEKSSKDKEKNSSDLGCKEGADKRKRSRVTDKVLTANSNPSSPSAAKRRRT

SEQ ID NO: 53028 - protein, 652 aa, Homo sapiens
  Payload ID: 10566
  Gene Symbol: MROH7-TTC4
  Gene Name: MROH7-TTC4 readthrough (NMD candidate)
  ENSP ID: ENSP00000392238
MALSPGANLVFHEDPKMTPSPPSCGAPGLGSGTIPQPHPDMAQVPMLNLLPSPGLALVPDLNDSLSPVSGEASGLVSENTPRPDDSRAIAPASLQITSSCSGEALDLDSKDVSRPDSQGRLCPASNPILSPSSTEAPRLSSGNHPQSNSEDAFKCLSSKIFKLGQRNSNPSRHELNPFIRHHSREGLVLGHCISRPSSKALLIPTSNSSLDLDSNPLLNMGSRNTSKLNLNVAPDSHGTLIPDTNETITLASHNISESVSKGAFSTTWSTSSKETMNVASSGHSRSDLSVTITQASYVTLIPGSSYGISLHSSTHEPNSTISPPSCMTLILGSNETLSLDSSLLFSDTSTLTLSSQQDDAKDNSIHTVPLEENLESWSEMASIKVGQFPLGFPISNPAGKDAVTLQGIPEDGVSLLLPRLECNGAISAHCNLCLPGAFDEVTSCLVKVPEKTEGGNNMALVENVTTLQKSQDLLEAEGEKKTMIKKIMRQIQEEPLDSLSSSVRKQAMEILTQLSHTQPTLGMRERSELVNVCVHSVFSLPSVQAMQEKDEAKAETIQALYHQTLEALQTLLKALFIEDPTPAGLKSILEALGPWMNSGKAHERARAVNTNVSVLNHMLLTLPFFIAIQTDALGVPGAGASAGETHPSHWGS

SEQ ID NO: 53029 - protein, 1334 aa, Homo sapiens
  Payload ID: 10566
  Gene Symbol: MROH7-TTC4
  Gene Name: MROH7-TTC4 readthrough (NMD candidate)
  ENSP ID: ENSP00000410192
MALSPGANLVFHEDPKMTPSPPSCGAPGLGSGTIPQPHPDMAQVPMLNLLPSPGLALVPDLNDSLSPVSGEASGLVSENTPRPDDSRAIAPASLQITSSCSGEALDLDSKDVSRPDSQGRLCPASNPILSPSSTEAPRLSSGNHPQSNSEDAFKCLSSKIFKLGQRNSNPSRHELNPFIRHHSREGLVLGHCISRPSSKALLIPTSNSSLDLDSNPLLNMGSRNTSKLNLNVAPDSHGTLIPDTNETITLASHNISESVSKGAFSTTWSTSSKETMNVASSGHSRSDLSVTITQASYVTLIPGSSYGISLHSSTHEPNSTISPPSCMTLILGSNETLSLDSSLLFSDTSTLTLSSQQDDAKDNSIHTVPLEENLESWSEMASIKVGQFPLGFPISNPAGKDAVTLQGIPEGAFDEVTSCLVKVPEKTEGGNNMALVENVTTLQKSQDLLEAEGEKKTMIKKIMRQIQEEPLDSLSSSVRKQAMEILTQLSHTQPTLGMRERSELVNVCVHSVFSLPSVQAMQEKDEAKAETIQALYHQTLEALQTLLKALFIEDPTPAGLKSILEALGPWMNSGKAHERARAVNTNVSVLNHMLLTLPFFMPLGFPALGLLLGRLILHIGDPDEEIGCEALDGIIILYTILELQKRARDKEETNKKELYESNKHFLGPYNPVSPCQNILRVIEEFGDFLGPQQIKDLLLAALEGLKGSSEAPGKDSREMMQLASEVMLSSVLEWYRHRALEVIPEIMQGIYMQLSHIQEPRARQVALLPVSLLASSFMTEVVVALLMCPLPLNSNGAEMWRQLILCKPSCDVRDLLDLLLGSLKEKPVTKEGRASIVPLAAASGLCELLSVNSCMGRVRRIYPQLLLALLIQVHYHIGLNLPGCVAPPKDTKKGAQPSPFVPVRWVVKVVKTLLLRMGCSYETTFLEDQGGWELMEQVESHHRGVALLARAMVQYSCQELCRILYLLIPLLERGDEKHRITATAFFVELLQMEQVRRIPEEYSLGRMAEGLSHHDPIMKVLSIRGLVILARRSEKTAKVKALLPSMVKGLKNMDGMLVVEAVHNLKAVFKGRDQKLMDSAVYVEMLQILLPHFSDAREVVRSSCINLYGKVVQKLRAPRTQAMEEQLVSTLVPLLLTMQEGNSKVSQKCVKTLLRCSYFMAWELPKRAYSRKPWDNQQQTVAKICKCLVNTHRDSAFIFLSQSLEYAKNSRASLRKCSVMFIGSLVPCMESIMTEDRLNEVKAATPRGQRFHLLCPPLYSQPLEQAGSAERAKNLKRSPYLCRERHQKLIPGRILTWLVSSQLFLMRSVLQKNRPRPIKMRAMITLKKKTTRKL

SEQ ID NO: 53030 - protein, 627 aa, Homo sapiens; identical to SEQ ID NO: 48097
  Payload ID: 10566
  Gene Symbol: MROH7-TTC4
  Gene Name: MROH7-TTC4 readthrough (NMD candidate)
  ENSP ID: ENSP00000475315

SEQ ID NO: 53031 - protein, 393 aa, Homo sapiens
  Payload ID: 10567
  Gene Symbol: MRS2
  Gene Name: MRS2 magnesium transporter
  ENSP ID: ENSP00000274747
MECLRSLPCLLPRAMRLPRRTLCALALDVTSVGPPVAACGRRANLIGRSRAAQLCGPDRLRVAGEVHRFRTSDVSQATLASVAPVFTVYLKAVITPECLLILDYRNLNLEQWLFRELPSQLSGEGQLVTYPLPFEFRAIEALLQYWINTLQGKLSILQPLILETLDALVDPKHSSVDRSKLHILLQNGKSLSELETDIKIFKESILEILDEEELLEELCVSKWSDPQVFEKSSAGIDHAEEMELLLENYYRLADDLSNAARELRVLIDDSQSIIFINLDSHRNVMMRLNLQLTMGTFSLSLFGLMGVAFGMNLESSLEEDHRIFWLITGIMFMGSGLIWRRLLSFLGRQLEAPLPPMMASLPKKTLLADRSMELKNSLRLDGLGSGRSILTNR

SEQ ID NO: 53032 - protein, 408 aa, Homo sapiens
  Payload ID: 10567
  Gene Symbol: MRS2
  Gene Name: MRS2 magnesium transporter
  Uniprot ID: Q9HD23
  ENSP ID: ENSP00000367604
MECLRSLPCLLPRAMRLPRRTLCALALDVTSVGPPVAACGRRANLIGRSRAAQLCGPDRLRVAGEVHRFRTSDVSQATLASVAPVFTVTKFDKQGNVTSFERKKTELYQELGLQARDLRFQHVMSITVRNNRIIMRMEYLKAVITPECLLILDYRNLNLEQWLFRELPSQLSGEGQLVTYPLPFEFRAIEALLQYWINTLQGKLSILQPLILETLDALVDPKHSSVDRSKLHILLQNGKSLSELETDIKIFKESILEILDEEELLEELCVSKWSDPQVFEKSSAGIDHAEEMELLLENYYRLADDLSNAARELRVLIDDSQSIIFINLDSHRNVMMRLNLQLTMGTFSLSLFGLMGVAFGMNLESSLEEDHRIFWLITGIMFMGSGLIWRRLLSFLGRQLEAPLPPMV

SEQ ID NO: 53033 - protein, 443 aa, Homo sapiens
  Payload ID: 10567
  Gene Symbol: MRS2
  Gene Name: MRS2 magnesium transporter
  Uniprot ID: Q9HD23
  ENSP ID: ENSP00000367637
MECLRSLPCLLPRAMRLPRRTLCALALDVTSVGPPVAACGRRANLIGRSRAAQLCGPDRLRVAGEVHRFRTSDVSQATLASVAPVFTVTKFDKQGNVTSFERKKTELYQELGLQARDLRFQHVMSITVRNNRIIMRMEYLKAVITPECLLILDYRNLNLEQWLFRELPSQLSGEGQLVTYPLPFEFRAIEALLQYWINTLQGKLSILQPLILETLDALVDPKHSSVDRSKLHILLQNGKSLSELETDIKIFKESILEILDEEELLEELCVSKWSDPQVFEKSSAGIDHAEEMELLLENYYRLADDLSNAARELRVLIDDSQSIIFINLDSHRNVMMRLNLQLTMGTFSLSLFGLMGVAFGMNLESSLEEDHRIFWLITGIMFMGSGLIWRRLLSFLGRQLEAPLPPMMASLPKKTLLADRSMELKNSLRLDGLGSGRSILTNR

SEQ ID NO: 53034 - protein, 182 aa, Homo sapiens
  Payload ID: 10567
  Gene Symbol: MRS2
  Gene Name: MRS2 magnesium transporter
  ENSP ID: ENSP00000387441
  MOD_RES (1)..(1): Any amino acid
XRAAQLCGPDRLRVAGEVHRFRTSDVSQATLASVAPVFTVTKFDKQGNVTSFERKKTELYQELETDIKIFKESILEILDEEELLEELCVSKWSDPQVFEKSSAGIDHAEEMELLLENYYRLADDLSNAARELRVLIDDSQSIIFINLDSHRNVMMRLNLQLTMGTFSLSLFGLMGVAFGMNL

SEQ ID NO: 53035 - protein, 446 aa, Homo sapiens
  Payload ID: 10567
  Gene Symbol: MRS2
  Gene Name: MRS2 magnesium transporter
  Uniprot ID: Q9HD23
  ENSP ID: ENSP00000399585
MECLRSLPCLLPRAMRLPRRTLCALALDVTSVGPPVAACGRRANLIGRSRAAQLCGPDRLRVAGEVHRFRTSDVSQATLASVAPVFTVTKFDKQGNVTSFERKKTELYQELGLQARDLRFQHVMSITVRNNRIIMRMEKYSLLLESVASILQNSVSFMERQTEQWLFRELPSQLSGEGQLVTYPLPFEFRAIEALLQYWINTLQGKLSILQPLILETLDALVDPKHSSVDRSKLHILLQNGKSLSELETDIKIFKESILEILDEEELLEELCVSKWSDPQVFEKSSAGIDHAEEMELLLENYYRLADDLSNAARELRVLIDDSQSIIFINLDSHRNVMMRLNLQLTMGTFSLSLFGLMGVAFGMNLESSLEEDHRIFWLITGIMFMGSGLIWRRLLSFLGRQLEAPLPPMMASLPKKTLLADRSMELKNSLRLDGLGSGRSILTNR

SEQ ID NO: 53036 - protein, 239 aa, Homo sapiens
  Payload ID: 10568
  Gene Symbol: MRTO4
  Gene Name: MRT4 homolog, ribosome maturation factor
  Uniprot ID: Q9UKD2
  ENSP ID: ENSP00000364320
MPKSKRDKKVSLTKTAKKGLELKQNLIEELRKCVDTYKYLFIFSVANMRNSKLKDIRNAWKHSRMFFGKNKVMMVALGRSPSDEYKDNLHQVSKRLRGEVGLLFTNRTKEEVNEWFTKYTEMDYARAGNKAAFTVSLDPGPLEQFPHSMEPQLRQLGLPTALKRGVVTLLSDYEVCKEGDVLTPEQARVLKLFGYEMAEFKVTIKYMWDSQSGRFQQMGDDLPESASESTEESDSEDDD

SEQ ID NO: 53037 - protein, 341 aa, Homo sapiens
  Payload ID: 10569
  Gene Symbol: MSANTD3-TMEFF1
  Gene Name: MSANTD3-TMEFF1 readthrough
  ENSP ID: ENSP00000424768
MLPEQLYFLQSPPEEEPEYHPDASAQELNVRESDVRVCDESSCKYGGVCKEDGDGLKCACQFQCHTNYIPVCGSNGDTYQNECFLRRAACKHQKEITVIARGPCYSDNGSGSGEGEEEGSGAEVHRKHSKCGPCKYKAECDEDAENVGCVCNIDCSGYSFNPVCASDGSSYNNPCFVREASCIKQEQIDIRHLGHCTDTDDTSLLGKKDDGLQYRPDVKDASDQREDVYIGNHMPCPENLNGYCIHGKCEFIYSTQKASCRCESGYTGQHCEKTDFSILYVVPSRQKLTHVLIAAIIGAVQIAIIVAIVMCITRKCPKNNRGRRQKQNLGHFTSDTSSRMV

SEQ ID NO: 53038 - protein, 303 aa, Homo sapiens
  Payload ID: 10570
  Gene Symbol: MSX1
  Gene Name: msh homeobox 1
  Uniprot ID: P28360
  ENSP ID: ENSP00000372170
MAPAADMTSLPLGVKVEDSAFGKPAGGGAGQAPSAAAATAAAMGADEEGAKPKVSPSLLPFSVEALMADHRKPGAKESALAPSEGVQAAGGSAQPLGVPPGSLGAPDAPSSPRPLGHFSVGGLLKLPEDALVKAESPEKPERTPWMQSPRFSPPPARRLSPPACTLRKHKTNRKPRTPFTTAQLLALERKFRQKQYLSIAERAEFSSSLSLTETQVKIWFQNRRAKAKRLQEAELEKLKMAAKPMLPPAAFGLSFPLGGPAAVAAAAGASLYGASGPFQRAALPVAPVGLYTAHVGYSMYHLT

SEQ ID NO: 53039 - protein, 267 aa, Homo sapiens
  Payload ID: 10571
  Gene Symbol: MSX2
  Gene Name: msh homeobox 2
  Uniprot ID: P35548
  ENSP ID: ENSP00000239243
MASPSKGNDLFSPDEEGPAVVAGPGPGPGGAEGAAEERRVKVSSLPFSVEALMSDKKPPKEASPLPAESASAGATLRPLLLSGHGAREAHSPGPLVKPFETASVKSENSEDGAAWMQEPGRYSPPPRHMSPTTCTLRKHKTNRKPRTPFTTSQLLALERKFRQKQYLSIAERAEFSSSLNLTETQVKIWFQNRRAKAKRLQEAELEKLKMAAKPMLPSSFSLPFPISSPLQAASIYGASYPFHRPVLPIPPVGLYATPVGYGMYHLS

SEQ ID NO: 53040 - protein, 134 aa, Homo sapiens
  Payload ID: 10571
  Gene Symbol: MSX2
  Gene Name: msh homeobox 2
  ENSP ID: ENSP00000427425
MASPSKGNDLFSPDEEGPAVVAGPGPGPGGAEGAAEERRVKVSSLPFSVEALMSDKKPPKEASPLPAESASAGATLRPLLLSGHGAREAHSPGPLVKPFETASVKSENSEDGAAWMQEPGRYSPPPSECAPGQE

SEQ ID NO: 53041 - protein, 851 aa, Homo sapiens
  Payload ID: 10572
  Gene Symbol: MSH5-SAPCD1
  Gene Name: MSH5-SAPCD1 readthrough (NMD candidate)
  ENSP ID: ENSP00000417871
MASLGANPRRTPQGPRPGAASSGFPSPAPVPGPREAEEEEVEEEEELAEIHLCVLWNSGYLGIAYYDTSDSTIHFMPDAPDHESLKLLQRVLDEINPQSVVTSAKQDENMTRFLGKLASQEHREPKRPEIIFLPSVDFGLEISKQRLLSGNYSFIPDAMTATEKILFLSSIIPFDCLLTPPGDLRFTPIPLLIPSQVRALGGLLKFLGRRRIGVELEDYNVSVPILGFKKFMLTHLVNIDQDTYSVLQIFKSESHPSVYKVASGLKEGLSLFGILNRCHCKWGEKLLRLWFTRPTHDLGELSSRLDVIQFFLLPQNLDMAQMLHRLLGHIKNVPLILKRMKLSHTKVSDWQVLYKTVYSALGLRDACRSLPQSIQLFRDIAQEFSDDLHHIASLIGKVVDFEGSLAENRFTVLPNIDPEIDEKKRRLMGLPSFLTEVARKELENLDSRIPSCSVIYIPLIGFLLSIPRLPSMVEASDFEINGLDFMFLSEEKLHYRSARTKELDALLGDLHCEIRDQETLLMYQLQCQVLARAAVLTRVLDLASRLDVLLALASAARDYGYSRPRYSPQVLGVRIQNGRHPLMELCARTFVPNSTECGGDKGRVKVITGPNSSGKSIYLKQVGLITFMALVGSFVPAEEAEIGAVDAIFTRIHSCESISLGLSTFMIDLNQVAKAVNNATAQSLVLIDEFGKGTNTVDGLALLAAVLRHWLARGPTCPHIFVATNFLSLVQLQLLPQGPLVQYLTMETCEDGNDLVFFYQVCEGVAKASHASHTAAQAGLPDKLVARGKEVSDLIRSGKPIKPVKDLLKKNQMENCQTLVDKFMKLDLEDPNLDLNVFMSQEVLPAATSIL

SEQ ID NO: 53042 - protein, 264 aa, Homo sapiens
  Payload ID: 10572
  Gene Symbol: MSH5-SAPCD1
  Gene Name: MSH5-SAPCD1 readthrough (NMD candidate)
  ENSP ID: ENSP00000419220
  MOD_RES (1)..(1): Any amino acid
XHYRSARTKELDALLGDLHCEIRDQETLLMYQLQCQVLARAAVLTRVLDLASRLDVLLALASAARDYGYSRPRYSPQVLGVRIQNGRHPLMELCARTFVPNSTECGGDKGRVKVITGPNSSGKSIYLKQVGLITFMALVGSFVPAEEAEIGAVDAIFTRIHSCESISLGLSTFMIDLNQVAKAVNNATAQSLVLIDEFGKGTNTVDGLALLAAVLRHWLARGPTCPHIFVATNFLSLVQLQLLPQGPLVQYLDWPRVSGQEGGD

SEQ ID NO: 53043 - protein, 29 aa, Homo sapiens
  Payload ID: 10572
  Gene Symbol: MSH5-SAPCD1
  Gene Name: MSH5-SAPCD1 readthrough (NMD candidate)
  ENSP ID: ENSP00000435414
  MOD_RES (1)..(1): Any amino acid
XMKLDLEDPNLDLNVFMSQEVLPAATSIL

SEQ ID NO: 53044 - protein, 851 aa, Homo sapiens; identical to SEQ ID NO: 53041
  Payload ID: 10572
  Gene Symbol: MSH5-SAPCD1
  Gene Name: MSH5-SAPCD1 readthrough (NMD candidate)
  ENSP ID: ENSP00000436555

SEQ ID NO: 53045 - protein, 264 aa, Homo sapiens; identical to SEQ ID NO: 53042
  Payload ID: 10572
  Gene Symbol: MSH5-SAPCD1
  Gene Name: MSH5-SAPCD1 readthrough (NMD candidate)
  ENSP ID: ENSP00000437010
  MOD_RES (1)..(1): Any amino acid

SEQ ID NO: 53046 - protein, 148 aa, Homo sapiens
  Payload ID: 10572
  Gene Symbol: MSH5-SAPCD1
  Gene Name: MSH5-SAPCD1 readthrough (NMD candidate)
  ENSP ID: ENSP00000446749
MGSQGSGGVPLVQAPYTVLLLPLGTSRQDPGAQSFFLWLRRMQALEREQDALWQGLELLQHGQAWFEDHLREAQRQQLHLGALGENFLTDLHSEPGRPPLAQIQKVNICLQNLIHEKELSRQQKGVTQPKEEMAQRGCTKGPRGPTRV

SEQ ID NO: 53047 - protein, 148 aa, Homo sapiens; identical to SEQ ID NO: 53046
  Payload ID: 10572
  Gene Symbol: MSH5-SAPCD1
  Gene Name: MSH5-SAPCD1 readthrough (NMD candidate)
  Uniprot ID: Q5SSQ6
  ENSP ID: ENSP00000447344

SEQ ID NO: 53048 - protein, 148 aa, Homo sapiens; identical to SEQ ID NO: 53046
  Payload ID: 10572
  Gene Symbol: MSH5-SAPCD1
  Gene Name: MSH5-SAPCD1 readthrough (NMD candidate)
  Uniprot ID: Q5SSQ6
  ENSP ID: ENSP00000448208

SEQ ID NO: 53049 - protein, 148 aa, Homo sapiens; identical to SEQ ID NO: 53046
  Payload ID: 10572
  Gene Symbol: MSH5-SAPCD1
  Gene Name: MSH5-SAPCD1 readthrough (NMD candidate)
  ENSP ID: ENSP00000450332

SEQ ID NO: 53050 - protein, 264 aa, Homo sapiens; identical to SEQ ID NO: 53042
  Payload ID: 10572
  Gene Symbol: MSH5-SAPCD1
  Gene Name: MSH5-SAPCD1 readthrough (NMD candidate)
  ENSP ID: ENSP00000454400
  MOD_RES (1)..(1): Any amino acid

SEQ ID NO: 53051 - protein, 264 aa, Homo sapiens; identical to SEQ ID NO: 53042
  Payload ID: 10572
  Gene Symbol: MSH5-SAPCD1
  Gene Name: MSH5-SAPCD1 readthrough (NMD candidate)
  ENSP ID: ENSP00000457337
  MOD_RES (1)..(1): Any amino acid

SEQ ID NO: 53052 - protein, 851 aa, Homo sapiens; identical to SEQ ID NO: 53041
  Payload ID: 10572
  Gene Symbol: MSH5-SAPCD1
  Gene Name: MSH5-SAPCD1 readthrough (NMD candidate)
  ENSP ID: ENSP00000457803

SEQ ID NO: 53053 - protein, 264 aa, Homo sapiens; identical to SEQ ID NO: 53042
  Payload ID: 10572
  Gene Symbol: MSH5-SAPCD1
  Gene Name: MSH5-SAPCD1 readthrough (NMD candidate)
  ENSP ID: ENSP00000461962
  MOD_RES (1)..(1): Any amino acid

SEQ ID NO: 53054 - protein, 851 aa, Homo sapiens; identical to SEQ ID NO: 53041
  Payload ID: 10572
  Gene Symbol: MSH5-SAPCD1
  Gene Name: MSH5-SAPCD1 readthrough (NMD candidate)
  ENSP ID: ENSP00000462078

SEQ ID NO: 53055 - protein, 496 aa, Homo sapiens
  Payload ID: 10572
  Gene Symbol: MSH5-SAPCD1
  Gene Name: MSH5-SAPCD1 readthrough (NMD candidate)
  ENSP ID: ENSP00000463117
TVYSALGLRDACRSLPQSIQLFRDIAQEFSDDLHHIASLIGKVVDFEGSLAENRFTVLPNIDPEIDEKKRRLMGLPSFLTEVARKELENLDSRIPSCSVIYIPLIGFLLSIPRLPSMVEASDFEINGLDFMFLSEEKLHYRSARTKELDALLGDLHCEIRDQETLLMYQLQCQVLARAAVLTRVLDLASRLDVLLALASAARDYGYSRPRYSPQVLGVRIQNGRHPLMELCARTFVPNSTECGGDKGRVKVITGPNSSGKSIYLKQVGLITFMALVGSFVPAEEAEIGAVDAIFTRIHSCESISLGLSTFMIDLNQVAKAVNNATAQSLVLIDEFGKGTNTVDGLALLAAVLRHWLARGPTCPHIFVATNFLSLVQLQLLPQGPLVQYLTMETCEDGNDLVFFYQVCEGVAKASHASHTAAQAGLPDKLVARGKEVSDLIRSGKPIKPVKDLLKKNQMENCQTLVDKFMKLDLEDPNLDLNVFMSQEVLPAATSIL

SEQ ID NO: 53056 - protein, 29 aa, Homo sapiens
  Payload ID: 10572
  Gene Symbol: MSH5-SAPCD1
  Gene Name: MSH5-SAPCD1 readthrough (NMD candidate)
  ENSP ID: ENSP00000463231
  MOD_RES (1)..(1): Any amino acid
XMKLDLEDPNLDLNVFMSQEVLPAATSIL

SEQ ID NO: 53057 - protein, 496 aa, Homo sapiens; identical to SEQ ID NO: 53055
  Payload ID: 10572
  Gene Symbol: MSH5-SAPCD1
  Gene Name: MSH5-SAPCD1 readthrough (NMD candidate)
  ENSP ID: ENSP00000463303

SEQ ID NO: 53058 - protein, 29 aa, Homo sapiens
  Payload ID: 10572
  Gene Symbol: MSH5-SAPCD1
  Gene Name: MSH5-SAPCD1 readthrough (NMD candidate)
  ENSP ID: ENSP00000463412
  MOD_RES (1)..(1): Any amino acid
XMKLDLEDPNLDLNVFMSQEVLPAATSIL

SEQ ID NO: 53059 - protein, 29 aa, Homo sapiens
  Payload ID: 10572
  Gene Symbol: MSH5-SAPCD1
  Gene Name: MSH5-SAPCD1 readthrough (NMD candidate)
  ENSP ID: ENSP00000463617
  MOD_RES (1)..(1): Any amino acid
XMKLDLEDPNLDLNVFMSQEVLPAATSIL

SEQ ID NO: 53060 - protein, 264 aa, Homo sapiens; identical to SEQ ID NO: 53042
  Payload ID: 10572
  Gene Symbol: MSH5-SAPCD1
  Gene Name: MSH5-SAPCD1 readthrough (NMD candidate)
  ENSP ID: ENSP00000463749
  MOD_RES (1)..(1): Any amino acid

SEQ ID NO: 53061 - protein, 29 aa, Homo sapiens
  Payload ID: 10572
  Gene Symbol: MSH5-SAPCD1
  Gene Name: MSH5-SAPCD1 readthrough (NMD candidate)
  ENSP ID: ENSP00000463789
  MOD_RES (1)..(1): Any amino acid
XMKLDLEDPNLDLNVFMSQEVLPAATSIL

SEQ ID NO: 53062 - protein, 29 aa, Homo sapiens
  Payload ID: 10572
  Gene Symbol: MSH5-SAPCD1
  Gene Name: MSH5-SAPCD1 readthrough (NMD candidate)
  ENSP ID: ENSP00000464606
  MOD_RES (1)..(1): Any amino acid
XMKLDLEDPNLDLNVFMSQEVLPAATSIL

SEQ ID NO: 53063 - protein, 460 aa, Homo sapiens
  Payload ID: 10573
  Gene Symbol: MSS51
  Gene Name: MSS51 mitochondrial translational activator
  Uniprot ID: Q4VC12
  ENSP ID: ENSP00000299432
MAPRSRRRRHKKPPSSVAPIIMAPTTIVTPVPLTPSKPGPSIDTLGFFSLDDNVPGLSQLILQKLNMKSYEEYKLVVDGGTPVSGFGFRCPQEMFQRMEDTFRFCAHCRALPSGLSDSKVLRHCKRCRNVYYCGPECQKSDWPAHRRVCQELRLVAVDRLMEWLLVTGDFVLPSGPWPWPPEAVQDWDSWFSMKGLHLDATLDAVLVSHAVTTLWASVGRPRPDPDVLQGSLKRLLTDVLSRPLTLGLGLRALGIDVRRTGGSTVHVVGASHVETFLTRPGDYDELGYMFPGHLGLRVVMVGVDVATGFSQSTSTSPLEPGTIQLSAHRGLYHDFWEEQVETGQTHHPDLVAAFHPGFHSSPDLMEAWLPTLLLLRDYKIPTLITVYSHQELVSSLQILVELDTHITAFGSNPFMSLKPEQVYSSPNKQPVYCSAYYIMFLGSSCQLDNRQLEEKVDGGI

SEQ ID NO: 53064 - protein, 460 aa, Homo sapiens; identical to SEQ ID NO: 53063
  Payload ID: 10573
  Gene Symbol: MSS51
  Gene Name: MSS51 mitochondrial translational activator
  Uniprot ID: Q4VC12
  ENSP ID: ENSP00000362003

SEQ ID NO: 53065 - protein, 181 aa, Homo sapiens
  Payload ID: 10573
  Gene Symbol: MSS51
  Gene Name: MSS51 mitochondrial translational activator
  ENSP ID: ENSP00000435203
MAPRSRRRRHKKPPSSVAPIIMAPTTIVTPVPLTPSKPGPSIDTLGFFSLDDNVPGLSQLILQKLNMKSYEEYKLVVDGGTPVSGFGFRCPQEMFQRMEDTFRFCAHCRALPSGLSDSKVLRHCKRCRNVYYCGPECQKSDWPAHRRVCQELRLVAVDRLMEWLLVTEHLNFTPGTWHNSA

SEQ ID NO: 53066 - protein, 327 aa, Homo sapiens
  Payload ID: 10574
  Gene Symbol: MLST8
  Gene Name: MTOR associated protein, LST8 homolog
  ENSP ID: ENSP00000301724
MNTSPGTVGSDPVILATAGYDHTVRFWQAHSGICTRTVQHQDSQVNALEVTPDRSMIAAAGYQHIRMYDLNSNNPNPIISYDGVNKNIASVGFHEDGRWMYTGGEDCTARIWDLRSRNLQCQRIFQVNAPINCVCLHPNQAELIVGDQSGAIHIWDLKTDHNEQLIPEPEVSITSAHIDPDASYMAAVNSTGNCYVWNLTGGIGDEVTQLIPKTKIPAHTRYALQCRFSPDSTLLATCSADQTCKIWRTSNFSLMTELSIKSGNPGESSRGWMWGCAFSGDSQYIVTGEPRPGLPHPWPPALASRASPPRLQLPLCWGRLLGLHLRS

SEQ ID NO: 53067 - protein, 325 aa, Homo sapiens
  Payload ID: 10574
  Gene Symbol: MLST8
  Gene Name: MTOR associated protein, LST8 homolog
  Uniprot ID: Q9BVC4
  ENSP ID: ENSP00000371888
MNTSPGTVGSDPVILATAGYDHTVRFWQAHSGICTRTVQHQDSVNALEVTPDRSMIAAAGYQHIRMYDLNSNNPNPIISYDGVNKNIASVGFHEDGRWMYTGGEDCTARIWDLRSRNLQCQRIFQVNAPINCVCLHPNQAELIVGDQSGAIHIWDLKTDHNEQLIPEPEVSITSAHIDPDASYMAAVNSTGNCYVWNLTGGIGDEVTQLIPKTKIPAHTRYALQCRFSPDSTLLATCSADQTCKIWRTSNFSLMTELSIKSGNPGESSRGWMWGCAFSGDSQYIVTASSDNLARLWCVETGEIKREYGGHQKAVVCLAFNDSVLG

SEQ ID NO: 53068 - protein, 326 aa, Homo sapiens
  Payload ID: 10574
  Gene Symbol: MLST8
  Gene Name: MTOR associated protein, LST8 homolog
  Uniprot ID: Q9BVC4
  ENSP ID: ENSP00000380313
MNTSPGTVGSDPVILATAGYDHTVRFWQAHSGICTRTVQHQDSQVNALEVTPDRSMIAAAGYQHIRMYDLNSNNPNPIISYDGVNKNIASVGFHEDGRWMYTGGEDCTARIWDLRSRNLQCQRIFQVNAPINCVCLHPNQAELIVGDQSGAIHIWDLKTDHNEQLIPEPEVSITSAHIDPDASYMAAVNSTGNCYVWNLTGGIGDEVTQLIPKTKIPAHTRYALQCRFSPDSTLLATCSADQTCKIWRTSNFSLMTELSIKSGNPGESSRGWMWGCAFSGDSQYIVTASSDNLARLWCVETGEIKREYGGHQKAVVCLAFNDSVLG

SEQ ID NO: 53069 - protein, 116 aa, Homo sapiens
  Payload ID: 10574
  Gene Symbol: MLST8
  Gene Name: MTOR associated protein, LST8 homolog
  ENSP ID: ENSP00000454235
MNTSPGTVGSDPVILATAGYDHTVRFWQAHSGICTRTVQHQDSQVNALEVTPDRSMIAAAGYQHIRMYDLNSNNPNPIISYDGVNKNIASVGFHEDGRWMYTGGEDCTARIWDLRG

SEQ ID NO: 53070 - protein, 72 aa, Homo sapiens
  Payload ID: 10574
  Gene Symbol: MLST8
  Gene Name: MTOR associated protein, LST8 homolog
  ENSP ID: ENSP00000454629
MNTSPGTVGSDPVILATAGYDHTVRFWQAHSGICTRTVQHQDSQVNALEVTPDRSMIAAAACVPRLPAHPHV

SEQ ID NO: 53071 - protein, 202 aa, Homo sapiens
  Payload ID: 10574
  Gene Symbol: MLST8
  Gene Name: MTOR associated protein, LST8 homolog
  ENSP ID: ENSP00000454698
MNTSPGTVGSDPVILATAGYDHTVRFWQAHSGICTRTVQHQDSQVNALEVTPDRSMIAAAGYQHIRMYDLNSNNPNPIISYDGVNKNIASVGFHEDGRWMYTGGEDCTARIWDLRSRNLQCQRIFQVNAPINCVCLHPNQAELIVGDQSGAIHIWDLKTDHNEQLIPEPEVSITSAHIDPDASYMAAVNSTGNCYVWNLTGG

SEQ ID NO: 53072 - protein, 326 aa, Homo sapiens; identical to SEQ ID NO: 53068
  Payload ID: 10574
  Gene Symbol: MLST8
  Gene Name: MTOR associated protein, LST8 homolog
  Uniprot ID: Q9BVC4
  ENSP ID: ENSP00000455046

SEQ ID NO: 53073 - protein, 198 aa, Homo sapiens
  Payload ID: 10574
  Gene Symbol: MLST8
  Gene Name: MTOR associated protein, LST8 homolog
  ENSP ID: ENSP00000455458
MNTSPGTVGSDPVILATAGYDHTVRFWQAHSGICTRTVQHQDSQVNALEVTPDRSMIAAAGYQHIRMYDLNSNNPNPIISYDGVNKNIASVGFHEDGRWMYTGGEDCTARIWDLRSRNLQCQRIFQVNAPINCVCLHPNQAELIVGDQSGAIHIWDLKTDHNEQLIPEPEVSITSAHIDPDASYMAAVNSTAPRHLLG

SEQ ID NO: 53074 - protein, 131 aa, Homo sapiens
  Payload ID: 10574
  Gene Symbol: MLST8
  Gene Name: MTOR associated protein, LST8 homolog
  ENSP ID: ENSP00000455475
MNTSPGTVGSDPVILATAGYDHTVRFWQAHSGICTRTVQHQDSQVNALEVTPDRSMIAAAGYQHIRMYDLNSNNPNPIISYDGVNKNIASVGFHEDGRWMYTGGEDCTARIWDLRQSSSWVTRAGLSTSGT

SEQ ID NO: 53075 - protein, 51 aa, Homo sapiens
  Payload ID: 10574
  Gene Symbol: MLST8
  Gene Name: MTOR associated protein, LST8 homolog
  ENSP ID: ENSP00000455642
MNTSPGTVGSDPVILATAGYDHTVRFWQAHSGICTRTVQHQDSQVNALEVT

SEQ ID NO: 53076 - protein, 116 aa, Homo sapiens; identical to SEQ ID NO: 53069
  Payload ID: 10574
  Gene Symbol: MLST8
  Gene Name: MTOR associated protein, LST8 homolog
  ENSP ID: ENSP00000455850

SEQ ID NO: 53077 - protein, 166 aa, Homo sapiens
  Payload ID: 10574
  Gene Symbol: MLST8
  Gene Name: MTOR associated protein, LST8 homolog
  ENSP ID: ENSP00000456046
MNTSPGTVGSDPVILATAGYDHTVRFWQAHSGICTRTVQHQDSQVNALEVTPDRSMIAAAVQPVSLGYQHIRMYDLNSNNPNPIISYDGVNKNIASVGFHEDGRWMYTGGEDCTARIWDLRSRNLQCQRIFQVNAPINCVCLHPNQAELIVGDQSGAIHIWDLKTD

SEQ ID NO: 53078 - protein, 72 aa, Homo sapiens; identical to SEQ ID NO: 53070
  Payload ID: 10574
  Gene Symbol: MLST8
  Gene Name: MTOR associated protein, LST8 homolog
  ENSP ID: ENSP00000456063

SEQ ID NO: 53079 - protein, 72 aa, Homo sapiens; identical to SEQ ID NO: 53070
  Payload ID: 10574
  Gene Symbol: MLST8
  Gene Name: MTOR associated protein, LST8 homolog
  ENSP ID: ENSP00000456076

SEQ ID NO: 53080 - protein, 326 aa, Homo sapiens; identical to SEQ ID NO: 53068
  Payload ID: 10574
  Gene Symbol: MLST8
  Gene Name: MTOR associated protein, LST8 homolog
  Uniprot ID: Q9BVC4
  ENSP ID: ENSP00000456405

SEQ ID NO: 53081 - protein, 275 aa, Homo sapiens
  Payload ID: 10574
  Gene Symbol: MLST8
  Gene Name: MTOR associated protein, LST8 homolog
  ENSP ID: ENSP00000456944
MNTSPGTVGSDPVILATAGYDHTVRFWQAHSGICTRTVQHQDSQVNALEVTPDRSMIAAAVQPVSLGYQHIRMYDLNSNNPNPIISYDGVNKNIASVGFHEDGRWMYTGGEDCTARIWDLRSRNLQCQRIFQVNAPINCVCLHPNQAELIVGDQSGAIHIWDLKTDHNEQLIPEPEVSITSAHIDPDASYMAAVNSTGNCYVWNLTGGIGDEVTQLIPKTKIPAHTRYALQCRFSPDSTLLATCSADQTCKIWRTSNFSLMTELSIKSGNPGESS

SEQ ID NO: 53082 - protein, 326 aa, Homo sapiens; identical to SEQ ID NO: 53068
  Payload ID: 10574
  Gene Symbol: MLST8
  Gene Name: MTOR associated protein, LST8 homolog
  Uniprot ID: Q9BVC4
  ENSP ID: ENSP00000457870

SEQ ID NO: 53083 - protein, 71 aa, Homo sapiens
  Payload ID: 10574
  Gene Symbol: MLST8
  Gene Name: MTOR associated protein, LST8 homolog
  ENSP ID: ENSP00000459612
MNTSPGTVGSDPVILATAGYDHTVRFWQAHSGICTRTVQHQDSVNALEVTPDRSMIAAAACVPRLPAHPHV

SEQ ID NO: 53084 - protein, 24 aa, Homo sapiens
  Payload ID: 10575
  Gene Symbol: MTRNR2L1
  Gene Name: MT-RNR2-like 1
  Uniprot ID: P0CJ68
  ENSP ID: ENSP00000439228
MAPRGFSCLLLSTSEIDLPVKRRT

SEQ ID NO: 53085 - protein, 24 aa, Homo sapiens
  Payload ID: 10576
  Gene Symbol: MTRNR2L10
  Gene Name: MT-RNR2-like 10
  Uniprot ID: P0CJ77
  ENSP ID: ENSP00000442159
MTTRGFSCLLLLIREIDLSAKRRI

SEQ ID NO: 53086 - protein, 24 aa, Homo sapiens
  Payload ID: 10577
  Gene Symbol: MTRNR2L11
  Gene Name: MT-RNR2-like 11 (pseudogene)
  Uniprot ID: S4R3Y5
  ENSP ID: ENSP00000474861
MATRGFSCLLLVISEIDLSVKRWV

SEQ ID NO: 53087 - protein, 24 aa, Homo sapiens
  Payload ID: 10578
  Gene Symbol: MTRNR2L12
  Gene Name: MT-RNR2-like 12
  Uniprot ID: P0DMP1
  ENSP ID: ENSP00000468991
MAPRGFSCLLLSTSEIDLPVKRRA

SEQ ID NO: 53088 - protein, 24 aa, Homo sapiens
  Payload ID: 10579
  Gene Symbol: MTRNR2L13
  Gene Name: MT-RNR2-like 13
  Uniprot ID: S4R3P1
  ENSP ID: ENSP00000474570
MDTQGFSCLLLLISEIDLSVKRRI

SEQ ID NO: 53089 - protein, 24 aa, Homo sapiens
  Payload ID: 10580
  Gene Symbol: MTRNR2L3
  Gene Name: MT-RNR2-like 3
  Uniprot ID: P0CJ70
  ENSP ID: ENSP00000443339
MATRRFSCLLLSTSEIDLSVKRRI

SEQ ID NO: 53090 - protein, 28 aa, Homo sapiens
  Payload ID: 10581
  Gene Symbol: MTRNR2L4
  Gene Name: MT-RNR2-like 4
  Uniprot ID: P0CJ71
  ENSP ID: ENSP00000382856
MATQGFSCLLLSVSEIDLSMKRQYKQIR

SEQ ID NO: 53091 - protein, 24 aa, Homo sapiens
  Payload ID: 10582
  Gene Symbol: MTRNR2L5
  Gene Name: MT-RNR2-like 5
  Uniprot ID: P0CJ72
  ENSP ID: ENSP00000437910
MATPGFSCLLLSTSEIDLPMKRRV

SEQ ID NO: 53092 - protein, 24 aa, Homo sapiens
  Payload ID: 10583
  Gene Symbol: MTRNR2L6
  Gene Name: MT-RNR2-like 6
  Uniprot ID: P0CJ73
  ENSP ID: ENSP00000473686
MTPRGFSCLLLPTSETDLPVKRRT

SEQ ID NO: 53093 - protein, 24 aa, Homo sapiens
  Payload ID: 10583
  Gene Symbol: MTRNR2L6
  Gene Name: MT-RNR2-like 6
  Uniprot ID: P0CJ73
  ENSP ID: ENSP00000488809
MTPRGFSCLLLPTSETDLPVKRRT

SEQ ID NO: 53094 - protein, 24 aa, Homo sapiens
  Payload ID: 10584
  Gene Symbol: MTRNR2L7
  Gene Name: MT-RNR2-like 7
  Uniprot ID: P0CJ74
  ENSP ID: ENSP00000439985
MATGGFGCLLLLIREIDLSVKRQI

SEQ ID NO: 53095 - protein, 24 aa, Homo sapiens
  Payload ID: 10585
  Gene Symbol: MTRNR2L8
  Gene Name: MT-RNR2-like 8
  Uniprot ID: P0CJ75
  ENSP ID: ENSP00000439666
MAPRGFSCLLLSTSEIDLPVKRRA

SEQ ID NO: 53096 - protein, 273 aa, Homo sapiens
  Payload ID: 10586
  Gene Symbol: MUC1
  Gene Name: mucin 1, cell surface associated
  Uniprot ID: P15941
  ENSP ID: ENSP00000338983
MTPGTQSPFFLLLLLTVLTVVTGSGHASSTPGGEKETSATQRSSVPSSTEKNALSTGVSFFFLSFHISNLQFNSSLEDPSTDYYQELQRDISEMFLQIYKQGGFLGLSNIKFRPGSVVVQLTLAFREGTINVHDVETQFNQYKTEAASRYNLTISDVSVSDVPFPFSAQSGAGVPGWGIALLVLVCVLVALAIVYLIALAVCQCRRKNYGQLDIFPARDTYHPMSEYPTYHTHGRYVPPSSTDRSPYEKVSAGNGGSSLSYTNPAVAATSANL

SEQ ID NO: 53097 - protein, 203 aa, Homo sapiens
  Payload ID: 10586
  Gene Symbol: MUC1
  Gene Name: mucin 1, cell surface associated
  Uniprot ID: P15941
  ENSP ID: ENSP00000339690
MTPGTQSPFFLLLLLTVLTVVTGSGHASSTPGGEKETSATQRSSVPSSTEKNAIPAPTTTKSCRETFLKCFCRFINKGVFWASPILSSVSDVPFPFSAQSGAGVPGWGIALLVLVCVLVALAIVYLIALAVCQCRRKNYGQLDIFPARDTYHPMSEYPTYHTHGRYVPPSSTDRSPYEKVSAGNGGSSLSYTNPAVAATSANL

SEQ ID NO: 53098 - protein, 166 aa, Homo sapiens
  Payload ID: 10586
  Gene Symbol: MUC1
  Gene Name: mucin 1, cell surface associated
  Uniprot ID: P15941
  ENSP ID: ENSP00000342814
MTPGTQSPFFLLLLLTVLTATTAPKPATVVTGSGHASSTPGGEKETSATQRSSVPSSTEKNASGAGVPGWGIALLVLVCVLVALAIVYLIALAVCQCRRKNYGQLDIFPARDTYHPMSEYPTYHTHGRYVPPSSTDRSPYEKVSAGNGGSSLSYTNPAVAATSANL

SEQ ID NO: 53099 - protein, 241 aa, Homo sapiens
  Payload ID: 10586
  Gene Symbol: MUC1
  Gene Name: mucin 1, cell surface associated
  ENSP ID: ENSP00000343482
MTPGTQSPFFLLLLLTVLTATTAPKPATVVTGSGHASSTPGGEKETSATQRSSVPSSTEKNAFLQIYKQGGFLGLSNIKFRPGSVVVQLTLAFREGTINVHDVETQFNQYKTEAASRYNLTISDVSVSDVPFPFSAQSGAGVPGWGIALLVLVCVLVALAIVYLIALAVCQCRRKNYGQLDIFPARDTYHPMSEYPTYHTHGRYVPPSSTDRSPYEKVSAGNGGSSLSYTNPAVAATSANL

SEQ ID NO: 53100 - protein, 168 aa, Homo sapiens
  Payload ID: 10586
  Gene Symbol: MUC1
  Gene Name: mucin 1, cell surface associated
  Uniprot ID: P15941
  ENSP ID: ENSP00000357374
MTPGTQSPFFLLLLLTVLTVVTGSGHASSTPGGEKETSATQRSSVPSSTEKNALSTGVSFFFLSFHISNLQFNSSLEDPSTDYYQELQRDISEMAVCQCRRKNYGQLDIFPARDTYHPMSEYPTYHTHGRYVPPSSTDRSPYEKVSAGNGGSSLSYTNPAVAATSANL

SEQ ID NO: 53101 - protein, 255 aa, Homo sapiens
  Payload ID: 10586
  Gene Symbol: MUC1
  Gene Name: mucin 1, cell surface associated
  Uniprot ID: P15941
  ENSP ID: ENSP00000357375
MTPGTQSPFFLLLLLTVLTVVTGSGHASSTPGGEKETSATQRSSVPSSTEKNAFNSSLEDPSTDYYQELQRDISEMFLQIYKQGGFLGLSNIKFRPGSVVVQLTLAFREGTINVHDVETQFNQYKTEAASRYNLTISDVSVSDVPFPFSAQSGAGVPGWGIALLVLVCVLVALAIVYLIALAVCQCRRKNYGQLDIFPARDTYHPMSEYPTYHTHGRYVPPSSTDRSPYEKVSAGNGGSSLSYTNPAVAATSANL

SEQ ID NO: 53102 - protein, 264 aa, Homo sapiens
  Payload ID: 10586
  Gene Symbol: MUC1
  Gene Name: mucin 1, cell surface associated
  Uniprot ID: P15941
  ENSP ID: ENSP00000357377
MTPGTQSPFFLLLLLTVLTATTAPKPATVVTGSGHASSTPGGEKETSATQRSSVPSSTEKNAFNSSLEDPSTDYYQELQRDISEMFLQIYKQGGFLGLSNIKFRPGSVVVQLTLAFREGTINVHDVETQFNQYKTEAASRYNLTISDVSVSDVPFPFSAQSGAGVPGWGIALLVLVCVLVALAIVYLIALAVCQCRRKNYGQLDIFPARDTYHPMSEYPTYHTHGRYVPPSSTDRSPYEKVSAGNGGSSLSYTNPAVAATSANL

SEQ ID NO: 53103 - protein, 198 aa, Homo sapiens
  Payload ID: 10586
  Gene Symbol: MUC1
  Gene Name: mucin 1, cell surface associated
  Uniprot ID: P15941
  ENSP ID: ENSP00000357378
MTPGTQSPFFLLLLLTVLTVVTGSGHASSTPGGEKETSATQRSSVPSSTEKNALSTGVSFFFLSFHISNLQFNSSLEDPSTDYYQELQRDISEMFLQIYKQGGFLGLSNIKFRPGSVVVQLTLAFREGTINVHDVETQFNQYKTEAASRYNLTISDVSGCLSVPPKELRAAGHLSSPGYLPSYERVPHLPHPWALCAP

SEQ ID NO: 53104 - protein, 159 aa, Homo sapiens
  Payload ID: 10586
  Gene Symbol: MUC1
  Gene Name: mucin 1, cell surface associated
  Uniprot ID: P15941
  ENSP ID: ENSP00000357381
MTPGTQSPFFLLLLLTVLTATTAPKPATVVTGSGHASSTPGGEKETSATQRSSVPSSTEKNAFNSSLEDPSTDYYQELQRDISEMAVCQCRRKNYGQLDIFPARDTYHPMSEYPTYHTHGRYVPPSSTDRSPYEKVSAGNGGSSLSYTNPAVAATSANL

SEQ ID NO: 53105 - protein, 230 aa, Homo sapiens
  Payload ID: 10586
  Gene Symbol: MUC1
  Gene Name: mucin 1, cell surface associated
  Uniprot ID: P15941
  ENSP ID: ENSP00000357383
MTPGTQSPFFLLLLLTVLTVVTGSGHASSTPGGEKETSATQRSSVPSSTEKNAIPAPTTTKSCRETFLKWPGSVVVQLTLAFREGTINVHDVETQFNQYKTEAASRYNLTISDVSVSDVPFPFSAQSGAGVPGWGIALLVLVCVLVALAIVYLIALAVCQCRRKNYGQLDIFPARDTYHPMSEYPTYHTHGRYVPPSSTDRSPYEKVSAGNGGSSLSYTNPAVAATSANL

SEQ ID NO: 53106 - protein, 268 aa, Homo sapiens
  Payload ID: 10586
  Gene Symbol: MUC1
  Gene Name: mucin 1, cell surface associated
  ENSP ID: ENSP00000388172
MTPGTQSPFFLLLLLTVLTATTAPKPATVVTGSGHASSTPGGEKETSATQRSSVPSSTEKNALSTGVSFFFLSFHISNLQFNSSLEDPSTDYYQELQRDISEMFLQIYKQGGFLGLSNIKFRPGSVVVQLTLAFREGTINVHDVETQFNQYKTEAASRYNLTISDVSVSDVPFPFSAQSGAGVPGWGIALLVLVCVLVALAIVYLIALAVCQCRRKNYGQLDIFPARDTYHPMSEYPTYHTHGRYVPPSSTDRSPYEKEWRVDRERLA

SEQ ID NO: 53107 - protein, 229 aa, Homo sapiens
  Payload ID: 10586
  Gene Symbol: MUC1
  Gene Name: mucin 1, cell surface associated
  ENSP ID: ENSP00000389098
MTPGTQSPFFLLLLLTVLTVVTGSGHASSTPGGEKETSATQRSSVPSSTEKNAIYKQGGFLGLSNIKFRPGSVVVQLTLAFREGTINVHDVETQFNQYKTEAASRYNLTISDVSVSDVPFPFSAQSGAGVPGWGIALLVLVCVLVALAIVYLIALAVCQCRRKNYGQLDIFPARDTYHPMSEYPTYHTHGRYVPPSSTDRSPYEKVSAGNGGSSLSYTNPAVAATSANL

SEQ ID NO: 53108 - protein, 85 aa, Homo sapiens
  Payload ID: 10586
  Gene Symbol: MUC1
  Gene Name: mucin 1, cell surface associated
  ENSP ID: ENSP00000478068
TEAASRYNLTISDVSVWGWGARLGHRAAGAGLCSGCAGHCLSHCLGCLSVPPKELRAAGHLSSPGYLPSYERVPHLPHPWALCAP

SEQ ID NO: 53109 - protein, 228 aa, Homo sapiens
  Payload ID: 10586
  Gene Symbol: MUC1
  Gene Name: mucin 1, cell surface associated
  ENSP ID: ENSP00000479471
ASSTHHSTVPPLTSSNHSTSPQLSTGVSFFFLSFHISNLQFNSSLEDPSTDYYQELQRDISEMFLQIYKQGGFLGLSNIKFRPGSVVVQLTLAFREGTINVHDVETQFNQYKTEAASRYNLTISDVSVSDVPFPFSAQSGAGVPGWGIALLVLVCVLVALAIVYLIALAVCQCRRKNYGQLDIFPARDTYHPMSEYPTYHTHGRYVPPSSTDRSPYEKEWRVDRERLA

SEQ ID NO: 53110 - protein, 1262 aa, Homo sapiens
  Payload ID: 10586
  Gene Symbol: MUC1
  Gene Name: mucin 1, cell surface associated
  ENSP ID: ENSP00000480333
MTPGTQSPFFLLLLLTVLTVVTGSGHASSTPGGEKETSATQRSSVPSSTEKNAVSMTSSVLSSHSPGSGSSTTQGQDVTLAPATEPASGSAATWGQDVTSVPVTRPALGSTTPPAHDVTSAPDNKPAPGSTAPPAHGVTSAPDTRPAPGSTAPQAHGVTSAPDTRPAPGSTAPPAHGVTSAPDTRPAPGSTAPPAHGVTSAPDTRSAPGSTAPAAHGVTSAPDTRSVPGSTAPQAHGVTSAPDTRPAPGSTAPPAHGVTSAPDTRPVPGSTAPPAHGVTSAPDTRPAPGSTAPPAHGVTSAPDTRPAPGSTAPQAHGVTSAPDTRPAPGSTAPPAHGVTSAPDTRPAPGSTAPPAHGVTSAPDTRPAPGSTAPAAHGVTSAPDTRPAPGSTAPQAHGVTSAPDTRPAPGSTAPPAHGVTSAPDTRPAPGSTAPPAHGVTSAPDTRPAPGSTAPPAHGVTSAPDTRPAPGSTAPAAHGVTSAPDTRPAPGSTAPQAHGVTSAPDTRPAPGSTAPPAHGVTSAPDTRPAPGSTAPPAHGVTSAPDTRPAPGSTAPPTHGVTSAPDTSPAPGSTAPPAHGVTSAPDTRPAPGYTAPAAHGVTSAPDTRPAPGSTAPQAHGVTSAPDTRPAPGSTAPPAHGVTSAPDTRPAPGSTAPPAHGVTSAPDTRPAPGSTAPPAHGVTSAPESRPAPGSTARAAHGVTSAPESRPAPGSTAPPAHGVTSAPDTRPAPGSTAPPAHGVTSAPDTRPAPGSTAPPAHGVTSAPDTRPAPGSTAPPAHGVTSAPDTRPAPGSTAPPAHGVTSAPDTRPSPPGSTAPPAHGVTSAPDTRPAPGSTAPPVHGVTSAPDTRPAPGSTAPPAHGVTSAPDTRPAPGSTAPPAHGVTSAPDTRPAPGSTAPPAHGVTSAPDTRRAPGSTPAPGSTAPPAHGVTSAPDTRPAPGSTAPPAHGVTSAPDNRPALGSTAPPVHNVTSASGSASGSASTLVHNGTSARATTTPASKSTPFSIPSHHSDTPTTLASHSTKTDASSTHHSTVPPLTSSNHSTSPQLSTGVSFFFLSFHISNLQFNSSLEDPSTDYYQELQRDISEMFLQIYKQGGFLGLSNIKFRPGSVVVQLTLAFREGTINVHDVETQFNQYKTEAASRYNLTISDVSVSDVPFPFSAQSGAGVPGWGIALLVLVCVLVALAIVYLIALAVCQCRRKNYGQLDIFPARDTYHPMSEYPTYHTHGRYVPPSSTDRSPYEKVSAGNGGSSLSYTNPAVAATSANL

SEQ ID NO: 53111 - protein, 135 aa, Homo sapiens
  Payload ID: 10586
  Gene Symbol: MUC1
  Gene Name: mucin 1, cell surface associated
  ENSP ID: ENSP00000480335
MTPGTQSPFFLLLLLTVLTATTAPKPATVVTGSGHASSTPGGEKETSATQRSSVPSSTEKNAALHQAQLLLWCTTAPLPGLPQPQPARALHSQFPATTLILLPPLPAIAPRLMPVALTIARSQHRLLPRAAERHF

SEQ ID NO: 53112 - protein, 475 aa, Homo sapiens
  Payload ID: 10586
  Gene Symbol: MUC1
  Gene Name: mucin 1, cell surface associated
  ENSP ID: ENSP00000481231
MTPGTQSPFFLLLLLTVLTVVTGSGHASSTPGGEKETSATQRSSVPSSTEKNAVSMTSSVLSSHSPGSGSSTTQGQDVTLAPATEPASGSAATWGQDVTSVPVTRPALGSTTPPAHDVTSAPDNKPAPGSTAPPAHGVTSAPDTRPAPGSTAPPAHGVTSAPDNRPALGSTAPPVHNVTSASGSASGSASTLVHNGTSARATTTPASKSTPFSIPSHHSDTPTTLASHSTKTDASSTHHSTVPPLTSSNHSTSPQLSTGVSFFFLSFHISNLQFNSSLEDPSTDYYQELQRDISEMFLQIYKQGGFLGLSNIKFRPGSVVVQLTLAFREGTINVHDVETQFNQYKTEAASRYNLTISDVSVSDVPFPFSAQSGAGVPGWGIALLVLVCVLVALAIVYLIALAVCQCRRKNYGQLDIFPARDTYHPMSEYPTYHTHGRYVPPSSTDRSPYEKVSAGNGGSSLSYTNPAVAATSANL

SEQ ID NO: 53113 - protein, 126 aa, Homo sapiens
  Payload ID: 10586
  Gene Symbol: MUC1
  Gene Name: mucin 1, cell surface associated
  ENSP ID: ENSP00000482688
MTPGTQSPFFLLLLLTVLTVVTGSGHASSTPGGEKETSATQRSSVPSSTEKNAALHQAQLLLWCTTAPLPGLPQPQPARALHSQFPATTLILLPPLPAIAPRLMPVALTIARSQHRLLPRAAERHF

SEQ ID NO: 53114 - protein, 123 aa, Homo sapiens
  Payload ID: 10586
  Gene Symbol: MUC1
  Gene Name: mucin 1, cell surface associated
  ENSP ID: ENSP00000482988
MTPGTQSPFFLLLLLTVLTATTAPKPATVVTGSGHASSTPGGEKETSATQRSSVPSSTEKNALSTGVSFFFLSFHISNLQFNSSLEDPSTDYYQELQRDISEMFLQIYKQGGFLGLSNIKFSE

SEQ ID NO: 53115 - protein, 96 aa, Homo sapiens
  Payload ID: 10586
  Gene Symbol: MUC1
  Gene Name: mucin 1, cell surface associated
  ENSP ID: ENSP00000483128
MTPGTQSPFFLLLLLTVLTVVTGSGHASSTPGGEKETSATQRSSVPSSTEKNAFNSSLEDPSTDYYQELQRDISEMFLQIYKQGGFLGLSNIKFSE

SEQ ID NO: 53116 - protein, 189 aa, Homo sapiens
  Payload ID: 10586
  Gene Symbol: MUC1
  Gene Name: mucin 1, cell surface associated
  ENSP ID: ENSP00000483473
MTPGTQSPFFLLLLLTVLTATTAPKPATVVTGSGHASSTPGGEKETSATQRSSVPSSTEKNAFNSSLEDPSTDYYQELQRDISEMSGAGVPGWGIALLVLVCVLVALAIVYLIALAVCQCRRKNYGQLDIFPARDTYHPMSEYPTYHTHGRYVPPSSTDRSPYEKVSAGNGGSSLSYTNPAVAATSANL

SEQ ID NO: 53117 - protein, 239 aa, Homo sapiens
  Payload ID: 10586
  Gene Symbol: MUC1
  Gene Name: mucin 1, cell surface associated
  ENSP ID: ENSP00000483482
MTPGTQSPFFLLLLLTVLTATTAPKPATVVTGSGHASSTPGGEKETSATQRSSVPSSTEKNAIPAPTTTKSCRETFLKWPGSVVVQLTLAFREGTINVHDVETQFNQYKTEAASRYNLTISDVSVSDVPFPFSAQSGAGVPGWGIALLVLVCVLVALAIVYLIALAVCQCRRKNYGQLDIFPARDTYHPMSEYPTYHTHGRYVPPSSTDRSPYEKVSAGNGGSSLSYTNPAVAATSANL

SEQ ID NO: 53118 - protein, 213 aa, Homo sapiens
  Payload ID: 10586
  Gene Symbol: MUC1
  Gene Name: mucin 1, cell surface associated
  ENSP ID: ENSP00000483581
MTPGTQSPFFLLLLLTVLTGSGHASSTPGGEKETSATQRSSVPSSTEKNAVSMTSSVLSSHSPGSGSSTTQGQDVTLAPATEPASGSAATWGQDVTSVPVTRPALGSTTPPAGVPGWGIALLVLVCVLVALAIVYLIALAVCQCRRKNYGQLDIFPARDTYHPMSEYPTYHTHGRYVPPSSTDRSPYEKVSAGNGGSSLSYTNPAVAATSANL

SEQ ID NO: 53119 - protein, 80 aa, Homo sapiens
  Payload ID: 10586
  Gene Symbol: MUC1
  Gene Name: mucin 1, cell surface associated
  ENSP ID: ENSP00000484006
MTPGTQSPFFLLLLLTVLTATTAPKPATVVTGSGHASSTPGGEKETSATQRSSVPSSTEKNAIPAPTTTKSCRETFLKCE

SEQ ID NO: 53120 - protein, 149 aa, Homo sapiens
  Payload ID: 10586
  Gene Symbol: MUC1
  Gene Name: mucin 1, cell surface associated
  ENSP ID: ENSP00000484730
MTPGTQSPFFLLLLLTVLTVVTGSGHASSTPGGEKETSATQRSSVPSSTEKNAFNSSLEDPSTDYYQELQRDISEMFLQIYKQGGFLGLSNIKFSLGLGCQAGASRCWCWSVFWLRWPLSISLPWLSVSAAERTTGSWTSFQPGIPTIL

SEQ ID NO: 53121 - protein, 484 aa, Homo sapiens
  Payload ID: 10586
  Gene Symbol: MUC1
  Gene Name: mucin 1, cell surface associated
  ENSP ID: ENSP00000484824
MTPGTQSPFFLLLLLTVLTATTAPKPATVVTGSGHASSTPGGEKETSATQRSSVPSSTEKNAVSMTSSVLSSHSPGSGSSTTQGQDVTLAPATEPASGSAATWGQDVTSVPVTRPALGSTTPPAHDVTSAPDNKPAPGSTAPPAHGVTSAPDTRPAPGSTAPPAHGVTSAPDNRPALGSTAPPVHNVTSASGSASGSASTLVHNGTSARATTTPASKSTPFSIPSHHSDTPTTLASHSTKTDASSTHHSTVPPLTSSNHSTSPQLSTGVSFFFLSFHISNLQFNSSLEDPSTDYYQELQRDISEMFLQIYKQGGFLGLSNIKFRPGSVVVQLTLAFREGTINVHDVETQFNQYKTEAASRYNLTISDVSVSDVPFPFSAQSGAGVPGWGIALLVLVCVLVALAIVYLIALAVCQCRRKNYGQLDIFPARDTYHPMSEYPTYHTHGRYVPPSSTDRSPYEKVSAGNGGSSLSYTNPAVAATSANL

SEQ ID NO: 53122 - protein, 94 aa, Homo sapiens
  Payload ID: 10587
  Gene Symbol: MUC12
  Gene Name: mucin 12, cell surface associated
  ENSP ID: ENSP00000306919
CVNKCTKGTKSQMNCNLGTCQLQRSGPRCLCPNTNTHWYWGETCEFNIAKSLVYGIVGAVMAVLLLALIILIILFSLSQRKRHRPESEGEQIRP

SEQ ID NO: 53123 - protein, 5478 aa, Homo sapiens
  Payload ID: 10587
  Gene Symbol: MUC12
  Gene Name: mucin 12, cell surface associated
  Uniprot ID: Q9UKN1
  ENSP ID: ENSP00000368755
MLVIWILTLALRLCASVTTVTPEGSAVHKAISQQGTLWTGEVLEKQTVEQGKSTLRRQKNHFHRSAGELRCRNALKDEGASAGWSVMFAGESVVVLVHLWMTGARVKNLGLVEFASPGDDGDGRAEGFSLGLPLSEQARAAGAREKERQETVINHSTFSGFSQITGSTVNTSIGGNTTSASTPSSSDPFTTFSDYGVSVTFITGSTATKHFLDSSTNSGHSEESTVSHSGPGATGTTLFPSHSATSVFVGEPKTSPITSASMETTALPGSTTTAGLSEKSTTFYSSPRSPDRTLSPARTTSSGVSEKSTTSHSRPGPTHTIAFPDSTTMPGVSQESTASHSIPGSTDTTLSPGTTTPSSLGPESTTFHSSPGYTKTTRLPDNTTTSGLLEASTPVHSSTGSPHTTLSPSSSTTHEGEPTTFQSWPSSKDTSPAPSGTTSAFVKLSTTYHSSPSSTPTTHFSASSTTLGHSEESTPVHSSPVATATTPPPARSATSGHVEESTAYHRSPGSTQTMHFPESSTTSGHSEESATFHGSTTHTKSSTPSTTAALAHTSYHSSLGSTETTHFRDSSTISGRSEESKASHSSPDAMATTVLPAGSTPSVLVGDSTPSPISSGSMETTALPGSTTKPGLSEKSTTFYSSPRSPDTTHLPASMTSSGVSEESTTSHSRPGSTHTTAFPGSTTMPGLSQESTASHSSPGPTDTTLSPGSTTASSLGPEYTTFHSRPGSTETTLLPDNTTASGLLEASMPVHSSTRSPHTTLSPAGSTTRQGESTTFHSWPSSKDTRPAPPTTTSAFVEPSTTSHGSPSSIPTTHISARSTTSGLVEESTTYHSSPGSTQTMHFPESDTTSGRGEESTTSHSSTTHTISSAPSTTSALVEEPTSYHSSPGSTATTHFPDSSTTSGRSEESTASHSSQDATGTIVLPARSTTSVLLGESTTSPISSGSMETTALPGSTTTPGLSERSTTFHSSPRSPATTLSPASTTSSGVSEESTTSRSRPGSTHTTAFPDSTTTPGLSRHSTTSHSSPGSTDTTLLPASTTTSGPSQESTTSHSSSGSTDTALSPGSTTALSFGQESTTFHSNPGSTHTTLFPDSTTSSGIVEASTRVHSSTGSPRTTLSPASSTSPGLQGESTAFQTHPASTHTTPSPPSTATAPVEESTTYHRSPGSTPTTHFPASSTTSGHSEKSTIFHSSPDASGTTPSSAHSTTSGRGESTTSRISPGSTEITTLPGSTTTPGLSEASTTFYSSPRSPTTTLSPASMTSLGVGEESTTSRSQPGSTHSTVSPASTTTPGLSEESTTVYSSSRGSTETTVFPHSTTTSVHGEEPTTFHSRPASTHTTLFTEDSTTSGLTEESTAFPGSPASTQTGLPATLTTADLGEESTTFPSSSGSTGTKLSPARSTTSGLVGESTPSRLSPSSTETTTLPGSPTTPSLSEKSTTFYTSPRSPDATLSPATTTSSGVSEESSTSHSQPGSTHTTAFPDSTTTSDLSQEPTTSHSSQGSTEATLSPGSTTASSLGQQSTTFHSSPGDTETTLLPDDTITSGLVEASTPTHSSTGSLHTTLTPASSTSAGLQEESTTFQSWPSSSDTTPSPPGTTAAPVEVSTTYHSRPSSTPTTHFSASSTTLGRSEESTTVHSSPGATGTALFPTRSATSVLVGEPTTSPISSGSTETTALPGSTTTAGLSEKSTTFYSSPRSPDTTLSPASTTSSGVSEESTTSHSRPGSTHTTAFPGSTTMPGVSQESTASHSSPGSTDTTLSPGSTTASSLGPESTTFHSSPGSTETTLLPDNTTASGLLEASTPVHSSTGSPHTTLSPAGSTTRQGESTTFQSWPSSKDTMPAPPTTTSAFVELSTTSHGSPSSTPTTHFSASSTTLGRSEESTTVHSSPVATATTPSPARSTTSGLVEESTAYHSSPGSTQTMHFPESSTASGRSEESRTSHSSTTHTISSPPSTTSALVEEPTSYHSSPGSTATTHFPDSSTTSGRSEESTASHSSQDATGTIVLPARSTTSVLLGESTTSPISSGSMETTALPGSTTTPGLSEKSTTFHSSPRSPATTLSPASTTSSGVSEESTTSHSRPGSTHTTAFPDSTTTPGLSRHSTTSHSSPGSTDTTLLPASTTTSGPSQESTTSHSSPGSTDTALSPGSTTALSFGQESTTFHSSPGSTHTTLFPDSTTSSGIVEASTRVHSSTGSPRTTLSPASSTSPGLQGESTAFQTHPASTHTTPSPPSTATAPVEESTTYHRSPGSTPTTHFPASSTTSGHSEKSTIFHSSPDASGTTPSSAHSTTSGRGESTTSRISPGSTEITTLPGSTTTPGLSEASTTFYSSPRSPTTTLSPASMTSLGVGEESTTSRSQPGSTHSTVSPASTTTPGLSEESTTVYSSSPGSTETTVFPRTPTTSVRGEEPTTFHSRPASTHTTLFTEDSTTSGLTEESTAFPGSPASTQTGLPATLTTADLGEESTTFPSSSGSTGTTLSPARSTTSGLVGESTPSRLSPSSTETTTLPGSPTTPSLSEKSTTFYTSPRSPDATLSPATTTSSGVSEESSTSHSQPGSTHTTAFPDSTTTPGLSRHSTTSHSSPGSTDTTLLPASTTTSGPSQESTTSHSSPGSTDTALSPGSTTALSFGQESTTFHSSPGSTHTTLFPDSTTSSGIVEASTRVHSSTGSPRTTLSPASSTSPGLQGESTTFQTHPASTHTTPSPPSTATAPVEESTTYHRSPGSTPTTHFPASSTTSGHSEKSTIFHSSPDASGTTPSSAHSTTSGRGESTTSRISPGSTEITTLPGSTTTPGLSEASTTFYSSPRSPTTTLSPASMTSLGVGEESTTSRSQPGSTHSTVSPASTTTPGLSEESTTVYSSSPGSTETTVFPRSTTTSVRGEEPTTFHSRPASTHTTLFTEDSTTSGLTEESTAFPGSPASTQTGLPATLTTADLGEESTTFPSSSGSTGTTLSPARSTTSGLVGESTPSRLSPSSTETTTLPGSPTTPSLSEKSTTFYTSPRSPDATLSPATTTSSGVSEESSTSHSQPGSTHTTAFPDSTTTSGLSQEPTASHSSQGSTEATLSPGSTTASSLGQQSTTFHSSPGDTETTLLPDDTITSGLVEASTPTHSSTGSLHTTLTPASSTSAGLQEESTTFQSWPSSSDTTPSPPGTTAAPVEVSTTYHSRPSSTPTTHFSASSTTLGRSEESTTVHSSPGATGTALFPTRSATSVLVGEPTTSPISSGSTETTALPGSTTTAGLSEKSTTFYSSPRSPDTTLSPASTTSSGVSEESTTSHSRPGSTHTTAFPGSTTMPGVSQESTASHSSPGSTDTTLSPGSTTASSLGPESTTFHSGPGSTETTLLPDNTTASGLLEASTPVHSSTGSPHTTLSPAGSTTRQGESTTFQSWPNSKDTTPAPPTTTSAFVELSTTSHGSPSSTPTTHFSASSTTLGRSEESTTVHSSPVATATTPSPARSTTSGLVEESTTYHSSPGSTQTMHFPESDTTSGRGEESTTSHSSTTHTISSAPSTTSALVEEPTSYHSSPGSTATTHFPDSSTTSGRSEESTASHSSQDATGTIVLPARSTTSVLLGESTTSPISSGSMETTALPGSTTTPGLSEKSTTFHSSPRSPATTLSPASTTSSGVSEESTTSHSRPGSTHTTAFPDSTTTPGLSRHSTTSHSSPGSTDTTLLPASTTTSGSSQESTTSHSSSGSTDTALSPGSTTALSFGQESTTFHSSPGSTHTTLFPDSTTSSGIVEASTRVHSSTGSPRTTLSPASSTSPGLQGESTAFQTHPASTHTTPSPPSTATAPVEESTTYHRSPGSTPTTHFPASSTTSGHSEKSTIFHSSPDASGTTPSSAHSTTSGRGESTTSRISPGSTEITTLPGSTTTPGLSEASTTFYSSPRSPTTTLSPASMTSLGVGEESTTSRSQPGSTHSTVSPASTTTPGLSEESTTVYSSSPGSTETTVFPRSTTTSVRREEPTTFHSRPASTHTTLFTEDSTTSGLTEESTAFPGSPASTQTGLPATLTTADLGEESTTFPSSSGSTGTKLSPARSTTSGLVGESTPSRLSPSSTETTTLPGSPTTPSLSEKSTTFYTSPRSPDATLSPATTTSSGVSEESSTSHSQPGSTHTTAFPDSTTTSGLSQEPTTSHSSQGSTEATLSPGSTTASSLGQQSTTFHSSPGDTETTLLPDDTITSGLVEASTPTHSSTGSLHTTLTPASSTSTGLQEESTTFQSWPSSSDTTPSPPSTTAVPVEVSTTYHSRPSSTPTTHFSASSTTLGRSEESTTVHSSPGATGTALFPTRSATSVLVGEPTTSPISSGSTETTALPGSTTTAGLSEKSTTFYSSPRSPDTTLSPASTTSSGVSEESTTSHSRPGSMHTTAFPSSTTMPGVSQESTASHSSPGSTDTTLSPGSTTASSLGPESTTFHSSPGSTETTLLPDNTTASGLLEASTPVHSSTGSPHTTLSPAGSTTRQGESTTFQSWPNSKDTTPAPPTTTSAFVELSTTSHGSPSSTPTTHFSASSTTLGRSEESTTVHSSPVATATTPSPARSTTSGLVEESTTYHSSPGSTQTMHFPESNTTSGRGEESTTSHSSTTHTISSAPSTTSALVEEPTSYHSSPGSTATTHFPDSSTTSGRSEESTASHSSQDATGTIVLPARSTTSVLLGESTTSPISSGSMETTALPGSTTTPGLSEKSTTFHSSPSSTPTTHFSASSTTLGRSEESTTVHSSPVATATTPSPARSTTSGLVEESTAYHSSPGSTQTMHFPESSTASGRSEESRTSHSSTTHTISSPPSTTSALVEEPTSYHSSPGSIATTHFPESSTTSGRSEESTASHSSPDTNGITPLPAHFTTSGRIAESTTFYISPGSMETTLASTATTPGLSAKSTILYSSSRSPDQTLSPASMTSSSISGEPTSLYSQAESTHTTAFPASTTTSGLSQESTTFHSKPGSTETTLSPGSITTSSFAQEFTTPHSQPGSALSTVSPASTTVPGLSEESTTFYSSPGSTETTAFSHSNTMSIHSQQSTPFPDSPGFTHTVLPATLTTTDIGQESTAFHSSSDATGTTPLPARSTASDLVGEPTTFYISPSPTYTTLFPASSSTSGLTEESTTFHTSPSFTSTIVSTESLETLAPGLCQEGQIWNGKQCVCPQGYVGYQCLSPLESFPVETPEKLNATLGMTVKVTYRNFTEKMNDASSQEYQNFSTLFKNRMDVVLKGDNLPQYRGVNIRRLLNGSIVVKNDVILEADYTLEYEELFENLAEIVKAKIMNETRTTLLDPDSCRKAILCYSEEDTFVDSSVTPGFDFQEQCTQKAAEGYTQFYYVDVLDGKLACVNKCTKGTKSQMNCNLGTCQLQRSGPRCLCPNTNTHWYWGETCEFNIAKSLVYGIVGAVMAVLLLALIILIILFSLSQRKRHREQYDVPQEWRKEGTPGIFQKTAIWEDQNLRESRFGLENAYNNFRPTLETVDSGTELHIQRPEMVASTV

SEQ ID NO: 53124 - protein, 5335 aa, Homo sapiens
  Payload ID: 10587
  Gene Symbol: MUC12
  Gene Name: mucin 12, cell surface associated
  Uniprot ID: Q9UKN1
  ENSP ID: ENSP00000441929
MLVIWILTLALRLCASVTTVTPGSTVNTSIGGNTTSASTPSSSDPFTTFSDYGVSVTFITGSTATKHFLDSSTNSGHSEESTVSHSGPGATGTTLFPSHSATSVFVGEPKTSPITSASMETTALPGSTTTAGLSEKSTTFYSSPRSPDRTLSPARTTSSGVSEKSTTSHSRPGPTHTIAFPDSTTMPGVSQESTASHSIPGSTDTTLSPGTTTPSSLGPESTTFHSSPGYTKTTRLPDNTTTSGLLEASTPVHSSTGSPHTTLSPSSSTTHEGEPTTFQSWPSSKDTSPAPSGTTSAFVKLSTTYHSSPSSTPTTHFSASSTTLGHSEESTPVHSSPVATATTPPPARSATSGHVEESTAYHRSPGSTQTMHFPESSTTSGHSEESATFHGSTTHTKSSTPSTTAALAHTSYHSSLGSTETTHFRDSSTISGRSEESKASHSSPDAMATTVLPAGSTPSVLVGDSTPSPISSGSMETTALPGSTTKPGLSEKSTTFYSSPRSPDTTHLPASMTSSGVSEESTTSHSRPGSTHTTAFPGSTTMPGLSQESTASHSSPGPTDTTLSPGSTTASSLGPEYTTFHSRPGSTETTLLPDNTTASGLLEASMPVHSSTRSPHTTLSPAGSTTRQGESTTFHSWPSSKDTRPAPPTTTSAFVEPSTTSHGSPSSIPTTHISARSTTSGLVEESTTYHSSPGSTQTMHFPESDTTSGRGEESTTSHSSTTHTISSAPSTTSALVEEPTSYHSSPGSTATTHFPDSSTTSGRSEESTASHSSQDATGTIVLPARSTTSVLLGESTTSPISSGSMETTALPGSTTTPGLSERSTTFHSSPRSPATTLSPASTTSSGVSEESTTSRSRPGSTHTTAFPDSTTTPGLSRHSTTSHSSPGSTDTTLLPASTTTSGPSQESTTSHSSSGSTDTALSPGSTTALSFGQESTTFHSNPGSTHTTLFPDSTTSSGIVEASTRVHSSTGSPRTTLSPASSTSPGLQGESTAFQTHPASTHTTPSPPSTATAPVEESTTYHRSPGSTPTTHFPASSTTSGHSEKSTIFHSSPDASGTTPSSAHSTTSGRGESTTSRISPGSTEITTLPGSTTTPGLSEASTTFYSSPRSPTTTLSPASMTSLGVGEESTTSRSQPGSTHSTVSPASTTTPGLSEESTTVYSSSRGSTETTVFPHSTTTSVHGEEPTTFHSRPASTHTTLFTEDSTTSGLTEESTAFPGSPASTQTGLPATLTTADLGEESTTFPSSSGSTGTKLSPARSTTSGLVGESTPSRLSPSSTETTTLPGSPTTPSLSEKSTTFYTSPRSPDATLSPATTTSSGVSEESSTSHSQPGSTHTTAFPDSTTTSDLSQEPTTSHSSQGSTEATLSPGSTTASSLGQQSTTFHSSPGDTETTLLPDDTITSGLVEASTPTHSSTGSLHTTLTPASSTSAGLQEESTTFQSWPSSSDTTPSPPGTTAAPVEVSTTYHSRPSSTPTTHFSASSTTLGRSEESTTVHSSPGATGTALFPTRSATSVLVGEPTTSPISSGSTETTALPGSTTTAGLSEKSTTFYSSPRSPDTTLSPASTTSSGVSEESTTSHSRPGSTHTTAFPGSTTMPGVSQESTASHSSPGSTDTTLSPGSTTASSLGPESTTFHSSPGSTETTLLPDNTTASGLLEASTPVHSSTGSPHTTLSPAGSTTRQGESTTFQSWPSSKDTMPAPPTTTSAFVELSTTSHGSPSSTPTTHFSASSTTLGRSEESTTVHSSPVATATTPSPARSTTSGLVEESTAYHSSPGSTQTMHFPESSTASGRSEESRTSHSSTTHTISSPPSTTSALVEEPTSYHSSPGSTATTHFPDSSTTSGRSEESTASHSSQDATGTIVLPARSTTSVLLGESTTSPISSGSMETTALPGSTTTPGLSEKSTTFHSSPRSPATTLSPASTTSSGVSEESTTSHSRPGSTHTTAFPDSTTTPGLSRHSTTSHSSPGSTDTTLLPASTTTSGPSQESTTSHSSPGSTDTALSPGSTTALSFGQESTTFHSSPGSTHTTLFPDSTTSSGIVEASTRVHSSTGSPRTTLSPASSTSPGLQGESTAFQTHPASTHTTPSPPSTATAPVEESTTYHRSPGSTPTTHFPASSTTSGHSEKSTIFHSSPDASGTTPSSAHSTTSGRGESTTSRISPGSTEITTLPGSTTTPGLSEASTTFYSSPRSPTTTLSPASMTSLGVGEESTTSRSQPGSTHSTVSPASTTTPGLSEESTTVYSSSPGSTETTVFPRTPTTSVRGEEPTTFHSRPASTHTTLFTEDSTTSGLTEESTAFPGSPASTQTGLPATLTTADLGEESTTFPSSSGSTGTTLSPARSTTSGLVGESTPSRLSPSSTETTTLPGSPTTPSLSEKSTTFYTSPRSPDATLSPATTTSSGVSEESSTSHSQPGSTHTTAFPDSTTTPGLSRHSTTSHSSPGSTDTTLLPASTTTSGPSQESTTSHSSPGSTDTALSPGSTTALSFGQESTTFHSSPGSTHTTLFPDSTTSSGIVEASTRVHSSTGSPRTTLSPASSTSPGLQGESTTFQTHPASTHTTPSPPSTATAPVEESTTYHRSPGSTPTTHFPASSTTSGHSEKSTIFHSSPDASGTTPSSAHSTTSGRGESTTSRISPGSTEITTLPGSTTTPGLSEASTTFYSSPRSPTTTLSPASMTSLGVGEESTTSRSQPGSTHSTVSPASTTTPGLSEESTTVYSSSPGSTETTVFPRSTTTSVRGEEPTTFHSRPASTHTTLFTEDSTTSGLTEESTAFPGSPASTQTGLPATLTTADLGEESTTFPSSSGSTGTTLSPARSTTSGLVGESTPSRLSPSSTETTTLPGSPTTPSLSEKSTTFYTSPRSPDATLSPATTTSSGVSEESSTSHSQPGSTHTTAFPDSTTTSGLSQEPTASHSSQGSTEATLSPGSTTASSLGQQSTTFHSSPGDTETTLLPDDTITSGLVEASTPTHSSTGSLHTTLTPASSTSAGLQEESTTFQSWPSSSDTTPSPPGTTAAPVEVSTTYHSRPSSTPTTHFSASSTTLGRSEESTTVHSSPGATGTALFPTRSATSVLVGEPTTSPISSGSTETTALPGSTTTAGLSEKSTTFYSSPRSPDTTLSPASTTSSGVSEESTTSHSRPGSTHTTAFPGSTTMPGVSQESTASHSSPGSTDTTLSPGSTTASSLGPESTTFHSGPGSTETTLLPDNTTASGLLEASTPVHSSTGSPHTTLSPAGSTTRQGESTTFQSWPNSKDTTPAPPTTTSAFVELSTTSHGSPSSTPTTHFSASSTTLGRSEESTTVHSSPVATATTPSPARSTTSGLVEESTTYHSSPGSTQTMHFPESDTTSGRGEESTTSHSSTTHTISSAPSTTSALVEEPTSYHSSPGSTATTHFPDSSTTSGRSEESTASHSSQDATGTIVLPARSTTSVLLGESTTSPISSGSMETTALPGSTTTPGLSEKSTTFHSSPRSPATTLSPASTTSSGVSEESTTSHSRPGSTHTTAFPDSTTTPGLSRHSTTSHSSPGSTDTTLLPASTTTSGSSQESTTSHSSSGSTDTALSPGSTTALSFGQESTTFHSSPGSTHTTLFPDSTTSSGIVEASTRVHSSTGSPRTTLSPASSTSPGLQGESTAFQTHPASTHTTPSPPSTATAPVEESTTYHRSPGSTPTTHFPASSTTSGHSEKSTIFHSSPDASGTTPSSAHSTTSGRGESTTSRISPGSTEITTLPGSTTTPGLSEASTTFYSSPRSPTTTLSPASMTSLGVGEESTTSRSQPGSTHSTVSPASTTTPGLSEESTTVYSSSPGSTETTVFPRSTTTSVRREEPTTFHSRPASTHTTLFTEDSTTSGLTEESTAFPGSPASTQTGLPATLTTADLGEESTTFPSSSGSTGTKLSPARSTTSGLVGESTPSRLSPSSTETTTLPGSPTTPSLSEKSTTFYTSPRSPDATLSPATTTSSGVSEESSTSHSQPGSTHTTAFPDSTTTSGLSQEPTTSHSSQGSTEATLSPGSTTASSLGQQSTTFHSSPGDTETTLLPDDTITSGLVEASTPTHSSTGSLHTTLTPASSTSTGLQEESTTFQSWPSSSDTTPSPPSTTAVPVEVSTTYHSRPSSTPTTHFSASSTTLGRSEESTTVHSSPGATGTALFPTRSATSVLVGEPTTSPISSGSTETTALPGSTTTAGLSEKSTTFYSSPRSPDTTLSPASTTSSGVSEESTTSHSRPGSMHTTAFPSSTTMPGVSQESTASHSSPGSTDTTLSPGSTTASSLGPESTTFHSSPGSTETTLLPDNTTASGLLEASTPVHSSTGSPHTTLSPAGSTTRQGESTTFQSWPNSKDTTPAPPTTTSAFVELSTTSHGSPSSTPTTHFSASSTTLGRSEESTTVHSSPVATATTPSPARSTTSGLVEESTTYHSSPGSTQTMHFPESNTTSGRGEESTTSHSSTTHTISSAPSTTSALVEEPTSYHSSPGSTATTHFPDSSTTSGRSEESTASHSSQDATGTIVLPARSTTSVLLGESTTSPISSGSMETTALPGSTTTPGLSEKSTTFHSSPSSTPTTHFSASSTTLGRSEESTTVHSSPVATATTPSPARSTTSGLVEESTAYHSSPGSTQTMHFPESSTASGRSEESRTSHSSTTHTISSPPSTTSALVEEPTSYHSSPGSIATTHFPESSTTSGRSEESTASHSSPDTNGITPLPAHFTTSGRIAESTTFYISPGSMETTLASTATTPGLSAKSTILYSSSRSPDQTLSPASMTSSSISGEPTSLYSQAESTHTTAFPASTTTSGLSQESTTFHSKPGSTETTLSPGSITTSSFAQEFTTPHSQPGSALSTVSPASTTVPGLSEESTTFYSSPGSTETTAFSHSNTMSIHSQQSTPFPDSPGFTHTVLPATLTTTDIGQESTAFHSSSDATGTTPLPARSTASDLVGEPTTFYISPSPTYTTLFPASSSTSGLTEESTTFHTSPSFTSTIVSTESLETLAPGLCQEGQIWNGKQCVCPQGYVGYQCLSPLESFPVETPEKLNATLGMTVKVTYRNFTEKMNDASSQEYQNFSTLFKNRMDVVLKGDNLPQYRGVNIRRLLNGSIVVKNDVILEADYTLEYEELFENLAEIVKAKIMNETRTTLLDPDSCRKAILCYSEEDTFVDSSVTPGFDFQEQCTQKAAEGYTQFYYVDVLDGKLACVNKCTKGTKSQMNCNLGTCQLQRSGPRCLCPNTNTHWYWGETCEFNIAKSLVYGIVGAVMAVLLLALIILIILFSLSQRKRHREQYDVPQEWRKEGTPGIFQKTAIWEDQNLRESRFGLENAYNNFRPTLETVDSGTELHIQRPEMVASTV

SEQ ID NO: 53125 - protein, 184 aa, Homo sapiens
  Payload ID: 10588
  Gene Symbol: MUC13
  Gene Name: mucin 13, cell surface associated
  ENSP ID: ENSP00000418660
MKAIIHLTLLALLSVNTEDNQSSGPPTGTALLETSTLNSTGPSNPCQDDPCADNSLCVKLHNTSFCLCLEGYYYNSSTCKKGKVFPGKISVTVSETFDPEEKHSMAYQDLHSEITSLFKDVFGTSVYGQTVILTVSTSLSPRSEMRADDKFVNVTIVTILAETTSDNEKTVTEKINKAIRSSSS

SEQ ID NO: 53126 - protein, 512 aa, Homo sapiens
  Payload ID: 10588
  Gene Symbol: MUC13
  Gene Name: mucin 13, cell surface associated
  Uniprot ID: Q9H3R2
  ENSP ID: ENSP00000485028
MKAIIHLTLLALLSVNTATNQGNSADAVTTTETATSGPTVAAADTTETNFPETASTTANTPSFPTATSPAPPIISTHSSSTIPTPAPPIISTHSSSTIPIPTAADSESTTNVNSLATSDIITASSPNDGLITMVPSETQSNNEMSPTTEDNQSSGPPTGTALLETSTLNSTGPSNPCQDDPCADNSLCVKLHNTSFCLCLEGYYYNSSTCKKGKVFPGKISVTVSETFDPEEKHSMAYQDLHSEITSLFKDVFGTSVYGQTVILTVSTSLSPRSEMRADDKFVNVTIVTILAETTSDNEKTVTEKINKAIRSSSSNFLNYDLTLRCDYYGCNQTADDCLNGLACDCKSDLQRPNPQSPFCVASSLKCPDACNAQHKQCLIKKSGGAPECACVPGYQEDANGNCQKCAFGYSGLDCKDKFQLILTIVGTIAGIVILSMIIALIVTARSNNKTKHIEEENLIDEDFQNLKLRSTGFTNLGAEGSVFPKVRITASRDSQMQNPYSRHSSMPRPDY

SEQ ID NO: 53127 - protein, 311 aa, Homo sapiens
  Payload ID: 10589
  Gene Symbol: MUC15
  Gene Name: mucin 15, cell surface associated
  ENSP ID: ENSP00000281268
MGIIQSILATSRDCYSFKKKPIPKKPTMLALAKILLISTLFYSLLSGSHGKENQDINTTQNIAEVFKTMENKPISLESEANLNSDKENITTSNLKASHSPPLNLPNNSHGITDFSSNSSAEHSLGSLKPTSTISTSPPLIHSFVSKVPWNAPIADEDLLPISAHPNATPALSSENFTWSLVNDTVKTPDNSSITVSILSSEPTSPSVTPLIVEPSGWLTTNSDSFTGFTPYQEKTTLQPTLKFTNNSKLFPNTSDPQKVLRLDNAPEPYDVSFGNSSYYNPTLNDSAMPESEENARDGIPMDDIPPLRTSV

SEQ ID NO: 53128 - protein, 334 aa, Homo sapiens
  Payload ID: 10589
  Gene Symbol: MUC15
  Gene Name: mucin 15, cell surface associated
  Uniprot ID: Q8N387
  ENSP ID: ENSP00000397339
MLALAKILLISTLFYSLLSGSHGKENQDINTTQNIAEVFKTMENKPISLESEANLNSDKENITTSNLKASHSPPLNLPNNSHGITDFSSNSSAEHSLGSLKPTSTISTSPPLIHSFVSKVPWNAPIADEDLLPISAHPNATPALSSENFTWSLVNDTVKTPDNSSITVSILSSEPTSPSVTPLIVEPSGWLTTNSDSFTGFTPYQEKTTLQPTLKFTNNSKLFPNTSDPQKENRNTGIVFGAILGAILGVSLLTLVGYLLCGKRKTDSFSHRRLYDDRNEPVLRLDNAPEPYDVSFGNSSYYNPTLNDSAMPESEENARDGIPMDDIPPLRTSV

SEQ ID NO: 53129 - protein, 361 aa, Homo sapiens
  Payload ID: 10589
  Gene Symbol: MUC15
  Gene Name: mucin 15, cell surface associated
  ENSP ID: ENSP00000416753
MGIIQSILATSRDCYSFKKKPIPKKPTMLALAKILLISTLFYSLLSGSHGKENQDINTTQNIAEVFKTMENKPISLESEANLNSDKENITTSNLKASHSPPLNLPNNSHGITDFSSNSSAEHSLGSLKPTSTISTSPPLIHSFVSKVPWNAPIADEDLLPISAHPNATPALSSENFTWSLVNDTVKTPDNSSITVSILSSEPTSPSVTPLIVEPSGWLTTNSDSFTGFTPYQEKTTLQPTLKFTNNSKLFPNTSDPQKENRNTGIVFGAILGAILGVSLLTLVGYLLCGKRKTDSFSHRRLYDDRNEPVLRLDNAPEPYDVSFGNSSYYNPTLNDSAMPESEENARDGIPMDDIPPLRTSV

SEQ ID NO: 53130 - protein, 311 aa, Homo sapiens; identical to SEQ ID NO: 53127
  Payload ID: 10589
  Gene Symbol: MUC15
  Gene Name: mucin 15, cell surface associated
  ENSP ID: ENSP00000431945

SEQ ID NO: 53131 - protein, 361 aa, Homo sapiens; identical to SEQ ID NO: 53129
  Payload ID: 10589
  Gene Symbol: MUC15
  Gene Name: mucin 15, cell surface associated
  ENSP ID: ENSP00000431983

SEQ ID NO: 53132 - protein, 14507 aa, Homo sapiens
  Payload ID: 10590
  Gene Symbol: MUC16
  Gene Name: mucin 16, cell surface associated
  ENSP ID: ENSP00000381008
MLKPSGLPGSSSPTRSLMTGSRSTKATPEMDSGLTGATLSPKTSTGAIVVTEHTLPFTSPDKTLASPTSSVVGRTTQSLGVMSSALPESTSRGMTHSEQRTSPSLSPQVNGTPSRNYPATSMVSGLSSPRTRTSSTEGNFTKEASTYTLTVETTSGPVTEKYTVPTETSTTEGDSTETPWDTRYIPVKITSPMKTFADSTASKENAPVSMTPAETTVTDSHTPGRTNPSFGTLYSSFLDLSPKGTPNSRGETSLELILSTTGYPFSSPEPGSAGHSRISTSAPLSSSASVLDNKISETSIFSGQSLTSPLSPGVPEARASTMPNSAIPFSMTLSNAETSAERVRSTISSLGTPSISTKQTAETILTFHAFAETMDIPSTHIAKTLASEWLGSPGTLGGTSTSALTTTSPSTTLVSEETNTHHSTSGKETEGTLNTSMTPLETSAPGEESEMTATLVPTLGFTTLDSKIRSPSQVSSSHPTRELRTTGSTSGRQSSSTAAHGSSDILRATTSSTSKASSWTSESTAQQFSEPQHTQWVETSPSMKTERPPASTSVAAPITTSVPSVVSGFTTLKTSSTKGIWLEETSADTLIGESTAGPTTHQFAVPTGISMTGGSSTRGSQGTTHLLTRATASSETSADLTLATNGVPVSVSPAVSKTAAGSSPPGGTKPSYTMVSSVIPETSSLQSSAFREGTSLGLTPLNTRHPFSSPEPDSAGHTKISTSIPLLSSASVLEDKVSATSTFSHHKATSSITTGTPEISTKTKPSSAVLSSMTLSNAATSPERVRNATSPLTHPSPSGEETAGSVLTLSTSAETTDSPNIHPTGTLTSESSESPSTLSLPSVSGVKTTFSSSTPSTHLFTSGEETEETSNPSVSQPETSVSRVRTTLASTSVPTPVFPTMDTWPTRSAQFSSSHLVSELRATSSTSVTNSTGSALPKISHLTGTATMSQTNRDTFNDSAAPQSTTWPETSPRFKTGLPSATTTVSTSATSLSATVMVSKFTSPATSSMEATSIREPSTTILTTETTNGPGSMAVASTNIPIGKGYITEGRLDTSHLPIGTTASSETSMDFTMAKESVSMSVSPSQSMDAAGSSTPGRTSQFVDTFSDDVYHLTSREITIPRDGTSSALTPQMTATHPPSPDPGSARSTWLGILSSSPSSPTPKVTMSSTFSTQRVTTSMIMDTVETSRWNMPNLPSTTSLTPSNIPTSGAIGKSTLVPLDTPSPATSLEASEGGLPTLSTYPESTNTPSIHLGAHASSESPSTIKLTMASVVKPGSYTPLTFPSIETHIHVSTARMAYSSGSSPEMTAPGETNTGSTWDPTTYITTTDPKDTSSAQVSTPHSVRTLRTTENHPKTESATPAAYSGSPKISSSPNLTSPATKAWTITDTTEHSTQLHYTKLAEKSSGFETQSAPGPVSVVIPTSPTIGSSTLELTSDVPGEPLVLAPSEQTTITLPMATWLSTSLTEEMASTDLDISSPSSPMSTFAIFPPMSTPSHELSKSEADTSAIRNTDSTTLDQHLGIRSLGRTGDLTTVPITPLTTTWTSVIEHSTQAQDTLSATMSPTHVTQSLKDQTSIPASASPSHLTEVYPELGTQGRSSSEATTFWKPSTDTLSREIETGPTNIQSTPPMDNTTTGSSSSGVTLGIAHLPIGTSSPAETSTNMALERRSSTATVSMAGTMGLLVTSAPGRSISQSLGRVSSVLSESTTEGVTDSSKGSSPRLNTQGNTALSSSLEPSYAEGSQMSTSIPLTSSPTTPDVEFIGGSTFWTKEVTTVMTSDISKSSARTESSSATLMSTALGSTENTGKEKLRTASMDLPSPTPSMEVTPWISLTLSNAPNTTDSLDLSHGVHTSSAGTLATDRSLNTGVTRASRLENGSDTSSKSLSMGNSTHTSMTYTEKSEVSSSIHPRPETSAPGAETTLTSTPGNRAISLTLPFSSIPVEEVISTGITSGPDINSAPMTHSPITPPTIVWTSTGTIEQSTQPLHAVSSEKVSVQTQSTPYVNSVAVSASPTHENSVSSGSSTSSPYSSASLESLDSTISRRNAITSWLWDLTTSLPTTTWPSTSLSEALSSGHSGVSNPSSTTTEFPLFSAASTSAAKQRNPETETHGPQNTAASTLNTDASSVTGLSETPVGASISSEVPLPMAITSRSDVSGLTSESTANPSLGTASSAGTKLTRTISLPTSESLVSFRMNKDPWTVSIPLGSHPTTNTETSIPVNSAGPPGLSTVASDVIDTPSDGAESIPTVSFSPSPDTEVTTISHFPEKTTHSFRTISSLTHELTSRVTPIPGDWMSSAMSTKPTGASPSITLGERRTITSAAPTTSPIVLTASFTETSTVSLDNETTVKTSDILDARKTNELPSDSSSSSDLINTSIASSTMDVTKTASISPTSISGMTASSSPSLFSSDRPQVPTSTTETNTATSPSVSSNTYSLDGGSNVGGTPSTLPPFTITHPVETSSALLAWSRPVRTFSTMVSTDTASGENPTSSNSVVTSVPAPGTWTSVGSTTDLPAMGFLKTSPAGEAHSLLASTIEPATAFTPHLSAAVVTGSSATSEASLLTTSESKAIHSSPQTPTTPTSGANWETSATPESLLVVTETSDTTLTSKILVTDTILFSTVSTPPSKFPSTGTLSGASFPTLLPDTPAIPLTATEPTSSLATSFDSTPLVTIASDSLGTVPETTLTMSETSNGDALVLKTVSNPDRSIPGITIQGVTESPLHPSSTSPSKIVAPRNTTYEGSITVALSTLPAGTTGSLVFSQSSENSETTALVDSSAGLERASVMPLTTGSQGMASSGGIRSGSTHSTGTKTFSSLPLTMNPGEVTAMSEITTNRLTATQSTAPKGIPVKPTSAESGLLTPVSASSSPSKAFASLTTAPPTWGIPQSTLTFEFSEVPSLDTKSASLPTPGQSLNTIPDSDASTASSSLSKSPEKNPRARMMTSTKAISASSFQSTGFTETPEGSASPSMAGHEPRVPTSGTGDPRYASESMSYPDPSKASSAMTSTSLASKLTTLFSTGQAARSGSSSSPISLSTEKETSFLSPTASTSRKTSLFLGPSMARQPNILVHLQTSALTLSPTSTLNMSQEEPPELTSSQTIAEEEGTTAETQTLTFTPSETPTSLLPVSSPTEPTARRKSSPETWASSISVPAKTSLVETTDGTLVTTIKMSSQAAQGNSTWPAPAEETGSSPAGTSPGSPEMSTTLKIMSSKEPSISPEIRSTVRNSPWKTPETTVPMETTVEPVTLQSTALGSGSTSISHLPTGTTSPTKSPTENMLATERVSLSPSPPEAWTNLYSGTPGGTRQSLATMSSVSLESPTARSITGTGQQSSPELVSKTTGMEFSMWHGSTGGTTGDTHVSLSTSSNILEDPVTSPNSVSSLTDKSKHKTETWVSTTAIPSTVLNNKIMAAEQQTSRSVDEAYSSTSSWSDQTSGSDITLGASPDVTNTLYITSTAQTTSLVSLPSGDQGITSLTNPSGGKTSSASSVTSPSIGLETLRANVSAVKSDIAPTAGHLSQTSSPAEVSILDVTTAPTPGISTTITTMGTNSISTTTPNPEVGMSTMDSTPATERRTTSTEHPSTWSSTAASDSWTVTDMTSNLKVARSPGTISTMHTTSFLASSTELDSMSTPHGRITVIGTSLVTPSSDASAVKTETSTSERTLSPSDTTASTPISTFSRVQRMSISVPDILSTSWTPSSTEAEDVPVSMVSTDHASTKTDPNTPLSTFLFDSLSTLDWDTGRSLSSATATTSAPQGATTPQELTLETMISPATSQLPFSIGHITSAVTPAAMARSSGVTFSRPDPTSKKAEQTSTQLPTTTSAHPGQVPRSAATTLDVIPHTAKTPDATFQRQGQTALTTEARATSDSWNEKEKSTPSAPWITEMMNSVSEDTIKEVTSSSSVLRTLNTLDINLESGTTSSPSWKSSPYERIAPSESTTDKEAIHPSTNTVETTGWVTSSEHASHSTIPAHSASSKLTSPVVTTSTREQAIVSMSTTTWPESTRARTEPNSFLTIELRDVSPYMDTSSTTQTSIISSPGSTAITKGPRTEITSSKRISSSFLAQSMRSSDSPSEAITRLSNFPAMTESGGMILAMQTSPPGATSLSAPTLDTSATASWTGTPLATTQRFTYSEKTTLFSKGPEDTSQPSPPSVEETSSSSSLVPIHATTSPSNILLTSQGHSPSSTPPVTSVFLSETSGLGKTTDMSRISLEPGTSLPPNLSSTAGEALSTYEASRDTKAIHHSADTAVTNMEATSSEYSPIPGHTKPSKATSPLVTSHIMGDITSSTSVFGSSETTEIETVSSVNQGLQERSTSQVASSATETSTVITHVSSGDATTHVTKTQATFSSGTSISSPHQFITSTNTFTDVSTNPSTSLIMTESSGVTITTQTGPTGAATQGPYLLDTSTMPYLTETPLAVTPDFMQSEKTTLISKGPKDVSWTSPPSVAETSYPSSLTPFLVTTIPPATSTLQGQHTSSPVSATSVLTSGLVKTTDMLNTSMEPVTNSPQNLNNPSNEILATLAATTDIETIHPSINKAVTNMGTASSAHVLHSTLPVSSEPSTATSPMVPASSMGDALASISIPGSETTDIEGEPTSSLTAGRKENSTLQEMNSTTESNIILSNVSVGAITEATKMEVPSFDATFIPTPAQSTKFPDIFSVASSRLSNSPPMTISTHMTTTQTGSSGATSKIPLALDTSTLETSAGTPSVVTEGFAHSKITTAMNNDVKDVSQTNPPFQDEASSPSSQAPVLVTTLPSSVAFTPQWHSTSSPVSMSSVLTSSLVKTAGKVDTSLETVTSSPQSMSNTLDDISVTSAATTDIETTHPSINTVVTNVGTTGSAFESHSTVSAYPEPSKVTSPNVTTSTMEDTTISRSIPKSSKTTRTETETTSSLTPKLRETSISQEITSSTETSTVPYKELTGATTEVSRTDVTSSSSTSFPGPDQSTVSLDISTETNTRLSTSPIMTESAEITITTQTGPHGATSQDTFTMDPSNTTPQAGIHSAMTHGFSQLDVTTLMSRIPQDVSWTSPPSVDKTSSPSSFLSSPAMTTPSLISSTLPEDKLSSPMTSLLTSGLVKITDILRTRLEPVTSSLPNFSSTSDKILATSKDSKDTKEIFPSINTEETNVKANNSGHESHSPALADSETPKATTQMVITTTVGDPAPSTSMPVHGSSETTNIKREPTYFLTPRLRETSTSQESSFPTDTSFLLSKVPTGTITEVSSTGVNSSSKISTPDHDKSTVPPDTFTGEIPRVFTSSIKTKSAEMTITTQASPPESASHSTLPLDTSTTLSQGGTHSTVTQGFPYSEVTTLMGMGPGNVSWMTTPPVEETSSVSSLMSSPAMTSPSPVSSTSPQSIPSSPLPVTALPTSVLVTTTDVLGTTSPESVTSSPPNLSSITHERPATYKDTAHTEAAMHHSTNTAVTNVGTSGSGHKSQSSVLADSETSKATPLMSTTSTLGDTSVSTSTPNISQTNQIQTEPTASLSPRLRESSTSEKTSSTTETNTAFSYVPTGAITQASRTEISSSRTSISDLDRPTIAPDISTGMITRLFTSPIMTKSAEMTVTTQTTTPGATSQGILPWDTSTTLFQGGTHSTVSQGFPHSEITTLRSRTPGDVSWMTTPPVEETSSGFSLMSPSMTSPSPVSSTSPESIPSSPLPVTALLTSVLVTTTNVLGTTSPEPVTSSPPNLSSPTQERLTTYKDTAHTEAMHASMHTNTAVANVGTSISGHESQSSVPADSHTSKATSPMGITFAMGDTSVSTSTPAFFETRIQTESTSSLIPGLRDTRTSEEINTVTETSTVLSEVPTTTTTEVSRTEVITSSRTTISGPDHSKMSPYISTETITRLSTFPFVTGSTEMAITNQTGPIGTISQATLTLDTSSTASWEGTHSPVTQRFPHSEETTTMSRSTKGVSWQSPPSVEETSSPSSPVPLPAITSHSSLYSAVSGSSPTSALPVTSLLTSGRRKTIDMLDTHSELVTSSLPSASSFSGEILTSEASTNTETIHFSENTAETNMGTTNSMHKLHSSVSIHSQPSGHTPPKVTGSMMEDAIVSTSTPGSPETKNVDRDSTSPLTPELKEDSTALVMNSTTESNTVFSSVSLDAATEVSRAEVTYYDPTFMPASAQSTKSPDISPEASSSHSNSPPLTISTHKTIATQTGPSGVTSLGQLTLDTSTIATSAGTPSARTQDFVDSETTSVMNNDLNDVLKTSPFSAEEANSLSSQAPLLVTTSPSPVTSTLQEHSTSSLVSVTSVPTPTLAKITDMDTNLEPVTRSPQNLRNTLATSEATTDTHTMHPSINTAVANVGTTSSPNEFYFTVSPDSDPYKATSAVVITSTSGDSIVSTSMPRSSAMKKIESETTFSLIFRLRETSTSQKIGSSSDTSTVFDKAFTAATTEVSRTELTSSSRTSIQGTEKPTMSPDTSTRSVTMLSTFAGLTKSEERTIATQTGPHRATSQGTLTWDTSITTSQAGTHSAMTHGFSQLDLSTLTSRVPEYISGTSPPSVEKTSSSSSLLSLPAITSPSPVPTTLPESRPSSPVHLTSLPTSGLVKTTDMLASVASLPPNLGSTSHKIPTTSEDIKDTEKMYPSTNIAVTNVGTTTSEKESYSSVPAYSEPPKVTSPMVTSFNIRDTIVSTSMPGSSEITRIEMESTFSLAHGLKGTSTSQDPIVSTEKSAVLHKLTTGATETSRTEVASSRRTSIPGPDHSTESPDISTEVIPSLPISLGITESSNMTIITRTGPPLGSTSQGTFTLDTPTTSSRAGTHSMATQEFPHSEMTTVMNKDPEILSWTIPPSIEKTSFSSSLMPSPAMTSPPVSSTLPKTIHTTPSPMTSLLTPSLVMTTDTLGTSPEPTTSSPPNLSSTSHEILTTDEDTTAIEAMHPSTSTAATNVETTSSGHGSQSSVLADSEKTKATAPMDTTSTMGHTTVSTSMSVSSETTKIKRESTYSLTPGLRETSISQNASFSTDTSIVLSEVPTGTTAEVSRTEVTSSGRTSIPGPSQSTVLPEISTRTMTRLFASPTMTESAEMTIPTQTGPSGSTSQDTLTLDTSTTKSQAKTHSTLTQRFPHSEMTTLMSRGPGDMSWQSSPSLENPSSLPSLLSLPATTSPPPISSTLPVTISSSPLPVTSLLTSSPVTTTDMLHTSPELVTSSPPKLSHTSDERLTTGKDTTNTEAVHPSTNTAASNVEIPSSGHESPSSALADSETSKATSPMFITSTQEDTTVAISTPHFLETSRIQKESISSLSPKLRETGSSVETSSAIETSAVLSEVSIGATTEISRTEVTSSSRTSISGSAESTMLPEISTTRKIIKFPTSPILAESSEMTIKTQTSPPGSTSESTFTLDTSTTPSLVITHSTMTQRLPHSEITTLVSRGAGDVPRPSSLPVEETSPPSSQLSLSAMISPSPVSSTLPASSHSSSASVTSLLTPGQVKTTEVLDASAEPETSSPPSLSSTSVEILATSEVTTDTEKIHPFSNTAVTKVGTSSSGHESPSSVLPDSETTKATSAMGTISIMGDTSVSTLTPALSNTRKIQSEPASSLTTRLRETSTSEETSLATEANTVLSKVSTGATTEVSRTEAISFSRTSMSGPEQSTMSQDISIGTIPRISASSVLTESAKMTITTQTGPSESTLESTLNLNTATTPSWVETHSIVIQGFPHPEMTTSMGRGPGGVSWPSPPFVKETSPPSSPLSLPAVTSPHPVSTTFLAHIPPSPLPVTSLLTSGPATTTDILGTSTEPGTSSSSSLSTTSHERLTTYKDTAHTEAVHPSTNTGGTNVATTSSGYKSQSSVLADSSPMCTTSTMGDTSVLTSTPAFLETRRIQTELASSLTPGLRESSGSEGTSSGTKMSTVLSKVPTGATTEISKEDVTSIPGPAQSTISPDISTRTVSWFSTSPVMTESAEITMNTHTSPLGATTQGTSTLDTSSTTSLTMTHSTISQGFSHSQMSTLMRRGPEDVSWMSPPLLEKTRPSFSLMSSPATTSPSPVSSTLPESISSSPLPVTSLLTSGLAKTTDMLHKSSEPVTNSPANLSSTSVEILATSEVTTDTEKTHPSSNRTVTDVGTSSSGHESTSFVLADSQTSKVTSPMVITSTMEDTSVSTSTPGFFETSRIQTEPTSSLTLGLRKTSSSEGTSLATEMSTVLSGVPTGATAEVSRTEVTSSSRTSISGFAQLTVSPETSTETITRLPTSSIMTESAEMMIKTQTDPPGSTPESTHTVDISTTPNWVETHSTVTQRFSHSEMTTLVSRSPGDMLWPSQSSVEETSSASSLLSLPATTSPSPVSSTLVEDFPSASLPVTSLLNPGLVITTDRMGISREPGTSSTSNLSSTSHERLTTLEDTVDTEDMQPSTHTAVTNVRTSISGHESQSSVLSDSETPKATSPMGTTYTMGETSVSISTSDFFETSRIQIEPTSSLTSGLRETSSSERISSATEGSTVLSEVPSGATTEVSRTEVISSRGTSMSGPDQFTISPDISTEAITRLSTSPIMTESAESAITIETGSPGATSEGTLTLDTSTTTFWSGTHSTASPGFSHSEMTTLMSRTPGDVPWPSLPSVEEASSVSSSLSSPAMTSTSFFSTLPESISSSPHPVTALLTLGPVKTTDMLRTSSEPETSSPPNLSSTSAEILATSEVTKDREKIHPSSNTPVVNVGTVIYKHLSPSSVLADLVTTKPTSPMATTSTLGNTSVSTSTPAFPETMMTQPTSSLTSGLREISTSQETSSATERSASLSGMPTGATTKVSRTEALSLGRTSTPGPAQSTISPEISTETITRISTPLTTTGSAEMTITPKTGHSGASSQGTFTLDTSSRASWPGTHSAATHRSPHSGMTTPMSRGPEDVSWPSRPSVEKTSPPSSLVSLSAVTSPSPLYSTPSESSHSSPLRVTSLFTPVMMKTTDMLDTSLEPVTTSPPSMNITSDESLATSKATMETEAIQLSENTAVTQMGTISARQEFYSSYPGLPEPSKVTSPVVTSSTIKDIVSTTIPASSEITRIEMESTSTLTPTPRETSTSQEIHSATKPSTVPYKALTSATIEDSMTQVMSSSRGPSPDQSTMSQDISTEVITRLSTSPIKTESTEMTITTQTGSPGATSRGTLTLDTSTTFMSGTHSTASQGFSHSQMTALMSRTPGDVPWLSHPSVEEASSASFSLSSPVMTSSSPVSSTLPDSIHSSSLPVTSLLTSGLVKTTELLGTSSEPETSSPPNLSSTSAEILAITEVTTDTEKLEMTNVVTSGYTHESPSSVLADSVTTKATSSMGITYPTGDTNVLTSTPAFSDTSRIQTKSKLSLTPGLMETSISEETSSATEKSTVLSSVPTGATTEVSRTEAISSSRTSIPGPAQSTMSSDTSMETITRISTPLTRKESTDMAITPKTGPSGATSQGTFTLDSSSTASWPGTHSATTQRFPQSVVTTPMSRGPEDVSWPSPLSVEKNSPPSSLVSSSSVTSPSPLYSTPSGSSHSSPVPVTSLFTSIMMKATDMLDASLEPETTSAPNMNITSDESLAASKATTETEAIHVFENTAASHVETTSATEELYSSSPGFSEPTKVISPVVTSSSIRDNMVSTTMPGSSGITRIEIESMSSLTPGLRETRTSQDITSSTETSTVLYKMPSGATPEVSRTEVMPSSRTSIPGPAQSTMSLDISDEVVTRLSTSPIMTESAEITITTQTGYSLATSQVTLPLGTSMTFLSGTHSTMSQGLSHSEMTNLMSRGPESLSWTSPRFVETTRSSSSLTSLPLTTSLSPVSSTLLDSSPSSPLPVTSLILPGLVKTTEVLDTSSEPKTSSSPNLSSTSVEIPATSEIMTDTEKIHPSSNTAVAKVRTSSSVHESHSSVLADSETTITIPSMGITSAVDDTTVFTSNPAFSETRRIPTEPTFSLTPGFRETSTSEETTSITETSAVLYGVPTSATTEVSMTEIMSSNRIHIPDSDQSTMSPDIITEVITRLSSSSMMSESTQMTITTQKSSPGATAQSTLTLATTTAPLARTHSTVPPRFLHSEMTTLMSRSPENPSWKSSLFVEKTSSSSSLLSLPVTTSPSVSSTLPQSIPSSSFSVTSLLTPGMVKTTDTSTEPGTSLSPNLSGTSVEILAASEVTTDTEKIHPSSSMAVTNVGTTSSGHELYSSVSIHSEPSKATYPVGTPSSMAETSISTSMPANFETTGFEAEPFSHLTSGFRKTNMSLDTSSVTPTNTPSSPGSTHLLQSSKTDFTSSAKTSSPDWPPASQYTEIPVDIITPFNASPSITESTGITSFPESRFTMSVTESTHHLSTDLLPSAETISTGTVMPSLSEAMTSFATTGVPRAISGSGSPFSRTESGPGDATLSTIAESLPSSTPVPFSSSTFTTTDSSTIPALHEITSSSATPYRVDTSLGTESSTTEGRLVMVSTLDTSSQPGRTSSSPILDTRMTESVELGTVTSAYQVPSLSTRLTRTDGIMEHITKIPNEAAHRGTIRPVKGPQTSTSPASPKGLHTGGTKRMETTTTALKTTTTALKTTSRATLTTSVYTPTLGTLTPLNASMQMASTIPTEMMITTPYVFPDVPETTSSLATSLGAETSTALPRTTPSVFNRESETTASLVSRSGAERSPVIQTLDVSSSEPDTTASWVIHPAETIPTVSKTTPNFFHSELDTVSSTATSHGADVSSAIPTNISPSELDALTPLVTISGTDTSTTFPTLTKSPHETETRTTWLTHPAETSSTIPRTIPNFSHHESDATPSIATSPGAETSSAIPIMTVSPGAEDLVTSQVTSSGTDRNMTIPTLTLSPGEPKTIASLVTHPEAQTSSAIPTSTISPAVSRLVTSMVTSLAAKTSTTNRALTNSPGEPATTVSLVTHPAQTSPTVPWTTSIFFHSKSDTTPSMTTSHGAESSSAVPTPTVSTEVPGVVTPLVTSSRAVISTTIPILTLSPGEPETTPSMATSHGEEASSAIPTPTVSPGVPGVVTSLVTSSRAVTSTTIPILTFSLGEPETTPSMATSHGTEAGSAVPTVLPEVPGMVTSLVASSRAVTSTTLPTLTLSPGEPETTPSMATSHGAEASSTVPTVSPEVPGVVTSLVTSSSGVNSTSIPTLILSPGELETTPSMATSHGAEASSAVPTPTVSPGVSGVVTPLVTSSRAVTSTTIPILTLSSSEPETTPSMATSHGVEASSAVLTVSPEVPGMVTSLVTSSRAVTSTTIPTLTISSDEPETTTSLVTHSEAKMISAIPTLAVSPTVQGLVTSLVTSSGSETSAFSNLTVASSQPETIDSWVAHPGTEASSVVPTLTVSTGEPFTNISLVTHPAESSSTLPRTTSRFSHSELDTMPSTVTSPEAESSSAISTTISPGIPGVLTSLVTSSGRDISATFPTVPESPHESEATASWVTHPAVTSTTVPRTTPNYSHSEPDTTPSIATSPGAEATSDFPTITVSPDVPDMVTSQVTSSGTDTSITIPTLTLSSGEPETTTSFITYSETHTSSAIPTLPVSPGASKMLTSLVISSGTDSTTTFPTLTETPYEPETTAIQLIHPAETNTMVPRTTPKFSHSKSDTTLPVAITSPGPEASSAVSTTTISPDMSDLVTSLVPSSGTDTSTTFPTLSETPYEPETTATWLTHPAETSTTVSGTIPNFSHRGSDTAPSMVTSPGVDTRSGVPTTTIPPSIPGVVTSQVTSSATDTSTAIPTLTPSPGEPETTASSATHPGTQTGFTVPIRTVPSSEPDTMASWVTHPPQTSTPVSRTTSSFSHSSPDATPVMATSPRTEASSAVLTTISPGAPEMVTSQITSSGAATSTTVPTLTHSPGMPETTALLSTHPRTETSKTFPASTVFPQVSETTASLTIRPGAETSTALPTQTTSSLFTLLVTGTSRVDLSPTASPGVSAKTAPLSTHPGTETSTMIPTSTLSLGLLETTGLLATSSSAETSTSTLTLTVSPAVSGLSSASITTDKPQTVTSWNTETSPSVTSVGPPEFSRTVTGTTMTLIPSEMPTPPKTSHGEGVSPTTILRTTMVEATNLATTGSSPTVAKTTTTFNTLAGSLFTPLTTPGMSTLASESVTSRTSYNHRSWISTTSSYNRRYWTPATSTPVTSTFSPGISTSSIPSSTAATVPFMVPFTLNFTITNLQYEEDMRHPGSRKFNATERELQGLLKPLFRNSSLEYLYSGCRLASLRPEKDSSATAVDAICTHRPDPEDLGLDRERLYWELSNLTNGIQELGPYTLDRNSLYVNGFTHRSSMPTTSTPGTSTVDVGTSGTPSSSPSPTTAGPLLMPFTLNFTITNLQYEEDMRRTGSRKFNTMESVLQGLLKPLFKNTSVGPLYSGCRLTLLRPEKDGAATGVDAICTHRLDPKSPGLNREQLYWELSKLTNDIEELGPYTLDRNSLYVNGFTHQSSVSTTSTPGTSTVDLRTSGTPSSLSSPTIMAAGPLLVPFTLNFTITNLQYGEDMGHPGSRKFNTTERVLQGLLGPIFKNTSVGPLYSGCRLTSLRSEKDGAATGVDAICIHHLDPKSPGLNRERLYWELSQLTNGIKELGPYTLDRNSLYVNGFTHRTSVPTSSTPGTSTVDLGTSGTPFSLPSPATAGPLLVLFTLNFTITNLKYEEDMHRPGSRKFNTTERVLQTLLGPMFKNTSVGLLYSGCRLTLLRSEKDGAATGVDAICTHRLDPKSPGVDREQLYWELSQLTNGIKELGPYTLDRNSLYVNGFTHWIPVPTSSTPGTSTVDLGSGTPSSLPSPTTAGPLLVPFTLNFTITNLKYEEDMHCPGSRKFNTTERVLQSLLGPMFKNTSVGPLYSGCRLTLLRSEKDGAATGVDAICTHRLDPKSPGVDREQLYWELSQLTNGIKELGPYTLDRNSLYVNGFTHQTSAPNTSTPGTSTVDLGTSGTPSSLPSPTSAGPLLVPFTLNFTITNLQYEEDMHHPGSRKFNTTERVLQGLLGPMFKNTSVGLLYSGCRLTLLRPEKNGAATGMDAICSHRLDPKSPGLNREQLYWELSQLTHGIKELGPYTLDRNSLYVNGFTHRSSVAPTSTPGTSTVDLGTSGTPSSLPSPTTAVPLLVPFTLNFTITNLQYGEDMRHPGSRKFNTTERVLQGLLGPLFKNSSVGPLYSGCRLISLRSEKDGAATGVDAICTHHLNPQSPGLDREQLYWQLSQMTNGIKELGPYTLDRNSLYVNGFTHRSSGLTTSTPWTSTVDLGTSGTPSPVPSPTTTGPLLVPFTLNFTITNLQYEENMGHPGSRKFNITESVLQGLLKPLFKSTSVGPLYSGCRLTLLRPEKDGVATRVDAICTHRPDPKIPGLDRQQLYWELSQLTHSITELGPYTLDRDSLYVNGFTQRSSVPTTSTPGTFTVQPETSETPSSLPGPTATGPVLLPFTLNFTITNLQYEEDMRRPGSRKFNTTERVLQGLLMPLFKNTSVSSLYSGCRLTLLRPEKDGAATRVDAVCTHRPDPKSPGLDRERLYWKLSQLTHGITELGPYTLDRHSLYVNGFTHQSSMTTTRTPDTSTMHLATSRTPASLSGPMTASPLLVLFTINFTITNLRYEENMHHPGSRKFNTTERVLQGLLRPVFKNTSVGPLYSGCRLTLLRPKKDGAATKVDAICTYRPDPKSPGLDREQLYWELSQLTHSITELGPYTLDRDSLYVNGFTQRSSVPTTSIPGTPTVDLGTSGTPVSKPGPSAASPLLVLFTLNFTITNLRYEENMQHPGSRKFNTTERVLQGLLRSLFKSTSVGPLYSGCRLTLLRPEKDGTATGVDAICTHHPDPKSPRLDREQLYWELSQLTHNITELGPYALDNDSLFVNGFTHRSSVSTTSTPGTPTVYLGASKTPASIFGPSAASHLLILFTLNFTITNLRYEENMWPGSRKFNTTERVLQGLLRPLFKNTSVGPLYSGCRLTLLRPEKDGEATGVDAICTHRPDPTGPGLDREQLYLELSQLTHSITELGPYTLDRDSLYVNGFTHRSSVPTTSTGVVSEEPFTLNFTINNLRYMADMGQPGSLKFNITDNVMQHLLSPLFQRSSLGARYTGCRVIALRSVKNGAETRVDLLCTYLQPLSGPGLPIKQVFHELSQQTHGITRLGPYSLDKDSLYLNGYNEPGPDEPPTTPKPATTFLPPLSEATTAMGYHLKTLTLNFTISNLQYSPDMGKGSATFNSTEGVLQHLLRPLFQKSSMGPFYLGCQLISLRPEKDGAATGVDTTCTYHPDPVGPGLDIQQLYWELSQLTHGVTQLGFYVLDRDSLFINGYAPQNLSIRGEYQINFHIVNWNLSNPDPTSSEYITLLRDIQDKVTTLYKGSQLHDTFRFCLVTNLTMDSVLVTVKALFSSNLDPSLVEQVFLDKTLNASFHWLGSTYQLVDIHVTEMESSVYQPTSSSSTQHFYLNFTITNLPYSQDKAQPGTTNYQRNKRNIEDALNQLFRNSSIKSYFSDCQVSTFRSVPNRHHTGVDSLCNFSPLARRVDRVAIYEEFLRMTRNGTQLQNFTLDRSSVLVDGYSPNRNEPLTGNSDLPFWAVILIGLAGLLGVITCLICGVLVTTRRRKKEGEYNVQQQCPGYYQSHLDLEDLQ

SEQ ID NO: 53133 - protein, 1224 aa, Homo sapiens
  Payload ID: 10590
  Gene Symbol: MUC16
  Gene Name: mucin 16, cell surface associated
  ENSP ID: ENSP00000470885
  MOD_RES (1)..(1): Any amino acid
XTGPLLVPFTLNFTITNLQYEENMGHPGSRKFNITESVLQGLLKPLFKSTSVGPLYSGCRLTLLRPEKDGVATRVDAICTHRPDPKIPGLDRQQLYWELSQLTHSITELGPYTLDRDSLYVNGFTQRSSVPTTSTPGTFTVQPETSETPSSLPGPTATGPVLLPFTLNFTITNLQYEEDMRRPGSRKFNTTERVLQGLLMPLFKNTSVSSLYSGCRLTLLRPEKDGAATRVDAVCTHRPDPKSPGLDRERLYWKLSQLTHGITELGPYTLDRHSLYVNGFTHQSSMTTTRTPDTSTMHLATSRTPASLSGPMTASPLLVLFTINFTITNLRYEENMHHPGSRKFNTTERVLQGLLRPVFKNTSVGPLYSGCRLTLLRPKKDGAATKVDAICTYRPDPKSPGLDREQLYWELSQLTHSITELGPYTLDRDSLYVNGFTQRSSVPTTSIPGTPTVDLGTSGTPVSKPGPSAASPLLVLFTLNFTITNLRYEENMQHPGSRKFNTTERVLQGLLRSLFKSTSVGPLYSGCRLTLLRPEKDGTATGVDAICTHHPDPKSPRLDREQLYWELSQLTHNITELGPYALDNDSLFVNGFTHRSSVSTTSTASHLLILFTLNFTITNLRYEENMWPGSRKFNTTERVLQGLLRPLFKNTSVGPLYSGCRLTLLRPEKDGEATGVDAICTHRPDPTGPGLDREQLYLELSQLTHSITELGPYTLDRDSLYVNGFTHRSSVPTTSTGVVSEEPFTLNFTINNLRYMADMGQPGSLKFNITDNVMQHLLSPLFQRSSLGARYTGCRVIALRSVKNGAETRVDLLCTYLQPLSGPGLPIKQVFHELSQQTHGITRLGPYSLDKDSLYLNGYNEPGPDEPPTTPKPATTFLPPLSEATTAMGYHLKTLTLNFTISNLQYSPDMGKGSATFNSTEGVLQHLLRPLFQKSSMGPFYLGCQLISLRPEKDGAATGVDTTCTYHPDPVGPGLDIQQLYWELSQLTHGVTQLGFYVLDRDSLFINGYAPQNLSIRGEYQINFHIVNWNLSNPDPTSSEYITLLRDIQDKVTTLYKGSQLHDTFRFCLVTNLTMDSVLVTVKALFSSNLDPSLVEQVFLDKTLNASFHWLGSTYQLVDIHVTEMESSVYQPTSSSSTQHFYLNFTITNLPYSQDKAQPGTTNYQRNKRNIEDAVRRGCSTNSSETAASRVIFLTVKFQHSGLSPTGTTPGWTPCVTSRHWLGE

SEQ ID NO: 53134 - protein, 1330 aa, Homo sapiens
  Payload ID: 10590
  Gene Symbol: MUC16
  Gene Name: mucin 16, cell surface associated
  ENSP ID: ENSP00000472781
  MOD_RES (1)..(1): Any amino acid
XTGPLLVPFTLNFTITNLQYEENMGHPGSRKFNITESVLQGLLKPLFKSTSVGPLYSGCRLTLLRPEKDGVATRVDAICTHRPDPKIPGLDRQQLYWELSQLTHSITELGPYTLDRDSLYVNGFTQRSSVPTTSTPGTFTVQPETSETPSSLPGPTATGPVLLPFTLNFTITNLQYEEDMRRPGSRKFNTTERVLQGLLMPLFKNTSVSSLYSGCRLTLLRPEKDGAATRVDAVCTHRPDPKSPGLDRERLYWKLSQLTHGITELGPYTLDRHSLYVNGFTHQSSMTTTRTPDTSTMHLATSRTPASLSGPMTASPLLVLFTINFTITNLRYEENMHHPGSRKFNTTERVLQGLLRPVFKNTSVGPLYSGCRLTLLRPKKDGAATKVDAICTYRPDPKSPGLDREQLYWELSQLTHSITELGPYTLDRDSLYVNGFTQRSSVPTTSIPGTPTVDLGTSGTPVSKPGPSAASPLLVLFTLNFTITNLRYEENMQHPGSRKFNTTERVLQGLLRSLFKSTSVGPLYSGCRLTLLRPEKDGTATGVDAICTHHPDPKSPRLDREQLYWELSQLTHNITELGPYALDNDSLFVNGFTHRSSVSTTSTPGTPTVYLGASKTPASIFGPSAASHLLILFTLNFTITNLRYEENMWPGSRKFNTTERVLQGLLRPLFKNTSVGPLYSGCRLTLLRPEKDGEATGVDAICTHRPDPTGPGLDREQLYLELSQLTHSITELGPYTLDRDSLYVNGFTHRSSVPTTSTGVVSEEPFTLNFTINNLRYMADMGQPGSLKFNITDNVMQHLLSPLFQRSSLGARYTGCRVIALRSVKNGAETRVDLLCTYLQPLSGPGLPIKQVFHELSQQTHGITRLGPYSLDKDSLYLNGYNEPGPDEPPTTMGYHLKTLTLNFTISNLQYSPDMGKGSATFNSTEGVLQHLLRPLFQKSSMGPFYLGCQLISLRPEKDGAATGVDTTCTYHPDPVGPGLDIQQLYWELSQLTHGVTQLGFYVLDRDSLFINGYAPQNLSIRGEYQINFHIVNWNLSNPDPTSSEYITLLRDIQDKVTTLYKGSQLHDTFRFCLVTNLTMDSVLVTVKALFSSNLDPSLVEQVFLDKTLNASFHWLGSTYQLVDIHVTEMESSVYQPTSSSSTQHFYLNFTITNLPYSQDKAQPGTTNYQRNKRNIEDALNQLFRNSSIKSYFSDCQVSTFRSVPNRHHTGVDSLCNFSPLARRVDRVAIYEEFLRMTRNGTQLQNFTLDRSSVLVDGYSPNRNEPLTGNSDLPFWAVILIGLAGLLGVITCLICGVLVTTRRRKKEGEYNVQQQCPGYYQSHLDLEDLQ

SEQ ID NO: 53135 - protein, 670 aa, Homo sapiens
  Payload ID: 10590
  Gene Symbol: MUC16
  Gene Name: mucin 16, cell surface associated
  ENSP ID: ENSP00000472883
  MOD_RES (1)..(1): Any amino acid
XPEKDGAATRVDAVCTHRPDPKSPGLDRERLYWKLSQLTHGITELGPYTLDRHSLYVNGFTHQSSMTTTRTPDTSTMHLATSRTPASLSGPMTASPLLVLFTINFTITNLRYEENMHHPGSRKFNTTERVLQGLLRPVFKNTSVGPLYSGCRLTLLRPKKDGAATKVDAICTYRPDPKSPGLDREQLYWELSQLTHSITELGPYTLDRDSLYVNGFTQRSSVPTTSIPGTPTVDLGTSGTPVSKPGPSAASPLLVLFTLNFTITNLRYEENMQHPGSRKFNTTERVLQGLLRSLFKSTSVGPLYSGCRLTLLRPEKDGTATGVDAICTHHPDPKSPRLDREQLYWELSQLTHNITELGPYALDNDSLFVNGFTHRSSVSTTSTPGTPTVYLGASKTPASIFGPSAASHLLILFTLNFTITNLRYEENMWPGSRKFNTTERVLQGLLRPLFKNTSVGPLYSGCRLTLLRPEKDGEATGVDAICTHRPDPTGPGLDREQLYLELSQLTHSITELGPYTLDRDSLYVNGFTHRSSVPTTSTGVVSEEPFTLNFTINNLRYMADMGQPGSLKFNITDNVMQHLLSPLFQRSSLGARYTGCRVIALRSVKNGAETRVDLLCTYLQPLSGPGLPIKQVFHELSQQTHGITRLGPYSLDKDSLYLNGHHTLQRQSTT

SEQ ID NO: 53136 - protein, 4493 aa, Homo sapiens
  Payload ID: 10591
  Gene Symbol: MUC17
  Gene Name: mucin 17, cell surface associated
  Uniprot ID: Q685J3
  ENSP ID: ENSP00000302716
MPRPGTMALCLLTLVLSLLPPQAAAEQDLSVNRAVWDGGGCISQGDVLNRQCQQLSQHVRTGSAANTATGTTSTNVVEPRMYLSCSTNPEMTSIESSVTSDTPGVSSTRMTPTESRTTSESTSDSTTLFPSSTEDTSSPTTPEGTDVPMSTPSEESISSTMAFVSTAPLPSFEAYTSLTYKVDMSTPLTTSTQASSSPTTPESTTIPKSTNSEGSTPLTSMPASTMKVASSEAITLLTTPVEISTPVTISAQASSSPTTAEGPSLSNSAPSGGSTPLTRMPLSVMLVVSSEASTLSTTPAATNIPVITSTEASSSPTTAEGTSIPTSTYTEGSTPLTSTPASTMPVATSEMSTLSITPVDTSTLVTTSTEPSSLPTTAEATSMLTSTLSEGSTPLTNMPVSTILVASSEASTTSTIPVDSKTFVTTASEASSSPTTAEDTSIATSTPSEGSTPLTSMPVSTTPVASSEASNLSTTPVDSKTQVTTSTEASSSPPTAEVNSMPTSTPSEGSTPLTSMSVSTMPVASSEASTLSTTPVDTSTPVTTSSEASSSSTTPEGTSIPTSTPSEGSTPLTNMPVSTRLVVSSEASTTSTTPADSNTFVTTSSEASSSSTTAEGTSMPTSTYSERGTTITSMSVSTTLVASSEASTLSTTPVDSNTPVTTSTEATSSSTTAEGTSMPTSTYTEGSTPLTSMPVNTTLVASSEASTLSTTPVDTSTPVTTSTEASSSPTTADGASMPTSTPSEGSTPLTSMPVSKTLLTSSEASTLSTTPLDTSTHITTSTEASCSPTTTEGTSMPISTPSEGSPLLTSIPVSITPVTSPEASTLSTTPVDSNSPVTTSTEVSSSPTPAEGTSMPTSTYSEGRTPLTSMPVSTTLVATSAISTLSTTPVDTSTPVTNSTEARSSPTTSEGTSMPTSTPGEGSTPLTSMPDSTTPVVSSEARTLSATPVDTSTPVTTSTEATSSPTTAEGTSIPTSTPSEGTTPLTSTPVSHTLVANSEASTLSTTPVDSNTPLTTSTEASSPPPTAEGTSMPTSTPSEGSTPLTRMPVSTTMVASSETSTLSTTPADTSTPVTTYSQASSSSTTADGTSMPTSTYSEGSTPLTSVPVSTRLVVSSEASTLSTTPVDTSIPVTTSTEASSSPTTAEGTSIPTSPPSEGTTPLASMPVSTTLVVSSEANTLSTTPVDSKTQVATSTEASSPPPTAEVTSMPTSTPGERSTPLTSMPVRHTPVASSEASTLSTSPVDTSTPVTTSAETSSSPTTAEGTSLPTSTTSEGSTLLTSIPVSTTLVTSPEASTLLTTPVDTKGPVVTSNEVSSSPTPAEGTSMPTSTYSEGRTPLTSIPVNTTLVASSAISILSTTPVDNSTPVTTSTEACSSPTTSEGTSMPNSNPSEGTTPLTSIPVSTTPVVSSEASTLSATPVDTSTPGTTSAEATSSPTTAEGISIPTSTPSEGKTPLKSIPVSNTPVANSEASTLSTTPVDSNSPVVTSTAVSSSPTPAEGTSIAISTPSEGSTALTSIPVSTTTVASSEINSLSTTPAVTSTPVTTYSQASSSPTTADGTSMQTSTYSEGSTPLTSLPVSTMLVVSSEANTLSTTPIDSKTQVTASTEASSSTTAEGSSMTISTPSEGSPLLTSIPVSTTPVASPEASTLSTTPVDSNSPVITSTEVSSSPTPAEGTSMPTSTYTEGRTPLTSITVRTTPVASSAISTLSTTPVDNSTPVTTSTEARSSPTTSEGTSMPNSTPSEGTTPLTSIPVSTTPVLSSEASTLSATPIDTSTPVTTSTEATSSPTTAEGTSIPTSTLSEGMTPLTSTPVSHTLVANSEASTLSTTPVDSNSPVVTSTAVSSSPTPAEGTSIATSTPSEGSTALTSIPVSTTTVASSETNTLSTTPAVTSTPVTTYAQVSSSPTTADGSSMPTSTPREGRPPLTSIPVSTTTVASSEINTLSTTLADTRTPVTTYSQASSSPTTADGTSMPTPAYSEGSTPLTSMPLSTTLVVSSEASTLSTTPVDTSTPATTSTEGSSSPTTAGGTSIQTSTPSERTTPLAGMPVSTTLVVSSEGNTLSTTPVDSKTQVTNSTEASSSATAEGSSMTISAPSEGSPLLTSIPLSTTPVASPEASTLSTTPVDSNSPVITSTEVSSSPIPTEGTSMQTSTYSDRRTPLTSMPVSTTVVASSAISTLSTTPVDTSTPVTNSTEARSSPTTSEGTSMPTSTPSEGSTPFTSMPVSTMPVVTSEASTLSATPVDTSTPVTTSTEATSSPTTAEGTSIPTSTLSEGTTPLTSIPVSHTLVANSEVSTLSTTPVDSNTPFTTSTEASSPPPTAEGTSMPTSTSSEGNTPLTRMPVSTTMVASFETSTLSTTPADTSTPVTTYSQAGSSPTTADDTSMPTSTYSEGSTPLTSVPVSTMPVVSSEASTHSTTPVDTSTPVTTSTEASSSPTTAEGTSIPTSPPSEGTTPLASMPVSTTPVVSSEAGTLSTTPVDTSTPMTTSTEASSSPTTAEDIVVPISTASEGSTLLTSIPVSTTPVASPEASTLSTTPVDSNSPVVTSTEISSSATSAEGTSMPTSTYSEGSTPLRSMPVSTKPLASSEASTLSTTPVDTSIPVTTSTETSSSPTTAKDTSMPISTPSEVSTSLTSILVSTMPVASSEASTLSTTPVDTRTLVTTSTGTSSSPTTAEGSSMPTSTPGERSTPLTNILVSTTLLANSEASTLSTTPVDTSTPVTTSAEASSSPTTAEGTSMRISTPSDGSTPLTSILVSTLPVASSEASTVSTTAVDTSIPVTTSTEASSSPTTAEVTSMPTSTPSETSTPLTSMPVNHTPVASSEAGTLSTTPVDTSTPVTTSTKASSSPTTAEGIVVPISTASEGSTLLTSIPVSTTPVASSEASTLSTTPVDTSIPVTTSTEGSSSPTTAEGTSMPISTPSEVSTPLTSILVSTVPVAGSEASTLSTTPVDTRTPVTTSAEASSSPTTAEGTSMPISTPGERRTPLTSMSVSTMPVASSEASTLSRTPADTSTPVTTSTEASSSPTTAEGTGIPISTPSEGSTPLTSIPVSTTPVAIPEASTLSTTPVDSNSPVVTSTEVSSSPTPAEGTSMPISTYSEGSTPLTGVPVSTTPVTSSAISTLSTTPVDTSTPVTTSTEAHSSPTTSEGTSMPTSTPSEGSTPLTYMPVSTMLVVSSEDSTLSATPVDTSTPVTTSTEATSSTTAEGTSIPTSTPSEGMTPLTSVPVSNTPVASSEASILSTTPVDSNTPLTTSTEASSSPPTAEGTSMPTSTPSEGSTPLTSMPVSTTTVASSETSTLSTTPADTSTPVTTYSQASSSPPIADGTSMPTSTYSEGSTPLTNMSFSTTPVVSSEASTLSTTPVDTSTPVTTSTEASLSPTTAEGTSIPTSSPSEGTTPLASMPVSTTPVVSSEVNTLSTTPVDSNTLVTTSTEASSSPTIAEGTSLPTSTTSEGSTPLSIMPLSTTPVASSEASTLSTTPVDTSTPVTTSSPTNSSPTTAEVTSMPTSTAGEGSTPLTNMPVSTTPVASSEASTLSTTPVDSNTFVTSSSQASSSPATLQVTTMRMSTPSEGSSSLTTMLLSSTYVTSSEASTPSTPSVDRSTPVTTSTQSNSTPTPPEVITLPMSTPSEVSTPLTIMPVSTTSVTISEAGTASTLPVDTSTPVITSTQVSSSPVTPEGTTMPIWTPSEGSTPLTTMPVSTTRVTSSEGSTLSTPSVVTSTPVTTSTEAISSSATLDSTTMSVSMPMEISTLGTTILVSTTPVTRFPESSTPSIPSVYTSMSMTTASEGSSSPTTLEGTTTMPMSTTSERSTLLTTVLISPISVMSPSEASTLSTPPGDTSTPLLTSTKAGSFSIPAEVTTIRISITSERSTPLTTLLVSTTLPTSFPGASIASTPPLDTSTTFTPSTDTASTPTIPVATTISVSVITEGSTPGTTIFIPSTPVTSSTADVFPATTGAVSTPVITSTELNTPSTSSSSTTTSFSTTKEFTTPAMTTAAPLTYVTMSTAPSTPRTTSRGCTTSASTLSATSTPHTSTSVTTRPVTPSSESSRPSTITSHTIPPTFPPAHSSTPPTTSASSTTVNPEAVTTMTTRTKPSTRTTSFPTVTTTAVPTNTTIKSNPTSTPTVPRTTTCFGDGCQNTASRCKNGGTWDGLKCQCPNLYYGELCEEVVSSIDIGPPETISAQMELTVTVTSVKFTEELKNHSSQEFQEFKQTFTEQMNIVYSGIPEYVGVNITKLRLGSVVVEHDVLLRTKYTPEYKTVLDNATEVVKEKITKVTTQQIMINDICSDMMCFNTTGTQVQNITVTQYDPEEDCRKMAKEYGDYFVVEYRDQKPYCISPCEPGFSVSKNCNLGKCQMSLSGPQCLCVTTETHWYSGETCNQGTQKSLVYGLVGAGVVLMLIILVALLMLVFRSKREVKRQKYRLSQLYKWQEEDSGPAPGTFQNIGFDICQDDDSIHLESIYSNFQPSLRHIDPETKIRIQRPQVMTTSF

SEQ ID NO: 53137 - protein, 4262 aa, Homo sapiens
  Payload ID: 10591
  Gene Symbol: MUC17
  Gene Name: mucin 17, cell surface associated
  ENSP ID: ENSP00000368751
MPRPGTMALCLLTLVLSLLPPQAAAEQDLSVNRAVWDGGGCISQGDVLNRQCQQLSQHVRTGSAANTATGTTSTNVVEPRMYLSCSTNPEMTSIESSVTSDTPGVSSTRMTPTESRTTSESTSDSTTLFPSSTEDTSSPTTPEGTDVPMSTPSEESISSTMAFVSTAPLPSFEAYTSLTYKVDMSTPLTTSTQASSSPTTPESTTIPKSTNSEGSTPLTSMPASTMKVASSEAITLLTTPVEISTPVTISAQASSSPTTAEGPSLSNSAPSGGSTPLTRMPLSVMLVVSSEASTLSTTPAATNIPVITSTEASSSPTTAEGTSIPTSTYTEGSTPLTSTPASTMPVATSEMSTLSITPVDTSTLVTTSTEPSSLPTTAEATSMLTSTLSEGSTPLTNMPVSTILVASSEASTTSTIPVDSKTFVTTASEASSSPTTAEDTSIATSTPSEGSTPLTSMPVSTTPVASSEASNLSTTPVDSKTQVTTSTEASSSPPTAEVNSMPTSTPSEGSTPLTSMSVSTMPVASSEASTLSTTPVDTSTPVTTSSEASSSSTTPEGTSIPTSTPSEGSTPLTNMPVSTRLVVSSEASTTSTTPADSNTFVTTSSEASSSSTTAEGTSMPTSTYSERGTTITSMSVSTTLVASSEASTLSTTPVDSNTPVTTSTEATSSSTTAEGTSMPTSTYTEGSTPLTSMPVNTTLVASSEASTLSTTPVDTSTPVTTSTEASSSPTTADGASMPTSTPSEGSTPLTSMPVSKTLLTSSEASTLSTTPLDTSTHITTSTEASCSPTTTEGTSMPISTPSEGSPLLTSIPVSITPVTSPEASTLSTTPVDSNSPVTTSTEVSSSPTPAEGTSMPTSTYSEGRTPLTSMPVSTTLVATSAISTLSTTPVDTSTPVTNSTEARSSPTTSEGTSMPTSTPGEGSTPLTSMPDSTTPVVSSEARTLSATPVDTSTPVTTSTEATSSPTTAEGTSIPTSTPSEGTTPLTSTPVSHTLVANSEASTLSTTPVDSNTPLTTSTEASSPPPTAEGTSMPTSTPSEGSTPLTRMPVSTTMVASSETSTLSTTPADTSTPVTTYSQASSSSTTADGTSMPTSTYSEGSTPLTSVPVSTRLVVSSEASTLSTTPVDTSIPVTTSTEASSSPTTAEGTSIPTSPPSEGTTPLASMPVSTTLVVSSEANTLSTTPVDSKTQVATSTEASSPPPTAEVTSMPTSTPGERSTPLTSMPVRHTPVASSEASTLSTSPVDTSTPVTTSAETSSSPTTAEGTSLPTSTTSEGSTLLTSIPVSTTLVTSPEASTLLTTPVDTKGPVVTSNEVSSSPTPAEGTSMPTSTYSEGRTPLTSIPVNTTLVASSAISILSTTPVDNSTPVTTSTEACSSPTTSEGTSMPNSNPSEGTTPLTSIPVSTTPVVSSEASTLSATPVDTSTPGTTSAEATSSPTTAEGISIPTSTPSEGKTPLKSIPVSNTPVANSEASTLSTTPVDSNSPVVTSTAVSSSPTPAEGTSIAISTPSEGSTALTSIPVSTTTVASSEINSLSTTPAVTSTPVTTYSQASSSPTTADGTSMQTSTYSEGSTPLTSLPVSTMLVVSSEANTLSTTPIDSKTQVTASTEASSSTTAEGSSMTISTPSEGSPLLTSIPVSTTPVASPEASTLSTTPVDSNSPVITSTEVSSSPTPAEGTSMPTSTYTEGRTPLTSITVRTTPVASSAISTLSTTPVDNSTPVTTSTEARSSPTTSEGTSMPNSTPSEGTTPLTSIPVSTTPVLSSEASTLSATPIDTSTPVTTSTEATSSPTTAEGTSIPTSTLSEGMTPLTSTPVSHTLVANSEASTLSTTPVDSNSPVVTSTAVSSSPTPAEGTSIATSTPSEGSTALTSIPVSTTTVASSETNTLSTTPAVTSTPVTTYAQVSSSPTTADGSSMPTSTPREGRPPLTSIPVSTTTVASSEINTLSTTLADTRTPVTTYSQASSSPTTADGTSMPTPAYSEGSTPLTSMPLSTTLVVSSEASTLSTTPVDTSTPATTSTEGSSSPTTAGGTSIQTSTPSERTTPLAGMPVSTTLVVSSEGNTLSTTPVDSKTQVTNSTEASSSATAEGSSMTISAPSEGSPLLTSIPLSTTPVASPEASTLSTTPVDSNSPVITSTEVSSSPIPTEGTSMQTSTYSDRRTPLTSMPVSTTVVASSAISTLSTTPVDTSTPVTNSTEARSSPTTSEGTSMPTSTPSEGSTPFTSMPVSTMPVVTSEASTLSATPVDTSTPVTTSTEATSSPTTAEGTSIPTSTLSEGTTPLTSIPVSHTLVANSEVSTLSTTPVDSNTPFTTSTEASSPPPTAEGTSMPTSTSSEGNTPLTRMPVSTTMVASFETSTLSTTPADTSTPVTTYSQAGSSPTTADDTSMPTSTYSEGSTPLTSVPVSTMPVVSSEASTHSTTPVDTSTPVTTSTEASSSPTTAEGTSIPTSPPSEGTTPLASMPVSTTPVVSSEAGTLSTTPVDTSTPMTTSTEASSSPTTAEDIVVPISTASEGSTLLTSIPVSTTPVASPEASTLSTTPVDSNSPVVTSTEISSSATSAEGTSMPTSTYSEGSTPLRSMPVSTKPLASSEASTLSTTPVDTSIPVTTSTETSSSPTTAKDTSMPISTPSEVSTSLTSILVSTMPVASSEASTLSTTPVDTRTLVTTSTGTSSSPTTAEGSSMPTSTPGERSTPLTNILVSTTLLANSEASTLSTTPVDTSTPVTTSAEASSSPTTAEGTSMRISTPSDGSTPLTSILVSTLPVASSEASTVSTTAVDTSIPVTTSTEASSSPTTAEVTSMPTSTPSETSTPLTSMPVNHTPVASSEAGTLSTTPVDTSTPVTTSTKASSSPTTAEGIVVPISTASEGSTLLTSIPVSTTPVASSEASTLSTTPVDTSIPVTTSTEGSSSPTTAEGTSMPISTPSEVSTPLTSILVSTVPVAGSEASTLSTTPVDTRTPVTTSAEASSSPTTAEGTSMPISTPGERRTPLTSMSVSTMPVASSEASTLSRTPADTSTPVTTSTEASSSPTTAEGTGIPISTPSEGSTPLTSIPVSTTPVAIPEASTLSTTPVDSNSPVVTSTEVSSSPTPAEGTSMPISTYSEGSTPLTGVPVSTTPVTSSAISTLSTTPVDTSTPVTTSTEAHSSPTTSEGTSMPTSTPSEGSTPLTYMPVSTMLVVSSEDSTLSATPVDTSTPVTTSTEATSSTTAEGTSIPTSTPSEGMTPLTSVPVSNTPVASSEASILSTTPVDSNTPLTTSTEASSSPPTAEGTSMPTSTPSEGSTPLTSMPVSTTTVASSETSTLSTTPADTSTPVTTYSQASSSPPIADGTSMPTSTYSEGSTPLTNMSFSTTPVVSSEASTLSTTPVDTSTPVTTSTEASLSPTTAEGTSIPTSSPSEGTTPLASMPVSTTPVVSSEVNTLSTTPVDSNTLVTTSTEASSSPTIAEGTSLPTSTTSEGSTPLSIMPLSTTPVASSEASTLSTTPVDTSTPVTTSSPTNSSPTTAEVTSMPTSTAGEGSTPLTNMPVSTTPVASSEASTLSTTPVDSNTFVTSSSQASSSPATLQVTTMRMSTPSEGSSSLTTMLLSSTYVTSSEASTPSTPSVDRSTPVTTSTQSNSTPTPPEVITLPMSTPSEVSTPLTIMPVSTTSVTISEAGTASTLPVDTSTPVITSTQVSSSPVTPEGTTMPIWTPSEGSTPLTTMPVSTTRVTSSEGSTLSTPSVVTSTPVTTSTEAISSSATLDSTTMSVSMPMEISTLGTTILVSTTPVTRFPESSTPSIPSVYTSMSMTTASEGSSSPTTLEGTTTMPMSTTSERSTLLTTVLISPISVMSPSEASTLSTPPGDTSTPLLTSTKAGSFSIPAEVTTIRISITSERSTPLTTLLVSTTLPTSFPGASIASTPPLDTSTTFTPSTDTASTPTIPVATTISVSVITEGSTPGTTIFIPSTPVTSSTADVFPATTGAVSTPVITSTELNTPSTSSSSTTTSFSTTKEFTTPAMTTAAPLTYVTMSTAPSTPRTTSRGCTTSASTLSATSTPHTSTSVTTRPVTPSSESSRPSTITSHTIPPTFPPAHSSTPPTTSASSTTVNPEAVTTMTTRTKPSTRTTSFPTVTTTAVPTNTTIKSNPTSTPTVPRTTTCFGDGCQNTASRCKNGGTWDGLKCQCPNLYYGELCEEVVSSIDIGPPETISAQMELTVTVTSVKFTEELKNHSSQEFQEFKQTFTEQMNIVYSGIPEYVGVNITKLRHDVFQHHWHPSAKHYGDPVRP

SEQ ID NO: 53138 - protein, 1779 aa, Homo sapiens
  Payload ID: 10592
  Gene Symbol: MUC2
  Gene Name: mucin 2, oligomeric mucus/gel-forming
  ENSP ID: ENSP00000478743
MGLPLARLAAVCLALSLAGGSELQTEGRTRNHGHNVCSTWGNFHYKTFDGDVFRFPGLCDYNFASDCRGSYKEFAVHLKRGPGQAEAPAGVESILLTIKDDTIYLTRHLAVLNGAVVSTPHYSPGLLIEKSDAYTKVYSRAGLTLMWNREDALMLELDTKFRNHTCGLCGDYNGLQSYSEFLSDGVLFSPLEFGNMQKINQPDVVCEDPEEEVAPASCSEHRAECERLLTAEAFADCQDLVPLEPYLRACQQDRCRCPGGDTCVCSTVAEFSRQCSHAGGRPGNWRTATLCPKTCPGNLVYLESGSPCMDTCSHLEVSSLCEEHRMDGCFCPEGTVYDDIGDSGCVPVSQCHCRLHGHLYTPGQEITNDCEQCVCNAGRWVCKDLPCPGTCALEGGSHITTFDGKTYTFHGDCYYVLAKGDHNDSYALLGELAPCGSTDKQTCLKTVVLLADKKKNVVVFKSDGSVLLNELQVNLPHVTASFSVFRPSSYHIMVSMAIGVRLQVQLAPVMQLFVTLDQASQGQVQGLCGNFNGLEGDDFKTASGLVEATGAGFANTWKAQSSCHDKLDWLDDPCSLNIESANYAEHWCSLLKKTETPFGRCHSAVDPAEYYKRCKYDTCNCQNNEDCLCAALSSYARACTAKGVMLWGWREHVCNKDVGSCPNSQVFLYNLTTCQQTCRSLSEADSHCLEGFAPVDGCGCPDHTFLDEKGRCVPLAKCSCYHRGLYLEAGDVVVRQEERCVCRDGRLHCRQIRLIGQSCTAPKIHMDCSNLTALATSKPRALSCQTLAAGYYHTECVSGCVCPDGLMDDGRGGCVVEKECPCVHNNDLYSSGAKIKVDCNTCTCKRGRWVCTQAVCHGTCSIYGSGHYITFDGKYYDFDGHCSYVAVQDYCGQNSSLGSFSIITENVPCGTTGVTCSKAIKIFMGRTELKLEDKHRVVIQRDEGHHVAYTTREVGQYLVVESSTGIIVIWDKRTTVFIKLAPSYKGTVCGLCGNFDHRSNNDFTTRDHMVVSSELDFGNSWKEAPTCPDVSTNPEPCSLNPHRRSWAEKQCSILKSSVFSICHSKVDPKPFYEACVHDSCSCDTGGDCECFCSAVASYAQECTKEGACVFWRTPDLCPIFCDYYNPPHECEWHYEPCGNRSFETCRTINGIHSNISVSYLEGCYPRCPKDRPIYEEDLKKCVTADKCGCYVEDTHYPPGASVPTEETCKSCVCTNSSQVVCRPEEGKILNQTQDGAFCYWEICGPNGTVEKHFNICSITTRPSTLTTFTTITLPTTPTTFTTTTTTTTPTSSTVLSTTPKLCCLWSDWINEDHPSSGSDDGDRETFDGVCGAPEDIECRSVKDPHLSLEQLGQKVQCDVSVGFICKNEDQFGNGPFGLCYDYKIRVNCCWPMDKCITTPSPPTTTPSPPPTSTTTLPPTTTPSPPTTTTTTPPPTTTPSPPITTTTTPPPTTTPSPPISTTTTPPPTTTPSPPTTTPSPPTTTPSPPTTTTTTPPPTTTPSPPTTTPITPPASTTTLPPTTTPSPPTTTTTTPPPTTTPITTTTTVTPTPTPTGTQTPTTTPITTTTTVTPTPTPTGTQTPTSTPITTTTTTPTPTAITTTTTVTPTPTPTGTQTPTTTPITTTTTVTPTPTPTGTQSPTPTAITTTTTVTPTPTPTGTQTPTSTPITTTTTVTPTPTPTGTQTPTPTPISTTTTVTPTPTPTGTQTPTTTPITTTTTVTPTPTPTGTQTPTTTPTPTSTKSTTVTPITTTTTVTATPTPTGTQTPTMIPISTTTTVTP

SEQ ID NO: 53139 - protein, 131 aa, Homo sapiens
  Payload ID: 10592
  Gene Symbol: MUC2
  Gene Name: mucin 2, oligomeric mucus/gel-forming
  ENSP ID: ENSP00000481861
FDGLYYSYQGNCTYVLVEEISPSVDNFGVYIDNYHCDPNDKVSCPRTLIVRHETQEVLIKTVHMMPMQVQVQVNRQAVALPYKKYGLEVYQSGINYVVDIPELGVLVSYNGLSFSVRLPYHRFGNNTKGQC

SEQ ID NO: 53140 - protein, 2817 aa, Homo sapiens
  Payload ID: 10592
  Gene Symbol: MUC2
  Gene Name: mucin 2, oligomeric mucus/gel-forming
  ENSP ID: ENSP00000486476
MGLPLARLAAVCLALSLAGGSELQTEGRTRNHGHNVCSTWGNFHYKTFDGDVFRFPGLCDYNFASDCRGSYKEFAVHLKRGPGQAEAPAGVESILLTIKDDTIYLTRHLAVLNGAVVSTPHYSPGLLIEKSDAYTKVYSRAGLTLMWNREDALMLELDTKFRNHTCGLCGDYNGLQSYSEFLSDGVLFSPLEFGNMQKINQPDVVCEDPEEEVAPASCSEHRAECERLLTAEAFADCQDLVPLEPYLRACQQDRCRCPGGDTCVCSTVAEFSRQCSHAGGRPGNWRTATLCPKTCPGNLVYLESGSPCMDTCSHLEVSSLCEEHRMDGCFCPEGTVYDDIGDSGCVPVSQCHCRLHGHLYTPGQEITNDCEQCVCNAGRWVCKDLPCPGTCALEGGSHITTFDGKTYTFHGDCYYVLAKGDHNDSYALLGELAPCGSTDKQTCLKTVVLLADKKKNVVVFKSDGSVLLNELQVNLPHVTASFSVFRPSSYHIMVSMAIGVRLQVQLAPVMQLFVTLDQASQGQVQGLCGNFNGLEGDDFKTASGLVEATGAGFANTWKAQSSCHDKLDWLDDPCSLNIESANYAEHWCSLLKKTETPFGRCHSAVDPAEYYKRCKYDTCNCQNNEDCLCAALSSYARACTAKGVMLWGWREHVCNKDVGSCPNSQVFLYNLTTCQQTCRSLSEADSHCLEGFAPVDGCGCPDHTFLDEKGRCVPLAKCSCYHRGLYLEAGDVVVRQEERCVCRDGRLHCRQIRLIGQSCTAPKIHMDCSNLTALATSKPRALSCQTLAAGYYHTECVSGCVCPDGLMDDGRGGCVVEKECPCVHNNDLYSSGAKIKVDCNTCTCKRGRWVCTQAVCHGTCSIYGSGHYITFDGKYYDFDGHCSYVAVQDYCGQNSSLGSFSIITENVPCGTTGVTCSKAIKIFMGRTELKLEDKHRVVIQRDEGHHVAYTTREVGQYLVVESSTGIIVIWDKRTTVFIKLAPSYKGTVCGLCGNFDHRSNNDFTTRDHMVVSSELDFGNSWKEAPTCPDVSTNPEPCSLNPHRRSWAEKQCSILKSSVFSICHSKVDPKPFYEACVHDSCSCDTGGDCECFCSAVASYAQECTKEGACVFWRTPDLCPIFCDYYNPPHECEWHYEPCGNRSFETCRTINGIHSNISVSYLEGCYPRCPKDRPIYEEDLKKCVTADKCGCYVEDTHYPPGASVPTEETCKSCVCTNSSQVVCRPEEGKILNQTQDGAFCYWEICGPNGTVEKHFNICSITTRPSTLTTFTTITLPTTPTTFTTTTTTTTPTSSTVLSTTPKLCCLWSDWINEDHPSSGSDDGDRETFDGVCGAPEDIECRSVKDPHLSLEQLGQKVQCDVSVGFICKNEDQFGNGPFGLCYDYKIRVNCCWPMDKCITTPSPPTTTPSPPPTSTTTLPPTTTPSPPTTTTTTPPPTTTPSPPITTTTTPPPTTTPSPPISTTTTPPPTTTPSPPTTTPSPPTTTPSPPTTTTTTPPPTTTPSPPTTTPITPPASTTTLPPTTTPSPPTTTTTTPPPTTTPITTTTTVTPTPTPTGTQTPTTTPITTTTTVTPTPTPTGTQTPTSTPITTTTTVTPTPTPTGTQTPTTTPITTTTTVTPTPTPTGTQTPTPTAITTTTTVTPTPTPTGTQTPTTTPITTTTTVTPTPTPTGTQSPTPTAITTTTTVTPTPTPTGTQTPTSTPITTTTTVTPTPTPTGTQTPTPTPISTTTTVTPTPTPTGTQTPTTTPITTTTTVTPTPTPTGTQTPTTVLITTTTTMTPTPTPTSTKSTTVTPITTTTTVTATPTPTGTQTPTMIPISTTTTVTPTPTPTTGSTGPPTHTSTAPIAELTTSNPPPESSTPQTSRSTSSPLTESTTLLSTLPPAIEMTSTAPPSTPTAPTTTSGGHTLSPPPSTTTSPPGTPTRGTTTGSSSAPTPSTVQTTTTSAWTPTPTPLSTPSIIRTTGLRPYPSSVLICCVLNDTYYAPGEEVYNGTYGDTCYFVNCSLSCTLEFYNWSCPSTPSPTPTPSKSTPTPSKPSSTPSKPTPGTKPPECPDFDPPRQENETWWLCDCFMATCKYNNTVEIVKVECEPPPMPTCSNGLQPVRVEDPDGCCWHWECDCYCTGWGDPHYVTFDGLYYSYQGNCTYVLVEEISPSVDNFGVYIDNYHCDPNDKVSCPRTLIVRHETQEVLIKTVHMMPMQVQVQVNRQAVALPYKKYGLEVYQSGINYVVDIPELGVLVSYNGLSFSVRLPYHRFGNNTKGQCGTCTNTTSDDCILPSGEIVSNCEAAADQWLVNDPSKPHCPHSSSTTKRPAVTVPGGGKTTPHKDCTPSPLCQLIKDSLFAQCHALVPPQHYYDACVFDSCFMPGSSLECASLQAYAALCAQQNICLDWRNHTHGACLVECPSHREYQACGPAEEPTCKSSSSQQNNTVLVEGCFCPEGTMNYAPGFDVCVKTCGCVGPDNVPREFGEHFEFDCKNCVCLEGGSGIICQPKRCSQKPVTHCVEDGTYLATEVNPADTCCNITVCKCNTSLCKEKPSVCPLGFEVKSKMVPGRCCPFYWCESKGVCVHGNAEYQPGSPVYSSKCQDCVCTDKVDNNTLLNVIACTHVPCNTSCSPGFELMEAPGECCKKCEQTHCIIKRPDNQHVILKPGDFKSDPKNNCTFFSCVKIHNQLISSVSNITCPNFDASICIPGSITFMPNGCCKTCTPRNETRVPCSTVPVTTEVSYAGCTKTVLMNHCSGSCGTFVMYSAKAQALDHSCSCCKEEKTSQREVVLSCPNGGSLTHTYTHIESCQCQDTVCGLPTGTSRRARRSPRHLGSG

SEQ ID NO: 53141 - protein, 538 aa, Homo sapiens
  Payload ID: 10593
  Gene Symbol: MUC20
  Gene Name: mucin 20, cell surface associated
  ENSP ID: ENSP00000325431
MGCLWGLALPLFFFCWEVGVSGSSAGPSTRRADTAMTTDDTEVPAMTLAPGHAALETQTLSAETSSRASTPAGPIPEAETRGAKRISPARETRSFTKTSPNFMVLIATSVETSAASGSPEGAGMTTVQTITGSDPREAIFDTLCTDDSSEEAKTLTMDILTLAHTSTEAKGLSSESSASSDSPHPVITPSRASESSASSDGPHPVITPSRASESSASSDGPHPVITPSWSPGSDVTLLAEALVTVTNIEVINCSITEIETTTSSIPGASDTDLIPTEGVKASSTSDPPALPDSTEAKPHITEVTASAETLSTAGTTESAAPDATVGTPLPTNSATEREVTAPGATTLSGALVTVSRNPLEETSALSVETPSYVKVSGAAPVSIEAGSAVGKTTSFAGSSASSYSPSEAALKNFTPSETPTMDIATKGPFPTSRDPLPSVPPTTTNSSRGTNSTLAKITTSAKTTMKPPTATPTTARTRPTTDVSAGENGGFLLLRLSVASPEDLTDPRVAERLMQQLHRELHAHAPHFQVSLLRVRRG

SEQ ID NO: 53142 - protein, 723 aa, Homo sapiens
  Payload ID: 10593
  Gene Symbol: MUC20
  Gene Name: mucin 20, cell surface associated
  ENSP ID: ENSP00000396774
MGCLWGLALPLFFFCWEVGVSGSSAGPSTRRADTAMTTDDTEVPAMTLAPGHAALETQTLSAETSSRASTPAGPIPEAETRGAKRISPARETRSFTKTSPNFMVLIATSVETSAASGSPEGAGMTTVQTITGSDPREAIFDTLCTDDSSEEAKTLTMDILTLAHTSTEAKGLSSESSASSDSPHPVITPSRASESSASSDGPHPVITPSRASESSASSDGPHPVITPSRASESSASSDGPHPVITPSRASESSASSDGPHPVITPSRASESSASSDGPHPVITPSRASESSASSDGPHPVITPSRASESSASSDGPHPVITPSRASESSASSDGPHPVITPSRASESSASSDGLHPVITPSRASESSASSDGPHPVITPSRASESSASSDGPHPVITPSWSPGSDVTLLAEALVTVTNIEVINCSITEIETTTSSIPGASDTDLIPTEGVKASSTSDPPALPDSTEAKPHITEVTASAETLSTAGTTESAAPDATVGTPLPTNSATEREVTAPGATTLSGALVTVSRNPLEETSALSVETPSYVKVSGAAPVSIEAGSAVGKTTSFAGSSASSYSPSEAALKNFTPSETPTMDIATKGPFPTSRDPLPSVPPTTTNSSRGTNSTLAKITTSAKTTMKPPTATPTTARTRPTTDVSAGENGGFLLLRLSVASPEDLTDPRVAERLMQQMERSLALSPRLECSGVISAHCKLHLLGSRDSPASAS

SEQ ID NO: 53143 - protein, 128 aa, Homo sapiens
  Payload ID: 10593
  Gene Symbol: MUC20
  Gene Name: mucin 20, cell surface associated
  ENSP ID: ENSP00000397774
  MOD_RES (1)..(1): Any amino acid
XPTMDIATKGPFPTSRDPLPSVPPTTTNSSRGTNSTLAKITTSAKTTMKPPTATPTTARTRPTTDVSAGENGGFLLLRLSVASPEDLTDPRVAERLMQQLMTQGTHSAHVPSMVGVNPLPIVPGGFQH

SEQ ID NO: 53144 - protein, 674 aa, Homo sapiens
  Payload ID: 10593
  Gene Symbol: MUC20
  Gene Name: mucin 20, cell surface associated
  Uniprot ID: Q8N307
  ENSP ID: ENSP00000405629
MTTDDTEVPAMTLAPGHAALETQTLSAETSSRASTPAGPIPEAETRGAKRISPARETRSFTKTSPNFMVLIATSVETSAASGSPEGAGMTTVQTITGSDPREAIFDTLCTDDSSEEAKTLTMDILTLAHTSTEAKGLSSESSASSDSPHPVITPSRASESSASSDGPHPVITPSRASESSASSDGPHPVITPSRASESSASSDGPHPVITPSRASESSASSDGPHPVITPSRASESSASSDGPHPVITPSRASESSASSDGPHPVITPSRASESSASSDGPHPVITPSRASESSASSDGPHPVITPSRASESSASSDGLHPVITPSRASESSASSDGPHPVITPSRASESSASSDGPHPVITPSWSPGSDVTLLAEALVTVTNIEVINCSITEIETTTSSIPGASDTDLIPTEGVKASSTSDPPALPDSTEAKPHITEVTASAETLSTAGTTESAAPDATVGTPLPTNSATEREVTAPGATTLSGALVTVSRNPLEETSALSVETPSYVKVSGAAPVSIEAGSAVGKTTSFAGSSASSYSPSEAALKNFTPSETPTMDIATKGPFPTSRDPLPSVPPTTTNSSRGTNSTLAKITTSAKTTMKPPTATPTTARTRPTTDVSAGENGGFLLLRLSVASPEDLTDPRVAERLMQQLHRELHAHAPHFQVSLLRVRRG

SEQ ID NO: 53145 - protein, 709 aa, Homo sapiens
  Payload ID: 10593
  Gene Symbol: MUC20
  Gene Name: mucin 20, cell surface associated
  Uniprot ID: Q8N307
  ENSP ID: ENSP00000414350
MGCLWGLALPLFFFCWEVGVSGSSAGPSTRRADTAMTTDDTEVPAMTLAPGHAALETQTLSAETSSRASTPAGPIPEAETRGAKRISPARETRSFTKTSPNFMVLIATSVETSAASGSPEGAGMTTVQTITGSDPREAIFDTLCTDDSSEEAKTLTMDILTLAHTSTEAKGLSSESSASSDSPHPVITPSRASESSASSDGPHPVITPSRASESSASSDGPHPVITPSRASESSASSDGPHPVITPSRASESSASSDGPHPVITPSRASESSASSDGPHPVITPSRASESSASSDGPHPVITPSRASESSASSDGPHPVITPSRASESSASSDGPHPVITPSRASESSASSDGLHPVITPSRASESSASSDGPHPVITPSRASESSASSDGPHPVITPSWSPGSDVTLLAEALVTVTNIEVINCSITEIETTTSSIPGASDTDLIPTEGVKASSTSDPPALPDSTEAKPHITEVTASAETLSTAGTTESAAPDATVGTPLPTNSATEREVTAPGATTLSGALVTVSRNPLEETSALSVETPSYVKVSGAAPVSIEAGSAVGKTTSFAGSSASSYSPSEAALKNFTPSETPTMDIATKGPFPTSRDPLPSVPPTTTNSSRGTNSTLAKITTSAKTTMKPPTATPTTARTRPTTDVSAGENGGFLLLRLSVASPEDLTDPRVAERLMQQLHRELHAHAPHFQVSLLRVRRG

SEQ ID NO: 53146 - protein, 503 aa, Homo sapiens
  Payload ID: 10593
  Gene Symbol: MUC20
  Gene Name: mucin 20, cell surface associated
  ENSP ID: ENSP00000478544
MTTDDTEVPAMTLAPGHAALETQTLSAETSSRASTPAGPIPEAETRGAKRISPARETRSFTKTSPNFMVLIATSVETSAASGSPEGAGMTTVQTITGSDPREAIFDTLCTDDSSEEAKTLTMDILTLAHTSTEAKGLSSESSASSDSPHPVITPSRASESSASSDGPHPVITPSRASESSASSDGPHPVITPSWSPGSDVTLLAEALVTVTNIEVINCSITEIETTTSSIPGASDTDLIPTEGVKASSTSDPPALPDSTEAKPHITEVTASAETLSTAGTTESAAPDATVGTPLPTNSATEREVTAPGATTLSGALVTVSRNPLEETSALSVETPSYVKVSGAAPVSIEAGSAVGKTTSFAGSSASSYSPSEAALKNFTPSETPTMDIATKGPFPTSRDPLPSVPPTTTNSSRGTNSTLAKITTSAKTTMKPPTATPTTARTRPTTDVSAGENGGFLLLRLSVASPEDLTDPRVAERLMQQLHRELHAHAPHFQVSLLRVRRG

SEQ ID NO: 53147 - protein, 709 aa, Homo sapiens; identical to SEQ ID NO: 53145
  Payload ID: 10593
  Gene Symbol: MUC20
  Gene Name: mucin 20, cell surface associated
  Uniprot ID: Q8N307
  ENSP ID: ENSP00000479182

SEQ ID NO: 53148 - protein, 503 aa, Homo sapiens
  Payload ID: 10593
  Gene Symbol: MUC20
  Gene Name: mucin 20, cell surface associated
  ENSP ID: ENSP00000479454
MTTDDTEVPAMTLAPGHAALETQTLSAETSSRASTPAGPIPEAETRGAKRISPARETRSFTKTSPNFMVLIATSVETSAASGSPEGAGMTTVQTITGSDPEEAIFDTLCTDDSSEEAKTLTMDILTLAHTSTEAKGLSSESSASSDGPHPVITPSRASESSASSDGPHPVITPSRASESSASSDGPHPVITPSWSPGSDVTLLAEALVTVTNIEVINCSITEIETTTSSIPGASDIDLIPTEGVKASSTSDPPALPDSTEAKPHITEVTASAETLSTAGTTESAAPHATVGTPLPTNSATEREVTAPGATTLSGALVTVSRNPLEETSALSVETPSYVKVSGAAPVSIEAGSAVGKTTSFAGSSASSYSPSEAALKNFTPSETPTMDIATKGPFPTSRDPLPSVPPTTTNSSRGTNSTLAKITTSAKTTMKPPTATPTTARTRPTTDVSAGENGGFLLLRLSVASPEDLTDPRVAERLMQQLHRELHAHAPHFQVSLLRVRRG

SEQ ID NO: 53149 - protein, 709 aa, Homo sapiens; identical to SEQ ID NO: 53145
  Payload ID: 10593
  Gene Symbol: MUC20
  Gene Name: mucin 20, cell surface associated
  Uniprot ID: Q8N307
  ENSP ID: ENSP00000479947

SEQ ID NO: 53150 - protein, 555 aa, Homo sapiens
  Payload ID: 10593
  Gene Symbol: MUC20
  Gene Name: mucin 20, cell surface associated
  ENSP ID: ENSP00000480568
MGCLWGLALPLFFFCWEVGVSGSSAGPSTRRADTAMTTDDTEVPAMTLAPGHAALETQTLSAETSSRASTPAGPVPEAETRGSKRISPARETRSFTKTSPNFMVLIATSVETSAASGSPEGAGMTTVQTITGSDPEEAIFDTLCTDDSSEEAKTLTMDILTLAHTSTEAKGLSSESSASSDGPHPVITPSRASESSASSDGPHPVITPSRASESSASSDGPHPVITPSRASESSASSDGPHPVITPSWSPGSDVTLLAEALVTVTNIEVINCSITEIETTTSSIPGASDTDPIPTEGVKASSTSDPPALPDSTEAKPHITEVTASAETLSTAGTTESAAPDATIGTPLPTNSTIEREVTAPGATTLSGALATGNPLEETSALSVETPSYVKVSGAAPVSIEAGSAVGKTTSFAGSSASSYSPSEAALKNFTPSETLTTDIATKGPFPTSRDPLPSVPPTTTNSSRGTNSTLAKITTSAKTTMKPPTATPTTARTRPTTDMSAGENGGFLLLRLSVASPEDLTDPRVAERLMQQLHRELHAHAPHFQVSLLRVRRG

SEQ ID NO: 53151 - protein, 503 aa, Homo sapiens; identical to SEQ ID NO: 53146
  Payload ID: 10593
  Gene Symbol: MUC20
  Gene Name: mucin 20, cell surface associated
  ENSP ID: ENSP00000480845

SEQ ID NO: 53152 - protein, 503 aa, Homo sapiens; identical to SEQ ID NO: 53148
  Payload ID: 10593
  Gene Symbol: MUC20
  Gene Name: mucin 20, cell surface associated
  ENSP ID: ENSP00000482294

SEQ ID NO: 53153 - protein, 709 aa, Homo sapiens; identical to SEQ ID NO: 53145
  Payload ID: 10593
  Gene Symbol: MUC20
  Gene Name: mucin 20, cell surface associated
  Uniprot ID: Q8N307
  ENSP ID: ENSP00000483878

SEQ ID NO: 53154 - protein, 503 aa, Homo sapiens; identical to SEQ ID NO: 53146
  Payload ID: 10593
  Gene Symbol: MUC20
  Gene Name: mucin 20, cell surface associated
  ENSP ID: ENSP00000484531

SEQ ID NO: 53155 - protein, 128 aa, Homo sapiens
  Payload ID: 10593
  Gene Symbol: MUC20
  Gene Name: mucin 20, cell surface associated
  ENSP ID: ENSP00000485702
  MOD_RES (1)..(1): Any amino acid
XPTMDIATKGPFPTSRDPLPSVPPTTTNSSRGTNSTLAKITTSAKTTMKPPTATPTTARTRPTTDVSAGENGGFLLLWLSVASPEDLTDPRVAERLMQQLMTQGTHSAHVPSMVGVNPLPIVPGGFQH

SEQ ID NO: 53156 - protein, 127 aa, Homo sapiens
  Payload ID: 10593
  Gene Symbol: MUC20
  Gene Name: mucin 20, cell surface associated
  ENSP ID: ENSP00000485806
  MOD_RES (1)..(1): Any amino acid
XTTDIATKGPFPTSRDPLPSVPPTTTNSSRGTNSTLAKITTSAKTTMKPPTATPTTARTRPTTDMSAGENGGFLLLRLSVASPEDLTDPRVAERLMQQLMTQGTHSAHVPSMVGVNPLPIVPGGFQY

SEQ ID NO: 53157 - protein, 674 aa, Homo sapiens; identical to SEQ ID NO: 53144
  Payload ID: 10593
  Gene Symbol: MUC20
  Gene Name: mucin 20, cell surface associated
  Uniprot ID: Q8N307
  ENSP ID: ENSP00000485837

SEQ ID NO: 53158 - protein, 674 aa, Homo sapiens; identical to SEQ ID NO: 53144
  Payload ID: 10593
  Gene Symbol: MUC20
  Gene Name: mucin 20, cell surface associated
  Uniprot ID: Q8N307
  ENSP ID: ENSP00000485855

SEQ ID NO: 53159 - protein, 128 aa, Homo sapiens; identical to SEQ ID NO: 53143
  Payload ID: 10593
  Gene Symbol: MUC20
  Gene Name: mucin 20, cell surface associated
  ENSP ID: ENSP00000485873
  MOD_RES (1)..(1): Any amino acid

SEQ ID NO: 53160 - protein, 674 aa, Homo sapiens; identical to SEQ ID NO: 53144
  Payload ID: 10593
  Gene Symbol: MUC20
  Gene Name: mucin 20, cell surface associated
  Uniprot ID: Q8N307
  ENSP ID: ENSP00000485921

SEQ ID NO: 53161 - protein, 723 aa, Homo sapiens; identical to SEQ ID NO: 53142
  Payload ID: 10593
  Gene Symbol: MUC20
  Gene Name: mucin 20, cell surface associated
  ENSP ID: ENSP00000486236

SEQ ID NO: 53162 - protein, 535 aa, Homo sapiens
  Payload ID: 10593
  Gene Symbol: MUC20
  Gene Name: mucin 20, cell surface associated
  ENSP ID: ENSP00000486394
MGCLWGLALPLFFCWEVGVSGSSAGPSTRRADTAMTTDDTEVPAMTLAPGHAALETQTLSAETSSRASTPAGPIPEAETRGAKRISPARETRSFTKTSPNFMVLIATSVETSAASGSPEGAGMTTVQTITGSDPEEAIFDTLCTDDISEEAKTLTMDILTLAHTSTEAKGLSSESSASSDGPHPVITPSRASESSASSDGPHPVITPSRASESSASSDGPHPVITPSWSPGSDVTLLAEALVTVTNIEVINCSITETTTSSIPGASDIDLIPTEGVKASSTSDPPALPDSTEAKPHITEVTASAETLSTAGTTESAAPHATVGTPLPTNSATEREVTAPGATTLSGALVTVSRNPLEETSALSVETPSYVKVSGAAPVSIEAGSAVGKTTSFAGSSASSYSPSEAALKNFTPSETPTMDIATKGPFPTSRDPLPSVPPTTTNSSRGTNSTLAKITTSAKTTMKPPTATPTTARTRPTTDVSAGENGGFLLLWLSVASPEDLTDPRVAERLMQQLHRELHAHAPHFQVSLLRVRRG

SEQ ID NO: 53163 - protein, 723 aa, Homo sapiens; identical to SEQ ID NO: 53142
  Payload ID: 10593
  Gene Symbol: MUC20
  Gene Name: mucin 20, cell surface associated
  ENSP ID: ENSP00000486409

SEQ ID NO: 53164 - protein, 128 aa, Homo sapiens; identical to SEQ ID NO: 53143
  Payload ID: 10593
  Gene Symbol: MUC20
  Gene Name: mucin 20, cell surface associated
  ENSP ID: ENSP00000486488
  MOD_RES (1)..(1): Any amino acid

SEQ ID NO: 53165 - protein, 520 aa, Homo sapiens
  Payload ID: 10593
  Gene Symbol: MUC20
  Gene Name: mucin 20, cell surface associated
  ENSP ID: ENSP00000486526
MTTDDTEVPAMTLAPGHAALETQTLSAETSSRASTPAGPVPEAETRGSKRISPARETRSFTKTSPNFMVLIATSVETSAASGSPEGAGMTTVQTITGSDPEEAIFDTLCTDDSSEEAKTLTMDILTLAHTSTEAKGLSSESSASSDGPHPVITPSRASESSASSDGPHPVITPSRASESSASSDGPHPVITPSRASESSASSDGPHPVITPSWSPGSDVTLLAEALVTVTNIEVINCSITEIETTTSSIPGASDTDPIPTEGVKASSTSDPPALPDSTEAKPHITEVTASAETLSTAGTTESAAPDATIGTPLPTNSTIEREVTAPGATTLSGALATGNPLEETSALSVETPSYVKVSGAAPVSIEAGSAVGKTTSFAGSSASSYSPSEAALKNFTPSETLTTDIATKGPFPTSRDPLPSVPPTTTNSSRGTNSTLAKITTSAKTTMKPPTATPTTARTRPTTDMSAGENGGFLLLRLSVASPEDLTDPRVAERLMQQLHRELHAHAPHFQVSLLRVRRG

SEQ ID NO: 53166 - protein, 128 aa, Homo sapiens; identical to SEQ ID NO: 53143
  Payload ID: 10593
  Gene Symbol: MUC20
  Gene Name: mucin 20, cell surface associated
  ENSP ID: ENSP00000486549
  MOD_RES (1)..(1): Any amino acid

SEQ ID NO: 53167 - protein, 128 aa, Homo sapiens; identical to SEQ ID NO: 53143
  Payload ID: 10593
  Gene Symbol: MUC20
  Gene Name: mucin 20, cell surface associated
  ENSP ID: ENSP00000486753
  MOD_RES (1)..(1): Any amino acid

SEQ ID NO: 53168 - protein, 128 aa, Homo sapiens; identical to SEQ ID NO: 53143
  Payload ID: 10593
  Gene Symbol: MUC20
  Gene Name: mucin 20, cell surface associated
  ENSP ID: ENSP00000486769
  MOD_RES (1)..(1): Any amino acid

SEQ ID NO: 53169 - protein, 552 aa, Homo sapiens
  Payload ID: 10593
  Gene Symbol: MUC20
  Gene Name: mucin 20, cell surface associated
  ENSP ID: ENSP00000486805
MGCLWGLALPLFFFCWEVGVSGSSAGPSTRRADTAMTTDDTEVPAMTLAPGHAALETQTLSAETSSRASTPAGPIPEAETRGAKRISPARETRSFTKTSPNFMVLIATSVETSAASGSPEGAGMTTVQTITGSDPEEAIFDTLCTDDSSEEAKTLTMDILTLAHTSTEAKGLSSESSASSDGPHPVITPSRASESSASSDGPHPVITPSRASESSASSDGPHPVITPSWSPGSDVTLLAEALVTVTNIEVINCSITEIETTTSSIPGASDIDLIPTEGVKASSTSDPPALPDSTEAKPHITEVTASAETLSTAGTTESAAPHATVGTPLPTNSATEREVTAPGATTLSGALVTVSRNPLEETSALSVETPSYVKVSGAAPVSIEAGSAVGKTTSFAGSSASSYSPSEAALKNFTPSETPTMDIATKGPFPTSRDPLPSVPPTTTNSSRGTNSTLAKITTSAKTTMKPPTATPTTARTRPTTDVSAGENGGFLLLRLSVASPEDLTDPRVAERLMQQMERSLALSPRLECSGVISAHCKLHLLGSRDSPASAS

SEQ ID NO: 53170 - protein, 549 aa, Homo sapiens
  Payload ID: 10593
  Gene Symbol: MUC20
  Gene Name: mucin 20, cell surface associated
  ENSP ID: ENSP00000486905
MGCLWGLALPLFFCWEVGVSGSSAGPSTRRADTAMTTDDTEVPAMTLAPGHAALETQTLSAETSSRASTPAGPIPEAETRGAKRISPARETRSFTKTSPNFMVLIATSVETSAASGSPEGAGMTTVQTITGSDPEEAIFDTLCTDDISEEAKTLTMDILTLAHTSTEAKGLSSESSASSDGPHPVITPSRASESSASSDGPHPVITPSRASESSASSDGPHPVITPSWSPGSDVTLLAEALVTVTNIEVINCSITETTTSSIPGASDIDLIPTEGVKASSTSDPPALPDSTEAKPHITEVTASAETLSTAGTTESAAPHATVGTPLPTNSATEREVTAPGATTLSGALVTVSRNPLEETSALSVETPSYVKVSGAAPVSIEAGSAVGKTTSFAGSSASSYSPSEAALKNFTPSETPTMDIATKGPFPTSRDPLPSVPPTTTNSSRGTNSTLAKITTSAKTTMKPPTATPTTARTRPTTDVSAGENGGFLLLWLSVASPEDLTDPRVAERLMQQMERSLALSPRLECSGVISAHCKLHLLGSRDSPASAS

SEQ ID NO: 53171 - protein, 552 aa, Homo sapiens; identical to SEQ ID NO: 53169
  Payload ID: 10593
  Gene Symbol: MUC20
  Gene Name: mucin 20, cell surface associated
  ENSP ID: ENSP00000487039

SEQ ID NO: 53172 - protein, 569 aa, Homo sapiens
  Payload ID: 10593
  Gene Symbol: MUC20
  Gene Name: mucin 20, cell surface associated
  ENSP ID: ENSP00000487047
MGCLWGLALPLFFFCWEVGVSGSSAGPSTRRADTAMTTDDTEVPAMTLAPGHAALETQTLSAETSSRASTPAGPVPEAETRGSKRISPARETRSFTKTSPNFMVLIATSVETSAASGSPEGAGMTTVQTITGSDPEEAIFDTLCTDDSSEEAKTLTMDILTLAHTSTEAKGLSSESSASSDGPHPVITPSRASESSASSDGPHPVITPSRASESSASSDGPHPVITPSRASESSASSDGPHPVITPSWSPGSDVTLLAEALVTVTNIEVINCSITEIETTTSSIPGASDTDPIPTEGVKASSTSDPPALPDSTEAKPHITEVTASAETLSTAGTTESAAPDATIGTPLPTNSTIEREVTAPGATTLSGALATGNPLEETSALSVETPSYVKVSGAAPVSIEAGSAVGKTTSFAGSSASSYSPSEAALKNFTPSETLTTDIATKGPFPTSRDPLPSVPPTTTNSSRGTNSTLAKITTSAKTTMKPPTATPTTARTRPTTDMSAGENGGFLLLRLSVASPEDLTDPRVAERLMQQMERSLALSPRLECSGVISAHCKLHLLGSRDSPASAS

SEQ ID NO: 53173 - protein, 538 aa, Homo sapiens
  Payload ID: 10593
  Gene Symbol: MUC20
  Gene Name: mucin 20, cell surface associated
  ENSP ID: ENSP00000487209
MGCLWGLALPLFFFCWEVGVSGSSAGPSTRRADTAMTTDDTEVPAMTLAPGHAALETQTLSAETSSRASTPAGPIPEAETRGAKRISPARETRSFTKTSPNFMVLIATSVETSAASGSPEGAGMTTVQTITGSDPEEAIFDTLCTDDSSEEAKTLTMDILTLAHTSTEAKGLSSESSASSDGPHPVITPSRASESSASSDGPHPVITPSRASESSASSDGPHPVITPSWSPGSDVTLLAEALVTVTNIEVINCSITEIETTTSSIPGASDIDLIPTEGVKASSTSDPPALPDSTEAKPHITEVTASAETLSTAGTTESAAPHATVGTPLPTNSATEREVTAPGATTLSGALVTVSRNPLEETSALSVETPSYVKVSGAAPVSIEAGSAVGKTTSFAGSSASSYSPSEAALKNFTPSETPTMDIATKGPFPTSRDPLPSVPPTTTNSSRGTNSTLAKITTSAKTTMKPPTATPTTARTRPTTDVSAGENGGFLLLRLSVASPEDLTDPRVAERLMQQLHRELHAHAPHFQVSLLRVRRG

SEQ ID NO: 53174 - protein, 723 aa, Homo sapiens; identical to SEQ ID NO: 53142
  Payload ID: 10593
  Gene Symbol: MUC20
  Gene Name: mucin 20, cell surface associated
  ENSP ID: ENSP00000487262

SEQ ID NO: 53175 - protein, 501 aa, Homo sapiens
  Payload ID: 10593
  Gene Symbol: MUC20
  Gene Name: mucin 20, cell surface associated
  ENSP ID: ENSP00000487482
MTTDDTEVPAMTLAPGHAALETQTLSAETSSRASTPAGPIPEAETRGAKRISPARETRSFTKTSPNFMVLIATSVETSAASGSPEGAGMTTVQTITGSDPEEAIFDTLCTDDISEEAKTLTMDILTLAHTSTEAKGLSSESSASSDGPHPVITPSRASESSASSDGPHPVITPSRASESSASSDGPHPVITPSWSPGSDVTLLAEALVTVTNIEVINCSITETTTSSIPGASDIDLIPTEGVKASSTSDPPALPDSTEAKPHITEVTASAETLSTAGTTESAAPHATVGTPLPTNSATEREVTAPGATTLSGALVTVSRNPLEETSALSVETPSYVKVSGAAPVSIEAGSAVGKTTSFAGSSASSYSPSEAALKNFTPSETPTMDIATKGPFPTSRDPLPSVPPTTTNSSRGTNSTLAKITTSAKTTMKPPTATPTTARTRPTTDVSAGENGGFLLLWLSVASPEDLTDPRVAERLMQQLHRELHAHAPHFQVSLLRVRRG

SEQ ID NO: 53176 - protein, 538 aa, Homo sapiens; identical to SEQ ID NO: 53173
  Payload ID: 10593
  Gene Symbol: MUC20
  Gene Name: mucin 20, cell surface associated
  ENSP ID: ENSP00000487573

SEQ ID NO: 53177 - protein, 566 aa, Homo sapiens
  Payload ID: 10594
  Gene Symbol: MUC21
  Gene Name: mucin 21, cell surface associated
  Uniprot ID: Q5SSG8
  ENSP ID: ENSP00000365473
MKMQKGNVLLMFGLLLHLEAATNSNETSTSANTGSSVISSGASTATNSGSSVTSSGVSTATISGSSVTSNGVSIVTNSEFHTTSSGISTATNSEFSTVSSGISIATNSESSTTSSGASTATNSESSTPSSGASTATNSDSSTTSSGASTATNSDSSTTSSEASTATNSESSTTSSGASTATNSESSTVSSRASTATNSESSTTSSGASTATNSESRTTSNGAGTATNSESSTTSSGASTATNSESSTPSSGAGTATNSESSTTSSGAGTATNSESSTVSSGISTVTNSESSTPSSGANTATNSESSTTSSGANTATNSDSSTTSSGASTATNSESSTTSSGASTATNSESSTTSSGASTATNSGSSTTSSGTSTATNSESSTVSSGASTATTSESSTTSSGASTATNSESSTVSSGASTATNSESSTTSSGANTATNSGSSVTSAGSGTAALTGMHTTSHSASTAVSEAKPGGSLVPWEIFLITLVSVVAAVGLFAGLFFCVRNSLSLRNTFNTAVYHPHGLNHGLGPGPGGNHGAPHRPRWSPNWFWRRPVSSIAMEMSGRNSGP

SEQ ID NO: 53178 - protein, 626 aa, Homo sapiens
  Payload ID: 10594
  Gene Symbol: MUC21
  Gene Name: mucin 21, cell surface associated
  ENSP ID: ENSP00000373027
MKMQKGNVLLMFGLLLHLEAATNSNETSTSANTGSSVISSGASTATNSGSSVTSSGVSTATISGSSVTSNGVSIVTNSEFHTTSSGISTATNSEFSTASSGISIATNSESSTTSSGASTATNSESSTPSSGASTVTNSGSSVTSSGASTATNSESSTVSSRASTATNSESSTLSSGASTATNSDSSTTSSGASTATNSESSTTSSGASTATNSESSTVSSRASTATNSESSTTSSGASTATNSESRTTSNGAGTATNSESSTTSSGASTATNSDSSTVSSGASTATNSESSTTSSGASTATNSDSSTTSSGAGTATNSESSTTSSGASTATNSESSTTSSGASTATNSDSSTTSSGAGTATNSESSTVSSGISTVTNSESSTPSSGANTATNSESSTTSSGANTATNSESSTVSSGASTATNSESSTTSSGVSTATNSESSTTSSGASTATNSDSSTTSSEASTATNSESSTVSSGISTVTNSESSTTSSGANTATNSGSSVTSAGSGTAALTGMHTTSHSASTAVSEAKPGGSLVPWEIFLITLVSVVAAVGLFAGLFFCVRNSLSLRNTFNTAVYHPHGLNHGLGPGPGGNHGAPHRPRWSPNWFWRRPVSSIAMEMSGRNSGP

SEQ ID NO: 53179 - protein, 566 aa, Homo sapiens
  Payload ID: 10594
  Gene Symbol: MUC21
  Gene Name: mucin 21, cell surface associated
  ENSP ID: ENSP00000393390
MKMQKGNVLLMFGLLLHLEAATNSNETSTSANTGSSVISSGASTATNSGSSVTSSGVSTATISGSSVTSNGVSIVTNSEFHTTSSGISTATNSEFSTASSGISIATNSESSTTSSGASTATNSESSTPSSGASTATNSDSSTTSSGASTATNSDSSTTSSEASTATNSESSTTSSGASTATNSESSTVSSRASTATNSESSTTSSGASTATNSESRTTSNGAGTATNSESSTTSSGASTATNSESSTPSSGAGTATNSESSTTSSGAGTATNSESSTVSSGISTVTNSESSTPSSGANTATNSESSTTSSGANTATNSDSSTTSSGASTATNSESSTTSSGASTATNSESSTTSSGASTATNSGSSTTSSGTSTATNSESSTVSSGASTATTSESSTTSSGASTATNSESSTVSSGASTATNSESSTTSSGANTATNSGSSVTSAGSGTAALTGMHTTSHSASTAVSEAKPGGSLVPWEIFLITLVSVVAAVGLFAGLFFCVRNSLSLRNTFNTAVYHPHGLNHGLGPGPGGNHGAPHRPRWSPNWFWRRPVSSIAMEMSGRNSGP

SEQ ID NO: 53180 - protein, 566 aa, Homo sapiens; identical to SEQ ID NO: 53179
  Payload ID: 10594
  Gene Symbol: MUC21
  Gene Name: mucin 21, cell surface associated
  ENSP ID: ENSP00000401817

SEQ ID NO: 53181 - protein, 566 aa, Homo sapiens
  Payload ID: 10594
  Gene Symbol: MUC21
  Gene Name: mucin 21, cell surface associated
  ENSP ID: ENSP00000407508
MKMQKGNVLLMFGLLLHLEAATNSNETSTSANTGSSVISSGASTATNSGSSVTSSGVSTATISGSSVTSNGVSIVTNSEFHTTSSGISTATNSEFSTVSSGISIATNSESSTTSSGASTATNSESSTPSSGASTATNSDSSTTSSGASTATNSDSSTTSSEASTATNSESSTTSSGASTVTNSESSTVSSRASTATNSESSTTSSGASTATNSESRTTSNGAGTATNSESSTTSSGASTATNSESSTPSSGAGTATNSESSTTSSGAGTATNSESSTVSSGISTVTNSESSTPSSGANTATNSESSTTSSGANTATNSDSSTTSSGASTATNSESSTTSSGASTATNSESSTTSSGASTATNSGSSTTSSGTSTATNSESSTVSSGASTATTSESSTTSSGASTATNSESSTVSSGASTATNSESSTTSSGANTATNSGSSVTSAGSGTAALTGMHTTSHSASTAVSEAKPGGSLVPWEIFLITLVSVVAAVGLFAGLFFCVRNSLSLRNTFNTAVYHPHGLNHGLGPGPGGNHGAPHRPRWSPNWFWRRPVSSIAMEMSGRNSGP

SEQ ID NO: 53182 - protein, 566 aa, Homo sapiens; identical to SEQ ID NO: 53179
  Payload ID: 10594
  Gene Symbol: MUC21
  Gene Name: mucin 21, cell surface associated
  ENSP ID: ENSP00000414676

SEQ ID NO: 53183 - protein, 596 aa, Homo sapiens
  Payload ID: 10594
  Gene Symbol: MUC21
  Gene Name: mucin 21, cell surface associated
  ENSP ID: ENSP00000416075
MKMQKGNVLLMFGLLLHLEAATNSNETSTSANTGSSVISSGASTATNSGSSVTSSGVSTATISGSSVTSNGVSIVTNSEFHTTSSGISTATNSEFSTASSGISIATNSESSTTSSGASTATNSESSTPSSGASTVTNSGSSVTSSGASTATNSESSTVSSRASTATNSESSTLSSGASTATNSDSSTTSSGASTATNSESSTTSSGASTATNSESSTVSSRASTATNSESSTTSSGASTATNSESRTTSNGAGTATNSESSTTSSGASTATNSDSSTVSSGASTATNSESSTTSSGASTATNSESSTTSSGASTATNSDSSTTSSGAGTATNSESSTVSSGISTVTNSESSTPSSGANTATNSESSTTSSGANTATNSESSTVSSGASTATNSESSTTSSGVSTATNSESSTTSSGASTATNSDSSTTSSEASTATNSESSTVSSGISTVTNSESSTTSSGANTATNSGSSVTSAGSGTAALTGMHTTSHSASTAVSEAKPGGSLVPWEIFLITLVSVVAAVGLFAGLFFCVRNSLSLRNTFNTAVYHPHGLNHGLGPGPGGNHGAPHRPRWSPNWFWRRPVSSIAMEMSGRNSGP

SEQ ID NO: 53184 - protein, 566 aa, Homo sapiens
  Payload ID: 10594
  Gene Symbol: MUC21
  Gene Name: mucin 21, cell surface associated
  ENSP ID: ENSP00000447201
MKMQKGNVLLMFGLLLHLEAATNSNETSTSANTGSSVISSGASTATNSGSSVTSSGVSTATISGSSVTSNGVSIVTNSEFHTTSSGISTATNSEFSTASSGISIATNSESSTTSSGASTATNSESSTPSSGASTATNSESSTLSSGASTATNSDSSTTSSGASTATNSESSTTSSGASTATNSESSTVSSRASTATNSESSTTSSGASTATNSESRTTSNGAGTATNSESSTTSSGASTATNSDSSTTSSGAGTATNSESSTTSSGASTATNSESSTTSSGASTATNSDSSTTSSGAGTATNSESSTVSSGISTVTNSESSTPSSGANTATNSESSTTSSGANTATNSESSTVSSGASTATNSESSTTSSGVSTATNSESSTTSSGASTATNSDSSTTSSEASTATNSESSTVSSGISTVTNSESSTTSSGANTATNSGSSVTSAGSGTAALTGMHTTSHSASTAVSEAKPGGSLVPWEIFLITLVSVVAAVGLFAGLFFCVRNSLSLRNTFNTAVYHPHGLNHGLGPGPGGNHGAPHRPRWSPNWFWRRPVSSIAMEMSGRNSGP

SEQ ID NO: 53185 - protein, 416 aa, Homo sapiens
  Payload ID: 10594
  Gene Symbol: MUC21
  Gene Name: mucin 21, cell surface associated
  ENSP ID: ENSP00000447840
MKMQKGNVLLMFGLLLHLEAATNSNETSTSANTGSSVISSGASTATNSGSSVTSSGVSTATISGSSVTSNGVSIVTNSEFHTTSSGISTATNSEFSTVSSGISIATNSESSTTSSGASTATNSESSTPSSGASTATNSDSSTTSSGASTATNSDSSTTSSEASTATNSESSTTSSGASTATNSESSTTSSGASTATNSESSTTSSGASTATNSGSSTTSSGTSTATNSESSTVSSGASTATTSESSTTSSGASTATNSESSTVSSGASTATNSESSTTSSGANTATNSGSSVTSAGSGTAALTGMHTTSHSASTAVSEAKPGGSLVPWEIFLITLVSVVAAVGLFAGLFFCVRNSLSLRNTFNTAVYHPHGLNHGLGPGPGGNHGAPHRPRWSPNWFWRRPVSSIAMEMSGRNSGP

SEQ ID NO: 53186 - protein, 416 aa, Homo sapiens
  Payload ID: 10594
  Gene Symbol: MUC21
  Gene Name: mucin 21, cell surface associated
  ENSP ID: ENSP00000448890
MKMQKGNVLLMFGLLLHLEAATNSNETSTSANTGSSVISSGASTATNSGSSVTSSGVSTATISGSSVTSNGVSIVTNSEFHTTSSGISTATNSEFSTASSGISIATNSESSTTSSGASTATNSESSTPSSGASTATNSDSSTTSSGASTATNSESSTTSSGASTATNSESSTTSSGASTATNSESSTTSSGANTATNSESSTVSSGASTATNSESSTTSSGVSTATNSESSTTSSGASTATNSDSSTTSSEASTATNSESSTVSSGISTVTNSESSTTSSGANTATNSGSSVTSAGSGTAALTGMHTTSHSASTAVSEAKPGGSLVPWEIFLITLVSVVAAVGLFAGLFFCVRNSLSLRNTFNTAVYHPHGLNHGLGPGPGGNHGAPHRPRWSPNWFWRRPVSSIAMEMSGRNSGP

SEQ ID NO: 53187 - protein, 112 aa, Homo sapiens
  Payload ID: 10594
  Gene Symbol: MUC21
  Gene Name: mucin 21, cell surface associated
  ENSP ID: ENSP00000457640
MHTTSHSASTAVSEAKPGGSLVPWEIFLITLVSVVAAVGLFAGLFFCVRNSLSLRNTFNTAVYHPHGLNHGLGPGPGGNHGAPHRPRWSPNWFWRRPVSSIAMEMSGRNSGP

SEQ ID NO: 53188 - protein, 418 aa, Homo sapiens
  Payload ID: 10594
  Gene Symbol: MUC21
  Gene Name: mucin 21, cell surface associated
  ENSP ID: ENSP00000478961
MKMQKGNVLLMFGLLLHLEAATNSNETSTSANTGSSVISSGASTATNSGSSVTSSGVSTATISGSSVTSNGVSIVTNSEFHTTSSGISTATNSEFSTASSGISIATNSESSTTSSGASTATNSESSTPSSGASTATNSDSSTTSSGASTATNSESSTTSSGASTATNSESSTTSSGAGTATNSESSTTSSGASTATNSESSTTTVSSGASTATNSESSTTSSGVSTATNSESSTTSSGASTATNSDSSTTSSEASTATNSESSTVSSGISTVTNSESSTTSSGANTATNSGSSVTSAGSGTAALTGMHTTSHSASTAVSEAKPGGSLVPWEIFLITLVSVVAAVGLFAGLFFCVRNSLSLRNTFNTAVYHPHGLNHGLGPGPGGNHGAPHRPRWSPNWFWRRPVSSIAMEMSGRNSGP

SEQ ID NO: 53189 - protein, 1773 aa, Homo sapiens
  Payload ID: 10595
  Gene Symbol: MUC22
  Gene Name: mucin 22
  Uniprot ID: E2RYF6
  ENSP ID: ENSP00000455906
MRRGNISPAFWFLWLLLFGLLGPSSENTTAFTKGSDTTTASITGSETTMASTMASTSALTTGSKITTDSTTGSETTSASTMASTAAFTTGSETNTASTTDSGTTIASTRTFTTGSDTTTGSTAGSETIVASTTVSGTTTTFTIASTTVPETTMASSTTSTAGSEKTMASSIISETTMASTTGSETATVSTTGSETTTTSTASSEATKVSTTGSETTTASTAGSETTTTSTSMAGSEATTTSTADSKVITASSMSSETTVAPAAGSNTTTASTTGSETTTILIKASETTTASTAGSETTTPSPTGSQTTIVSISGSEITTTSTAGSENTTVSSAGSGTTTASMAGSETTVSTAGSETTTVSITGTETTMVSAMGSETTTNSTTSSETTVTSTAGSETTTVSTVGSETTTAYTADSETTAASTTGSEMTTVFTAGSETITPSTAGSETTTVSTAGSETTTVSTTGSETTTASTAHSETTAASTMGSETTKVSTAGSETTVSTAGSETTAASTEDSETNTAFTEDSKTTTASTTGFETTAASTTGSEPTMASTMGSETTMASTIGPETTKVSTASSEVTTVFAAGSETIRASTVGSETTTVSTTGSETTTASIMGSETSTDSTTGSETTTASTEGSETTTASTEGSEATTVSTTGSETTTVSITDSETTTTCTEGSEMTAVSTTVFETTTASTEGSEITIASTSDSETTTASTEGSETTTVTTAGSETKTAYTTGSETTTASNTGLETTTVFTIGSDTTTASTEGSETTAVSATGSEMTTVSTEGSENTTVSTTGSETTTVSTTGLETTTTSTEGSEMTTVSTTGAETTTDSTEGSGTTAASTAGSETTTVSTADSENTTASTADSETTSASTTGSETTTASTTSSETTTASTEGSETTTVSTTDSETTMVSTTGSERTITSTEGSETTTVSATGSETTVSTEGSGTTTVSITGSETTKVSTTGSETTTTSTEGSEITTASITGSETTTASTEGSETTTASTEGSETTSASTTGSETTTASTTSSETTMASIMGSETTMASTIGSETTKVSTASSKMTTVFTENSETTIASTTASETTTVSTAGSETIPASTAGSETTTTTSTEGSETTTASTEGSETTTASTESSETTTATTIGSETTTASTEGSETTTTSTEGSETTTASTEGSEITTVSTTGSETTTASTEGSETTTASTEGSELTTVSTTGSETITVSAEGSETTTVTTMGSETTTASTAGSETTTVSTAGSETTTASIEGSETTTVSSTGSETTTVSTTGTETTITSTEGSETTTVTTAGSETTAVYTTGSETTTTSTEGSETTTVSTTGSETTTASTADLETTTVSTSGSGTTTASTAGSETTTVYITGSKTTTASTEGSEATTVSTTSSETTTASTTGSEMTTVFTTVSETTTVSTIGSEATTSSAAGSEATTTSTEGSETTTASTAGSETTTASTAGSETTTASTSGSETNTACTTGSETSTPSSAGSETNTAFIIGSESTIASTASLEPTATSLTGSETTTVSITASGATAASTTVSSTTFVLTKATDVSIQPITNTPMSGTRTTGTRLTASSSVTMAPGMDFTASAASHTVPGIVLNTSGLGTSTMGASSTTSAHGVRTTTGSTREPTSSTFQETGPVSMGTNTVSMSHTPTNVIKPSGYLQPWAIILISLAAVVAAVGLSVGLSFCLRNLFFPLRYCGIYYPHGHSHSLGLDLNLGLGSGTFHSLGNALVHGGELEMGHGGTHGFGYGVGHGLSHIHGDGYGVNHGGHYGHGGGH

SEQ ID NO: 53190 - protein, 3323 aa, Homo sapiens
  Payload ID: 10596
  Gene Symbol: MUC3A
  Gene Name: mucin 3A, cell surface associated
  ENSP ID: ENSP00000368771
MQLLGLLGLLWMLKASPWATGTLSTATSISQVPFPRAEAASAVLSNSPHSRDLAGWPLGVPQLASPAPGHRENAPMTLTTSPHDTLISETLLNSPVSSNTSTTPTSKFAFKVETTPPTVLVYSATTECVYPTSFIITISHPTSICVTTTQVAFTSSYTSTPVTQKPVTTVTSTYSMTTTEKGTSAMTSSPSTTTARETPIVTVTPSSVSATDTTFHTTISSTTRTTERTPLPTGSIHTTTSPTPVFTTLKTAVTSTSPITSSITSTNTVTSMTTTASQPTATNTLSSPTRTILSSTPVLSTETITSGITNTTPLSTLVTTLPTTISRSTPTSETTYTTSPTSTVTDSTTKIAYSTSMTGTLSTETSLPPTSSSLPTTETATTPMTNLVTTTTEISSHSTPSFSSSTIYSTVSTSTTAISSLPPTSGTMVTSTTMTPSSLSTDIPFTTPTTITHHSVGSTGFLTTATDLTSTFTVSSSSAMSTSVIPSSPSIQNTETSSLVSMTSATTPNVRPTFVSTLSTPTSSLLTTFPATYSFSSSMSASSAGTTHTESISSPPASTSTLHTTAESTLAPTTTTSFTTSTTMEPPSTTAATTGTGQTTFTSSTATFPETTTPTPTTDMSTESLTTAMTSPPITSSVTSTNTVTSMTTTTSPPTTTNSFTSLTSMPLSSTPVPSTEVVTSGTINTIPPSILVTTLPTPNASSMTTSETTYPNSPTGPGTNSTTEITYPTTMTETSSTATSLPPTSPLVSTAKTAKTPTTNLVTTTTKTTSHSTTSFTSSTVYSTASTYTTAITSVPTTLGTMVTSTSMISSTVSTGIPTSQPTTITPSSVGISGSLPMMTDLTSVYTVSNMSARPTTVIPSSPTVQNTEISISVSMTSATTPSGGPTFTSTENTPTRSLLTSFPMTHSFSSSMSESSAGTTHTESISSPRGTTSTLHTTVESTPSPTTTTSFTTSTMMEPPSSTVSTTGRGQTTFPSSTATFPETTTLTPTTDISTVSLTTAMTSPPPVSSSITPTNTMTSMRTTTYWPTATNTLSPLTSSILSSTPVPSTEMITSHTTNTTPLSTLVTTLLTTITRSTPTSETTYPTSPTSIVSDSTTEITYSTSITGTLSTATTLPPTSSSLPTTETATMTPTTTLITTTPNTTSLSTPSFTSSTIYSTVSTSTTAISSASPTSGTMVTSTTMTPSSLSTDTPSTTPTTITYPSVGSTGFLTTATDLTSTFTVSSSSAMSTSVIPSSPSIQNTETSSLVSMTSATTPSLRPTITSTDSTLTSSLLTTFPSTYSFSSSMSASSAGTTHTETISSLPASTNTIHTTAESALAPTTTTSFTTSPTMEPPSTTVATTGTGQTTFPSSTATFLETTTLTPTTDFSTESLTTAMTSTPPITSSITPTDTMTSMRTTTSWPTATNTLSPLTSSILSSTPVPSTEVTTSHTTNTNPVSTLVTTLPITITRSTLTSETAYPSSPTSTVTESTTEITYPTTMTETSSTATSLPPTSSLVSTAETAKTPTTNLVTTTTKTTSHSTTSFTSSTIYSTASTPTTAITSVPTTLGTMVTSTSMIPSTVSTGIPTSQPTTITPSSVGISGSLPMMTDLTSVYTVSSMSARPTSVIPSSPTVQNTETSIFVSMMSATTPSGGPTFTSTENTPTRSLLTSFPVTHSFSSSMSASSVGTTHTQSISSPPAITSTLHTTAESTPSPTTTMSFTTFTKMETPSSTVATTGTGQTTFTSSTATSPKTTTLTPTSDISTGSFKTAVSSTPPITSSITSTYTVTSMTTTTPLGPTATNTLPSFTSSVSSSTPVPSTEAITSGTTNTTPLSTLVTTFSNSDTSSTPTSETTYPTSLTSALTDSTTRTTYSTNMTGTLSTVTSLRPTSSSLLTTVTATVPTTNLVTTTTKITSHSTPSFTSSIATTETPSHSTPRFTSSITTTETPSHSTPRFTSSITNTKTTSHSSPSFTSSITTTETTSHNTPSLTSSITTTKTTSHSTPSYTSLITTTTTTSHSTPSFTSSITTTETTSHNTPSLTSSITTTETTSHSTPSFTSSITTETTSHSTPSFTSLITITEITSHSTLSYTTSITTTETPSHSTLSFTSSITTTETTSHSTPSFTSSITTSEMPSHSTPSFTSSITTTENATHSTPNFTSSITTTETTSHSTPSFTSLITTTETTSHRWGTTETTSYSTPSFTSSNTITETTSHSTPSYITSITTTETPSSSTPSFSSSITTTETTSHSTPGFTSSITTTETTSHSTPSFTSSITTTETTSHDTPSFTSSITTSETPSHSTPSSTSLITTTKTTSHSTPSFTSSITTTETTSHSAHSFTSSITTTETTSHNTRSFTSSITTTETNSHSTTSFTSSITTTETTSHSTPSFSSSITTTETPLHSTPGLTSWVTTTKTTSHITPGLTSSITTTETTSHSTPGFTSSITTTETTSESTPSLSSSTIYSTVSTSTTAITSHFTTSETAVTPTPVTPSSLSTDIPTTSLRTLTPSSVGTSTSLTTTTDFPSIPTDISTLPTRTHIISSSPSIQSTETSSLVGTTSPTMSTVRMTLRITENTPISSFSTSIVVIPETPTQTPPVLTSATGTQTSPAPTTVTFGSTDSSTSTLHTLTPSTALSTIVSTSQVPIPSTHSSTLQTTPSTPSLQTSLTSTSEFTTESFTRGSTSTNAILTSFSTIIWSSTPTIIMSSSPSSASITPVFSTTIHSVPSSPYIFSTENVGSASITGFPSLSSSATTSTSSTSSSLTTALTEITPFSYISLPSTTPCPGTITITIVPASPTDPCVEMDPSTEATSPPTTPLTVFPFTTEMVTCPTSISIQTTLTTYMDTSSMMPESESSISPNASSSTGTGTVPTNTVFTSTRLPTSETWLSNSSVIPLPLPGVSTIPLTMKPSSSLPTILRTSSKSTHPSPPTTRTSETPVATTQTPTTLTSRRTTRITSQMTTQSTLTTTAGTCDNGGTWEQGQCACLPGFSGDRCQLQTRCQNGGQWDGLKCQCPSTFYGSSCEFAVEQVDLDVVETEVGMEVSVDQQFSPDLNDNTSQAYRDFNKTFWNQMQKIFADMQGFTFKGVEILSLRNGSIVVDYLVLLEMPFSPQLESEYEQVKTTLKEGLQNASQDVNSCQDSQTLCFKPDSIKVNNNSKTELTPAAICRRAAPTGYEEFYFPLVEATRLRCVTKCTSGVDNAIDCHQGQCVLETSGPTCRCYSTDTHWFSGPRCEVAVHWRALVGGLTAGAALLVLLLLALGVRAVRSGWWGGQRRGRSWDQDRKWFETWDEEVVGTFSNWGFEDDGTDKDTNFYVALENVDTTMKVHIKRPEMTSSSV

SEQ ID NO: 53191 - protein, 1002 aa, Homo sapiens
  Payload ID: 10596
  Gene Symbol: MUC3A
  Gene Name: mucin 3A, cell surface associated
  Uniprot ID: Q02505
  ENSP ID: ENSP00000393306
  MOD_RES (1)..(1): Any amino acid
XITITEITSHSTLSYTTSITTTETPSHSTLSFTSSITTTETTSHSTPSFTSSITTSEMPSHSTPSFTSSITTTENATHSTPNFTSSITTTETTSHSTPSFTSLITTTETTSHRWGTTETTSYSTPSFTSSNTITETTSHSTPSYITSITTTETPSSSTPSFSSSITTTETTSHSTPGFTSSITTTETTSHSTPSFTSSITTTETTSHDTPSFTSSITTSETPSHSTPSSTSLITTTKTTSHSTPSFTSSITTTETTSHSAHSFTSSITTTETTSHNTRSFTSSITTTETNSHSTTSFTSSITTTETTSHSTPSFSSSITTTETPLHSTPGLTSWVTTTKTTSHITPGLTSSITTTETTSHSTPGFTSSITTTETTSESTPSLSSSTIYSTVSTSTTAITSHFTTSETAVTPTPVTPSSLSTDIPTTSLRTLTPSSVGTSTSLTTTTDFPSIPTDISTLPTRTHIISSSPSIQSTETSSLVGTTSPTMSTVRMTLRITENTPISSFSTSIVVIPETPTQTPPVLTSATGTQTSPAPTTVTFGSTDSSTSTLHTLTPSTALSTIVSTSQVPIPSTHSSTLQTTPSTPSLQTSLTSTSEFTTESFTRGSTSTNAILTSFSTIIWSSTPTIIMSSSPSSASITPVFSTTIHSVPSSPYIFSTENVGSASITGFPSLSSSATTSTSSTSSSLTTALTEITPFSYISLPSTTPCPGTITITIVPASPTDPCVEMDPSTEATSPPTTPLTVFPFTTEMVTCPTSISIQTTLTTYMDTSSMMPESESSISPNASSSTGTGTVPTNTVFTSTRLPTSETWLSNSSVIPLPLPGVSTIPLTMKPSSSLPTILRTSSKSTHPSPPTTRTSETPVATTQTPTTLTSRRTTRITSQMTTQSTLTTTAGTCDNGGTWEQGQCACLPGFSGDRCQLQTRCQNGGQWDGLKCQCPSTFYGSSCEFAVEQVDLDAEDFCRHAGLHLQGCGDPVPEEWQHRGGLPGPAGDALQPPAGERV

SEQ ID NO: 53192 - protein, 3265 aa, Homo sapiens
  Payload ID: 10596
  Gene Symbol: MUC3A
  Gene Name: mucin 3A, cell surface associated
  ENSP ID: ENSP00000483541
MQLLGLLGLLWMLKASPWATGTLSTATSISQVPFPRAEAASAVLSNSPHSRDLAGWPLGVPQLASPAPGHRENAPMTLTTSPHDTLISETLLNSPVSSNTSTTPTSKFAFKVETTPPTVLVYSATTECVYPTSFIITISHPTSICVTTTQVAFTSSYTSTPVTQKPVTTVTSTYSMTTTEKGTSAMTSSPSTTTARETPIVTVTPSSVSATDTTFHTTISSTTRTTERTPLPTGSIHTTTSPTPVFTTLKTAVTSTSPITSSITSTNTVTSMTTTASQPTATNTLSSPTRTILSSTPVLSTETITSGITNTTPLSTLVTTLPTTISRSTPTSETTYTTSPTSTVTDSTTKIAYSTSMTGTLSTETSLPPTSSSLPTTETATTPMTNLVTTTTEISSHSTPSFSSSTIYSTVSTSTTAISSLPPTSGTMVTSTTMTPSSLSTDIPFTTPTTITHHSVGSTGFLTTATDLTSTFTVSSSSAMSTSVIPSSPSIQNTETSSLVSMTSATTPNVRPTFVSTLSTPTSSLLTTFPATYSFSSSMSASSAGTTHTESISSPPASTSTLHTTAESTLAPTTTTSFTTSTTMEPPSTTAATTGTGQTTFTSSTATFPETTTPTPTTDMSTESLTTAMTSPPITSSVTSTNTVTSMTTTTSPPTTTNSFTSLTSMPLSSTPVPSTEVVTSGTINTIPPSILVTTLPTPNASSMTTSETTYPNSPTGPGTNSTTEITYPTTMTETSSTATSLPPTSPLVSTAKTAKTPTTNLVTTTTKTTSHSTTSFTSSTVYSTASTYTTAITSVPTTLGTMVTSTSMISSTVSTGIPTSQPTTITPSSVGISGSLPMMTDLTSVYTVSNMSARPTTVIPSSPTVQNTEISISVSMTSATTPSGGPTFTSTENTPTRSLLTSFPMTHSFSSSMSESSAGTTHTESISSPRGTTSTLHTTVESTPSPTTTTSFTTSTMMEPPSSTVSTTGRGQTTFPSSTATFPETTTLTPTTDISTVSLTTAMTSPPPVSSSITPTNTMTSMRTTTYWPTATNTLSPLTSSILSSTPVPSTEMITSHTTNTTPLSTLVTTLLTTITRSTPTSETTYPTSPTSIVSDSTTEITYSTSITGTLSTATTLPPTSSSLPTTETATMTPTTTLITTTPNTTSLSTPSFTSSTIYSTVSTSTTAISSASPTSGTMVTSTTMTPSSLSTDTPSTTPTTITYPSVGSTGFLTTATDLTSTFTVSSSSAMSTSVIPSSPSIQNTETSSLVSMTSATTPSLRPTITSTDSTLTSSLLTTFPSTYSFSSSMSASSAGTTHTETISSLPASTNTIHTTAESALAPTTTTSFTTSPTMEPPSTTVATTGTGQTTFPSSTATFLETTTLTPTTDFSTESLTTAMTSTPPITSSITPTDTMTSMRTTTSWPTATNTLSPLTSSILSSTPVPSTEVTTSHTTNTNPVSTLVTTLPITITRSTLTSETAYPSSPTSTVTESTTEITYPTTMTETSSTATSLPPTSSLVSTAETAKTPTTNLVTTTTKTTSHSTTSFTSSTIYSTASTPTTAITSVPTTLGTMVTSTSMIPSTVSTGIPTSQPTTITPSSVGISGSLPMMTDLTSVYTVSSMSARPTSVIPSSPTVQNTETSIFVSMMSATTPSGGPTFTSTENTPTRSLLTSFPVTHSFSSSMSASSVGTTHTQSISSPPAITSTLHTTAESTPSPTTTMSFTTFTKMETPSSTVATTGTGQTTFTSSTATSPKTTTLTPTSDISTGSFKTAVSSTPPITSSITSTYTVTSMTTTTPLGPTATNTLPSFTSSVSSSTPVPSTEAITSGTTNTTPLSTLVTTFSNSDTSSTPTSETTYPTSLTSALTDSTTRTTYSTNMTGTLSTVTSLRPTSSSLLTTVTATVPTTNLVTTTTKITSHSTPSFTSSIATTETPSHSTPRFTSSITTTETPSHSTPRFTSSITNTKTTSHSSPSFTSSITTTETTSHNTPSLTSSITTTKTTSHSTPSYTSLITTTTTTSHSTPSFTSSITTTETTSHNTPSLTSSITTTETTSHSTPSFTSSITTETTSHSTPSFTSLITITEITSHSTLSYTTSITTTETPSHSTLSFTSSITTTETTSHSTPSFTSSITTSEMPSHSTPSFTSSITTTENATHSTPNFTSSITTTETTSHSTPSFTSLITTTETTSHRWGTTETTSYSTPSFTSSNTITETTSHSTPSYITSITTTETPSSSTPSFSSSITTTETTSHSTPGFTSSITTTETTSHSTPSFTSSITTTETTSHDTPSFTSSITTSETPSHSTPSSTSLITTTKTTSHSTPSFTSSITTTETTSHSAHSFTSSITTTETTSHNTRSFTSSITTTETNSHSTTSFTSSITTTETTSHSTPSFSSSITTTETPLHSTPGLTSWVTTTKTTSHITPGLTSSITTTETTSHSTPGFTSSITTTETTSESTPSLSSSTIYSTVSTSTTAITSHFTTSETAVTPTPVTPSSLSTDIPTTSLRTLTPSSVGTSTSLTTTTDFPSIPTDISTLPTRTHIISSSPSIQSTETSSLVGTTSPTMSTVRMTLRITENTPISSFSTSIVVIPETPTQTPPVLTSATGTQTSPAPTTVTFGSTDSSTSTLHTLTPSTALSTIVSTSQVPIPSTHSSTLQTTPSTPSLQTSLTSTSEFTTESFTRGSTSTNAILTSFSTIIWSSTPTIIMSSSPSSASITPVFSTTIHSVPSSPYIFSTENVGSASITGFPSLSSSATTSTSSTSSSLTTALTEITPFSYISLPSTTPCPGTITITIVPASPTDPCVEMDPSTEATSPPTTPLTVFPFTTEMVTCPTSISIQTTLTTYMDTSSMMPESESSISPNASSSTGTGTVPTNTVFTSTRLPTSETWLSNSSVIPLPLPGVSTIPLTMKPSSSLPTILRTSSKSTHPSPPTTRTSETPVATTQTPTTLTSRRTTRITSQMTTQSTLTTTAGTCDNGGTWEQGQCACLPGFSGDRCQLQTRCQNGGQWDGLKCQCPSTFYGSSCEFAVEQVDLDVVETEVGMEVSVDQQFSPDLNDNTSQAYRDFNKTFWNQMQKIFADMQGFTFKGVEILSLRNGSIVVDYLVLLEMPFSPQLESEYEQVKTTLKEGLQNASQDVNSCQDSQTLCFKPDSIKVNNNSKTELTPAAICRRAAPTGYEEFYFPLVEATRLRCVTKCTSGVDNAIDCHQGQCVLETSGPTCRSWDQDRKWFETWDEEVVGTFSNWGFEDDGTDKDTNFYVALENVDTTMKVHIKRPEMTSSSV

SEQ ID NO: 53193 - protein, 1176 aa, Homo sapiens
  Payload ID: 10597
  Gene Symbol: MUC4
  Gene Name: mucin 4, cell surface associated
  Uniprot ID: Q99102
  ENSP ID: ENSP00000304207
MKGARWRRVPWVSLSCLCLCLLPHVVPGMTTPSLKTDGGRRTATSPPPTTSQTIISTIPSTAMHTRSTAAPIPILPERGVSLFPYGAGAGDLEFVRRTVDFTSPLFKPATGFPLGSSLRDSLYFTDNGQIIFPESDYQIFSYPNPLPTGFTGRDPVALVAPFWDDADFSTGRGTTFYQEYETFYGEHSLLVQQAESWIRKMTNNGGYKARWALKVTWVNAHAYPAQWTLGSNTYQAILSTDGSRSYALFLYQSGGMQWDVAQRSGNPVLMGFSSGDGYFENSPLMSQPVWERYRPDRFLNSNSGLQGLQFYRLHREERPNYRLECLQWLKSQPRWPSWGWNQVSCPCSWQQGRRDLRFQPVSIGRWGLGSRQLCSFTSWRGGVCCSYGPWGEFREGWHVQRPWQLAQELEPQSWCCRWNDKPYLCALYQQRRPHVGCATYRPPQPAWMFGDPHITTLDGVSYTFNGLGDFLLVGAQDGNSSFLLQGRTAQTGSAQATNFIAFAAQYRSSSLGPVTVQWLLEPHDAIRVLLDNQTVTFQPDHEDGGGQETFNATGVLLSRNGSEVSASFDGWATVSVIALSNILHASASLPPEYQNRTEGLLGVWNNNPEDDFRMPNGSTIPPGSPEEMLFHFGMTWQINGTGLLGKRNDQLPSNFTPVFYSQLQKNSSWAEHLISNCDGDSSCIYDTLALRNASIGLHTREVSKNYEQANATLNQYPPSINGGRVIEAYKGQTTLIQYTSNAEDANFTLRDSCTDLELFENGTLLWTPKSLEPFTLEILARSAKIGLASALQPRTVVCHCNAESQCLYNQTSRVGNSSLEVAGCKCDGGTFGRYCEGSEDACEEPCFPSVHCVPGKGCEACPPNLTGDGRHCAALGSSFLCQNQSCPVNYCYNQGHCYISQTLGCQPMCTCPPAFTDSRCFLAGNNFSPTVNLELPLRVIQLLLSEEENASMAEVNASVAYRLGTLDMRAFLRNSQVERIDSAAPASGSPIQHWMVISEFQYRPRGPVIDFLNNQLLAAVVEAFLYHVPRRSEEPRNDVVFQPISGEDVRDVTALNVSTLKAYFRCDGYKGYDLVYSPQSGFTCVSPCSRGYCDHGGQCQHLPSGPRCSCVSFSIYTAWGEHCEHLSMKLDAFFGIFFGALGGLLLLGVGTFVVLRFWGCSGARFSYFLNSAEALP

SEQ ID NO: 53194 - protein, 174 aa, Homo sapiens
  Payload ID: 10597
  Gene Symbol: MUC4
  Gene Name: mucin 4, cell surface associated
  ENSP ID: ENSP00000310528
  MOD_RES (1)..(1): Any amino acid
XLKMETPGMTTPSLKTDGGRRTATSPPPTTSQTIISTIPSTAMHTRSTAAPIPILPERGEAIQEFPSSPMGQAPGTWSSSGGPWTSPPHSSSRRLASPLAPLSVIPSTSQTMARSSSQSQTTRFSPTPTHSQQASQAGTLWPWWLRSGTMLTSPLVGGPHFIRNTRRSMVNTAC

SEQ ID NO: 53195 - protein, 1125 aa, Homo sapiens
  Payload ID: 10597
  Gene Symbol: MUC4
  Gene Name: mucin 4, cell surface associated
  Uniprot ID: Q99102
  ENSP ID: ENSP00000338109
MKGARWRRVPWVSLSCLCLCLLPHVVPGVSLFPYGAGAGDLEFVRRTVDFTSPLFKPATGFPLGSSLRDSLYFTDNGQIIFPESDYQIFSYPNPLPTGFTGRDPVALVAPFWDDADFSTGRGTTFYQEYETFYGEHSLLVQQAESWIRKMTNNGGYKARWALKVTWVNAHAYPAQWTLGSNTYQAILSTDGSRSYALFLYQSGGMQWDVAQRSGNPVLMGFSSGDGYFENSPLMSQPVWERYRPDRFLNSNSGLQGLQFYRLHREERPNYRLECLQWLKSQPRWPSWGWNQVSCPCSWQQGRRDLRFQPVSIGRWGLGSRQLCSFTSWRGGVCCSYGPWGEFREGWHVQRPWQLAQELEPQSWCCRWNDKPYLCALYQQRRPHVGCATYRPPQPAWMFGDPHITTLDGVSYTFNGLGDFLLVGAQDGNSSFLLQGRTAQTGSAQATNFIAFAAQYRSSSLGPVTVQWLLEPHDAIRVLLDNQTVTFQPDHEDGGGQETFNATGVLLSRNGSEVSASFDGWATVSVIALSNILHASASLPPEYQNRTEGLLGVWNNNPEDDFRMPNGSTIPPGSPEEMLFHFGMTWQINGTGLLGKRNDQLPSNFTPVFYSQLQKNSSWAEHLISNCDGDSSCIYDTLALRNASIGLHTREVSKNYEQANATLNQYPPSINGGRVIEAYKGQTTLIQYTSNAEDANFTLRDSCTDLELFENGTLLWTPKSLEPFTLEILARSAKIGLASALQPRTVVCHCNAESQCLYNQTSRVGNSSLEVAGCKCDGGTFGRYCEGSEDACEEPCFPSVHCVPGKGCEACPPNLTGDGRHCAALGSSFLCQNQSCPVNYCYNQGHCYISQTLGCQPMCTCPPAFTDSRCFLAGNNFSPTVNLELPLRVIQLLLSEEENASMAEVNASVAYRLGTLDMRAFLRNSQVERIDSAAPASGSPIQHWMVISEFQYRPRGPVIDFLNNQLLAAVVEAFLYHVPRRSEEPRNDVVFQPISGEDVRDVTALNVSTLKAYFRCDGYKGYDLVYSPQSGFTCVSPCSRGYCDHGGQCQHLPSGPRCSCVSFSIYTAWGEHCEHLSMKLDAFFGIFFGALGGLLLLGVGTFVVLRFWGCSGARFSYFLNSAEALP

SEQ ID NO: 53196 - protein, 144 aa, Homo sapiens
  Payload ID: 10597
  Gene Symbol: MUC4
  Gene Name: mucin 4, cell surface associated
  ENSP ID: ENSP00000345378
  MOD_RES (1)..(1): Any amino acid
XLKMETPGMTTPSLKTDGGRRTATSPPPTTSQTIISTIPSTAMHTRSTAAPIPILPERGVSLFPYGAGAGDLEFVRRTVDFTSPLFKPATGFPLGSSLRDSLYASQAGTLWPWWLRSGTMLTSPLVGGPHFIRNTRRSMVNTAC

SEQ ID NO: 53197 - protein, 144 aa, Homo sapiens; identical to SEQ ID NO: 53196
  Payload ID: 10597
  Gene Symbol: MUC4
  Gene Name: mucin 4, cell surface associated
  ENSP ID: ENSP00000376208
  MOD_RES (1)..(1): Any amino acid

SEQ ID NO: 53198 - protein, 164 aa, Homo sapiens
  Payload ID: 10597
  Gene Symbol: MUC4
  Gene Name: mucin 4, cell surface associated
  ENSP ID: ENSP00000389780
  MOD_RES (1)..(1): Any amino acid
XLKMETPGMTTPSLKTDGGRRTATSPPPTTSQTIISTIPSTAMHTRSTAAPIPILPERGEAIQEFPSSPMGQAPGTWSSSGGPWTSPPHSSSRRLASPLAPLSVIPSTSQTMARSSSQSQTTRFSPTPTHSQQASQAGTLWPWWLRSGTMLTSPLVGGPHFIRL

SEQ ID NO: 53199 - protein, 144 aa, Homo sapiens; identical to SEQ ID NO: 53196
  Payload ID: 10597
  Gene Symbol: MUC4
  Gene Name: mucin 4, cell surface associated
  ENSP ID: ENSP00000407750
  MOD_RES (1)..(1): Any amino acid

SEQ ID NO: 53200 - protein, 4442 aa, Homo sapiens
  Payload ID: 10597
  Gene Symbol: MUC4
  Gene Name: mucin 4, cell surface associated
  ENSP ID: ENSP00000417397
MKGARWRRVPWVSLSCLCLCLLPHVVPGTTEDTLITGSKTAAPVTSTGSTTATLEGQSTAASSRTSNQDISASSQNHQTKSTETTSKAQTDTLTQMMTSTLFSSPSVHNVMETAPPDEMTTSFPSSVTNTLMMTSKTITMTTSTDSTLGNTEETSTAGTESSTPVTSAVSITAGQEGQSRTTSWRTSIQDTSASSQNHWTRSTQTTRESQTSTLTHRTTSTPSFSPSVHNVTGTVSQKTSPSGETATSSLCSVTNTSMMTSEKITVTTSTGSTLGNPGETSSVPVTGSLMPVTSAALVTFDPEGQSPATFSRTSTQDTTAFSKNHQTQSVETTRVSQINTLNTLTPVTTSTVLSSPSGFNPSGTVSQETFPSGETTTSSPSSVSNTFLVTSKVFRMPTSRDSTLGNTEETSLSVSGTISAITSKVSTIWWSDTLSTALSPSSLPPKISTAFHTQQSEGAETTGRPHERSSFSPGVSQEIFTLHETTTWPSSFSSKGHTTWSQTELPSTSTGAATRLVTGNPSTGTAGTIPRVPSKVSAIGEPGEPTTYSSHSTTLPKTTGAGAQTQWTQETGTTGEALLSSPSYSVTQMIKTATSPSSSPMLDRHTSQQITTAPSTNHSTIHSTSTSPQESPAVSQRGHTQAPQTTQESQTTRSVSPMTDTKTVTTPGSSFTASGHSPSEIVPQDAPTISAATTFAPAPTGDGHTTQAPTTALQAAPSSHDATLGPSGGTSLSKTGALTLANSVVSTPGGPEGQWTSASASTSPDTAAAMTHTHQAESTEASGQTQTSEPASSGSRTTSAGTATPSSSGASGTTPSGSEGISTSGETTRFSSNPSRDSHTTQSTTELLSASASHGAIPVSTGMASSIVPGTFHPTLSEASTAGRPTGQSSPTSPSASPQETAAISRMAQTQRTRTSRGSDTISLASQATDTFSTVPPTPPSITSTGLTSPQTETHTLSPSGSGKTFTTALISNATPLPVTYASSASTGHTTPLHVTDASSVSTGHATPLPVTSPSSVSTGHTTPLPVTDTSSESTGHVTPLPVTSFSSASTGDSTPLPVTDTSSASTGHVTPLPVTSLSSASTGDTTPLPVTDTSSASTGHATSLPVTDTSSVSTGHTTPLPVTDTSSASTGHATSLPVTDTSSVSTGHTTPLHVTDASSASTGQATPLPVTSLSSVSTGDTTPLPVTSPSSASTGHATPLLVTDTSSASTGHATPLPVTDASSVSTDHATSLPVTIPSAASTGHTTPLPVTDTSSASTGQATSLLVTDTSSVSTGDTTPLPVTSTSSASTGHVTPLHVTSPSSASTGHATPLPVTSLSSASTGDTMPLPVTSPSSASTGDTTPLPVTDASSVSTGHTTPLHVTDASSASTGQATPLPVTSLSSVSTGDTTPLPVTSPSSASTGHATPLLVTDTSSASTGHATPLPVTDASSVSTDHATSLPVTIPSAASTGHTTPLPVTDTSSASTGQATSLLVTDTSSVSTGDTTPLPVTSTSSASTGHVTPLHVTSPSSASTGHATPLPVTSLSSASTGDTMPLPVTSPSSASTGDTTPLPVTDASSVSTGHTTPLPVTSPSSASTGHTTPLPVTDTSSASKGDTTPLPVTSPSSASTGHTTPLPVTDTSSASTGDTTPLPVTNASSLSTGHATPLHVTSPSSASTGHATPLPVTSTSSASTGHATPLPVTGLSSATTDDTTRLPVTDVSSASTGQATPLPVTSLSSVSTGDTTPLPVTSPSSASTGHASPLLVTDASSASTGQATPLPVTDTSSVSTAHATPLPVTGLSSASTDDTTRLPVTDVSSASTGQAIPLPVTSPSSASTGDTTPLPVTDASSASTGDTTSLPVTIPSSASSGHTTSLPVTDASSVSTGHATSLLVTDASSVSTGDTTPLPVTDTNSASTGDTTPLHVTDASSVSTGHATSLPVTSLSSASTGDTTPLPVTSPSSASSGHTTPLPVTDASSVPTGHATSLPVTDASSVSTGHATPLPVTDASSVSTGHATPLPVTDTSSVSTGQATPLPVTSLSSASTGDTTPLPVTDTSSASTGQDTPLPVTSLSSVSTGDTTPLPVTNPSSASTGHATPLLVTDASSISTGHATSLLVTDASSVSTGHATALHDTDASSLSTGDTTPLPVTSPSSTSTGDTTPLPVTETSSVSTGHATSLPVTDTSSASTGHATSLPVTDTSSASTGHATPLPVTDTSSASTGQATPLPVTSPSSASTGHAIPLLVTDTSSASTGQATPLPVTSLSSASTGDTTPLPVTDASSVSTGHATSLPVTSLSSVSTGDTTPLPVTSPSSASTGHATPLHVTDASSASTGHATPLPVTSLSSASTGDTTPLPVTSPSSASTGHATPLHVTDASSVSTGDTTPLPVTSSSSASSGHTTPLPVTDASSASTGDTTPLPVTDTSSASTGHATHLPVTGLSSASTGDTTRLPVTNVSSASTGHATPLPVTSTSSASTGDTTPLPGTDTSSVSTGHTTPLLVTDASSVSTGDTTRLPVTSPSSASTGHTTPLPVTDTPSASTGDTTPLPVTNASSLSTRHATSLHVTSPSSASTGHATSLPVTDTSAASTGHATPLPVTSTSSASTGDTTPLPVTDTYSASTGQATPLPVTSLSSVSTGDTTPLPVTSPSSASTGHATPLLVTDASSASTGQATPLPVTSLSSVSTGDTTPLPVTSPSSASTGHATSLPVTDTSSASTGDTTSLPVTDTSSAYTGDTTSLPVTDTSSSSTGDTTPLLVTETSSVSTGDTTPLPVTDTSSASTGHATPLPVTNTSSVSTGHATPLHVTSPSSASTGHTTPLPVTDASSVSTGHATSLPVTDASSVFTGHATSLPVTIPSSASSGHTTPLPVTDASSVSTGHATSLPVTDASSVSTGHATPLPVTDASSVSTGHATPLPLTSLSSVSTGDTTPLPVTDTSSASTGQATPLPVTSLSSVSTGDTTPLPVTDTSSASTGHATSLPVTDTSSASTGHATPLPDTDTSSASTGHATLLPVTDTSSASIGHATSLPVTDTSSISTGHATPLHVTSPSSASTGHATPLPVTDTSSASTGHANPLHVTSPSSASTGHATPLPVTDTSSASTGHATPLPVTSLSSVSTGDTTPLPVTSPSSASTGHTTPLPVTDTSSASTGQATALPVTSTSSASTGDTTPLPVTDTSSASTGQATPLPVTSLSSVSTGDTTPLPVTSPSSASTGHATPLLVTDASSASTGQATPLPVTSLSSVSTGDTTPLPVTSPSSASTGHATSLPVTDTSSASTGDTTSLPVTDTSSAYTGDTTSLPVTDTSSSSTGDTTPLLVTETSSVSTGHATPLLVTDASSASTGHATPLHVTSPSSASTGDTTPVPVTDTSSVSTGHATPLPVTGLSSASTGDTTRLPVTDISSASTGQATPLPVTNTSSVSTGDTMPLPVTSPSSASTGHATPLPVTSTSSASTGHATPVPVTSTSSASTGHTTPLPVTDTSSASTGDTTPLPVTSPSSASTGHTTPLHVTIPSSASTGDTSTLPVTGASSASTGHATPLPVTDTSSVSTGHATPLPVTSLSSVSTGDTTPLPVTDASSASTGQATPLPVTSLSSVSTGDTTPLLVTDASSVSTGHATPLPVTDTSSASTGDTTRLPVTDTSSASTGQATPLPVTSLSSVSTGDTTPLLVTDASSVSTGHATPLPVTDTSSASTGDTTRLPVTDTSSASTGQATPLPVTIPSSSSSGHTTPLPVTSTSSVSTGHVTPLHVTSPSSASTGHVTPLPVTSTSSASTGHATPLLVTDASSVSTGHATPLPVTDASSASTGDTTPLPVTDTSSASTGQATPLPVTSLSSVSTGDTTPLPVTDASSASTGHATPLPVTIPSSVSTGDTMPLPVTSPSSASTGHATPLPVTGLSSASTGDTTPLPVTDTSSASTRHATPLPVTDTSSASTDDTTRLPVTDVSSASTGHATPLPVTSTSSASTGDTTPLPVTDTSSVSTGHATSLPVTSRSSASTGHATPLPVTDTSSVSTGHATPLPVTSTSSVSTGHATPLPVTSPSSASTGHATPVPVTSTSSASTGDTTPLPVTNASSLSTGHATPLHVTSPSSASRGDTSTLPVTDASSASTGHATPLPLTSLSSVSTGDTTPLPVTDTSSASTGQATPLPVTSLSSVSTGDTTPLPVTIPSSASSGHTTSLPVTDASSVSTGHGTPLPVTSTSSASTGDTTPLPVTDTSSASTGHATPLPVTDTSSASTGHATPLPVTSLSSVSTGHATPLAVSSATSASTVSSDSPLKMETPGMTTPSLKTDGGRRTATSPPPTTSQTIISTIPSTAMHTRSTAAPIPILPERGVSLFPYGAGAGDLEFVRRTVDFTSPLFKPATGFPLGSSLRDSLYASQAGTLWPWWLRSGTMLTSPLVGGPHFIRATPTKPSSPRTGAGPMPCFSTRAVGCSGTWPSAQATRCSWASLVEMAISKTAH

SEQ ID NO: 53201 - protein, 5412 aa, Homo sapiens
  Payload ID: 10597
  Gene Symbol: MUC4
  Gene Name: mucin 4, cell surface associated
  ENSP ID: ENSP00000417498
MKGARWRRVPWVSLSCLCLCLLPHVVPGTTEDTLITGSKTAAPVTSTGSTTATLEGQSTAASSRTSNQDISASSQNHQTKSTETTSKAQTDTLTQMMTSTLFSSPSVHNVMETAPPDEMTTSFPSSVTNTLMMTSKTITMTTSTDSTLGNTEETSTAGTESSTPVTSAVSITAGQEGQSRTTSWRTSIQDTSASSQNHWTRSTQTTRESQTSTLTHRTTSTPSFSPSVHNVTGTVSQKTSPSGETATSSLCSVTNTSMMTSEKITVTTSTGSTLGNPGETSSVPVTGSLMPVTSAALVTFDPEGQSPATFSRTSTQDTTAFSKNHQTQSVETTRVSQINTLNTLTPVTTSTVLSSPSGFNPSGTVSQETFPSGETTTSSPSSVSNTFLVTSKVFRMPTSRDSTLGNTEETSLSVSGTISAITSKVSTIWWSDTLSTALSPSSLPPKISTAFHTQQSEGAETTGRPHERSSFSPGVSQEIFTLHETTTWPSSFSSKGHTTWSQTELPSTSTGAATRLVTGNPSTGTAGTIPRVPSKVSAIGEPGEPTTYSSHSTTLPKTTGAGAQTQWTQETGTTGEALLSSPSYSVTQMIKTATSPSSSPMLDRHTSQQITTAPSTNHSTIHSTSTSPQESPAVSQRGHTQAPQTTQESQTTRSVSPMTDTKTVTTPGSSFTASGHSPSEIVPQDAPTISAATTFAPAPTGDGHTTQAPTTALQAAPSSHDATLGPSGGTSLSKTGALTLANSVVSTPGGPEGQWTSASASTSPDTAAAMTHTHQAESTEASGQTQTSEPASSGSRTTSAGTATPSSSGASGTTPSGSEGISTSGETTRFSSNPSRDSHTTQSTTELLSASASHGAIPVSTGMASSIVPGTFHPTLSEASTAGRPTGQSSPTSPSASPQETAAISRMAQTQRTRTSRGSDTISLASQATDTFSTVPPTPPSITSTGLTSPQTETHTLSPSGSGKTFTTALISNATPLPVTYASSASTGHTTPLHVTDASSVSTGHATPLPVTSPSSVSTGHTTPLPVTDTSSESTGHVTPLPVTSFSSASTGDSTPLPVTDTSSASTGHVTPLPVTSLSSASTGDTTPLPVTDTSSASTGHATSLPVTDTSSVSTGHTTPLPVTDTSSASTGHATSLPVTDTSSVSTGHTTPLHVTDASSASTGQATPLPVTSLSSVSTGDTTPLPVTSPSSASTGHATPLLVTDTSSASTGHATPLPVTDASSVSTDHATSLPVTIPSAASTGHTTPLPVTDTSSASTGQATSLLVTDTSSVSTGDTTPLPVTSTSSASTGHVTPLHVTSPSSASTGHATPLPVTSLSSASTGDTMPLPVTSPSSASTGDTTPLPVTDASSVSTGHTTPLHVTDASSASTGQATPLPVTSLSSVSTGDTTPLPVTSPSSASTGHATPLLVTDTSSASTGHATPLPVTDASSVSTDHATSLPVTIPSAASTGHTTPLPVTDTSSASTGQATSLLVTDTSSVSTGDTTPLPVTSTSSASTGHVTPLHVTSPSSASTGHATPLPVTSLSSASTGDTMPLPVTSPSSASTGDTTPLPVTDASSVSTGHTTPLPVTSPSSASTGHTTPLPVTDTSSASKGDTTPLPVTSPSSASTGHTTPLPVTDTSSASTGDTTPLPVTNASSLSTGHATPLHVTSPSSASTGHATPLPVTSTSSASTGHATPLPVTGLSSATTDDTTRLPVTDVSSASTGQATPLPVTSLSSVSTGDTTPLPVTSPSSASTGHASPLLVTDASSASTGQATPLPVTDTSSVSTAHATPLPVTGLSSASTDDTTRLPVTDVSSASTGQAIPLPVTSPSSASTGDTTPLPVTDASSASTGDTTSLPVTIPSSASSGHTTSLPVTDASSVSTGHATSLLVTDASSVSTGDTTPLPVTDTNSASTGDTTPLHVTDASSVSTGHATSLPVTSLSSASTGDTTPLPVTSPSSASSGHTTPLPVTDASSVPTGHATSLPVTDASSVSTGHATPLPVTDASSVSTGHATPLPVTDTSSVSTGQATPLPVTSLSSASTGDTTPLPVTDTSSASTGQDTPLPVTSLSSVSTGDTTPLPVTNPSSASTGHATPLLVTDASSISTGHATSLLVTDASSVSTGHATALHDTDASSLSTGDTTPLPVTSPSSTSTGDTTPLPVTETSSVSTGHATSLPVTDTSSASTGHATSLPVTDTSSASTGHATPLPVTDTSSASTGQATPLPVTSPSSASTGHAIPLLVTDTSSASTGQATPLPVTSLSSASTGDTTPLPVTDASSVSTGHATSLPVTSLSSVSTGDTTPLPVTSPSSASTGHATPLHVTDASSASTGHATPLPVTSLSSASTGDTTPLPVTSPSSASTGHATPLHVTDASSVSTGDTTPLPVTSSSSASSGHTTPLPVTDASSASTGDTTPLPVTDTSSASTGHATHLPVTGLSSASTGDTTRLPVTNVSSASTGHATPLPVTSTSSASTGDTTPLPGTDTSSVSTGHTTPLLVTDASSVSTGDTTRLPVTSPSSASTGHTTPLPVTDTPSASTGDTTPLPVTNASSLSTRHATSLHVTSPSSASTGHATSLPVTDTSAASTGHATPLPVTSTSSASTGDTTPLPVTDTYSASTGQATPLPVTSLSSVSTGDTTPLPVTSPSSASTGHATPLLVTDASSASTGQATPLPVTSLSSVSTGDTTPLPVTSPSSASTGHATSLPVTDTSSASTGDTTSLPVTDTSSAYTGDTTSLPVTDTSSSSTGDTTPLLVTETSSVSTGDTTPLPVTDTSSASTGHATPLPVTNTSSVSTGHATPLHVTSPSSASTGHTTPLPVTDASSVSTGHATSLPVTDASSVFTGHATSLPVTIPSSASSGHTTPLPVTDASSVSTGHATSLPVTDASSVSTGHATPLPVTDASSVSTGHATPLPLTSLSSVSTGDTTPLPVTDTSSASTGQATPLPVTSLSSVSTGDTTPLPVTDTSSASTGHATSLPVTDTSSASTGHATPLPDTDTSSASTGHATLLPVTDTSSASIGHATSLPVTDTSSISTGHATPLHVTSPSSASTGHATPLPVTDTSSASTGHANPLHVTSPSSASTGHATPLPVTDTSSASTGHATPLPVTSLSSVSTGDTTPLPVTSPSSASTGHTTPLPVTDTSSASTGQATALPVTSTSSASTGDTTPLPVTDTSSASTGQATPLPVTSLSSVSTGDTTPLPVTSPSSASTGHATPLLVTDASSASTGQATPLPVTSLSSVSTGDTTPLPVTSPSSASTGHATSLPVTDTSSASTGDTTSLPVTDTSSAYTGDTTSLPVTDTSSSSTGDTTPLLVTETSSVSTGHATPLLVTDASSASTGHATPLHVTSPSSASTGDTTPVPVTDTSSVSTGHATPLPVTGLSSASTGDTTRLPVTDISSASTGQATPLPVTNTSSVSTGDTMPLPVTSPSSASTGHATPLPVTSTSSASTGHATPVPVTSTSSASTGHTTPLPVTDTSSASTGDTTPLPVTSPSSASTGHTTPLHVTIPSSASTGDTSTLPVTGASSASTGHATPLPVTDTSSVSTGHATPLPVTSLSSVSTGDTTPLPVTDASSASTGQATPLPVTSLSSVSTGDTTPLLVTDASSVSTGHATPLPVTDTSSASTGDTTRLPVTDTSSASTGQATPLPVTSLSSVSTGDTTPLLVTDASSVSTGHATPLPVTDTSSASTGDTTRLPVTDTSSASTGQATPLPVTIPSSSSSGHTTPLPVTSTSSVSTGHVTPLHVTSPSSASTGHVTPLPVTSTSSASTGHATPLLVTDASSVSTGHATPLPVTDASSASTGDTTPLPVTDTSSASTGQATPLPVTSLSSVSTGDTTPLPVTDASSASTGHATPLPVTIPSSVSTGDTMPLPVTSPSSASTGHATPLPVTGLSSASTGDTTPLPVTDTSSASTRHATPLPVTDTSSASTDDTTRLPVTDVSSASTGHATPLPVTSTSSASTGDTTPLPVTDTSSVSTGHATSLPVTSRSSASTGHATPLPVTDTSSVSTGHATPLPVTSTSSVSTGHATPLPVTSPSSASTGHATPVPVTSTSSASTGDTTPLPVTNASSLSTGHATPLHVTSPSSASRGDTSTLPVTDASSASTGHATPLPLTSLSSVSTGDTTPLPVTDTSSASTGQATPLPVTSLSSVSTGDTTPLPVTIPSSASSGHTTSLPVTDASSVSTGHGTPLPVTSTSSASTGDTTPLPVTDTSSASTGHATPLPVTDTSSASTGHATPLPVTSLSSVSTGHATPLAVSSATSASTVSSDSPLKMETPGMTTPSLKTDGGRRTATSPPPTTSQTIISTIPSTAMHTRSTAAPIPILPERGVSLFPYGAGAGDLEFVRRTVDFTSPLFKPATGFPLGSSLRDSLYFTDNGQIIFPESDYQIFSYPNPLPTGFTGRDPVALVAPFWDDADFSTGRGTTFYQEYETFYGEHSLLVQQAESWIRKMTNNGGYKARWALKVTWVNAHAYPAQWTLGSNTYQAILSTDGSRSYALFLYQSGGMQWDVAQRSGNPVLMGFSSGDGYFENSPLMSQPVWERYRPDRFLNSNSGLQGLQFYRLHREERPNYRLECLQWLKSQPRWPSWGWNQVSCPCSWQQGRRDLRFQPVSIGRWGLGSRQLCSFTSWRGGVCCSYGPWGEFREGWHVQRPWQLAQELEPQSWCCRWNDKPYLCALYQQRRPHVGCATYRPPQPAWMFGDPHITTLDGVSYTFNGLGDFLLVGAQDGNSSFLLQGRTAQTGSAQATNFIAFAAQYRSSSLGPVTVQWLLEPHDAIRVLLDNQTVTFQPDHEDGGGQETFNATGVLLSRNGSEVSASFDGWATVSVIALSNILHASASLPPEYQNRTEGLLGVWNNNPEDDFRMPNGSTIPPGSPEEMLFHFGMTWQINGTGLLGKRNDQLPSNFTPVFYSQLQKNSSWAEHLISNCDGDSSCIYDTLALRNASIGLHTREVSKNYEQANATLNQYPPSINGGRVIEAYKGQTTLIQYTSNAEDANFTLRDSCTDLELFENGTLLWTPKSLEPFTLEILARSAKIGLASALQPRTVVCHCNAESQCLYNQTSRVGNSSLEVAGCKCDGGTFGRYCEGSEDACEEPCFPSVHCVPGKGCEACPPNLTGDGRHCAALGSSFLCQNQSCPVNYCYNQGHCYISQTLGCQPMCTCPPAFTDSRCFLAGNNFSPTVNLELPLRVIQLLLSEEENASMAEVNASVAYRLGTLDMRAFLRNSQVERIDSAAPASGSPIQHWMVISEFQYRPRGPVIDFLNNQLLAAVVEAFLYHVPRRSEEPRNDVVFQPISGEDVRDVTALNVSTLKAYFRCDGYKGYDLVYSPQSGFTCVSPCSRGYCDHGGQCQHLPSGPRCSCVSFSIYTAWGEHCEHLSMKLDAFFGIFFGALGGLLLLGVGTFVVLRFWGCSGARFSYFLNSAEALP

SEQ ID NO: 53202 - protein, 4458 aa, Homo sapiens
  Payload ID: 10597
  Gene Symbol: MUC4
  Gene Name: mucin 4, cell surface associated
  ENSP ID: ENSP00000417657
MKGARWRRVPWVSLSCLCLCLLPHVVPGTTEDTLITGSKTAAPVTSTGSTTATLEGQSTAASSRTSNQDISASSQNHQTKSTETTSKAQTDTLTQMMTSTLFSSPSVHNVMETAPPDEMTTSFPSSVTNTLMMTSKTITMTTSTDSTLGNTEETSTAGTESSTPVTSAVSITAGQEGQSRTTSWRTSIQDTSASSQNHWTRSTQTTRESQTSTLTHRTTSTPSFSPSVHNVTGTVSQKTSPSGETATSSLCSVTNTSMMTSEKITVTTSTGSTLGNPGETSSVPVTGSLMPVTSAALVTFDPEGQSPATFSRTSTQDTTAFSKNHQTQSVETTRVSQINTLNTLTPVTTSTVLSSPSGFNPSGTVSQETFPSGETTTSSPSSVSNTFLVTSKVFRMPTSRDSTLGNTEETSLSVSGTISAITSKVSTIWWSDTLSTALSPSSLPPKISTAFHTQQSEGAETTGRPHERSSFSPGVSQEIFTLHETTTWPSSFSSKGHTTWSQTELPSTSTGAATRLVTGNPSTGTAGTIPRVPSKVSAIGEPGEPTTYSSHSTTLPKTTGAGAQTQWTQETGTTGEALLSSPSYSVTQMIKTATSPSSSPMLDRHTSQQITTAPSTNHSTIHSTSTSPQESPAVSQRGHTQAPQTTQESQTTRSVSPMTDTKTVTTPGSSFTASGHSPSEIVPQDAPTISAATTFAPAPTGDGHTTQAPTTALQAAPSSHDATLGPSGGTSLSKTGALTLANSVVSTPGGPEGQWTSASASTSPDTAAAMTHTHQAESTEASGQTQTSEPASSGSRTTSAGTATPSSSGASGTTPSGSEGISTSGETTRFSSNPSRDSHTTQSTTELLSASASHGAIPVSTGMASSIVPGTFHPTLSEASTAGRPTGQSSPTSPSASPQETAAISRMAQTQRTRTSRGSDTISLASQATDTFSTVPPTPPSITSTGLTSPQTETHTLSPSGSGKTFTTALISNATPLPVTYASSASTGHTTPLHVTDASSVSTGHATPLPVTSPSSVSTGHTTPLPVTDTSSESTGHVTPLPVTSFSSASTGDSTPLPVTDTSSASTGHVTPLPVTSLSSASTGDTTPLPVTDTSSASTGHATSLPVTDTSSVSTGHTTPLPVTDTSSASTGHATSLPVTDTSSVSTGHTTPLHVTDASSASTGQATPLPVTSLSSVSTGDTTPLPVTSPSSASTGHATPLLVTDTSSASTGHATPLPVTDASSVSTDHATSLPVTIPSAASTGHTTPLPVTDTSSASTGQATSLLVTDTSSVSTGDTTPLPVTSTSSASTGHVTPLHVTSPSSASTGHATPLPVTSLSSASTGDTMPLPVTSPSSASTGDTTPLPVTDASSVSTGHTTPLHVTDASSASTGQATPLPVTSLSSVSTGDTTPLPVTSPSSASTGHATPLLVTDTSSASTGHATPLPVTDASSVSTDHATSLPVTIPSAASTGHTTPLPVTDTSSASTGQATSLLVTDTSSVSTGDTTPLPVTSTSSASTGHVTPLHVTSPSSASTGHATPLPVTSLSSASTGDTMPLPVTSPSSASTGDTTPLPVTDASSVSTGHTTPLPVTSPSSASTGHTTPLPVTDTSSASKGDTTPLPVTSPSSASTGHTTPLPVTDTSSASTGDTTPLPVTNASSLSTGHATPLHVTSPSSASTGHATPLPVTSTSSASTGHATPLPVTGLSSATTDDTTRLPVTDVSSASTGQATPLPVTSLSSVSTGDTTPLPVTSPSSASTGHASPLLVTDASSASTGQATPLPVTDTSSVSTAHATPLPVTGLSSASTDDTTRLPVTDVSSASTGQAIPLPVTSPSSASTGDTTPLPVTDASSASTGDTTSLPVTIPSSASSGHTTSLPVTDASSVSTGHATSLLVTDASSVSTGDTTPLPVTDTNSASTGDTTPLHVTDASSVSTGHATSLPVTSLSSASTGDTTPLPVTSPSSASSGHTTPLPVTDASSVPTGHATSLPVTDASSVSTGHATPLPVTDASSVSTGHATPLPVTDTSSVSTGQATPLPVTSLSSASTGDTTPLPVTDTSSASTGQDTPLPVTSLSSVSTGDTTPLPVTNPSSASTGHATPLLVTDASSISTGHATSLLVTDASSVSTGHATALHDTDASSLSTGDTTPLPVTSPSSTSTGDTTPLPVTETSSVSTGHATSLPVTDTSSASTGHATSLPVTDTSSASTGHATPLPVTDTSSASTGQATPLPVTSPSSASTGHAIPLLVTDTSSASTGQATPLPVTSLSSASTGDTTPLPVTDASSVSTGHATSLPVTSLSSVSTGDTTPLPVTSPSSASTGHATPLHVTDASSASTGHATPLPVTSLSSASTGDTTPLPVTSPSSASTGHATPLHVTDASSVSTGDTTPLPVTSSSSASSGHTTPLPVTDASSASTGDTTPLPVTDTSSASTGHATHLPVTGLSSASTGDTTRLPVTNVSSASTGHATPLPVTSTSSASTGDTTPLPGTDTSSVSTGHTTPLLVTDASSVSTGDTTRLPVTSPSSASTGHTTPLPVTDTPSASTGDTTPLPVTNASSLSTRHATSLHVTSPSSASTGHATSLPVTDTSAASTGHATPLPVTSTSSASTGDTTPLPVTDTYSASTGQATPLPVTSLSSVSTGDTTPLPVTSPSSASTGHATPLLVTDASSASTGQATPLPVTSLSSVSTGDTTPLPVTSPSSASTGHATSLPVTDTSSASTGDTTSLPVTDTSSAYTGDTTSLPVTDTSSSSTGDTTPLLVTETSSVSTGDTTPLPVTDTSSASTGHATPLPVTNTSSVSTGHATPLHVTSPSSASTGHTTPLPVTDASSVSTGHATSLPVTDASSVFTGHATSLPVTIPSSASSGHTTPLPVTDASSVSTGHATSLPVTDASSVSTGHATPLPVTDASSVSTGHATPLPLTSLSSVSTGDTTPLPVTDTSSASTGQATPLPVTSLSSVSTGDTTPLPVTDTSSASTGHATSLPVTDTSSASTGHATPLPDTDTSSASTGHATLLPVTDTSSASIGHATSLPVTDTSSISTGHATPLHVTSPSSASTGHATPLPVTDTSSASTGHANPLHVTSPSSASTGHATPLPVTDTSSASTGHATPLPVTSLSSVSTGDTTPLPVTSPSSASTGHTTPLPVTDTSSASTGQATALPVTSTSSASTGDTTPLPVTDTSSASTGQATPLPVTSLSSVSTGDTTPLPVTSPSSASTGHATPLLVTDASSASTGQATPLPVTSLSSVSTGDTTPLPVTSPSSASTGHATSLPVTDTSSASTGDTTSLPVTDTSSAYTGDTTSLPVTDTSSSSTGDTTPLLVTETSSVSTGHATPLLVTDASSASTGHATPLHVTSPSSASTGDTTPVPVTDTSSVSTGHATPLPVTGLSSASTGDTTRLPVTDISSASTGQATPLPVTNTSSVSTGDTMPLPVTSPSSASTGHATPLPVTSTSSASTGHATPVPVTSTSSASTGHTTPLPVTDTSSASTGDTTPLPVTSPSSASTGHTTPLHVTIPSSASTGDTSTLPVTGASSASTGHATPLPVTDTSSVSTGHATPLPVTSLSSVSTGDTTPLPVTDASSASTGQATPLPVTSLSSVSTGDTTPLLVTDASSVSTGHATPLPVTDTSSASTGDTTRLPVTDTSSASTGQATPLPVTSLSSVSTGDTTPLLVTDASSVSTGHATPLPVTDTSSASTGDTTRLPVTDTSSASTGQATPLPVTIPSSSSSGHTTPLPVTSTSSVSTGHVTPLHVTSPSSASTGHVTPLPVTSTSSASTGHATPLLVTDASSVSTGHATPLPVTDASSASTGDTTPLPVTDTSSASTGQATPLPVTSLSSVSTGDTTPLPVTDASSASTGHATPLPVTIPSSVSTGDTMPLPVTSPSSASTGHATPLPVTGLSSASTGDTTPLPVTDTSSASTRHATPLPVTDTSSASTDDTTRLPVTDVSSASTGHATPLPVTSTSSASTGDTTPLPVTDTSSVSTGHATSLPVTSRSSASTGHATPLPVTDTSSVSTGHATPLPVTSTSSVSTGHATPLPVTSPSSASTGHATPVPVTSTSSASTGDTTPLPVTNASSLSTGHATPLHVTSPSSASRGDTSTLPVTDASSASTGHATPLPLTSLSSVSTGDTTPLPVTDTSSASTGQATPLPVTSLSSVSTGDTTPLPVTIPSSASSGHTTSLPVTDASSVSTGHGTPLPVTSTSSASTGDTTPLPVTDTSSASTGHATPLPVTDTSSASTGHATPLPVTSLSSVSTGHATPLAVSSATSASTVSSDSPLKMETPGMTTPSLKTDGGRRTATSPPPTTSQTIISTIPSTAMHTRSTAAPIPILPERGVSLFPYGAGAGDLEFVRRTVDFTSPLFKPATGFPLGSSLRDSLYFTDNGQIIFPESDYQIFSYPNPLPTGFTGRDPVALVAPFWDDADFSTGRGTTFYQSNTYQAILSTDGSRSYALFLYQSGGMQWDVAQRSVEMAISKTAH

SEQ ID NO: 53203 - protein, 4430 aa, Homo sapiens
  Payload ID: 10597
  Gene Symbol: MUC4
  Gene Name: mucin 4, cell surface associated
  ENSP ID: ENSP00000417722
MKGARWRRVPWVSLSCLCLCLLPHVVPGTTEDTLITGSKTAAPVTSTGSTTATLEGQSTAASSRTSNQDISASSQNHQTKSTETTSKAQTDTLTQMMTSTLFSSPSVHNVMETAPPDEMTTSFPSSVTNTLMMTSKTITMTTSTDSTLGNTEETSTAGTESSTPVTSAVSITAGQEGQSRTTSWRTSIQDTSASSQNHWTRSTQTTRESQTSTLTHRTTSTPSFSPSVHNVTGTVSQKTSPSGETATSSLCSVTNTSMMTSEKITVTTSTGSTLGNPGETSSVPVTGSLMPVTSAALVTFDPEGQSPATFSRTSTQDTTAFSKNHQTQSVETTRVSQINTLNTLTPVTTSTVLSSPSGFNPSGTVSQETFPSGETTTSSPSSVSNTFLVTSKVFRMPTSRDSTLGNTEETSLSVSGTISAITSKVSTIWWSDTLSTALSPSSLPPKISTAFHTQQSEGAETTGRPHERSSFSPGVSQEIFTLHETTTWPSSFSSKGHTTWSQTELPSTSTGAATRLVTGNPSTGTAGTIPRVPSKVSAIGEPGEPTTYSSHSTTLPKTTGAGAQTQWTQETGTTGEALLSSPSYSVTQMIKTATSPSSSPMLDRHTSQQITTAPSTNHSTIHSTSTSPQESPAVSQRGHTQAPQTTQESQTTRSVSPMTDTKTVTTPGSSFTASGHSPSEIVPQDAPTISAATTFAPAPTGDGHTTQAPTTALQAAPSSHDATLGPSGGTSLSKTGALTLANSVVSTPGGPEGQWTSASASTSPDTAAAMTHTHQAESTEASGQTQTSEPASSGSRTTSAGTATPSSSGASGTTPSGSEGISTSGETTRFSSNPSRDSHTTQSTTELLSASASHGAIPVSTGMASSIVPGTFHPTLSEASTAGRPTGQSSPTSPSASPQETAAISRMAQTQRTRTSRGSDTISLASQATDTFSTVPPTPPSITSTGLTSPQTETHTLSPSGSGKTFTTALISNATPLPVTYASSASTGHTTPLHVTDASSVSTGHATPLPVTSPSSVSTGHTTPLPVTDTSSESTGHVTPLPVTSFSSASTGDSTPLPVTDTSSASTGHVTPLPVTSLSSASTGDTTPLPVTDTSSASTGHATSLPVTDTSSVSTGHTTPLPVTDTSSASTGHATSLPVTDTSSVSTGHTTPLHVTDASSASTGQATPLPVTSLSSVSTGDTTPLPVTSPSSASTGHATPLLVTDTSSASTGHATPLPVTDASSVSTDHATSLPVTIPSAASTGHTTPLPVTDTSSASTGQATSLLVTDTSSVSTGDTTPLPVTSTSSASTGHVTPLHVTSPSSASTGHATPLPVTSLSSASTGDTMPLPVTSPSSASTGDTTPLPVTDASSVSTGHTTPLHVTDASSASTGQATPLPVTSLSSVSTGDTTPLPVTSPSSASTGHATPLLVTDTSSASTGHATPLPVTDASSVSTDHATSLPVTIPSAASTGHTTPLPVTDTSSASTGQATSLLVTDTSSVSTGDTTPLPVTSTSSASTGHVTPLHVTSPSSASTGHATPLPVTSLSSASTGDTMPLPVTSPSSASTGDTTPLPVTDASSVSTGHTTPLPVTSPSSASTGHTTPLPVTDTSSASKGDTTPLPVTSPSSASTGHTTPLPVTDTSSASTGDTTPLPVTNASSLSTGHATPLHVTSPSSASTGHATPLPVTSTSSASTGHATPLPVTGLSSATTDDTTRLPVTDVSSASTGQATPLPVTSLSSVSTGDTTPLPVTSPSSASTGHASPLLVTDASSASTGQATPLPVTDTSSVSTAHATPLPVTGLSSASTDDTTRLPVTDVSSASTGQAIPLPVTSPSSASTGDTTPLPVTDASSASTGDTTSLPVTIPSSASSGHTTSLPVTDASSVSTGHATSLLVTDASSVSTGDTTPLPVTDTNSASTGDTTPLHVTDASSVSTGHATSLPVTSLSSASTGDTTPLPVTSPSSASSGHTTPLPVTDASSVPTGHATSLPVTDASSVSTGHATPLPVTDASSVSTGHATPLPVTDTSSVSTGQATPLPVTSLSSASTGDTTPLPVTDTSSASTGQDTPLPVTSLSSVSTGDTTPLPVTNPSSASTGHATPLLVTDASSISTGHATSLLVTDASSVSTGHATALHDTDASSLSTGDTTPLPVTSPSSTSTGDTTPLPVTETSSVSTGHATSLPVTDTSSASTGHATSLPVTDTSSASTGHATPLPVTDTSSASTGQATPLPVTSPSSASTGHAIPLLVTDTSSASTGQATPLPVTSLSSASTGDTTPLPVTDASSVSTGHATSLPVTSLSSVSTGDTTPLPVTSPSSASTGHATPLHVTDASSASTGHATPLPVTSLSSASTGDTTPLPVTSPSSASTGHATPLHVTDASSVSTGDTTPLPVTSSSSASSGHTTPLPVTDASSASTGDTTPLPVTDTSSASTGHATHLPVTGLSSASTGDTTRLPVTNVSSASTGHATPLPVTSTSSASTGDTTPLPGTDTSSVSTGHTTPLLVTDASSVSTGDTTRLPVTSPSSASTGHTTPLPVTDTPSASTGDTTPLPVTNASSLSTRHATSLHVTSPSSASTGHATSLPVTDTSAASTGHATPLPVTSTSSASTGDTTPLPVTDTYSASTGQATPLPVTSLSSVSTGDTTPLPVTSPSSASTGHATPLLVTDASSASTGQATPLPVTSLSSVSTGDTTPLPVTSPSSASTGHATSLPVTDTSSASTGDTTSLPVTDTSSAYTGDTTSLPVTDTSSSSTGDTTPLLVTETSSVSTGDTTPLPVTDTSSASTGHATPLPVTNTSSVSTGHATPLHVTSPSSASTGHTTPLPVTDASSVSTGHATSLPVTDASSVFTGHATSLPVTIPSSASSGHTTPLPVTDASSVSTGHATSLPVTDASSVSTGHATPLPVTDASSVSTGHATPLPLTSLSSVSTGDTTPLPVTDTSSASTGQATPLPVTSLSSVSTGDTTPLPVTDTSSASTGHATSLPVTDTSSASTGHATPLPDTDTSSASTGHATLLPVTDTSSASIGHATSLPVTDTSSISTGHATPLHVTSPSSASTGHATPLPVTDTSSASTGHANPLHVTSPSSASTGHATPLPVTDTSSASTGHATPLPVTSLSSVSTGDTTPLPVTSPSSASTGHTTPLPVTDTSSASTGQATALPVTSTSSASTGDTTPLPVTDTSSASTGQATPLPVTSLSSVSTGDTTPLPVTSPSSASTGHATPLLVTDASSASTGQATPLPVTSLSSVSTGDTTPLPVTSPSSASTGHATSLPVTDTSSASTGDTTSLPVTDTSSAYTGDTTSLPVTDTSSSSTGDTTPLLVTETSSVSTGHATPLLVTDASSASTGHATPLHVTSPSSASTGDTTPVPVTDTSSVSTGHATPLPVTGLSSASTGDTTRLPVTDISSASTGQATPLPVTNTSSVSTGDTMPLPVTSPSSASTGHATPLPVTSTSSASTGHATPVPVTSTSSASTGHTTPLPVTDTSSASTGDTTPLPVTSPSSASTGHTTPLHVTIPSSASTGDTSTLPVTGASSASTGHATPLPVTDTSSVSTGHATPLPVTSLSSVSTGDTTPLPVTDASSASTGQATPLPVTSLSSVSTGDTTPLLVTDASSVSTGHATPLPVTDTSSASTGDTTRLPVTDTSSASTGQATPLPVTSLSSVSTGDTTPLLVTDASSVSTGHATPLPVTDTSSASTGDTTRLPVTDTSSASTGQATPLPVTIPSSSSSGHTTPLPVTSTSSVSTGHVTPLHVTSPSSASTGHVTPLPVTSTSSASTGHATPLLVTDASSVSTGHATPLPVTDASSASTGDTTPLPVTDTSSASTGQATPLPVTSLSSVSTGDTTPLPVTDASSASTGHATPLPVTIPSSVSTGDTMPLPVTSPSSASTGHATPLPVTGLSSASTGDTTPLPVTDTSSASTRHATPLPVTDTSSASTDDTTRLPVTDVSSASTGHATPLPVTSTSSASTGDTTPLPVTDTSSVSTGHATSLPVTSRSSASTGHATPLPVTDTSSVSTGHATPLPVTSTSSVSTGHATPLPVTSPSSASTGHATPVPVTSTSSASTGDTTPLPVTNASSLSTGHATPLHVTSPSSASRGDTSTLPVTDASSASTGHATPLPLTSLSSVSTGDTTPLPVTDTSSASTGQATPLPVTSLSSVSTGDTTPLPVTIPSSASSGHTTSLPVTDASSVSTGHGTPLPVTSTSSASTGDTTPLPVTDTSSASTGHATPLPVTDTSSASTGHATPLPVTSLSSVSTGHATPLAVSSATSASTVSSDSPLKMETPGMTTPSLKTDGGRRTATSPPPTTSQTIISTIPSTAMHTRSTAAPIPILPERGEAIQEFPSSPMGQAPGTWSSSGGPWTSPPHSSSRRLASPLAPLSVIPSTSQTMARSSSQSQTTRFSPTPTHSQQASQAGTLWPWWLRSGTMLTSPLVGGPHFIRNTRRSMVNTAC

SEQ ID NO: 53204 - protein, 4430 aa, Homo sapiens; identical to SEQ ID NO: 53203
  Payload ID: 10597
  Gene Symbol: MUC4
  Gene Name: mucin 4, cell surface associated
  ENSP ID: ENSP00000417757

SEQ ID NO: 53205 - protein, 4510 aa, Homo sapiens
  Payload ID: 10597
  Gene Symbol: MUC4
  Gene Name: mucin 4, cell surface associated
  ENSP ID: ENSP00000418306
MKGARWRRVPWVSLSCLCLCLLPHVVPGTTEDTLITGSKTAAPVTSTGSTTATLEGQSTAASSRTSNQDISASSQNHQTKSTETTSKAQTDTLTQMMTSTLFSSPSVHNVMETAPPDEMTTSFPSSVTNTLMMTSKTITMTTSTDSTLGNTEETSTAGTESSTPVTSAVSITAGQEGQSRTTSWRTSIQDTSASSQNHWTRSTQTTRESQTSTLTHRTTSTPSFSPSVHNVTGTVSQKTSPSGETATSSLCSVTNTSMMTSEKITVTTSTGSTLGNPGETSSVPVTGSLMPVTSAALVTFDPEGQSPATFSRTSTQDTTAFSKNHQTQSVETTRVSQINTLNTLTPVTTSTVLSSPSGFNPSGTVSQETFPSGETTTSSPSSVSNTFLVTSKVFRMPTSRDSTLGNTEETSLSVSGTISAITSKVSTIWWSDTLSTALSPSSLPPKISTAFHTQQSEGAETTGRPHERSSFSPGVSQEIFTLHETTTWPSSFSSKGHTTWSQTELPSTSTGAATRLVTGNPSTGTAGTIPRVPSKVSAIGEPGEPTTYSSHSTTLPKTTGAGAQTQWTQETGTTGEALLSSPSYSVTQMIKTATSPSSSPMLDRHTSQQITTAPSTNHSTIHSTSTSPQESPAVSQRGHTQAPQTTQESQTTRSVSPMTDTKTVTTPGSSFTASGHSPSEIVPQDAPTISAATTFAPAPTGDGHTTQAPTTALQAAPSSHDATLGPSGGTSLSKTGALTLANSVVSTPGGPEGQWTSASASTSPDTAAAMTHTHQAESTEASGQTQTSEPASSGSRTTSAGTATPSSSGASGTTPSGSEGISTSGETTRFSSNPSRDSHTTQSTTELLSASASHGAIPVSTGMASSIVPGTFHPTLSEASTAGRPTGQSSPTSPSASPQETAAISRMAQTQRTRTSRGSDTISLASQATDTFSTVPPTPPSITSTGLTSPQTETHTLSPSGSGKTFTTALISNATPLPVTYASSASTGHTTPLHVTDASSVSTGHATPLPVTSPSSVSTGHTTPLPVTDTSSESTGHVTPLPVTSFSSASTGDSTPLPVTDTSSASTGHVTPLPVTSLSSASTGDTTPLPVTDTSSASTGHATSLPVTDTSSVSTGHTTPLPVTDTSSASTGHATSLPVTDTSSVSTGHTTPLHVTDASSASTGQATPLPVTSLSSVSTGDTTPLPVTSPSSASTGHATPLLVTDTSSASTGHATPLPVTDASSVSTDHATSLPVTIPSAASTGHTTPLPVTDTSSASTGQATSLLVTDTSSVSTGDTTPLPVTSTSSASTGHVTPLHVTSPSSASTGHATPLPVTSLSSASTGDTMPLPVTSPSSASTGDTTPLPVTDASSVSTGHTTPLHVTDASSASTGQATPLPVTSLSSVSTGDTTPLPVTSPSSASTGHATPLLVTDTSSASTGHATPLPVTDASSVSTDHATSLPVTIPSAASTGHTTPLPVTDTSSASTGQATSLLVTDTSSVSTGDTTPLPVTSTSSASTGHVTPLHVTSPSSASTGHATPLPVTSLSSASTGDTMPLPVTSPSSASTGDTTPLPVTDASSVSTGHTTPLPVTSPSSASTGHTTPLPVTDTSSASKGDTTPLPVTSPSSASTGHTTPLPVTDTSSASTGDTTPLPVTNASSLSTGHATPLHVTSPSSASTGHATPLPVTSTSSASTGHATPLPVTGLSSATTDDTTRLPVTDVSSASTGQATPLPVTSLSSVSTGDTTPLPVTSPSSASTGHASPLLVTDASSASTGQATPLPVTDTSSVSTAHATPLPVTGLSSASTDDTTRLPVTDVSSASTGQAIPLPVTSPSSASTGDTTPLPVTDASSASTGDTTSLPVTIPSSASSGHTTSLPVTDASSVSTGHATSLLVTDASSVSTGDTTPLPVTDTNSASTGDTTPLHVTDASSVSTGHATSLPVTSLSSASTGDTTPLPVTSPSSASSGHTTPLPVTDASSVPTGHATSLPVTDASSVSTGHATPLPVTDASSVSTGHATPLPVTDTSSVSTGQATPLPVTSLSSASTGDTTPLPVTDTSSASTGQDTPLPVTSLSSVSTGDTTPLPVTNPSSASTGHATPLLVTDASSISTGHATSLLVTDASSVSTGHATALHDTDASSLSTGDTTPLPVTSPSSTSTGDTTPLPVTETSSVSTGHATSLPVTDTSSASTGHATSLPVTDTSSASTGHATPLPVTDTSSASTGQATPLPVTSPSSASTGHAIPLLVTDTSSASTGQATPLPVTSLSSASTGDTTPLPVTDASSVSTGHATSLPVTSLSSVSTGDTTPLPVTSPSSASTGHATPLHVTDASSASTGHATPLPVTSLSSASTGDTTPLPVTSPSSASTGHATPLHVTDASSVSTGDTTPLPVTSSSSASSGHTTPLPVTDASSASTGDTTPLPVTDTSSASTGHATHLPVTGLSSASTGDTTRLPVTNVSSASTGHATPLPVTSTSSASTGDTTPLPGTDTSSVSTGHTTPLLVTDASSVSTGDTTRLPVTSPSSASTGHTTPLPVTDTPSASTGDTTPLPVTNASSLSTRHATSLHVTSPSSASTGHATSLPVTDTSAASTGHATPLPVTSTSSASTGDTTPLPVTDTYSASTGQATPLPVTSLSSVSTGDTTPLPVTSPSSASTGHATPLLVTDASSASTGQATPLPVTSLSSVSTGDTTPLPVTSPSSASTGHATSLPVTDTSSASTGDTTSLPVTDTSSAYTGDTTSLPVTDTSSSSTGDTTPLLVTETSSVSTGDTTPLPVTDTSSASTGHATPLPVTNTSSVSTGHATPLHVTSPSSASTGHTTPLPVTDASSVSTGHATSLPVTDASSVFTGHATSLPVTIPSSASSGHTTPLPVTDASSVSTGHATSLPVTDASSVSTGHATPLPVTDASSVSTGHATPLPLTSLSSVSTGDTTPLPVTDTSSASTGQATPLPVTSLSSVSTGDTTPLPVTDTSSASTGHATSLPVTDTSSASTGHATPLPDTDTSSASTGHATLLPVTDTSSASIGHATSLPVTDTSSISTGHATPLHVTSPSSASTGHATPLPVTDTSSASTGHANPLHVTSPSSASTGHATPLPVTDTSSASTGHATPLPVTSLSSVSTGDTTPLPVTSPSSASTGHTTPLPVTDTSSASTGQATALPVTSTSSASTGDTTPLPVTDTSSASTGQATPLPVTSLSSVSTGDTTPLPVTSPSSASTGHATPLLVTDASSASTGQATPLPVTSLSSVSTGDTTPLPVTSPSSASTGHATSLPVTDTSSASTGDTTSLPVTDTSSAYTGDTTSLPVTDTSSSSTGDTTPLLVTETSSVSTGHATPLLVTDASSASTGHATPLHVTSPSSASTGDTTPVPVTDTSSVSTGHATPLPVTGLSSASTGDTTRLPVTDISSASTGQATPLPVTNTSSVSTGDTMPLPVTSPSSASTGHATPLPVTSTSSASTGHATPVPVTSTSSASTGHTTPLPVTDTSSASTGDTTPLPVTSPSSASTGHTTPLHVTIPSSASTGDTSTLPVTGASSASTGHATPLPVTDTSSVSTGHATPLPVTSLSSVSTGDTTPLPVTDASSASTGQATPLPVTSLSSVSTGDTTPLLVTDASSVSTGHATPLPVTDTSSASTGDTTRLPVTDTSSASTGQATPLPVTSLSSVSTGDTTPLLVTDASSVSTGHATPLPVTDTSSASTGDTTRLPVTDTSSASTGQATPLPVTIPSSSSSGHTTPLPVTSTSSVSTGHVTPLHVTSPSSASTGHVTPLPVTSTSSASTGHATPLLVTDASSVSTGHATPLPVTDASSASTGDTTPLPVTDTSSASTGQATPLPVTSLSSVSTGDTTPLPVTDASSASTGHATPLPVTIPSSVSTGDTMPLPVTSPSSASTGHATPLPVTGLSSASTGDTTPLPVTDTSSASTRHATPLPVTDTSSASTDDTTRLPVTDVSSASTGHATPLPVTSTSSASTGDTTPLPVTDTSSVSTGHATSLPVTSRSSASTGHATPLPVTDTSSVSTGHATPLPVTSTSSVSTGHATPLPVTSPSSASTGHATPVPVTSTSSASTGDTTPLPVTNASSLSTGHATPLHVTSPSSASRGDTSTLPVTDASSASTGHATPLPLTSLSSVSTGDTTPLPVTDTSSASTGQATPLPVTSLSSVSTGDTTPLPVTIPSSASSGHTTSLPVTDASSVSTGHGTPLPVTSTSSASTGDTTPLPVTDTSSASTGHATPLPVTDTSSASTGHATPLPVTSLSSVSTGHATPLAVSSATSASTVSSDSPLKMETPGMTTPSLKTDGGRRTATSPPPTTSQTIISTIPSTAMHTRSTAAPIPILPERGVSLFPYGAGAGDLEFVRRTVDFTSPLFKPATGFPLGSSLRDSLYFTDNGQIIFPESDYQIFSYPNPLPTGFTGRDPVALVAPFWDDADFSTGRGTTFYQEYETFYGEHSLLVQQAESWIRKMTNNGGYKARWALKVTWVNAHAYPAQWTLGSNTYQAILSTDGSRSYALFLYQSGGMQWDVAQRSVEMAISKTAH

SEQ ID NO: 53206 - protein, 5070 aa, Homo sapiens
  Payload ID: 10597
  Gene Symbol: MUC4
  Gene Name: mucin 4, cell surface associated
  ENSP ID: ENSP00000419798
MKGARWRRVPWVSLSCLCLCLLPHVVPGTTEDTLITGSKTAAPVTSTGSTTATLEGQSTAASSRTSNQDISASSQNHQTKSTETTSKAQTDTLTQMMTSTLFSSPSVHNVMETAPPDEMTTSFPSSVTNTLMMTSKTITMTTSTDSTLGNTEETSTAGTESSTPVTSAVSITAGQEGQSRTTSWRTSIQDTSASSQNHWTRSTQTTRESQTSTLTHRTTSTPSFSPSVHNVTGTVSQKTSPSGETATSSLCSVTNTSMMTSEKITVTTSTGSTLGNPGETSSVPVTGSLMPVTSAALVTFDPEGQSPATFSRTSTQDTTAFSKNHQTQSVETTRVSQINTLNTLTPVTTSTVLSSPSGFNPSGTVSQETFPSGETTTSSPSSVSNTFLVTSKVFRMPTSRDSTLGNTEETSLSVSGTISAITSKVSTIWWSDTLSTALSPSSLPPKISTAFHTQQSEGAETTGRPHERSSFSPGVSQEIFTLHETTTWPSSFSSKGHTTWSQTELPSTSTGAATRLVTGNPSTGTAGTIPRVPSKVSAIGEPGEPTTYSSHSTTLPKTTGAGAQTQWTQETGTTGEALLSSPSYSVTQMIKTATSPSSSPMLDRHTSQQITTAPSTNHSTIHSTSTSPQESPAVSQRGHTQAPQTTQESQTTRSVSPMTDTKTVTTPGSSFTASGHSPSEIVPQDAPTISAATTFAPAPTGDGHTTQAPTTALQAAPSSHDATLGPSGGTSLSKTGALTLANSVVSTPGGPEGQWTSASASTSPDTAAAMTHTHQAESTEASGQTQTSEPASSGSRTTSAGTATPSSSGASGTTPSGSEGISTSGETTRFSSNPSRDSHTTQSTTELLSASASHGAIPVSTGMASSIVPGTFHPTLSEASTAGRPTGQSSPTSPSASPQETAAISRMAQTQRTRTSRGSDTISLASQATDTFSTVPPTPPSITSTGLTSPQTETHTLSPSGSGKTFTTALISNATPLPVTYASSASTGHTTPLHVTDASSVSTGHATPLPVTSPSSVSTGHTTPLPVTDTSSESTGHVTPLPVTSFSSASTGDSTPLPVTDTSSASTGHVTPLPVTSLSSASTGDTTPLPVTDTSSASTGHATSLPVTDTSSVSTGHTTPLPVTDTSSASTGHATSLPVTDTSSVSTGHTTPLHVTDASSASTGQATPLPVTSLSSVSTGDTTPLPVTSPSSASTGHATPLLVTDTSSASTGHATPLPVTDASSVSTDHATSLPVTIPSAASTGHTTPLPVTDTSSASTGQATSLLVTDTSSVSTGDTTPLPVTSTSSASTGHVTPLHVTSPSSASTGHATPLPVTSLSSASTGDTMPLPVTSPSSASTGDTTPLPVTDASSVSTGHTTPLHVTDASSASTGQATPLPVTSLSSVSTGDTTPLPVTSPSSASTGHATPLLVTDTSSASTGHATPLPVTDASSVSTDHATSLPVTIPSAASTGHTTPLPVTDTSSASTGQATSLLVTDTSSVSTGDTTPLPVTSTSSASTGHVTPLHVTSPSSASTGHATPLPVTSLSSASTGDTMPLPVTSPSSASTGDTTPLPVTDASSVSTGHTTPLPVTSPSSASTGHTTPLPVTDTSSASKGDTTPLPVTSPSSASTGHTTPLPVTDTSSASTGDTTPLPVTNASSLSTGHATPLHVTSPSSASTGHATPLPVTSTSSASTGHATPLPVTGLSSATTDDTTRLPVTDVSSASTGQATPLPVTSLSSVSTGDTTPLPVTSPSSASTGHASPLLVTDASSASTGQATPLPVTDTSSVSTAHATPLPVTGLSSASTDDTTRLPVTDVSSASTGQAIPLPVTSPSSASTGDTTPLPVTDASSASTGDTTSLPVTIPSSASSGHTTSLPVTDASSVSTGHATSLLVTDASSVSTGDTTPLPVTDTNSASTGDTTPLHVTDASSVSTGHATSLPVTSLSSASTGDTTPLPVTSPSSASSGHTTPLPVTDASSVPTGHATSLPVTDASSVSTGHATPLPVTDASSVSTGHATPLPVTDTSSVSTGQATPLPVTSLSSASTGDTTPLPVTDTSSASTGQDTPLPVTSLSSVSTGDTTPLPVTNPSSASTGHATPLLVTDASSISTGHATSLLVTDASSVSTGHATALHDTDASSLSTGDTTPLPVTSPSSTSTGDTTPLPVTETSSVSTGHATSLPVTDTSSASTGHATSLPVTDTSSASTGHATPLPVTDTSSASTGQATPLPVTSPSSASTGHAIPLLVTDTSSASTGQATPLPVTSLSSASTGDTTPLPVTDASSVSTGHATSLPVTSLSSVSTGDTTPLPVTSPSSASTGHATPLHVTDASSASTGHATPLPVTSLSSASTGDTTPLPVTSPSSASTGHATPLHVTDASSVSTGDTTPLPVTSSSSASSGHTTPLPVTDASSASTGDTTPLPVTDTSSASTGHATHLPVTGLSSASTGDTTRLPVTNVSSASTGHATPLPVTSTSSASTGDTTPLPGTDTSSVSTGHTTPLLVTDASSVSTGDTTRLPVTSPSSASTGHTTPLPVTDTPSASTGDTTPLPVTNASSLSTRHATSLHVTSPSSASTGHATSLPVTDTSAASTGHATPLPVTSTSSASTGDTTPLPVTDTYSASTGQATPLPVTSLSSVSTGDTTPLPVTSPSSASTGHATPLLVTDASSASTGQATPLPVTSLSSVSTGDTTPLPVTSPSSASTGHATSLPVTDTSSASTGDTTSLPVTDTSSAYTGDTTSLPVTDTSSSSTGDTTPLLVTETSSVSTGDTTPLPVTDTSSASTGHATPLPVTNTSSVSTGHATPLHVTSPSSASTGHTTPLPVTDASSVSTGHATSLPVTDASSVFTGHATSLPVTIPSSASSGHTTPLPVTDASSVSTGHATSLPVTDASSVSTGHATPLPVTDASSVSTGHATPLPLTSLSSVSTGDTTPLPVTDTSSASTGQATPLPVTSLSSVSTGDTTPLPVTDTSSASTGHATSLPVTDTSSASTGHATPLPDTDTSSASTGHATLLPVTDTSSASIGHATSLPVTDTSSISTGHATPLHVTSPSSASTGHATPLPVTDTSSASTGHANPLHVTSPSSASTGHATPLPVTDTSSASTGHATPLPVTSLSSVSTGDTTPLPVTSPSSASTGHTTPLPVTDTSSASTGQATALPVTSTSSASTGDTTPLPVTDTSSASTGQATPLPVTSLSSVSTGDTTPLPVTSPSSASTGHATPLLVTDASSASTGQATPLPVTSLSSVSTGDTTPLPVTSPSSASTGHATSLPVTDTSSASTGDTTSLPVTDTSSAYTGDTTSLPVTDTSSSSTGDTTPLLVTETSSVSTGHATPLLVTDASSASTGHATPLHVTSPSSASTGDTTPVPVTDTSSVSTGHATPLPVTGLSSASTGDTTRLPVTDISSASTGQATPLPVTNTSSVSTGDTMPLPVTSPSSASTGHATPLPVTSTSSASTGHATPVPVTSTSSASTGHTTPLPVTDTSSASTGDTTPLPVTSPSSASTGHTTPLHVTIPSSASTGDTSTLPVTGASSASTGHATPLPVTDTSSVSTGHATPLPVTSLSSVSTGDTTPLPVTDASSASTGQATPLPVTSLSSVSTGDTTPLLVTDASSVSTGHATPLPVTDTSSASTGDTTRLPVTDTSSASTGQATPLPVTSLSSVSTGDTTPLLVTDASSVSTGHATPLPVTDTSSASTGDTTRLPVTDTSSASTGQATPLPVTIPSSSSSGHTTPLPVTSTSSVSTGHVTPLHVTSPSSASTGHVTPLPVTSTSSASTGHATPLLVTDASSVSTGHATPLPVTDASSASTGDTTPLPVTDTSSASTGQATPLPVTSLSSVSTGDTTPLPVTDASSASTGHATPLPVTIPSSVSTGDTMPLPVTSPSSASTGHATPLPVTGLSSASTGDTTPLPVTDTSSASTRHATPLPVTDTSSASTDDTTRLPVTDVSSASTGHATPLPVTSTSSASTGDTTPLPVTDTSSVSTGHATSLPVTSRSSASTGHATPLPVTDTSSVSTGHATPLPVTSTSSVSTGHATPLPVTSPSSASTGHATPVPVTSTSSASTGDTTPLPVTNASSLSTGHATPLHVTSPSSASRGDTSTLPVTDASSASTGHATPLPLTSLSSVSTGDTTPLPVTDTSSASTGQATPLPVTSLSSVSTGDTTPLPVTIPSSASSGHTTSLPVTDASSVSTGHGTPLPVTSTSSASTGDTTPLPVTDTSSASTGHATPLPVTDTSSASTGHATPLPVTSLSSVSTGHATPLAVSSATSASTVSSDSPLKMETPGMTTPSLKTDGGRRTATSPPPTTSQTIISTIPSTAMHTRSTAAPIPILPERGVSLFPYGAGAGDLEFVRRTVDFTSPLFKPATGFPLGSSLRDSLYFTDNGQIIFPESDYQIFSYPNPLPTGFTGRDPVALVAPFWDDADFSTGRGTTFYQEYETFYGEHSLLVQQAESWIRKMTNNGGYKARWALKVTWVNAHAYPAQWTLGSNTYQAILSTDGSRSYALFLYQSGGMQWDVAQRSGNPVLMGFSSGDGYFENSPLMSQPVWERYRPDRFLNSNSGLQGLQFYRLHREERPNYRLECLQWLKSQPRWPSWGWNQVSCPCSWQQGRRDLRFQPVSIGRWGLGSRQLCSFTSWRGGVCCSYGPWGEFREGWHVQRPWQLAQELEPQSWCCRWNDKPYLCALYQQRRPHVGCATYRPPQPAWMFGDPHITTLDGVSYTFNGLGDFLLVGAQDGNSSFLLQGRTAQTGSAQATNFIAFAAQYRSSSLGPVTVQWLLEPHDAIRVLLDNQTVTFQPDHEDGGGQETFNATGVLLSRNGSEVSASFDGWATVSVIALSNILHASASLPPEYQNRTEGLLGVWNNNPEDDFRMPNGSTIPPGSPEEMLFHFGMTWQINGTGLLGKRNDQLPSNFTPVFYSQLQKNSSWAEHLISNCDGDSSCIYDTLALRNASIGLHTREVSKNYEQANATLNQYPPSINGGRVIEAYKGQTTLIQYTSNAEDANFTLRDSCTDLELFENGTLLWTPKSLEPFTLEILARSAKIGLASALQPRTVVCHCNAESQCLYNQTSRVGNSSLELWGALSCVRTSPAL

SEQ ID NO: 53207 - protein, 4400 aa, Homo sapiens
  Payload ID: 10597
  Gene Symbol: MUC4
  Gene Name: mucin 4, cell surface associated
  ENSP ID: ENSP00000419989
MKGARWRRVPWVSLSCLCLCLLPHVVPGTTEDTLITGSKTAAPVTSTGSTTATLEGQSTAASSRTSNQDISASSQNHQTKSTETTSKAQTDTLTQMMTSTLFSSPSVHNVMETAPPDEMTTSFPSSVTNTLMMTSKTITMTTSTDSTLGNTEETSTAGTESSTPVTSAVSITAGQEGQSRTTSWRTSIQDTSASSQNHWTRSTQTTRESQTSTLTHRTTSTPSFSPSVHNVTGTVSQKTSPSGETATSSLCSVTNTSMMTSEKITVTTSTGSTLGNPGETSSVPVTGSLMPVTSAALVTFDPEGQSPATFSRTSTQDTTAFSKNHQTQSVETTRVSQINTLNTLTPVTTSTVLSSPSGFNPSGTVSQETFPSGETTTSSPSSVSNTFLVTSKVFRMPTSRDSTLGNTEETSLSVSGTISAITSKVSTIWWSDTLSTALSPSSLPPKISTAFHTQQSEGAETTGRPHERSSFSPGVSQEIFTLHETTTWPSSFSSKGHTTWSQTELPSTSTGAATRLVTGNPSTGTAGTIPRVPSKVSAIGEPGEPTTYSSHSTTLPKTTGAGAQTQWTQETGTTGEALLSSPSYSVTQMIKTATSPSSSPMLDRHTSQQITTAPSTNHSTIHSTSTSPQESPAVSQRGHTQAPQTTQESQTTRSVSPMTDTKTVTTPGSSFTASGHSPSEIVPQDAPTISAATTFAPAPTGDGHTTQAPTTALQAAPSSHDATLGPSGGTSLSKTGALTLANSVVSTPGGPEGQWTSASASTSPDTAAAMTHTHQAESTEASGQTQTSEPASSGSRTTSAGTATPSSSGASGTTPSGSEGISTSGETTRFSSNPSRDSHTTQSTTELLSASASHGAIPVSTGMASSIVPGTFHPTLSEASTAGRPTGQSSPTSPSASPQETAAISRMAQTQRTRTSRGSDTISLASQATDTFSTVPPTPPSITSTGLTSPQTETHTLSPSGSGKTFTTALISNATPLPVTYASSASTGHTTPLHVTDASSVSTGHATPLPVTSPSSVSTGHTTPLPVTDTSSESTGHVTPLPVTSFSSASTGDSTPLPVTDTSSASTGHVTPLPVTSLSSASTGDTTPLPVTDTSSASTGHATSLPVTDTSSVSTGHTTPLPVTDTSSASTGHATSLPVTDTSSVSTGHTTPLHVTDASSASTGQATPLPVTSLSSVSTGDTTPLPVTSPSSASTGHATPLLVTDTSSASTGHATPLPVTDASSVSTDHATSLPVTIPSAASTGHTTPLPVTDTSSASTGQATSLLVTDTSSVSTGDTTPLPVTSTSSASTGHVTPLHVTSPSSASTGHATPLPVTSLSSASTGDTMPLPVTSPSSASTGDTTPLPVTDASSVSTGHTTPLHVTDASSASTGQATPLPVTSLSSVSTGDTTPLPVTSPSSASTGHATPLLVTDTSSASTGHATPLPVTDASSVSTDHATSLPVTIPSAASTGHTTPLPVTDTSSASTGQATSLLVTDTSSVSTGDTTPLPVTSTSSASTGHVTPLHVTSPSSASTGHATPLPVTSLSSASTGDTMPLPVTSPSSASTGDTTPLPVTDASSVSTGHTTPLPVTSPSSASTGHTTPLPVTDTSSASKGDTTPLPVTSPSSASTGHTTPLPVTDTSSASTGDTTPLPVTNASSLSTGHATPLHVTSPSSASTGHATPLPVTSTSSASTGHATPLPVTGLSSATTDDTTRLPVTDVSSASTGQATPLPVTSLSSVSTGDTTPLPVTSPSSASTGHASPLLVTDASSASTGQATPLPVTDTSSVSTAHATPLPVTGLSSASTDDTTRLPVTDVSSASTGQAIPLPVTSPSSASTGDTTPLPVTDASSASTGDTTSLPVTIPSSASSGHTTSLPVTDASSVSTGHATSLLVTDASSVSTGDTTPLPVTDTNSASTGDTTPLHVTDASSVSTGHATSLPVTSLSSASTGDTTPLPVTSPSSASSGHTTPLPVTDASSVPTGHATSLPVTDASSVSTGHATPLPVTDASSVSTGHATPLPVTDTSSVSTGQATPLPVTSLSSASTGDTTPLPVTDTSSASTGQDTPLPVTSLSSVSTGDTTPLPVTNPSSASTGHATPLLVTDASSISTGHATSLLVTDASSVSTGHATALHDTDASSLSTGDTTPLPVTSPSSTSTGDTTPLPVTETSSVSTGHATSLPVTDTSSASTGHATSLPVTDTSSASTGHATPLPVTDTSSASTGQATPLPVTSPSSASTGHAIPLLVTDTSSASTGQATPLPVTSLSSASTGDTTPLPVTDASSVSTGHATSLPVTSLSSVSTGDTTPLPVTSPSSASTGHATPLHVTDASSASTGHATPLPVTSLSSASTGDTTPLPVTSPSSASTGHATPLHVTDASSVSTGDTTPLPVTSSSSASSGHTTPLPVTDASSASTGDTTPLPVTDTSSASTGHATHLPVTGLSSASTGDTTRLPVTNVSSASTGHATPLPVTSTSSASTGDTTPLPGTDTSSVSTGHTTPLLVTDASSVSTGDTTRLPVTSPSSASTGHTTPLPVTDTPSASTGDTTPLPVTNASSLSTRHATSLHVTSPSSASTGHATSLPVTDTSAASTGHATPLPVTSTSSASTGDTTPLPVTDTYSASTGQATPLPVTSLSSVSTGDTTPLPVTSPSSASTGHATPLLVTDASSASTGQATPLPVTSLSSVSTGDTTPLPVTSPSSASTGHATSLPVTDTSSASTGDTTSLPVTDTSSAYTGDTTSLPVTDTSSSSTGDTTPLLVTETSSVSTGDTTPLPVTDTSSASTGHATPLPVTNTSSVSTGHATPLHVTSPSSASTGHTTPLPVTDASSVSTGHATSLPVTDASSVFTGHATSLPVTIPSSASSGHTTPLPVTDASSVSTGHATSLPVTDASSVSTGHATPLPVTDASSVSTGHATPLPLTSLSSVSTGDTTPLPVTDTSSASTGQATPLPVTSLSSVSTGDTTPLPVTDTSSASTGHATSLPVTDTSSASTGHATPLPDTDTSSASTGHATLLPVTDTSSASIGHATSLPVTDTSSISTGHATPLHVTSPSSASTGHATPLPVTDTSSASTGHANPLHVTSPSSASTGHATPLPVTDTSSASTGHATPLPVTSLSSVSTGDTTPLPVTSPSSASTGHTTPLPVTDTSSASTGQATALPVTSTSSASTGDTTPLPVTDTSSASTGQATPLPVTSLSSVSTGDTTPLPVTSPSSASTGHATPLLVTDASSASTGQATPLPVTSLSSVSTGDTTPLPVTSPSSASTGHATSLPVTDTSSASTGDTTSLPVTDTSSAYTGDTTSLPVTDTSSSSTGDTTPLLVTETSSVSTGHATPLLVTDASSASTGHATPLHVTSPSSASTGDTTPVPVTDTSSVSTGHATPLPVTGLSSASTGDTTRLPVTDISSASTGQATPLPVTNTSSVSTGDTMPLPVTSPSSASTGHATPLPVTSTSSASTGHATPVPVTSTSSASTGHTTPLPVTDTSSASTGDTTPLPVTSPSSASTGHTTPLHVTIPSSASTGDTSTLPVTGASSASTGHATPLPVTDTSSVSTGHATPLPVTSLSSVSTGDTTPLPVTDASSASTGQATPLPVTSLSSVSTGDTTPLLVTDASSVSTGHATPLPVTDTSSASTGDTTRLPVTDTSSASTGQATPLPVTSLSSVSTGDTTPLLVTDASSVSTGHATPLPVTDTSSASTGDTTRLPVTDTSSASTGQATPLPVTIPSSSSSGHTTPLPVTSTSSVSTGHVTPLHVTSPSSASTGHVTPLPVTSTSSASTGHATPLLVTDASSVSTGHATPLPVTDASSASTGDTTPLPVTDTSSASTGQATPLPVTSLSSVSTGDTTPLPVTDASSASTGHATPLPVTIPSSVSTGDTMPLPVTSPSSASTGHATPLPVTGLSSASTGDTTPLPVTDTSSASTRHATPLPVTDTSSASTDDTTRLPVTDVSSASTGHATPLPVTSTSSASTGDTTPLPVTDTSSVSTGHATSLPVTSRSSASTGHATPLPVTDTSSVSTGHATPLPVTSTSSVSTGHATPLPVTSPSSASTGHATPVPVTSTSSASTGDTTPLPVTNASSLSTGHATPLHVTSPSSASRGDTSTLPVTDASSASTGHATPLPLTSLSSVSTGDTTPLPVTDTSSASTGQATPLPVTSLSSVSTGDTTPLPVTIPSSASSGHTTSLPVTDASSVSTGHGTPLPVTSTSSASTGDTTPLPVTDTSSASTGHATPLPVTDTSSASTGHATPLPVTSLSSVSTGHATPLAVSSATSASTVSSDSPLKMETPGMTTPSLKTDGGRRTATSPPPTTSQTIISTIPSTAMHTRSTAAPIPILPERGVSLFPYGAGAGDLEFVRRTVDFTSPLFKPATGFPLGSSLRDSLYASQAGTLWPWWLRSGTMLTSPLVGGPHFIRNTRRSMVNTAC

SEQ ID NO: 53208 - protein, 5360 aa, Homo sapiens
  Payload ID: 10597
  Gene Symbol: MUC4
  Gene Name: mucin 4, cell surface associated
  ENSP ID: ENSP00000420243
MKGARWRRVPWVSLSCLCLCLLPHVVPGTTEDTLITGSKTAAPVTSTGSTTATLEGQSTAASSRTSNQDISASSQNHQTKSTETTSKAQTDTLTQMMTSTLFSSPSVHNVMETAPPDEMTTSFPSSVTNTLMMTSKTITMTTSTDSTLGNTEETSTAGTESSTPVTSAVSITAGQEGQSRTTSWRTSIQDTSASSQNHWTRSTQTTRESQTSTLTHRTTSTPSFSPSVHNVTGTVSQKTSPSGETATSSLCSVTNTSMMTSEKITVTTSTGSTLGNPGETSSVPVTGSLMPVTSAALVTFDPEGQSPATFSRTSTQDTTAFSKNHQTQSVETTRVSQINTLNTLTPVTTSTVLSSPSGFNPSGTVSQETFPSGETTTSSPSSVSNTFLVTSKVFRMPTSRDSTLGNTEETSLSVSGTISAITSKVSTIWWSDTLSTALSPSSLPPKISTAFHTQQSEGAETTGRPHERSSFSPGVSQEIFTLHETTTWPSSFSSKGHTTWSQTELPSTSTGAATRLVTGNPSTGTAGTIPRVPSKVSAIGEPGEPTTYSSHSTTLPKTTGAGAQTQWTQETGTTGEALLSSPSYSVTQMIKTATSPSSSPMLDRHTSQQITTAPSTNHSTIHSTSTSPQESPAVSQRGHTQAPQTTQESQTTRSVSPMTDTKTVTTPGSSFTASGHSPSEIVPQDAPTISAATTFAPAPTGDGHTTQAPTTALQAAPSSHDATLGPSGGTSLSKTGALTLANSVVSTPGGPEGQWTSASASTSPDTAAAMTHTHQAESTEASGQTQTSEPASSGSRTTSAGTATPSSSGASGTTPSGSEGISTSGETTRFSSNPSRDSHTTQSTTELLSASASHGAIPVSTGMASSIVPGTFHPTLSEASTAGRPTGQSSPTSPSASPQETAAISRMAQTQRTRTSRGSDTISLASQATDTFSTVPPTPPSITSTGLTSPQTETHTLSPSGSGKTFTTALISNATPLPVTYASSASTGHTTPLHVTDASSVSTGHATPLPVTSPSSVSTGHTTPLPVTDTSSESTGHVTPLPVTSFSSASTGDSTPLPVTDTSSASTGHVTPLPVTSLSSASTGDTTPLPVTDTSSASTGHATSLPVTDTSSVSTGHTTPLPVTDTSSASTGHATSLPVTDTSSVSTGHTTPLHVTDASSASTGQATPLPVTSLSSVSTGDTTPLPVTSPSSASTGHATPLLVTDTSSASTGHATPLPVTDASSVSTDHATSLPVTIPSAASTGHTTPLPVTDTSSASTGQATSLLVTDTSSVSTGDTTPLPVTSTSSASTGHVTPLHVTSPSSASTGHATPLPVTSLSSASTGDTMPLPVTSPSSASTGDTTPLPVTDASSVSTGHTTPLHVTDASSASTGQATPLPVTSLSSVSTGDTTPLPVTSPSSASTGHATPLLVTDTSSASTGHATPLPVTDASSVSTDHATSLPVTIPSAASTGHTTPLPVTDTSSASTGQATSLLVTDTSSVSTGDTTPLPVTSTSSASTGHVTPLHVTSPSSASTGHATPLPVTSLSSASTGDTMPLPVTSPSSASTGDTTPLPVTDASSVSTGHTTPLPVTSPSSASTGHTTPLPVTDTSSASKGDTTPLPVTSPSSASTGHTTPLPVTDTSSASTGDTTPLPVTNASSLSTGHATPLHVTSPSSASTGHATPLPVTSTSSASTGHATPLPVTGLSSATTDDTTRLPVTDVSSASTGQATPLPVTSLSSVSTGDTTPLPVTSPSSASTGHASPLLVTDASSASTGQATPLPVTDTSSVSTAHATPLPVTGLSSASTDDTTRLPVTDVSSASTGQAIPLPVTSPSSASTGDTTPLPVTDASSASTGDTTSLPVTIPSSASSGHTTSLPVTDASSVSTGHATSLLVTDASSVSTGDTTPLPVTDTNSASTGDTTPLHVTDASSVSTGHATSLPVTSLSSASTGDTTPLPVTSPSSASSGHTTPLPVTDASSVPTGHATSLPVTDASSVSTGHATPLPVTDASSVSTGHATPLPVTDTSSVSTGQATPLPVTSLSSASTGDTTPLPVTDTSSASTGQDTPLPVTSLSSVSTGDTTPLPVTNPSSASTGHATPLLVTDASSISTGHATSLLVTDASSVSTGHATALHDTDASSLSTGDTTPLPVTSPSSTSTGDTTPLPVTETSSVSTGHATSLPVTDTSSASTGHATSLPVTDTSSASTGHATPLPVTDTSSASTGQATPLPVTSPSSASTGHAIPLLVTDTSSASTGQATPLPVTSLSSASTGDTTPLPVTDASSVSTGHATSLPVTSLSSVSTGDTTPLPVTSPSSASTGHATPLHVTDASSASTGHATPLPVTSLSSASTGDTTPLPVTSPSSASTGHATPLHVTDASSVSTGDTTPLPVTSSSSASSGHTTPLPVTDASSASTGDTTPLPVTDTSSASTGHATHLPVTGLSSASTGDTTRLPVTNVSSASTGHATPLPVTSTSSASTGDTTPLPGTDTSSVSTGHTTPLLVTDASSVSTGDTTRLPVTSPSSASTGHTTPLPVTDTPSASTGDTTPLPVTNASSLSTRHATSLHVTSPSSASTGHATSLPVTDTSAASTGHATPLPVTSTSSASTGDTTPLPVTDTYSASTGQATPLPVTSLSSVSTGDTTPLPVTSPSSASTGHATPLLVTDASSASTGQATPLPVTSLSSVSTGDTTPLPVTSPSSASTGHATSLPVTDTSSASTGDTTSLPVTDTSSAYTGDTTSLPVTDTSSSSTGDTTPLLVTETSSVSTGDTTPLPVTDTSSASTGHATPLPVTNTSSVSTGHATPLHVTSPSSASTGHTTPLPVTDASSVSTGHATSLPVTDASSVFTGHATSLPVTIPSSASSGHTTPLPVTDASSVSTGHATSLPVTDASSVSTGHATPLPVTDASSVSTGHATPLPLTSLSSVSTGDTTPLPVTDTSSASTGQATPLPVTSLSSVSTGDTTPLPVTDTSSASTGHATSLPVTDTSSASTGHATPLPDTDTSSASTGHATLLPVTDTSSASIGHATSLPVTDTSSISTGHATPLHVTSPSSASTGHATPLPVTDTSSASTGHANPLHVTSPSSASTGHATPLPVTDTSSASTGHATPLPVTSLSSVSTGDTTPLPVTSPSSASTGHTTPLPVTDTSSASTGQATALPVTSTSSASTGDTTPLPVTDTSSASTGQATPLPVTSLSSVSTGDTTPLPVTSPSSASTGHATPLLVTDASSASTGQATPLPVTSLSSVSTGDTTPLPVTSPSSASTGHATSLPVTDTSSASTGDTTSLPVTDTSSAYTGDTTSLPVTDTSSSSTGDTTPLLVTETSSVSTGHATPLLVTDASSASTGHATPLHVTSPSSASTGDTTPVPVTDTSSVSTGHATPLPVTGLSSASTGDTTRLPVTDISSASTGQATPLPVTNTSSVSTGDTMPLPVTSPSSASTGHATPLPVTSTSSASTGHATPVPVTSTSSASTGHTTPLPVTDTSSASTGDTTPLPVTSPSSASTGHTTPLHVTIPSSASTGDTSTLPVTGASSASTGHATPLPVTDTSSVSTGHATPLPVTSLSSVSTGDTTPLPVTDASSASTGQATPLPVTSLSSVSTGDTTPLLVTDASSVSTGHATPLPVTDTSSASTGDTTRLPVTDTSSASTGQATPLPVTSLSSVSTGDTTPLLVTDASSVSTGHATPLPVTDTSSASTGDTTRLPVTDTSSASTGQATPLPVTIPSSSSSGHTTPLPVTSTSSVSTGHVTPLHVTSPSSASTGHVTPLPVTSTSSASTGHATPLLVTDASSVSTGHATPLPVTDASSASTGDTTPLPVTDTSSASTGQATPLPVTSLSSVSTGDTTPLPVTDASSASTGHATPLPVTIPSSVSTGDTMPLPVTSPSSASTGHATPLPVTGLSSASTGDTTPLPVTDTSSASTRHATPLPVTDTSSASTDDTTRLPVTDVSSASTGHATPLPVTSTSSASTGDTTPLPVTDTSSVSTGHATSLPVTSRSSASTGHATPLPVTDTSSVSTGHATPLPVTSTSSVSTGHATPLPVTSPSSASTGHATPVPVTSTSSASTGDTTPLPVTNASSLSTGHATPLHVTSPSSASRGDTSTLPVTDASSASTGHATPLPLTSLSSVSTGDTTPLPVTDTSSASTGQATPLPVTSLSSVSTGDTTPLPVTIPSSASSGHTTSLPVTDASSVSTGHGTPLPVTSTSSASTGDTTPLPVTDTSSASTGHATPLPVTDTSSASTGHATPLPVTSLSSVSTGHATPLAVSSATSASTVSSDSPLKMETPGMTTPSLKTDGGRRTATSPPPTTSQTIISTIPSTAMHTRSTAAPIPILPERGVSLFPYGAGAGDLEFVRRTVDFTSPLFKPATGFPLGSSLRDSLYFTDNGQIIFPESDYQIFSYPNPLPTGFTGRDPVALVAPFWDDADFSTGRGTTFYQSNTYQAILSTDGSRSYALFLYQSGGMQWDVAQRSGNPVLMGFSSGDGYFENSPLMSQPVWERYRPDRFLNSNSGLQGLQFYRLHREERPNYRLECLQWLKSQPRWPSWGWNQVSCPCSWQQGRRDLRFQPVSIGRWGLGSRQLCSFTSWRGGVCCSYGPWGEFREGWHVQRPWQLAQELEPQSWCCRWNDKPYLCALYQQRRPHVGCATYRPPQPAWMFGDPHITTLDGVSYTFNGLGDFLLVGAQDGNSSFLLQGRTAQTGSAQATNFIAFAAQYRSSSLGPVTVQWLLEPHDAIRVLLDNQTVTFQPDHEDGGGQETFNATGVLLSRNGSEVSASFDGWATVSVIALSNILHASASLPPEYQNRTEGLLGVWNNNPEDDFRMPNGSTIPPGSPEEMLFHFGMTWQINGTGLLGKRNDQLPSNFTPVFYSQLQKNSSWAEHLISNCDGDSSCIYDTLALRNASIGLHTREVSKNYEQANATLNQYPPSINGGRVIEAYKGQTTLIQYTSNAEDANFTLRDSCTDLELFENGTLLWTPKSLEPFTLEILARSAKIGLASALQPRTVVCHCNAESQCLYNQTSRVGNSSLEVAGCKCDGGTFGRYCEGSEDACEEPCFPSVHCVPGKGCEACPPNLTGDGRHCAALGSSFLCQNQSCPVNYCYNQGHCYISQTLGCQPMCTCPPAFTDSRCFLAGNNFSPTVNLELPLRVIQLLLSEEENASMAEVNASVAYRLGTLDMRAFLRNSQVERIDSAAPASGSPIQHWMVISEFQYRPRGPVIDFLNNQLLAAVVEAFLYHVPRRSEEPRNDVVFQPISGEDVRDVTALNVSTLKAYFRCDGYKGYDLVYSPQSGFTCVSPCSRGYCDHGGQCQHLPSGPRCSCVSFSIYTAWGEHCEHLSMKLDAFFGIFFGALGGLLLLGVGTFVVLRFWGCSGARFSYFLNSAEALP

SEQ ID NO: 53209 - protein, 4444 aa, Homo sapiens
  Payload ID: 10597
  Gene Symbol: MUC4
  Gene Name: mucin 4, cell surface associated
  ENSP ID: ENSP00000420439
MKGARWRRVPWVSLSCLCLCLLPHVVPGTTEDTLITGSKTAAPVTSTGSTTATLEGQSTAASSRTSNQDISASSQNHQTKSTETTSKAQTDTLTQMMTSTLFSSPSVHNVMETAPPDEMTTSFPSSVTNTLMMTSKTITMTTSTDSTLGNTEETSTAGTESSTPVTSAVSITAGQEGQSRTTSWRTSIQDTSASSQNHWTRSTQTTRESQTSTLTHRTTSTPSFSPSVHNVTGTVSQKTSPSGETATSSLCSVTNTSMMTSEKITVTTSTGSTLGNPGETSSVPVTGSLMPVTSAALVTFDPEGQSPATFSRTSTQDTTAFSKNHQTQSVETTRVSQINTLNTLTPVTTSTVLSSPSGFNPSGTVSQETFPSGETTTSSPSSVSNTFLVTSKVFRMPTSRDSTLGNTEETSLSVSGTISAITSKVSTIWWSDTLSTALSPSSLPPKISTAFHTQQSEGAETTGRPHERSSFSPGVSQEIFTLHETTTWPSSFSSKGHTTWSQTELPSTSTGAATRLVTGNPSTGTAGTIPRVPSKVSAIGEPGEPTTYSSHSTTLPKTTGAGAQTQWTQETGTTGEALLSSPSYSVTQMIKTATSPSSSPMLDRHTSQQITTAPSTNHSTIHSTSTSPQESPAVSQRGHTQAPQTTQESQTTRSVSPMTDTKTVTTPGSSFTASGHSPSEIVPQDAPTISAATTFAPAPTGDGHTTQAPTTALQAAPSSHDATLGPSGGTSLSKTGALTLANSVVSTPGGPEGQWTSASASTSPDTAAAMTHTHQAESTEASGQTQTSEPASSGSRTTSAGTATPSSSGASGTTPSGSEGISTSGETTRFSSNPSRDSHTTQSTTELLSASASHGAIPVSTGMASSIVPGTFHPTLSEASTAGRPTGQSSPTSPSASPQETAAISRMAQTQRTRTSRGSDTISLASQATDTFSTVPPTPPSITSTGLTSPQTETHTLSPSGSGKTFTTALISNATPLPVTYASSASTGHTTPLHVTDASSVSTGHATPLPVTSPSSVSTGHTTPLPVTDTSSESTGHVTPLPVTSFSSASTGDSTPLPVTDTSSASTGHVTPLPVTSLSSASTGDTTPLPVTDTSSASTGHATSLPVTDTSSVSTGHTTPLPVTDTSSASTGHATSLPVTDTSSVSTGHTTPLHVTDASSASTGQATPLPVTSLSSVSTGDTTPLPVTSPSSASTGHATPLLVTDTSSASTGHATPLPVTDASSVSTDHATSLPVTIPSAASTGHTTPLPVTDTSSASTGQATSLLVTDTSSVSTGDTTPLPVTSTSSASTGHVTPLHVTSPSSASTGHATPLPVTSLSSASTGDTMPLPVTSPSSASTGDTTPLPVTDASSVSTGHTTPLHVTDASSASTGQATPLPVTSLSSVSTGDTTPLPVTSPSSASTGHATPLLVTDTSSASTGHATPLPVTDASSVSTDHATSLPVTIPSAASTGHTTPLPVTDTSSASTGQATSLLVTDTSSVSTGDTTPLPVTSTSSASTGHVTPLHVTSPSSASTGHATPLPVTSLSSASTGDTMPLPVTSPSSASTGDTTPLPVTDASSVSTGHTTPLPVTSPSSASTGHTTPLPVTDTSSASKGDTTPLPVTSPSSASTGHTTPLPVTDTSSASTGDTTPLPVTNASSLSTGHATPLHVTSPSSASTGHATPLPVTSTSSASTGHATPLPVTGLSSATTDDTTRLPVTDVSSASTGQATPLPVTSLSSVSTGDTTPLPVTSPSSASTGHASPLLVTDASSASTGQATPLPVTDTSSVSTAHATPLPVTGLSSASTDDTTRLPVTDVSSASTGQAIPLPVTSPSSASTGDTTPLPVTDASSASTGDTTSLPVTIPSSASSGHTTSLPVTDASSVSTGHATSLLVTDASSVSTGDTTPLPVTDTNSASTGDTTPLHVTDASSVSTGHATSLPVTSLSSASTGDTTPLPVTSPSSASSGHTTPLPVTDASSVPTGHATSLPVTDASSVSTGHATPLPVTDASSVSTGHATPLPVTDTSSVSTGQATPLPVTSLSSASTGDTTPLPVTDTSSASTGQDTPLPVTSLSSVSTGDTTPLPVTNPSSASTGHATPLLVTDASSISTGHATSLLVTDASSVSTGHATALHDTDASSLSTGDTTPLPVTSPSSTSTGDTTPLPVTETSSVSTGHATSLPVTDTSSASTGHATSLPVTDTSSASTGHATPLPVTDTSSASTGQATPLPVTSPSSASTGHAIPLLVTDTSSASTGQATPLPVTSLSSASTGDTTPLPVTDASSVSTGHATSLPVTSLSSVSTGDTTPLPVTSPSSASTGHATPLHVTDASSASTGHATPLPVTSLSSASTGDTTPLPVTSPSSASTGHATPLHVTDASSVSTGDTTPLPVTSSSSASSGHTTPLPVTDASSASTGDTTPLPVTDTSSASTGHATHLPVTGLSSASTGDTTRLPVTNVSSASTGHATPLPVTSTSSASTGDTTPLPGTDTSSVSTGHTTPLLVTDASSVSTGDTTRLPVTSPSSASTGHTTPLPVTDTPSASTGDTTPLPVTNASSLSTRHATSLHVTSPSSASTGHATSLPVTDTSAASTGHATPLPVTSTSSASTGDTTPLPVTDTYSASTGQATPLPVTSLSSVSTGDTTPLPVTSPSSASTGHATPLLVTDASSASTGQATPLPVTSLSSVSTGDTTPLPVTSPSSASTGHATSLPVTDTSSASTGDTTSLPVTDTSSAYTGDTTSLPVTDTSSSSTGDTTPLLVTETSSVSTGDTTPLPVTDTSSASTGHATPLPVTNTSSVSTGHATPLHVTSPSSASTGHTTPLPVTDASSVSTGHATSLPVTDASSVFTGHATSLPVTIPSSASSGHTTPLPVTDASSVSTGHATSLPVTDASSVSTGHATPLPVTDASSVSTGHATPLPLTSLSSVSTGDTTPLPVTDTSSASTGQATPLPVTSLSSVSTGDTTPLPVTDTSSASTGHATSLPVTDTSSASTGHATPLPDTDTSSASTGHATLLPVTDTSSASIGHATSLPVTDTSSISTGHATPLHVTSPSSASTGHATPLPVTDTSSASTGHANPLHVTSPSSASTGHATPLPVTDTSSASTGHATPLPVTSLSSVSTGDTTPLPVTSPSSASTGHTTPLPVTDTSSASTGQATALPVTSTSSASTGDTTPLPVTDTSSASTGQATPLPVTSLSSVSTGDTTPLPVTSPSSASTGHATPLLVTDASSASTGQATPLPVTSLSSVSTGDTTPLPVTSPSSASTGHATSLPVTDTSSASTGDTTSLPVTDTSSAYTGDTTSLPVTDTSSSSTGDTTPLLVTETSSVSTGHATPLLVTDASSASTGHATPLHVTSPSSASTGDTTPVPVTDTSSVSTGHATPLPVTGLSSASTGDTTRLPVTDISSASTGQATPLPVTNTSSVSTGDTMPLPVTSPSSASTGHATPLPVTSTSSASTGHATPVPVTSTSSASTGHTTPLPVTDTSSASTGDTTPLPVTSPSSASTGHTTPLHVTIPSSASTGDTSTLPVTGASSASTGHATPLPVTDTSSVSTGHATPLPVTSLSSVSTGDTTPLPVTDASSASTGQATPLPVTSLSSVSTGDTTPLLVTDASSVSTGHATPLPVTDTSSASTGDTTRLPVTDTSSASTGQATPLPVTSLSSVSTGDTTPLLVTDASSVSTGHATPLPVTDTSSASTGDTTRLPVTDTSSASTGQATPLPVTIPSSSSSGHTTPLPVTSTSSVSTGHVTPLHVTSPSSASTGHVTPLPVTSTSSASTGHATPLLVTDASSVSTGHATPLPVTDASSASTGDTTPLPVTDTSSASTGQATPLPVTSLSSVSTGDTTPLPVTDASSASTGHATPLPVTIPSSVSTGDTMPLPVTSPSSASTGHATPLPVTGLSSASTGDTTPLPVTDTSSASTRHATPLPVTDTSSASTDDTTRLPVTDVSSASTGHATPLPVTSTSSASTGDTTPLPVTDTSSVSTGHATSLPVTSRSSASTGHATPLPVTDTSSVSTGHATPLPVTSTSSVSTGHATPLPVTSPSSASTGHATPVPVTSTSSASTGDTTPLPVTNASSLSTGHATPLHVTSPSSASRGDTSTLPVTDASSASTGHATPLPLTSLSSVSTGDTTPLPVTDTSSASTGQATPLPVTSLSSVSTGDTTPLPVTIPSSASSGHTTSLPVTDASSVSTGHGTPLPVTSTSSASTGDTTPLPVTDTSSASTGHATPLPVTDTSSASTGHATPLPVTSLSSVSTGHATPLAVSSATSASTVSSDSPLKMETPGMTTPSLKTDGGRRTATSPPPTTSQTIISTIPSTAMHTRSTAAPIPILPERGVSLFPYGAGAGDLEFVRRTVDFTSPLFKPATGFPLGSSLRDSLYASQAGTLWPWWLRSGTMLTSPLVGGPHFIRATPTKPSSPRTGAGPMPCFSTRAVGCSGTWPSAQWRWLFRKQPTDVPASVGEVSP

SEQ ID NO: 53210 - protein, 604 aa, Homo sapiens
  Payload ID: 10597
  Gene Symbol: MUC4
  Gene Name: mucin 4, cell surface associated
  ENSP ID: ENSP00000477983
GHATPLLVTDASSISTGHATSLLVTDASSVSTGHATALHDTDASSLSTGDTTPLPVTSPSSTSTGDTTPLPVTETSSVSTGHATSLPVTDTSSASTGHATSLPVTDTSSASTGHATPLPVTDTSSASTGQATPLPVTSPSSASTGHAIPLLVTDTSSASTGQATPLPVTSLSSASTGDTTPLPVTDASSVSTGDTTPLPVTSPSSASTGHATPLHVTDASSASTGHATPLPVTSLSSASTGDTTPLPVTSPSSASTGHATPLHVTDASSVSTGDTTPLPVTSSSSASSGHTTPLPVTDASSASTGDTTPLPVTDTSSASTGHATHLPVTGLSSASTGDTTRLPVTNVSSASTGHATPLPVTSTSSASTGDTTPLPGTDTSSVSTGHTTPLLVTDASSVSTGDTTRLPVTSPSSASTGHTTPLPVTDTPSASTGDTTPLPVTNASSLSTRHATSLHVTSPSSASTGHATSLPVTDTSAASTGHATPLPVTSTSSASTGDTTPLPVTDTYSASTGQATPLPVTSLSSVSTGDTTPLPVTSPSSASTGHATPLLVTDASSASTGQATPLPVTSLSSVSTGDTTPLPVTSPSSASTGHATSLPVTDTS

SEQ ID NO: 53211 - protein, 5314 aa, Homo sapiens
  Payload ID: 10597
  Gene Symbol: MUC4
  Gene Name: mucin 4, cell surface associated
  ENSP ID: ENSP00000478400
SLPPSACGPRVMETAPPDEMTTSFPSSVTNTLMMTSKTITMTTSTDSTLGNTEETSTAGTESSTPVTSAVSITAGQEGQSRTTSWRTSIQDTSASSQNHWTRSTQTTRESQTSTLTHRTTSTPSFSPSVHNVTGTVSQKTSPSGETATSSLCSVTNTSMMTSEKITVTTSTGSTLGNPGETSSVPVTGSLMPVTSAALVTVDPEGQSPVTFSRTSTQDTTAFSKNHQTQSVETTRVSQINTLNTLTPVTTSTVLSSPSGFNPSGTVSQETFPSGETTISSPSSVSNTFLVTSKVFRMPISRDSTLGNTEETSLSVSGTISAITSKVSTIWWSDTLSTALSPSSLPPKISTAFHTQQSEGAETTGRPHERSSFSPGVSQEIFTLHETTTWPSSFSSKGHTTWSQTELPSTSTGAATRLVTGNPSTGAAGTIPRVPSKVSAIGEPGEPTTYSSHSTTLPKTTGAGAQTQWTQETGTTGEALLSSPSYSVTQMIKTATSPSSSPMLDRHTSQQITTAPSTNHSTIHSTSTSPQESPAVSQRGHTQAPQTTQESQTTRSVSPMTDTKTVTTPGSSFTASGHSPSEIVPQDAPTISAATTFAPAPTGDGHTTQAPTTALQAAPSSHDATLGPSGGTSLSKTGALTLANSVVSTPGGPEGQWTSASASTSPDTAAAMTHTHQAESTEASGQTQTSEPASSGSRTTSAGTATPSSSGASGTTPSGSEGISTSGETTRFSSNPSRDSHTTQSTTELLSASASHGAIPVSTGMASSIVPGTFHPTLSEASTAGRPTGQSSPTSPSASPQETAAISRMAQTQRTRTSRGSDTISLASQATDTFSTVPPTPPSITSSGLTSPQTQTHTLSPSGSGKTFTTALISNATPLPVTYASSASTGHTTPLHVTDASSVSTGHATPLPVTSPSSVSTGHTTPLPVTDTSSESTGHVTPLPVTSLSSASTGDSTPLPVTDTSSASTGHVTPLPVTSLSSASTGDTTPLPVTDTSSASTGHATSLPVTDTSSVSTGHTTPLPVTDTSSASTGHATSLPVTDTSSVSTGDTTPLHVTDASSASTGQDTPLPVTSLSSVSTGDTTPLPVTSPSSASTGHATPLLVTDASSVSTGHATSLLVTDASSVSTGHATALHVTSPSSASTGDTTPLPVTDTSSASTGHATSLPVTDTSSASTGHATPLPVTDTSSASTGQATPLPVTGPSSASTGHATSLPVTSLSSVSTGDTTPLPVTSPSSASSGHTTPLPVTDASSVSTGHTTPLPVTDASSASTGHATPLPVTSTSSASTGDTTPLPVTSPSSASTGHATSLPVTDTSSVSTGHATSLPVTDASSVFTGHATSLPVTIPSSASSGHTTPLPVTDASSVSTGHATSLPVTDASSVSTGDTTPLPVTDTSSASTGHATPLHVTSPSSASTGHATPLPVTSLSSVSTGDTTPLPVTSPSSASTGHTTPLPVTDTSSASTGQATALPVTSTSSASTGDTTPLPVTDTSSASTGDTTPLPVTSPSSASTGHATPLPVTDTSSAYTGDTTSLPVTDTSSSSTGHATPLHVTSPSSASTGQATPLPVTNTSSASTGHATPLPVTGLSSASTGDTTRLPVTDISSASTGQATPLPVTNTSSVSTGDTMPLPVTSPSSASTGHATPLPVTDASSASTGHATPLPVTDTSSVSTGHATPLPLTSLSSVSTGDTTPLPVTDASSASTGHATPLPVTSLSSVSTGDTTPLPVTDASSASTGDTTPLPVTIPSSASSGHTTSLPVTDTSSVSTGDTTPLLVTDASSVSTGHATPLPVTDTSSASTGDTTRLPVTDTSSASTGQATPLPVTSLSSVSTGDTTPLLVTSTSSASTGHATSLPVTDTSSVSTGHATSLPVTDTSSVSTGHATPLPVTDASSVSTGHATPLPVTDTSSASTGQATPLPVTSLSSVSTGDTMPLPVTDASSASTGQATLLPVTSLSSVSTGDTTPLPVTSPSSASTGHATPLLVTDTSSASTGHATPLPVTDASSVSTGHATSLPVTDTSSVSTGDTTPLPVTSPSSASTGDTTPLPVTDASSVSTGHTTPLPVTDTSSASTGHATPLHVTSPSSASTGHATPLPVTSTSSASTGHATSLPVTSTSSASTGHATPLPVTDNSSVSTGHATPLPVTGLSSATTDDTTRLPVTDVSSASTGQATPLPVTSLSSVSTGDTTPLPVTSPSSASTGHASPLLVTDASSASTGQATPLPVTSPSSASTGDTTPLPVTDASSASTGHATSLLVTDASSVSTGDTTPLPVTDTNSASTGDTTPLHVTDASSVSTGDTTPLPVTDTSSASTGHATHLPVTGLSSASTGDTTRLPVTNVSSASTGHATPLPVTSTSSASTGDTTPLPGTDTSSVSTGHTTPLLVTDASSVSTGDTTRLPVTSPSSASTGHTTPLPVTDTSSASTGDTTPLPVTNASSLSTGHATPLHVTSPSSASTGHATPLPVTSTSSASTGHATPLPVTSTSSASTDDTTRLPVTDVSSASTGQATPLPVTSLSSVSTGDTTPLPVTSPSSASTGHASPLLVTDASSASTGQATPLPVTGLSSASTDDTTRLPVTSPSSASTGDTTPLPVTDASSASTGDTTSLPVTIPSSASSGHTTSLPVTDASSVSTGHATSLLVTDASSVSTGDTTPLPVTDTNSASTGDTTPLHVTDASSVSTGHATSLPVTSLSSASTGDTTPLPVTSPSSASSGHTTSLPVTDASSVSTGHATSLPVTIPSSASSGHTTPLPVTDASSVPTGHATSLPVTDASSVSTGHATPLPVTDASSVSTGHATPLPVTSLSSASSTGDTTPLPVTDTSSASTGQDTPLPVTSLFSVSTGDTTPLPVTDASSVSTGHATSLLVTDASSASTGDTTPLPVTDTSSVSTGHATSLPVTDTSSASTGHATSLPVTDTSSASTGQATPLPVTSPSSASTGHAIPLLVTDTSSASTGQATPLPVTSLSSASTGDTTPLPVTDASSVSTGHATSLPVTSLSSVSTGDTTPLPVTSPSSASTGHATPLHVTSPSSASTGHATPLPVTSLSSASTGDTTPLPVTSPSSASTGHATPLHVTDASSVSTGDTTPLPVTSPSSASSGHTTPLPVTDASSASTGHATPLPVTSTSSASTGDTTPLPVTSPSSASTGHTTPLPVTDTPSASTGDTTPLPVTDTSAASTGHATPLPVTSTSSASTGDTTPLPVTDTSSASTGHATPLPVTNTSSVSTGHATPLHVTSPSSASTGHTTPLPVTDASSVSTGHATSLPVTDASSVSTGHATPLPVTDASSVSTGHATPLPLTSLSSVSTGDTTPLPVTDTSSASTGQATPLPVTSLSSVSTGDTTPLPVTDTSSASTGHATSLPVTDTSSASTGHATPLPVTDTSSISTGHATPLHVTSPSSASTGHATPLPVTDTSSASTGHATPLPVTSLSSVSTGDTTPLPVTSPSSASTGHATPLLVTDASSASTGQATPLPVTSLSSVSTGDTTPLPVTSPSSASTGHATSLPVTDTSSASTGDTTSLPVTDTSSAYTGDTTSLPVTDTSSSSTGDTTPLLVTETSSASTGDTTPVPVTDTSSVSTGHATPLPVTGLSSASTGDTTRLPVTDISSASTGQATPLPVTNTSSVSTGDTMPLPVTSPSSASTGHATPLPVTSTSSASTGHATPVPVTSTSLASTGHTTPLPVTSPSSASTGHTTPLPVTDTSSASTGDTTPLPVTNASSLSTGHTTPLHVTIPSSASTGDTSTLPVTGASSASTGHATPLPVTDTSSVSTGHATPLPVTSFSSVSTGDTTPLPVTDASSASTGHATPLPVTDTSSASTGDTTPLPVTDASSASTGQATPLPVTSLSSVSTGDTTPLPVTIPSSASSGHTTSLPVSDTSSASTGQATPLPVTSLSSVSTGDTTPLLVTDASSVSTGHATPLPVTDTSSASTGDTTRLPVTDTSSASTGQATPLPVTSLSSVSTGDTTPLLVTNTSSVSTGHATSLPVTIPSSSSSGHTTPLPVTSTSSVSTGHVTPLHVTSPSSSSTGQATPLPVTSTSSVSTGHVTPLHVTSPSSASTGHATPLPVTSTSSASTGHATPLPVTDASSVSTGHATPLPVTDTSSASTGDTTPLPVTDTSSASTGQATPLPVTSLSSVSTGHATPLAVSSATSASTVSSDSPLKMETSGMTTPSLKTDGGRRTATSPPPTTSQTIISTIPSTAMHTRSTAAPIPILPERGVSLFPYGADAGDLEFVRRTVDFTSPLFKPATGFPLGSSLRDSLYFTDNGQIIFPESDYQIFSYPNPLPTGFTGRDPVALVAPFWDDADFSTGRGTTFYQEYETFYGEHSLLVQQAESWIRKMTNNGGYKARWALKVTWVNAHAYPAQWTLGSNTYQAILSTDGSRSYALFLYQSGGMQWDVAQRSGNPVLMGFSSGDGYFENSPLMSQPVWERYRPDRFLNSNSGLQGLQFYRLHREERPNYRLECLQWLKSQPRWPSWGWNQVSCPCSWQQGRRDLRFQPVSIGRWGLGSRQLCSFTSWRGGVCCSYGPWGEFREGWHVQRPWQLAQELEPQSWCCRWNDKPYLCALYQQRRPHVGCATYRPPQPAWMFGDPHITTLDGVSYTFNGLGDFLLVGAQDGNSSFLLQGRTAQTGSAQATNFIAFAAQYRSSSLGPVTVQWLLEPHDAIRVLLDNQTVTFQPDHEDGGGQETFNATGVLLSRNGSEVSASFDGWATVSVIALSNILHASASLPPEYQNRTEGLLGVWNNNPEDDFRMPNGSTIPPGSPEEMLFHFGMTWQINGTGLLGKRNDQLPSNFTPVFYSQLQKNSSWAEHLISNCDGDSSCIYDTLALRNASIGLHTREVSKNYEQANATLNQYPPSINGGRVIEAYKGQTTLIQYTSNAEDANFTLRDSCTDLELFENGTLLWTPKSLEPFTLEILARSAKIGLASALQPRTVVCHCNAESQCLYNQTSRVGNSSLEVAGCKCDGGTFGRYCEGSEDACEEPCFPSVHCVPGKGCEACPPNLTGDGRHCAALGSSFLCQNQSCPVNYCYNQGHCYISQTLGCQPMCTCPPAFTDSRCFLAGNNFSPTVNLELPLRVIQLLLSEEENASMAEVNASVAYRLGTLDMRAFLRNSQVERIDSAAPASGSPIQHWMVISEFQYRPRGPVIDFLNNQLLAAVVEAFLYHVPRRSEEPRNDVVFQPISGEDVRDVTALNVSTLKAYFRCDGYKGYDLVYSPQSGFTCVSPCSRGYCDHGGQCQHLPSGPRCSCVSFSIYTAWGEHCEHLSMKLDAFFGIFFGALGGLLLLGVGTFVVLRFWGCSGARFSYFLNSAEALP

SEQ ID NO: 53212 - protein, 2143 aa, Homo sapiens
  Payload ID: 10597
  Gene Symbol: MUC4
  Gene Name: mucin 4, cell surface associated
  ENSP ID: ENSP00000478625
PGTTEDTLITGSKTPAPVTSTGSTTATLEGQSTAASSRTSNQDISASSQNHQTKSTETTSKAQTDTLTQMMTSTLFSSPSVHNVMETVTQETAPPDEMTTSFPSSVTNTLMMTSKTITMTTSTDSTLGNTEETSTAGTESSTPVTSAVSITAGQEGQSRTTSWRTSIQDTSASSQNHWTRSTQTTRESQTSTLTHRTTSTPSFSPSVHNVTGTVSQKTSPSGETATSSLCSVTNTSMMTSEKITVTTSTGSTLGNPGETSSVPVTGSLMPVTSAALVTVDPEGQSPVTFSRTSTQDTTAFSKNHQTQSVETTRVSQINTLNTLTPVTTSTVLSSPSGFNPSGTVSQETFPSGETTISSPSSVSNTFLVTSKVFRMPISRDSTLGNTEETSLSVSGTISAITSKVSTIWWSDTLSTALSPSSLPPKISTAFHTQQSEGAETTGRPHERSSFSPGVSQEIFTLHETTTWPSSFSSKGHTTWSQTELPSTSTGAATRLVTGNPSTGAAGTIPRVPSKVSAIGEPGEPTTYSSHSTTLPKTTGAGAQTQWTQETGTTGEALLSSPSYSVTQMIKTATSPSSSPMLDRHTSQQITTAPSTNHSTIHSTSTSPQESPAVSQRGHTQAPQTTQESQTTRSVSPMTDTKTVTTPGSSFTASGHSPSEIVPQDAPTISAATTFAPAPTGDGHTTQAPTTALQAAPSSHDATLGPSGGTSLSKTGALTLANSVVSTPGGPEGQWTSASASTSPDTAAAMTHTHQAESTEASGQTQTSEPASSGSRTTSAGTATPSSSGASGTTPSGSEGISTSGETTRFSSNPSRDSHTTQSTTELLSASASHGAIPVSTGMASSIVPGTFHPTLSEASTAGRPTGQSSPTSPSASPQETAAISRMAQTQRTRTSRGSDTISLASQATDTFSTVPPTPPSITSSGLTSPQTQTHTLSPSGSGKTFTTALISNATPLPVTYASSASTGHATPLAVSSATSASTVSSDSPLKMETSGMTTPSLKTDGGRRTATSPPPTTSQTIISTIPSTAMHTRSTAAPIPILPERGVSLFPYGADAGDLEFVRRTVDFTSPLFKPATGFPLGSSLRDSLYFTDNGQIIFPESDYQIFSYPNPLPTGFTGRDPVALVAPFWDDADFSTGRGTTFYQEYETFYGEHSLLVQQAESWIRKMTNNGGYKARWALKVTWVNAHAYPAQWTLGSNTYQAILSTDGSRSYALFLYQSGGMQWDVAQRSGNPVLMGFSSGDGYFENSPLMSQPVWERYRPDRFLNSNSGLQGLQFYRLHREERPNYRLECLQWLKSQPRWPSWGWNQVSCPCSWQQGRRDLRFQPVSIGRWGLGSRQLCSFTSWRGGVCCSYGPWGEFREGWHVQRPWQLAQELEPQSWCCRWNDKPYLCALYQQRRPHVGCATYRPPQPAWMFGDPHITTLDGVSYTFNGLGDFLLVGAQDGNSSFLLQGRTAQTGSAQATNFIAFAAQYRSSSLGPVTVQWLLEPHDAIRVLLDNQTVTFQPDHEDGGGQETFNATGVLLSRNGSEVSASFDGWATVSVIALSNILHASASLPPEYQNRTEGLLGVWNNNPEDDFRMPNGSTIPPGSPEEMLFHFGMTWQINGTGLLGKRNDQLPSNFTPVFYSQLQKNSSWAEHLISNCDGDSSCIYDTLALRNASIGLHTREVSKNYEQANATLNQYPPSINGGRVIEAYKGQTTLIQYTSNAEDANFTLRDSCTDLELFENGTLLWTPKSLEPFTLEILARSAKIGLASALQPRTVVCHCNAESQCLYNQTSRVGNSSLEVAGCKCDGGTFGRYCEGSEDACEEPCFPSVHCVPGKGCEACPPNLTGDGRHCAALGSSFLCQNQSCPVNYCYNQGHCYISQTLGCQPMCTCPPAFTDSRCFLAGNNFSPTVNLELPLRVIQLLLSEEENASMAEVNASVAYRLGTLDMRAFLRNSQVERIDSAAPASGSPIQHWMVISEFQYRPRGPVIDFLNNQLLAAVVEAFLYHVPRRSEEPRNDVVFQPISGEDVRDVTALNVSTLKAYFRCDGYKGYDLVYSPQSGFTCVSPCSRGYCDHGGQCQHLPSGPRCSCVSFSIYTAWGEHCEHLSMKLDAFFGIFFGALGGLLLLGVGTFVVLRFWGCSGARFSYFLNSAEALP

SEQ ID NO: 53213 - protein, 1149 aa, Homo sapiens
  Payload ID: 10597
  Gene Symbol: MUC4
  Gene Name: mucin 4, cell surface associated
  ENSP ID: ENSP00000479199
  MOD_RES (1)..(1): Any amino acid
XMTTPSLKTDGGRRTATSPPPTTSQTIISTIPSTAMHTRSTAAPIPILPERGVSLFPYGAGAGDLEFVRRTVDFTSPLFKPATGFPLGSSLRDSLYFTDNGQIIFPESDYQIFSYPNPLPTGFTGRDPVALVAPFWDDADFSTGRGTTFYQEYETFYGEHSLLVQQAESWIRKMTNNGGYKARWALKVTWVNAHAYPAQWTLGSNTYQAILSTDGSRSYALFLYQSGGMQWDVAQRSGNPVLMGFSSGDGYFENSPLMSQPVWERYRPDRFLNSNSGLQGLQFYRLHREERPNYRLECLQWLKSQPRWPSWGWNQVSCPCSWQQGRRDLRFQPVSIGRWGLGSRQLCSFTSWRGGVCCSYGPWGEFREGWHVQRPWQLAQELEPQSWCCRWNDKPYLCALYQQRRPHVGCATYRPPQPAWMFGDPHITTLDGVSYTFNGLGDFLLVGAQDGNSSFLLQGRTAQTGSAQATNFIAFAAQYRSSSLGPVTVQWLLEPHDAIRVLLDNQTVTFQPDHEDGGGQETFNATGVLLSRNGSEVSASFDGWATVSVIALSNILHASASLPPEYQNRTEGLLGVWNNNPEDDFRMPNGSTIPPGSPEEMLFHFGMTWQINGTGLLGKRNDQLPSNFTPVFYSQLQKNSSWAEHLISNCDGDSSCIYDTLALRNASIGLHTREVSKNYEQANATLNQYPPSINGGRVIEAYKGQTTLIQYTSNAEDANFTLRDSCTDLELFENGTLLWTPKSLEPFTLEILARSAKIGLASALQPRTVVCHCNAESQCLYNQTSRVGNSSLEVAGCKCDGGTFGRYCEGSEDACEEPCFPSVHCVPGKGCEACPPNLTGDGRHCAALGSSFLCQNQSCPVNYCYNQGHCYISQTLGCQPMCTCPPAFTDSRCFLAGNNFSPTVNLELPLRVIQLLLSEEENASMAEVNASVAYRLGTLDMRAFLRNSQVERIDSAAPASGSPIQHWMVISEFQYRPRGPVIDFLNNQLLAAVVEAFLYHVPRRSEEPRNDVVFQPISGEDVRDVTALNVSTLKAYFRCDGYKGYDLVYSPQSGFTCVSPCSRGYCDHGGQCQHLPSGPRCSCVSFSIYTAWGEHCEHLSMKLDAFFGIFFGALGGLLLLGVGTFVVLRFWGCSGARFSYFLNSAEALP

SEQ ID NO: 53214 - protein, 5385 aa, Homo sapiens
  Payload ID: 10597
  Gene Symbol: MUC4
  Gene Name: mucin 4, cell surface associated
  ENSP ID: ENSP00000479614
  MOD_RES (1)..(1): Any amino acid
XTTEDTLITGSKTAAPVTSTGSTTATLEGQSTAASSRTSNQDISASSQNHQTKSTETTSKAQTDTLTQMMTSTLFSSPSVHNVMETAPPDEMTTSFPSSVTNTLMMTSKTITMTTSTDSTLGNTEETSTAGTESSTPVTSAVSITAGQEGQSRTTSWRTSIQDTSASSQNHWTRSTQTTRESQTSTLTHRTTSTPSFSPSVHNVTGTVSQKTSPSGETATSSLCSVTNTSMMTSEKITVTTSTGSTLGNPGETSSVPVTGSLMPVTSAALVTFDPEGQSPATFSRTSTQDTTAFSKNHQTQSVETTRVSQINTLNTLTPVTTSTVLSSPSGFNPSGTVSQETFPSGETTTSSPSSVSNTFLVTSKVFRMPTSRDSTLGNTEETSLSVSGTISAITSKVSTIWWSDTLSTALSPSSLPPKISTAFHTQQSEGAETTGRPHERSSFSPGVSQEIFTLHETTTWPSSFSSKGHTTWSQTELPSTSTGAATRLVTGNPSTGTAGTIPRVPSKVSAIGEPGEPTTYSSHSTTLPKTTGAGAQTQWTQETGTTGEALLSSPSYSVTQMIKTATSPSSSPMLDRHTSQQITTAPSTNHSTIHSTSTSPQESPAVSQRGHTQAPQTTQESQTTRSVSPMTDTKTVTTPGSSFTASGHSPSEIVPQDAPTISAATTFAPAPTGDGHTTQAPTTALQAAPSSHDATLGPSGGTSLSKTGALTLANSVVSTPGGPEGQWTSASASTSPDTAAAMTHTHQAESTEASGQTQTSEPASSGSRTTSAGTATPSSSGASGTTPSGSEGISTSGETTRFSSNPSRDSHTTQSTTELLSASASHGAIPVSTGMASSIVPGTFHPTLSEASTAGRPTGQSSPTSPSASPQETAAISRMAQTQRTRTSRGSDTISLASQATDTFSTVPPTPPSITSTGLTSPQTETHTLSPSGSGKTFTTALISNATPLPVTYASSASTGHTTPLHVTDASSVSTGHATPLPVTSPSSVSTGHTTPLPVTDTSSESTGHVTPLPVTSFSSASTGDSTPLPVTDTSSASTGHVTPLPVTSLSSASTGDTTPLPVTDTSSASTGHATSLPVTDTSSVSTGHTTPLPVTDTSSASTGHATSLPVTDTSSVSTGHTTPLHVTDASSASTGQATPLPVTSLSSVSTGDTTPLPVTSPSSASTGHATPLLVTDTSSASTGHATPLPVTDASSVSTDHATSLPVTIPSAASTGHTTPLPVTDTSSASTGQATSLLVTDTSSVSTGDTTPLPVTSTSSASTGHVTPLHVTSPSSASTGHATPLPVTSLSSASTGDTMPLPVTSPSSASTGDTTPLPVTDASSVSTGHTTPLHVTDASSASTGQATPLPVTSLSSVSTGDTTPLPVTSPSSASTGHATPLLVTDTSSASTGHATPLPVTDASSVSTDHATSLPVTIPSAASTGHTTPLPVTDTSSASTGQATSLLVTDTSSVSTGDTTPLPVTSTSSASTGHVTPLHVTSPSSASTGHATPLPVTSLSSASTGDTMPLPVTSPSSASTGDTTPLPVTDASSVSTGHTTPLPVTSPSSASTGHTTPLPVTDTSSASKGDTTPLPVTSPSSASTGHTTPLPVTDTSSASTGDTTPLPVTNASSLSTGHATPLHVTSPSSASTGHATPLPVTSTSSASTGHATPLPVTGLSSATTDDTTRLPVTDVSSASTGQATPLPVTSLSSVSTGDTTPLPVTSPSSASTGHASPLLVTDASSASTGQATPLPVTDTSSVSTAHATPLPVTGLSSASTDDTTRLPVTDVSSASTGQAIPLPVTSPSSASTGDTTPLPVTDASSASTGDTTSLPVTIPSSASSGHTTSLPVTDASSVSTGHATSLLVTDASSVSTGDTTPLPVTDTNSASTGDTTPLHVTDASSVSTGHATSLPVTSLSSASTGDTTPLPVTSPSSASSGHTTPLPVTDASSVPTGHATSLPVTDASSVSTGHATPLPVTDASSVSTGHATPLPVTDTSSVSTGQATPLPVTSLSSASTGDTTPLPVTDTSSASTGQDTPLPVTSLSSVSTGDTTPLPVTNPSSASTGHATPLLVTDASSISTGHATSLLVTDASSVSTGHATALHDTDASSLSTGDTTPLPVTSPSSTSTGDTTPLPVTETSSVSTGHATSLPVTDTSSASTGHATSLPVTDTSSASTGHATPLPVTDTSSASTGQATPLPVTSPSSASTGHAIPLLVTDTSSASTGQATPLPVTSLSSASTGDTTPLPVTDASSVSTGHATSLPVTSLSSVSTGDTTPLPVTSPSSASTGHATPLHVTDASSASTGHATPLPVTSLSSASTGDTTPLPVTSPSSASTGHATPLHVTDASSVSTGDTTPLPVTSSSSASSGHTTPLPVTDASSASTGDTTPLPVTDTSSASTGHATHLPVTGLSSASTGDTTRLPVTNVSSASTGHATPLPVTSTSSASTGDTTPLPGTDTSSVSTGHTTPLLVTDASSVSTGDTTRLPVTSPSSASTGHTTPLPVTDTPSASTGDTTPLPVTNASSLSTRHATSLHVTSPSSASTGHATSLPVTDTSAASTGHATPLPVTSTSSASTGDTTPLPVTDTYSASTGQATPLPVTSLSSVSTGDTTPLPVTSPSSASTGHATPLLVTDASSASTGQATPLPVTSLSSVSTGDTTPLPVTSPSSASTGHATSLPVTDTSSASTGDTTSLPVTDTSSAYTGDTTSLPVTDTSSSSTGDTTPLLVTETSSVSTGDTTPLPVTDTSSASTGHATPLPVTNTSSVSTGHATPLHVTSPSSASTGHTTPLPVTDASSVSTGHATSLPVTDASSVFTGHATSLPVTIPSSASSGHTTPLPVTDASSVSTGHATSLPVTDASSVSTGHATPLPVTDASSVSTGHATPLPLTSLSSVSTGDTTPLPVTDTSSASTGQATPLPVTSLSSVSTGDTTPLPVTDTSSASTGHATSLPVTDTSSASTGHATPLPDTDTSSASTGHATLLPVTDTSSASIGHATSLPVTDTSSISTGHATPLHVTSPSSASTGHATPLPVTDTSSASTGHANPLHVTSPSSASTGHATPLPVTDTSSASTGHATPLPVTSLSSVSTGDTTPLPVTSPSSASTGHTTPLPVTDTSSASTGQATALPVTSTSSASTGDTTPLPVTDTSSASTGQATPLPVTSLSSVSTGDTTPLPVTSPSSASTGHATPLLVTDASSASTGQATPLPVTSLSSVSTGDTTPLPVTSPSSASTGHATSLPVTDTSSASTGDTTSLPVTDTSSAYTGDTTSLPVTDTSSSSTGDTTPLLVTETSSVSTGHATPLLVTDASSASTGHATPLHVTSPSSASTGDTTPVPVTDTSSVSTGHATPLPVTGLSSASTGDTTRLPVTDISSASTGQATPLPVTNTSSVSTGDTMPLPVTSPSSASTGHATPLPVTSTSSASTGHATPVPVTSTSSASTGHTTPLPVTDTSSASTGDTTPLPVTSPSSASTGHTTPLHVTIPSSASTGDTSTLPVTGASSASTGHATPLPVTDTSSVSTGHATPLPVTSLSSVSTGDTTPLPVTDASSASTGQATPLPVTSLSSVSTGDTTPLLVTDASSVSTGHATPLPVTDTSSASTGDTTRLPVTDTSSASTGQATPLPVTSLSSVSTGDTTPLLVTDASSVSTGHATPLPVTDTSSASTGDTTRLPVTDTSSASTGQATPLPVTIPSSSSSGHTTPLPVTSTSSVSTGHVTPLHVTSPSSASTGHVTPLPVTSTSSASTGHATPLLVTDASSVSTGHATPLPVTDASSASTGDTTPLPVTDTSSASTGQATPLPVTSLSSVSTGDTTPLPVTDASSASTGHATPLPVTIPSSVSTGDTMPLPVTSPSSASTGHATPLPVTGLSSASTGDTTPLPVTDTSSASTRHATPLPVTDTSSASTDDTTRLPVTDVSSASTGHATPLPVTSTSSASTGDTTPLPVTDTSSVSTGHATSLPVTSRSSASTGHATPLPVTDTSSVSTGHATPLPVTSTSSVSTGHATPLPVTSPSSASTGHATPVPVTSTSSASTGDTTPLPVTNASSLSTGHATPLHVTSPSSASRGDTSTLPVTDASSASTGHATPLPLTSLSSVSTGDTTPLPVTDTSSASTGQATPLPVTSLSSVSTGDTTPLPVTIPSSASSGHTTSLPVTDASSVSTGHGTPLPVTSTSSASTGDTTPLPVTDTSSASTGHATPLPVTDTSSASTGHATPLPVTSLSSVSTGHATPLAVSSATSASTVSSDSPLKMETPGMTTPSLKTDGGRRTATSPPPTTSQTIISTIPSTAMHTRSTAAPIPILPERGVSLFPYGAGAGDLEFVRRTVDFTSPLFKPATGFPLGSSLRDSLYFTDNGQIIFPESDYQIFSYPNPLPTGFTGRDPVALVAPFWDDADFSTGRGTTFYQEYETFYGEHSLLVQQAESWIRKMTNNGGYKARWALKVTWVNAHAYPAQWTLGSNTYQAILSTDGSRSYALFLYQSGGMQWDVAQRSGNPVLMGFSSGDGYFENSPLMSQPVWERYRPDRFLNSNSGLQGLQFYRLHREERPNYRLECLQWLKSQPRWPSWGWNQVSCPCSWQQGRRDLRFQPVSIGRWGLGSRQLCSFTSWRGGVCCSYGPWGEFREGWHVQRPWQLAQELEPQSWCCRWNDKPYLCALYQQRRPHVGCATYRPPQPAWMFGDPHITTLDGVSYTFNGLGDFLLVGAQDGNSSFLLQGRTAQTGSAQATNFIAFAAQYRSSSLGPVTVQWLLEPHDAIRVLLDNQTVTFQPDHEDGGGQETFNATGVLLSRNGSEVSASFDGWATVSVIALSNILHASASLPPEYQNRTEGLLGVWNNNPEDDFRMPNGSTIPPGSPEEMLFHFGMTWQINGTGLLGKRNDQLPSNFTPVFYSQLQKNSSWAEHLISNCDGDSSCIYDTLALRNASIGLHTREVSKNYEQANATLNQYPPSINGGRVIEAYKGQTTLIQYTSNAEDANFTLRDSCTDLELFENGTLLWTPKSLEPFTLEILARSAKIGLASALQPRTVVCHCNAESQCLYNQTSRVGNSSLEVAGCKCDGGTFGRYCEGSEDACEEPCFPSVHCVPGKGCEACPPNLTGDGRHCAALGSSFLCQNQSCPVNYCYNQGHCYISQTLGCQPMCTCPPAFTDSRCFLAGNNFSPTVNLELPLRVIQLLLSEEENASMAEVNASVAYRLGTLDMRAFLRNSQVERIDSAAPASGSPIQHWMVISEFQYRPRGPVIDFLNNQLLAAVVEAFLYHVPRRSEEPRNDVVFQPISGEDVRDVTALNVSTLKAYFRCDGYKGYDLVYSPQSGFTCVSPCSRGYCDHGGQCQHLPSGPRCSCVSFSIYTAWGEHCEHLSMKLDAFFGIFFGALGGLLLLGVGTFVVLRFWGCSGARFSYFLNSAEALP

SEQ ID NO: 53215 - protein, 5333 aa, Homo sapiens
  Payload ID: 10597
  Gene Symbol: MUC4
  Gene Name: mucin 4, cell surface associated
  ENSP ID: ENSP00000480194
  MOD_RES (1)..(1): Any amino acid
XTTEDTLITGSKTAAPVTSTGSTTATLEGQSTAASSRTSNQDISASSQNHQTKSTETTSKAQTDTLTQMMTSTLFSSPSVHNVMETAPPDEMTTSFPSSVTNTLMMTSKTITMTTSTDSTLGNTEETSTAGTESSTPVTSAVSITAGQEGQSRTTSWRTSIQDTSASSQNHWTRSTQTTRESQTSTLTHRTTSTPSFSPSVHNVTGTVSQKTSPSGETATSSLCSVTNTSMMTSEKITVTTSTGSTLGNPGETSSVPVTGSLMPVTSAALVTFDPEGQSPATFSRTSTQDTTAFSKNHQTQSVETTRVSQINTLNTLTPVTTSTVLSSPSGFNPSGTVSQETFPSGETTTSSPSSVSNTFLVTSKVFRMPTSRDSTLGNTEETSLSVSGTISAITSKVSTIWWSDTLSTALSPSSLPPKISTAFHTQQSEGAETTGRPHERSSFSPGVSQEIFTLHETTTWPSSFSSKGHTTWSQTELPSTSTGAATRLVTGNPSTGTAGTIPRVPSKVSAIGEPGEPTTYSSHSTTLPKTTGAGAQTQWTQETGTTGEALLSSPSYSVTQMIKTATSPSSSPMLDRHTSQQITTAPSTNHSTIHSTSTSPQESPAVSQRGHTQAPQTTQESQTTRSVSPMTDTKTVTTPGSSFTASGHSPSEIVPQDAPTISAATTFAPAPTGDGHTTQAPTTALQAAPSSHDATLGPSGGTSLSKTGALTLANSVVSTPGGPEGQWTSASASTSPDTAAAMTHTHQAESTEASGQTQTSEPASSGSRTTSAGTATPSSSGASGTTPSGSEGISTSGETTRFSSNPSRDSHTTQSTTELLSASASHGAIPVSTGMASSIVPGTFHPTLSEASTAGRPTGQSSPTSPSASPQETAAISRMAQTQRTRTSRGSDTISLASQATDTFSTVPPTPPSITSTGLTSPQTETHTLSPSGSGKTFTTALISNATPLPVTYASSASTGHTTPLHVTDASSVSTGHATPLPVTSPSSVSTGHTTPLPVTDTSSESTGHVTPLPVTSFSSASTGDSTPLPVTDTSSASTGHVTPLPVTSLSSASTGDTTPLPVTDTSSASTGHATSLPVTDTSSVSTGHTTPLPVTDTSSASTGHATSLPVTDTSSVSTGHTTPLHVTDASSASTGQATPLPVTSLSSVSTGDTTPLPVTSPSSASTGHATPLLVTDTSSASTGHATPLPVTDASSVSTDHATSLPVTIPSAASTGHTTPLPVTDTSSASTGQATSLLVTDTSSVSTGDTTPLPVTSTSSASTGHVTPLHVTSPSSASTGHATPLPVTSLSSASTGDTMPLPVTSPSSASTGDTTPLPVTDASSVSTGHTTPLHVTDASSASTGQATPLPVTSLSSVSTGDTTPLPVTSPSSASTGHATPLLVTDTSSASTGHATPLPVTDASSVSTDHATSLPVTIPSAASTGHTTPLPVTDTSSASTGQATSLLVTDTSSVSTGDTTPLPVTSTSSASTGHVTPLHVTSPSSASTGHATPLPVTSLSSASTGDTMPLPVTSPSSASTGDTTPLPVTDASSVSTGHTTPLPVTSPSSASTGHTTPLPVTDTSSASKGDTTPLPVTSPSSASTGHTTPLPVTDTSSASTGDTTPLPVTNASSLSTGHATPLHVTSPSSASTGHATPLPVTSTSSASTGHATPLPVTGLSSATTDDTTRLPVTDVSSASTGQATPLPVTSLSSVSTGDTTPLPVTSPSSASTGHASPLLVTDASSASTGQATPLPVTDTSSVSTAHATPLPVTGLSSASTDDTTRLPVTDVSSASTGQAIPLPVTSPSSASTGDTTPLPVTDASSASTGDTTSLPVTIPSSASSGHTTSLPVTDASSVSTGHATSLLVTDASSVSTGDTTPLPVTDTNSASTGDTTPLHVTDASSVSTGHATSLPVTSLSSASTGDTTPLPVTSPSSASSGHTTPLPVTDASSVPTGHATSLPVTDASSVSTGHATPLPVTDASSVSTGHATPLPVTDTSSVSTGQATPLPVTSLSSASTGDTTPLPVTDTSSASTGQDTPLPVTSLSSVSTGDTTPLPVTNPSSASTGHATPLLVTDASSISTGHATSLLVTDASSVSTGHATALHDTDASSLSTGDTTPLPVTSPSSTSTGDTTPLPVTETSSVSTGHATSLPVTDTSSASTGHATSLPVTDTSSASTGHATPLPVTDTSSASTGQATPLPVTSPSSASTGHAIPLLVTDTSSASTGQATPLPVTSLSSASTGDTTPLPVTDASSVSTGHATSLPVTSLSSVSTGDTTPLPVTSPSSASTGHATPLHVTDASSASTGHATPLPVTSLSSASTGDTTPLPVTSPSSASTGHATPLHVTDASSVSTGDTTPLPVTSSSSASSGHTTPLPVTDASSASTGDTTPLPVTDTSSASTGHATHLPVTGLSSASTGDTTRLPVTNVSSASTGHATPLPVTSTSSASTGDTTPLPGTDTSSVSTGHTTPLLVTDASSVSTGDTTRLPVTSPSSASTGHTTPLPVTDTPSASTGDTTPLPVTNASSLSTRHATSLHVTSPSSASTGHATSLPVTDTSAASTGHATPLPVTSTSSASTGDTTPLPVTDTYSASTGQATPLPVTSLSSVSTGDTTPLPVTSPSSASTGHATPLLVTDASSASTGQATPLPVTSLSSVSTGDTTPLPVTSPSSASTGHATSLPVTDTSSASTGDTTSLPVTDTSSAYTGDTTSLPVTDTSSSSTGDTTPLLVTETSSVSTGDTTPLPVTDTSSASTGHATPLPVTNTSSVSTGHATPLHVTSPSSASTGHTTPLPVTDASSVSTGHATSLPVTDASSVFTGHATSLPVTIPSSASSGHTTPLPVTDASSVSTGHATSLPVTDASSVSTGHATPLPVTDASSVSTGHATPLPLTSLSSVSTGDTTPLPVTDTSSASTGQATPLPVTSLSSVSTGDTTPLPVTDTSSASTGHATSLPVTDTSSASTGHATPLPDTDTSSASTGHATLLPVTDTSSASIGHATSLPVTDTSSISTGHATPLHVTSPSSASTGHATPLPVTDTSSASTGHANPLHVTSPSSASTGHATPLPVTDTSSASTGHATPLPVTSLSSVSTGDTTPLPVTSPSSASTGHTTPLPVTDTSSASTGQATALPVTSTSSASTGDTTPLPVTDTSSASTGQATPLPVTSLSSVSTGDTTPLPVTSPSSASTGHATPLLVTDASSASTGQATPLPVTSLSSVSTGDTTPLPVTSPSSASTGHATSLPVTDTSSASTGDTTSLPVTDTSSAYTGDTTSLPVTDTSSSSTGDTTPLLVTETSSVSTGHATPLLVTDASSASTGHATPLHVTSPSSASTGDTTPVPVTDTSSVSTGHATPLPVTGLSSASTGDTTRLPVTDISSASTGQATPLPVTNTSSVSTGDTMPLPVTSPSSASTGHATPLPVTSTSSASTGHATPVPVTSTSSASTGHTTPLPVTDTSSASTGDTTPLPVTSPSSASTGHTTPLHVTIPSSASTGDTSTLPVTGASSASTGHATPLPVTDTSSVSTGHATPLPVTSLSSVSTGDTTPLPVTDASSASTGQATPLPVTSLSSVSTGDTTPLLVTDASSVSTGHATPLPVTDTSSASTGDTTRLPVTDTSSASTGQATPLPVTSLSSVSTGDTTPLLVTDASSVSTGHATPLPVTDTSSASTGDTTRLPVTDTSSASTGQATPLPVTIPSSSSSGHTTPLPVTSTSSVSTGHVTPLHVTSPSSASTGHVTPLPVTSTSSASTGHATPLLVTDASSVSTGHATPLPVTDASSASTGDTTPLPVTDTSSASTGQATPLPVTSLSSVSTGDTTPLPVTDASSASTGHATPLPVTIPSSVSTGDTMPLPVTSPSSASTGHATPLPVTGLSSASTGDTTPLPVTDTSSASTRHATPLPVTDTSSASTDDTTRLPVTDVSSASTGHATPLPVTSTSSASTGDTTPLPVTDTSSVSTGHATSLPVTSRSSASTGHATPLPVTDTSSVSTGHATPLPVTSTSSVSTGHATPLPVTSPSSASTGHATPVPVTSTSSASTGDTTPLPVTNASSLSTGHATPLHVTSPSSASRGDTSTLPVTDASSASTGHATPLPLTSLSSVSTGDTTPLPVTDTSSASTGQATPLPVTSLSSVSTGDTTPLPVTIPSSASSGHTTSLPVTDASSVSTGHGTPLPVTSTSSASTGDTTPLPVTDTSSASTGHATPLPVTDTSSASTGHATPLPVTSLSSVSTGHATPLAVSSATSASTVSSDSPLKMETPGMTTPSLKTDGGRRTATSPPPTTSQTIISTIPSTAMHTRSTAAPIPILPERGVSLFPYGAGAGDLEFVRRTVDFTSPLFKPATGFPLGSSLRDSLYFTDNGQIIFPESDYQIFSYPNPLPTGFTGRDPVALVAPFWDDADFSTGRGTTFYQSNTYQAILSTDGSRSYALFLYQSGGMQWDVAQRSGNPVLMGFSSGDGYFENSPLMSQPVWERYRPDRFLNSNSGLQGLQFYRLHREERPNYRLECLQWLKSQPRWPSWGWNQVSCPCSWQQGRRDLRFQPVSIGRWGLGSRQLCSFTSWRGGVCCSYGPWGEFREGWHVQRPWQLAQELEPQSWCCRWNDKPYLCALYQQRRPHVGCATYRPPQPAWMFGDPHITTLDGVSYTFNGLGDFLLVGAQDGNSSFLLQGRTAQTGSAQATNFIAFAAQYRSSSLGPVTVQWLLEPHDAIRVLLDNQTVTFQPDHEDGGGQETFNATGVLLSRNGSEVSASFDGWATVSVIALSNILHASASLPPEYQNRTEGLLGVWNNNPEDDFRMPNGSTIPPGSPEEMLFHFGMTWQINGTGLLGKRNDQLPSNFTPVFYSQLQKNSSWAEHLISNCDGDSSCIYDTLALRNASIGLHTREVSKNYEQANATLNQYPPSINGGRVIEAYKGQTTLIQYTSNAEDANFTLRDSCTDLELFENGTLLWTPKSLEPFTLEILARSAKIGLASALQPRTVVCHCNAESQCLYNQTSRVGNSSLEVAGCKCDGGTFGRYCEGSEDACEEPCFPSVHCVPGKGCEACPPNLTGDGRHCAALGSSFLCQNQSCPVNYCYNQGHCYISQTLGCQPMCTCPPAFTDSRCFLAGNNFSPTVNLELPLRVIQLLLSEEENASMAEVNASVAYRLGTLDMRAFLRNSQVERIDSAAPASGSPIQHWMVISEFQYRPRGPVIDFLNNQLLAAVVEAFLYHVPRRSEEPRNDVVFQPISGEDVRDVTALNVSTLKAYFRCDGYKGYDLVYSPQSGFTCVSPCSRGYCDHGGQCQHLPSGPRCSCVSFSIYTAWGEHCEHLSMKLDAFFGIFFGALGGLLLLGVGTFVVLRFWGCSGARFSYFLNSAEALP

SEQ ID NO: 53216 - protein, 4969 aa, Homo sapiens
  Payload ID: 10597
  Gene Symbol: MUC4
  Gene Name: mucin 4, cell surface associated
  ENSP ID: ENSP00000480691
PGTTEDTLITGSKTAAPVTSTGSTTATLEGQSTAASSRTSNQDISASSQNHQTKSTETTSKAQTDTLTQMMTSTLFSSPSVHNVMETAPPDEMTTSFPSSVTNTLMMTSKTITMTTSTDSTLGNTEETSTAGTESSTPVTSAVSITAGQEGQSRTTSWRTSIQDTSASSQNHWTRSTQTTRESQTSTLTHRTTSTPSFSPSVHNVTGTVSQKTSPSGETATSSLCSVTNTSMMTSEKITVTTSTGSTLGNPGETSSVPVTGSLMPVTSAALVTFDPEGQSPATFSRTSTQDTTAFSKNHQTQSVETTRVSQINTLNTLTPVTTSTVLSSPSGFNPSGTVSQETFPSGETTTSSPSSVSNTFLVTSKVFRMPTSRDSTLGNTEETSLSVSGTISAITSKVSTIWWSDTLSTALSPSSLPPKISTAFHTQQSEGAETTGRPHERSSFSPGVSQEIFTLHETTTWPSSFSSKGHTTWSQTELPSTSTGAATRLVTGNPSTGTAGTIPRVPSKVSAIGEPGEPTTYSSHSTTLPKTTGAGAQTQWTQETGTTGEALLSSPSYSVTQMIKTATSPSSSPMLDRHTSQQITTAPSTNHSTIHSTSTSPQESPAVSQRGHTQAPQTTQESQTTRSVSPMTDTKTVTTPGSSFTASGHSPSEIVPQDAPTISAATTFAPAPTGDGHTTQAPTTALQAAPSSHDATLGPSGGTSLSKTGALTLANSVVSTPGGPEGQWTSASASTSPDTAAAMTHTHQAESTEASGQTQTSEPASSGSRTTSAGTATPSSSGASGTTPSGSEGISTSGETTRFSSNPSRDSHTTQSTTELLSASASHGAIPVSTGMASSIVPGTFHPTLSEASTAGRPTGQSSPTSPSASPQETAAISRMAQTQRTRTSRGSDTISLASQATDTFSTVPPTPPSITSTGLTSPQTETHTLSPSGSGKTFTTALISNATPLPVTYASSASTGHTTPLHVTDASSVSTGHATPLPVTSPSSVSTGHTTPLPVTDTSSESTGHVTPLPVTSFSSASTGDSTPLPVTDTSSASTGHVTPLPVTSLSSASTGDTTPLPVTDTSSASTGHATSLPVTDTSSVSTGHTTPLPVTDTSSASTGHATSLPVTDTSSVSTGHTTPLHVTDASSASTGQATPLPVTSLSSVSTGDTTPLPVTSPSSASTGHATPLLVTDTSSASTGHATPLPVTDASSVSTDHATSLPVTIPSAASTGHTTPLPVTDTSSASTGQATSLLVTDTSSVSTGDTTPLPVTSTSSASTGHVTPLHVTSPSSASTGHATPLPVTSLSSASTGDTMPLPVTSPSSASTGDTTPLPVTDASSVSTGHTTPLHVTDASSASTGQATPLPVTSLSSVSTGDTTPLPVTSPSSASTGHATPLLVTDTSSASTGHATPLPVTDASSVSTDHATSLPVTIPSAASTGHTTPLPVTDTSSASTGQATSLLVTDTSSVSTGDTTPLPVTSTSSASTGHVTPLHVTSPSSASTGHATPLPVTSLSSASTGDTMPLPVTSPSSASTGDTTPLPVTDASSVSTGHTTPLPVTSPSSASTGHTTPLPVTDTSSASKGDTTPLPVTSPSSASTGHTTPLPVTDTSSASTGDTTPLPVTNASSLSTGHATPLHVTSPSSASTGHATPLPVTSTSSASTGHATPLPVTGLSSATTDDTTRLPVTDVSSASTGQATPLPVTSLSSVSTGDTTPLPVTSPSSASTGHASPLLVTDASSASTGQATPLPVTDTSSVSTAHATPLPVTGLSSASTDDTTRLPVTDVSSASTGQAIPLPVTSPSSASTGDTTPLPVTDASSASTGDTTSLPVTIPSSASSGHTTSLPVTDASSVSTGHATSLLVTDASSVSTGDTTPLPVTDTNSASTGDTTPLHVTDASSVSTGHATSLPVTSLSSASTGDTTPLPVTSPSSASSGHTTPLPVTDASSVPTGHATSLPVTDASSVSTGHATPLPVTDASSVSTGHATPLPVTDTSSVSTGQATPLPVTSLSSASTGDTTPLPVTDTSSASTGQDTPLPVTSLSSVSTGDTTPLPVTNPSSASTGHATPLLVTDASSISTGHATSLLVTDASSVSTGHATALHDTDASSLSTGDTTPLPVTSPSSTSTGDTTPLPVTETSSVSTGHATSLPVTDTSSASTGHATSLPVTDTSSASTGHATPLPVTDTSSASTGQATPLPVTSPSSASTGHAIPLLVTDTSSASTGQATPLPVTSLSSASTGDTTPLPVTDASSVSTGHATSLPVTSLSSVSTGDTTPLPVTSPSSASTGHATPLHVTDASSASTGHATPLPVTSLSSASTGDTTPLPVTSPSSASTGHATPLHVTDASSVSTGDTTPLPVTSSSSASSGHTTPLPVTDASSASTGDTTPLPVTDTSSASTGHATHLPVTGLSSASTGDTTRLPVTNVSSASTGHATPLPVTSTSSASTGDTTPLPGTDTSSVSTGHTTPLLVTDASSVSTGDTTRLPVTSPSSASTGHTTPLPVTDTPSASTGDTTPLPVTNASSLSTRHATSLHVTSPSSASTGHATSLPVTDTSAASTGHATPLPVTSTSSASTGDTTPLPVTDTYSASTGQATPLPVTSLSSVSTGDTTPLPVTSPSSASTGHATPLLVTDASSASTGQATPLPVTSLSSVSTGDTTPLPVTSPSSASTGHATSLPVTDTSSASTGDTTSLPVTDTSSAYTGDTTSLPVTDTSSSSTGDTTPLLVTETSSVSTGDTTPLPVTDTSSASTGHATPLPVTNTSSVSTGHATPLHVTSPSSASTGHTTPLPVTDASSVSTGHATSLPVTDASSVFTGHATSLPVTIPSSASSGHTTPLPVTDASSVSTGHATSLPVTDASSVSTGHATPLPVTDASSVSTGHATPLPLTSLSSVSTGDTTPLPVTDTSSASTGQATPLPVTSLSSVSTGDTTPLPVTDTSSASTGHATSLPVTDTSSASTGHATPLPDTDTSSASTGHATLLPVTDTSSASIGHATSLPVTDTSSISTGHATPLHVTSPSSASTGHATPLPVTDTSSASTGHANPLHVTSPSSASTGHATPLPVTDTSSASTGHATPLPVTSLSSVSTGDTTPLPVTSPSSASTGHTTPLPVTDTSSASTGQATALPVTSTSSASTGDTTPLPVTDTSSASTGQATPLPVTSLSSVSTGDTTPLPVTSPSSASTGHATPLLVTDASSASTGQATPLPVTSLSSVSTGDTTPLPVTSPSSASTGHATSLPVTDTSSASTGDTTSLPVTDTSSAYTGDTTSLPVTDTSSSSTGDTTPLLVTETSSVSTGHATPLLVTDASSASTGHATPLHVTSPSSASTGDTTPVPVTDTSSVSTGHATPLPVTGLSSASTGDTTRLPVTDISSASTGQATPLPVTNTSSVSTGDTMPLPVTSPSSASTGHATPLPVTSTSSASTGHATPVPVTSTSSASTGHTTPLPVTDTSSASTGDTTPLPVTSPSSASTGHTTPLHVTIPSSASTGDTSTLPVTGASSASTGHATPLPVTDTSSVSTGHATPLPVTSLSSVSTGDTTPLPVTDASSASTGQATPLPVTSLSSVSTGDTTPLLVTDASSVSTGHATPLPVTDTSSASTGDTTRLPVTDTSSASTGQATPLPVTSLSSVSTGDTTPLLVTDASSVSTGHATPLPVTDTSSASTGDTTRLPVTDTSSASTGQATPLPVTIPSSSSSGHTTPLPVTSTSSVSTGHVTPLHVTSPSSASTGHVTPLPVTSTSSASTGHATPLLVTDASSVSTGHATPLPVTDASSASTGDTTPLPVTDTSSASTGQATPLPVTSLSSVSTGDTTPLPVTDASSASTGHATPLPVTIPSSVSTGDTMPLPVTSPSSASTGHATPLPVTGLSSASTGDTTPLPVTDTSSASTRHATPLPVTDTSSASTDDTTRLPVTDVSSASTGHATPLPVTSTSSASTGDTTPLPVTDTSSVSTGHATSLPVTSRSSASTGHATPLPVTDTSSVSTGHATPLPVTSTSSVSTGHATPLPVTSPSSASTGHATPVPVTSTSSASTGDTTPLPVTNASSLSTGHATPLHVTSPSSASRGDTSTLPVTDASSASTGHATPLPLTSLSSVSTGDTTPLPVTDTSSASTGQATPLPVTSLSSVSTGDTTPLPVTIPSSASSGHTTSLPVTDASSVSTGHGTPLPVTSTSSASTGDTTPLPVTDTSSASTGHATPLPVTDTSSASTGHATPLPVTSLSSVSTGHATPLAVSSATSASTVSSDSPLKMETPGMTTPSLKTDGGRRTATSPPPTTSQTIISTIPSTAMHTRSTAAPIPILPERGVSLFPYGAGAGDLEFVRRTVDFTSPLFKPATGFPLGSSLRDSLYFTDNGQIIFPESDYQIFSYPNPLPTGFTGRDPVALVAPFWDDADFSTGRGTTFYQEYETFYGEHSLLVQQAESWIRKMTNNGGYKARWALKVTWVNAHAYPAQWTLGSNTYQAILSTDGSRSYALFLYQSGGMQWDVAQRSGNPVLMGFSSGDGYFENSPLMSQPVWERYRPDRFLNSNSGLQGLQFYRLHREERPNYRLECLQWLKSQPRWPSWGWNQVSCPCSWQQGRRDLRFQPVSIGRWGLGSRQLCSFTSWRGGVCCSYGPWGEFREGWHVQRPWQLAQELEPQSWCCRWNDKPYLCALYQQRRPHVGCATYRPPQPAWMFGDPHITTLDGVSYTFNGLGDFLLVGAQDGNSSFLLQGRTAQTGSAQATNFIAFAAQYRSSSLGPVTVQWLLEPHDAIRVLLDNQTVTFQPDHEDGGGQETFNATGVLLSRNGSEVSASFDGWATVSVIALSNILHASASLPPEYQNRTEGLLGVWNNNPEDDFRMPNGSTIPPGSPEEMLFHFGMTWQINGTGLLGKRNDQLPSNFTPVFYSQLQKNSSWAEHLISNCDGDSSCIYDTLALRNASIGLHTREVSKNYEQANATLNQYPPSINGGRVIEAYKGQTTLIQYTSNAEDANFTLRDSCTDLELF

SEQ ID NO: 53217 - protein, 4969 aa, Homo sapiens; identical to SEQ ID NO: 53216
  Payload ID: 10597
  Gene Symbol: MUC4
  Gene Name: mucin 4, cell surface associated
  ENSP ID: ENSP00000480849

SEQ ID NO: 53218 - protein, 609 aa, Homo sapiens
  Payload ID: 10597
  Gene Symbol: MUC4
  Gene Name: mucin 4, cell surface associated
  ENSP ID: ENSP00000481308
SSVSTGDTTPLPVTSPSSASTGHATPLLVTDTSSASTGHATPLPVTDASSVSTDHATSLPVTIPSAASTGHTTPLPVTDTSSASTGQATSLLVTDTSSVSTGDTTPLPVTSTSSASTGHVTPLHVTSPSSASTGHATPLPVTSLSSASTGDTMPLPVTSPSSASTGDTTPLPVTDASSVSTGHTTPLPVTSPSSASTGHTTPLPVTDTSSASKGDTTPLPVTSPSSASTGHTTPLPVTDTSSASTGDTTPLPVTNASSLSTGHATPLHVTSPSSASTGHATPLPVTSTSSASTGHATPLPVTGLSSASTGQATPLPVTSLSSVSTGDTTPLPVTSPSSASTGHASPLLVTDASSASTGQATPLPVTDTSSVSTAHATPLPVTGLSSASTDDTTRLPVTDVSSASTGQAIPLPVTSPSSASTGDTTPLPVTDASSASTGDTTSLPVTIPSSASSGHTTSLPVTDASSVSTGHATSLLVTDASSVSTGDTTPLPVTDTNSASTGDTTPLHVTDASSVSTGHATSLPVTSLSSASTGDTTPLPVTSPSSASSGHTTPLPVTDASSVPTGHATSLPVTDASSVSTGHATPLPVTDASSVSTGHATPLPVTDTS

SEQ ID NO: 53219 - protein, 1149 aa, Homo sapiens; identical to SEQ ID NO: 53213
  Payload ID: 10597
  Gene Symbol: MUC4
  Gene Name: mucin 4, cell surface associated
  ENSP ID: ENSP00000481518
  MOD_RES (1)..(1): Any amino acid

SEQ ID NO: 53220 - protein, 2138 aa, Homo sapiens
  Payload ID: 10597
  Gene Symbol: MUC4
  Gene Name: mucin 4, cell surface associated
  ENSP ID: ENSP00000481623
PGTTEDTLITGSKTAAPVTSTGSTTATLEGQSTAASSRTSNQDISASSQNHQTKSTETTSKAQTDTLTQMMTSTLFSSPSVHNVMETAPPDEMTTSFPSSVTNTLMMTSKTITMTTSTDSTLGNTEETSTAGTESSTPVTSAVSITAGQEGQSRTTSWRTSIQDTSASSQNHWTRSTQTTRESQTSTLTHRTTSTPSFSPSVHNVTGTVSQKTSPSGETATSSLCSVTNTSMMTSEKITVTTSTGSTLGNPGETSSVPVTGSLMPVTSAALVTFDPEGQSPATFSRTSTQDTTAFSKNHQTQSVETTRVSQINTLNTLTPVTTSTVLSSPSGFNPSGTVSQETFPSGETTTSSPSSVSNTFLVTSKVFRMPTSRDSTLGNTEETSLSVSGTISAITSKVSTIWWSDTLSTALSPSSLPPKISTAFHTQQSEGAETTGRPHERSSFSPGVSQEIFTLHETTTWPSSFSSKGHTTWSQTELPSTSTGAATRLVTGNPSTGTAGTIPRVPSKVSAIGEPGEPTTYSSHSTTLPKTTGAGAQTQWTQETGTTGEALLSSPSYSVTQMIKTATSPSSSPMLDRHTSQQITTAPSTNHSTIHSTSTSPQESPAVSQRGHTQAPQTTQESQTTRSVSPMTDTKTVTTPGSSFTASGHSPSEIVPQDAPTISAATTFAPAPTGDGHTTQAPTTALQAAPSSHDATLGPSGGTSLSKTGALTLANSVVSTPGGPEGQWTSASASTSPDTAAAMTHTHQAESTEASGQTQTSEPASSGSRTTSAGTATPSSSGASGTTPSGSEGISTSGETTRFSSNPSRDSHTTQSTTELLSASASHGAIPVSTGMASSIVPGTFHPTLSEASTAGRPTGQSSPTSPSASPQETAAISRMAQTQRTRTSRGSDTISLASQATDTFSTVPPTPPSITSTGLTSPQTETHTLSPSGSGKTFTTALISNATPLPVTYASSASTGHATPLAVSSATSASTVSSDSPLKMETSGMTTPSLKTDGGRRTATSPPPTTSQTIISTIPSTAMHTRSTAAPIPILPERGVSLFPYGADAGDLEFVRRTVDFTSPLFKPATGFPLGSSLRDSLYFTDNGQIIFPESDYQIFSYPNPLPTGFTGRDPVALVAPFWDDADFSTGRGTTFYQEYETFYGEHSLLVQQAESWIRKITNNGGYKARWALKVTWVNAHAYPAQWTLGSNTYQAILSTDGSRSYALFLYQSGGMQWDVAQRSGKPVLMGFSSGDGYFENSPLMSQPVWERYRPDRFLNSNSGLQGLQFYRLHREERPNYRLECLQWLKSQPRWPSWGWNQVSCPCSWQQGRRDLRFQPVSIGRWGLGSRQLCSFTSWRGGVCCSYGPWGEFREGWHVQRPWQLAQELEPQSWCCRWNDKPYLCALYQQRRPHVGCATYRPPQPAWMFGDPHITTLDGVSYTFNGLGDFLLVGAQDGNSSFLLQGRTAQTGSAQATNFIAFAAQYRSSSLGPVTVQWLLEPHDAIRVLLDNQTVTFQPDHEDGGGQETFNATGVLLSRNGSEVSASFDGWATVSVIALSNILHSSASLPPEYQNRTEGLLGVWNNNPEDDFRMPNGSTIPPGSPEEMLFHFGMTWQINGTGLLGKRNDQLPSNFTPVFYSQLQKNSSWAEHLISNCDGDSSCIYDTLALRNASIGLHTREVSKNYEQANATLNQYPPSINGGRVIEAYKGQTTLIQYTSNAEDANFTLRDSCTDLELFENGTLLWTPKSLEPFTLEILARSAKIGLASALQPRTVVCHCNAESQCLYNQTSRVGNSSLEVAGCKCDGGTFGRYCEGSEDACEEPCFPSVHCVPGKGCEACPPNLTGDGRHCAALGSSFLCQNQSCPVNYCYNQGHCYISQTLGCQPMCTCPPAFTDSRCFLAGNNFSPTVNLELPLRVIQLLLSEEENASMAEVNASVAYRLGTLDMRAFLRNSQVERIDSAAPASGSPIQHWMVISEFQYRPRGPVIDFLNNQLLAAVVEAFLYHVPRRSEEPRNDVVFQPISGEDVRDVTALNVSTLKAYFRCDGYKGYDLVYSPQSGFTCVSPCSRGYCDHGGQCQHLPSGPRCSCVSFSIYTAWGEHCEHLSMKLDAFFGIFFGALGGLLLLGVGTFVVLRFWGCSGARFSYFLNSAEALP

SEQ ID NO: 53221 - protein, 5385 aa, Homo sapiens; identical to SEQ ID NO: 53214
  Payload ID: 10597
  Gene Symbol: MUC4
  Gene Name: mucin 4, cell surface associated
  ENSP ID: ENSP00000481715
  MOD_RES (1)..(1): Any amino acid

SEQ ID NO: 53222 - protein, 5333 aa, Homo sapiens; identical to SEQ ID NO: 53215
  Payload ID: 10597
  Gene Symbol: MUC4
  Gene Name: mucin 4, cell surface associated
  ENSP ID: ENSP00000482172
  MOD_RES (1)..(1): Any amino acid

SEQ ID NO: 53223 - protein, 2138 aa, Homo sapiens
  Payload ID: 10597
  Gene Symbol: MUC4
  Gene Name: mucin 4, cell surface associated
  ENSP ID: ENSP00000482178
PGTTEDTLITGSKTAAPVTSTGSTTATLEGQSTAASSRTSNQDISASSQNHQTKSTETTSKAQTDTLTQMMTSTLFSSPSVHNVMETAPPDEMTTSFPSSVTNTLMMTSKTITMTTSTDSTLGNTEETSTAGTESSTPVTSAVSITAGQEGQSRTTSWRTSIQDTSASSQNHWTRSTQTTRESQTSTLTHRTTSTPSFSPSVHNVTGTVSQKTSPSGETATSSLCSVTNTSMMTSEKITVTTSTGSTLGNPGETSSVPVTGSLMPVTSAALVTFDPEGQSPATFSRTSTQDTTAFSKNHQTQSVETTRVSQINTLNTLTPVTTSTVLSSPSGFNPSGTVSQETFPSGETTTSSPSSVSNTFLVTSKVFRMPTSRDSTLGNTEETSLSVSGTISAITSKVSTIWWSDTLSTALSPSSLPPKISTAFHTQQSEGAETTGRPHERSSFSPGVSQEIFTLHETTTWPSSFSSKGHTTWSQTELPSTSTGAATRLVTGNPSTGTAGTIPRVPSKVSAIGEPGEPTTYSSHSTTLPKTTGAGAQTQWTQETGTTGEALLSSPSYSVTQMIKTATSPSSSPMLDRHTSQQITTAPSTNHSTIHSTSTSPQESPAVSQRGHTQAPQTTQESQTTRSVSPMTDTKTVTTPGSSFTASGHSPSEIVPQDAPTISAATTFAPAPTGDGHTTQAPTTALQAAPSSHDATLGPSGGTSLSKTGALTLANSVVSTPGGPEGQWTSASASTSPDTAAAMTHTHQAESTEASGQTQTSEPASSGSRTTSAGTATPSSSGASGTTPSGSEGISTSGETTRFSSNPSRDSHTTQSTTELLSASASHGAIPVSTGMASSIVPGTFHPTLSEASTAGRPTGQSSPTSPSASPQETAAISRMAQTQRTRTSRGSDTISLASQATDTFSTVPPTPPSITSTGLTSPQTETHTLSPSGSGKTFTTALISNATPLPVTYASSASTGHATPLAVSSATSASTVSSDSPLKMETPGMTTPSLKTDGGRRTATSPPPTTSQTIISTIPSTAMHTRSTAAPIPILPERGVSLFPYGAGAGDLEFVRRTVDFTSPLFKPATGFPLGSSLRDSLYFTDNGQIIFPESDYQIFSYPNPLPTGFTGRDPVALVAPFWDDADFSTGRGTTFYQEYETFYGEHSLLVQQAESWIRKMTNNGGYKARWALKVTWVNAHAYPAQWTLGSNTYQAILSTDGSRSYALFLYQSGGMQWDVAQRSGNPVLMGFSSGDGYFENSPLMSQPVWERYRPDRFLNSNSGLQGLQFYRLHREERPNYRLECLQWLKSQPRWPSWGWNQVSCPCSWQQGRRDLRFQPVSIGRWGLGSRQLCSFTSWRGGVCCSYGPWGEFREGWHVQRPWQLAQELEPQSWCCRWNDKPYLCALYQQRRPHVGCATYRPPQPAWMFGDPHITTLDGVSYTFNGLGDFLLVGAQDGNSSFLLQGRTAQTGSAQATNFIAFAAQYRSSSLGPVTVQWLLEPHDAIRVLLDNQTVTFQPDHEDGGGQETFNATGVLLSRNGSEVSASFDGWATVSVIALSNILHASASLPPEYQNRTEGLLGVWNNNPEDDFRMPNGSTIPPGSPEEMLFHFGMTWQINGTGLLGKRNDQLPSNFTPVFYSQLQKNSSWAEHLISNCDGDSSCIYDTLALRNASIGLHTREVSKNYEQANATLNQYPPSINGGRVIEAYKGQTTLIQYTSNAEDANFTLRDSCTDLELFENGTLLWTPKSLEPFTLEILARSAKIGLASALQPRTVVCHCNAESQCLYNQTSRVGNSSLEVAGCKCDGGTFGRYCEGSEDACEEPCFPSVHCVPGKGCEACPPNLTGDGRHCAALGSSFLCQNQSCPVNYCYNQGHCYISQTLGCQPMCTCPPAFTDSRCFLAGNNFSPTVNLELPLRVIQLLLSEEENASMAEVNASVAYRLGTLDMRAFLRNSQVERIDSAAPASGSPIQHWMVISEFQYRPRGPVIDFLNNQLLAAVVEAFLYHVPRRSEEPRNDVVFQPISGEDVRDVTALNVSTLKAYFRCDGYKGYDLVYSPQSGFTCVSPCSRGYCDHGGQCQHLPSGPRCSCVSFSIYTAWGEHCEHLSMKLDAFFGIFFGALGGLLLLGVGTFVVLRFWGCSGARFSYFLNSAEALP

SEQ ID NO: 53224 - protein, 167 aa, Homo sapiens
  Payload ID: 10597
  Gene Symbol: MUC4
  Gene Name: mucin 4, cell surface associated
  ENSP ID: ENSP00000482417
  MOD_RES (1)..(1): Any amino acid
XMTTPSLKTDGGRRTATSPPPTTSQTIISTIPSTAMHTRSTAAPIPILPERGEAIQEFPSSPMGQTPGTWSSSGGPWTSPPHSSSRRLASPLAPLSVIPSTSQTMARSSSQSQTTRFSPTPTHSQQASQAGTLWPWWLRSGTMLTSPLVGGPHFIRNTRRSMVNTAC

SEQ ID NO: 53225 - protein, 2138 aa, Homo sapiens; identical to SEQ ID NO: 53223
  Payload ID: 10597
  Gene Symbol: MUC4
  Gene Name: mucin 4, cell surface associated
  ENSP ID: ENSP00000483270

SEQ ID NO: 53226 - protein, 604 aa, Homo sapiens; identical to SEQ ID NO: 53210
  Payload ID: 10597
  Gene Symbol: MUC4
  Gene Name: mucin 4, cell surface associated
  ENSP ID: ENSP00000483919

SEQ ID NO: 53227 - protein, 5385 aa, Homo sapiens; identical to SEQ ID NO: 53214
  Payload ID: 10597
  Gene Symbol: MUC4
  Gene Name: mucin 4, cell surface associated
  ENSP ID: ENSP00000485685
  MOD_RES (1)..(1): Any amino acid

SEQ ID NO: 53228 - protein, 4393 aa, Homo sapiens
  Payload ID: 10597
  Gene Symbol: MUC4
  Gene Name: mucin 4, cell surface associated
  ENSP ID: ENSP00000485714
  MOD_RES (1)..(1): Any amino acid
XTTEDTLITGSKTAAPVTSTGSTTATLEGQSTAASSRTSNQDISASSQNHQTKSTETTSKAQTDTLTQMMTSTLFSSPSVHNVMETAPPDEMTTSFPSSVTNTLMMTSKTITMTTSTDSTLGNTEETSTAGTESSTPVTSAVSITAGQEGQSRTTSWRTSIQDTSASSQNHWTRSTQTTRESQTSTLTHRTTSTPSFSPSVHNVTGTVSQKTSPSGETATSSLCSVTNTSMMTSEKITVTTSTGSTLGNPGETSSVPVTGSLMPVTSAALVTFDPEGQSPATFSRTSTQDTTAFSKNHQTQSVETTRVSQINTLNTLTPVTTSTVLSSPSGFNPSGTVSQETFPSGETTTSSPSSVSNTFLVTSKVFRMPTSRDSTLGNTEETSLSVSGTISAITSKVSTIWWSDTLSTALSPSSLPPKISTAFHTQQSEGAETTGRPHERSSFSPGVSQEIFTLHETTTWPSSFSSKGHTTWSQTELPSTSTGAATRLVTGNPSTGTAGTIPRVPSKVSAIGEPGEPTTYSSHSTTLPKTTGAGAQTQWTQETGTTGEALLSSPSYSVTQMIKTATSPSSSPMLDRHTSQQITTAPSTNHSTIHSTSTSPQESPAVSQRGHTQAPQTTQESQTTRSVSPMTDTKTVTTPGSSFTASGHSPSEIVPQDAPTISAATTFAPAPTGDGHTTQAPTTALQAAPSSHDATLGPSGGTSLSKTGALTLANSVVSTPGGPEGQWTSASASTSPDTAAAMTHTHQAESTEASGQTQTSEPASSGSRTTSAGTATPSSSGASGTTPSGSEGISTSGETTRFSSNPSRDSHTTQSTTELLSASASHGAIPVSTGMASSIVPGTFHPTLSEASTAGRPTGQSSPTSPSASPQETAAISRMAQTQRTRTSRGSDTISLASQATDTFSTVPPTPPSITSTGLTSPQTETHTLSPSGSGKTFTTALISNATPLPVTYASSASTGHTTPLHVTDASSVSTGHATPLPVTSPSSVSTGHTTPLPVTDTSSESTGHVTPLPVTSFSSASTGDSTPLPVTDTSSASTGHVTPLPVTSLSSASTGDTTPLPVTDTSSASTGHATSLPVTDTSSVSTGHTTPLPVTDTSSASTGHATSLPVTDTSSVSTGHTTPLHVTDASSASTGQATPLPVTSLSSVSTGDTTPLPVTSPSSASTGHATPLLVTDTSSASTGHATPLPVTDASSVSTDHATSLPVTIPSAASTGHTTPLPVTDTSSASTGQATSLLVTDTSSVSTGDTTPLPVTSTSSASTGHVTPLHVTSPSSASTGHATPLPVTSLSSASTGDTMPLPVTSPSSASTGDTTPLPVTDASSVSTGHTTPLHVTDASSASTGQATPLPVTSLSSVSTGDTTPLPVTSPSSASTGHATPLLVTDTSSASTGHATPLPVTDASSVSTDHATSLPVTIPSAASTGHTTPLPVTDTSSASTGQATSLLVTDTSSVSTGDTTPLPVTSTSSASTGHVTPLHVTSPSSASTGHATPLPVTSLSSASTGDTMPLPVTSPSSASTGDTTPLPVTDASSVSTGHTTPLPVTSPSSASTGHTTPLPVTDTSSASKGDTTPLPVTSPSSASTGHTTPLPVTDTSSASTGDTTPLPVTNASSLSTGHATPLHVTSPSSASTGHATPLPVTSTSSASTGHATPLPVTGLSSATTDDTTRLPVTDVSSASTGQATPLPVTSLSSVSTGDTTPLPVTSPSSASTGHASPLLVTDASSASTGQATPLPVTDTSSVSTAHATPLPVTGLSSASTDDTTRLPVTDVSSASTGQAIPLPVTSPSSASTGDTTPLPVTDASSASTGDTTSLPVTIPSSASSGHTTSLPVTDASSVSTGHATSLLVTDASSVSTGDTTPLPVTDTNSASTGDTTPLHVTDASSVSTGHATSLPVTSLSSASTGDTTPLPVTSPSSASSGHTTPLPVTDASSVPTGHATSLPVTDASSVSTGHATPLPVTDASSVSTGHATPLPVTDTSSVSTGQATPLPVTSLSSASTGDTTPLPVTDTSSASTGQDTPLPVTSLSSVSTGDTTPLPVTNPSSASTGHATPLLVTDASSISTGHATSLLVTDASSVSTGHATALHDTDASSLSTGDTTPLPVTSPSSTSTGDTTPLPVTETSSVSTGHATSLPVTDTSSASTGHATSLPVTDTSSASTGHATPLPVTDTSSASTGQATPLPVTSPSSASTGHAIPLLVTDTSSASTGQATPLPVTSLSSASTGDTTPLPVTDASSVSTGHATSLPVTSLSSVSTGDTTPLPVTSPSSASTGHATPLHVTDASSASTGHATPLPVTSLSSASTGDTTPLPVTSPSSASTGHATPLHVTDASSVSTGDTTPLPVTSSSSASSGHTTPLPVTDASSASTGDTTPLPVTDTSSASTGHATHLPVTGLSSASTGDTTRLPVTNVSSASTGHATPLPVTSTSSASTGDTTPLPGTDTSSVSTGHTTPLLVTDASSVSTGDTTRLPVTSPSSASTGHTTPLPVTDTPSASTGDTTPLPVTNASSLSTRHATSLHVTSPSSASTGHATSLPVTDTSAASTGHATPLPVTSTSSASTGDTTPLPVTDTYSASTGQATPLPVTSLSSVSTGDTTPLPVTSPSSASTGHATPLLVTDASSASTGQATPLPVTSLSSVSTGDTTPLPVTSPSSASTGHATSLPVTDTSSASTGDTTSLPVTDTSSAYTGDTTSLPVTDTSSSSTGDTTPLLVTETSSVSTGDTTPLPVTDTSSASTGHATPLPVTNTSSVSTGHATPLHVTSPSSASTGHTTPLPVTDASSVSTGHATSLPVTDASSVFTGHATSLPVTIPSSASSGHTTPLPVTDASSVSTGHATSLPVTDASSVSTGHATPLPVTDASSVSTGHATPLPLTSLSSVSTGDTTPLPVTDTSSASTGQATPLPVTSLSSVSTGDTTPLPVTDTSSASTGHATSLPVTDTSSASTGHATPLPDTDTSSASTGHATLLPVTDTSSASIGHATSLPVTDTSSISTGHATPLHVTSPSSASTGHATPLPVTDTSSASTGHANPLHVTSPSSASTGHATPLPVTDTSSASTGHATPLPVTSLSSVSTGDTTPLPVTSPSSASTGHTTPLPVTDTSSASTGQATALPVTSTSSASTGDTTPLPVTDTSSASTGQATPLPVTSLSSVSTGDTTPLPVTSPSSASTGHATPLLVTDASSASTGQATPLPVTSLSSVSTGDTTPLPVTSPSSASTGHATSLPVTDTSSASTGDTTSLPVTDTSSAYTGDTTSLPVTDTSSSSTGDTTPLLVTETSSVSTGHATPLLVTDASSASTGHATPLHVTSPSSASTGDTTPVPVTDTSSVSTGHATPLPVTGLSSASTGDTTRLPVTDISSASTGQATPLPVTNTSSVSTGDTMPLPVTSPSSASTGHATPLPVTSTSSASTGHATPVPVTSTSSASTGHTTPLPVTDTSSASTGDTTPLPVTSPSSASTGHTTPLHVTIPSSASTGDTSTLPVTGASSASTGHATPLPVTDTSSVSTGHATPLPVTSLSSVSTGDTTPLPVTDASSASTGQATPLPVTSLSSVSTGDTTPLLVTDASSVSTGHATPLPVTDTSSASTGDTTRLPVTDTSSASTGQATPLPVTSLSSVSTGDTTPLLVTDASSVSTGHATPLPVTDTSSASTGDTTRLPVTDTSSASTGQATPLPVTIPSSSSSGHTTPLPVTSTSSVSTGHVTPLHVTSPSSASTGHVTPLPVTSTSSASTGHATPLLVTDASSVSTGHATPLPVTDASSASTGDTTPLPVTDTSSASTGQATPLPVTSLSSVSTGDTTPLPVTDASSASTGHATPLPVTIPSSVSTGDTMPLPVTSPSSASTGHATPLPVTGLSSASTGDTTPLPVTDTSSASTRHATPLPVTDTSSASTDDTTRLPVTDVSSASTGHATPLPVTSTSSASTGDTTPLPVTDTSSVSTGHATSLPVTSRSSASTGHATPLPVTDTSSVSTGHATPLPVTSTSSVSTGHATPLPVTSPSSASTGHATPVPVTSTSSASTGDTTPLPVTNASSLSTGHATPLHVTSPSSASRGDTSTLPVTDASSASTGHATPLPLTSLSSVSTGDTTPLPVTDTSSASTGQATPLPVTSLSSVSTGDTTPLPVTIPSSASSGHTTSLPVTDASSVSTGHGTPLPVTSTSSASTGDTTPLPVTDTSSASTGHATPLPVTDTSSASTGHATPLPVTSLSSVSTGHATPLAVSSATSASTVSSDSPLKMETPGMTTPSLKTDGGRRTATSPPPTTSQTIISTIPSTAMHTRSTAAPIPILPERGEAIQEFPSSPMGQAPGTWSSSGGPWTSPPHSSSRRLASPLAPLSVIPSTSQTMARSSSQSQTTRFSPTPTHSQQASQAGTLWPWWLRSGTMLTSPLVGGPHFIRL

SEQ ID NO: 53229 - protein, 144 aa, Homo sapiens; identical to SEQ ID NO: 53196
  Payload ID: 10597
  Gene Symbol: MUC4
  Gene Name: mucin 4, cell surface associated
  ENSP ID: ENSP00000485725
  MOD_RES (1)..(1): Any amino acid

SEQ ID NO: 53230 - protein, 1098 aa, Homo sapiens
  Payload ID: 10597
  Gene Symbol: MUC4
  Gene Name: mucin 4, cell surface associated
  ENSP ID: ENSP00000485734
  MOD_RES (1)..(1): Any amino acid
XVSLFPYGAGAGDLEFVRRTVDFTSPLFKPATGFPLGSSLRDSLYFTDNGQIIFPESDYQIFSYPNPLPTGFTGRDPVALVAPFWDDADFSTGRGTTFYQEYETFYGEHSLLVQQAESWIRKMTNNGGYKARWALKVTWVNAHAYPAQWTLGSNTYQAILSTDGSRSYALFLYQSGGMQWDVAQRSGNPVLMGFSSGDGYFENSPLMSQPVWERYRPDRFLNSNSGLQGLQFYRLHREERPNYRLECLQWLKSQPRWPSWGWNQVSCPCSWQQGRRDLRFQPVSIGRWGLGSRQLCSFTSWRGGVCCSYGPWGEFREGWHVQRPWQLAQELEPQSWCCRWNDKPYLCALYQQRRPHVGCATYRPPQPAWMFGDPHITTLDGVSYTFNGLGDFLLVGAQDGNSSFLLQGRTAQTGSAQATNFIAFAAQYRSSSLGPVTVQWLLEPHDAIRVLLDNQTVTFQPDHEDGGGQETFNATGVLLSRNGSEVSASFDGWATVSVIALSNILHASASLPPEYQNRTEGLLGVWNNNPEDDFRMPNGSTIPPGSPEEMLFHFGMTWQINGTGLLGKRNDQLPSNFTPVFYSQLQKNSSWAEHLISNCDGDSSCIYDTLALRNASIGLHTREVSKNYEQANATLNQYPPSINGGRVIEAYKGQTTLIQYTSNAEDANFTLRDSCTDLELFENGTLLWTPKSLEPFTLEILARSAKIGLASALQPRTVVCHCNAESQCLYNQTSRVGNSSLEVAGCKCDGGTFGRYCEGSEDACEEPCFPSVHCVPGKGCEACPPNLTGDGRHCAALGSSFLCQNQSCPVNYCYNQGHCYISQTLGCQPMCTCPPAFTDSRCFLAGNNFSPTVNLELPLRVIQLLLSEEENASMAEVNASVAYRLGTLDMRAFLRNSQVERIDSAAPASGSPIQHWMVISEFQYRPRGPVIDFLNNQLLAAVVEAFLYHVPRRSEEPRNDVVFQPISGEDVRDVTALNVSTLKAYFRCDGYKGYDLVYSPQSGFTCVSPCSRGYCDHGGQCQHLPSGPRCSCVSFSIYTAWGEHCEHLSMKLDAFFGIFFGALGGLLLLGVGTFVVLRFWGCSGARFSYFLNSAEALP

SEQ ID NO: 53231 - protein, 5044 aa, Homo sapiens
  Payload ID: 10597
  Gene Symbol: MUC4
  Gene Name: mucin 4, cell surface associated
  ENSP ID: ENSP00000485749
  MOD_RES (1)..(1): Any amino acid
XTTEDTLITGSKTAAPVTSTGSTTATLEGQSTAASSRTSNQDISASSQNHQTKSTETTSKAQTDTLTQMMTSTLFSSPSVHNVMETAPPDEMTTSFPSSVTNTLMMTSKTITMTTSTDSTLGNTEETSTAGTESSTPVTSAVSITAGQEGQSRTTSWRTSIQDTSASSQNHWTRSTQTTRESQTSTLTHRTTSTPSFSPSVHNVTGTVSQKTSPSGETATSSLCSVTNTSMMTSEKITVTTSTGSTLGNPGETSSVPVTGSLMPVTSAALVTFDPEGQSPATFSRTSTQDTTAFSKNHQTQSVETTRVSQINTLNTLTPVTTSTVLSSPSGFNPSGTVSQETFPSGETTTSSPSSVSNTFLVTSKVFRMPTSRDSTLGNTEETSLSVSGTISAITSKVSTIWWSDTLSTALSPSSLPPKISTAFHTQQSEGAETTGRPHERSSFSPGVSQEIFTLHETTTWPSSFSSKGHTTWSQTELPSTSTGAATRLVTGNPSTGTAGTIPRVPSKVSAIGEPGEPTTYSSHSTTLPKTTGAGAQTQWTQETGTTGEALLSSPSYSVTQMIKTATSPSSSPMLDRHTSQQITTAPSTNHSTIHSTSTSPQESPAVSQRGHTQAPQTTQESQTTRSVSPMTDTKTVTTPGSSFTASGHSPSEIVPQDAPTISAATTFAPAPTGDGHTTQAPTTALQAAPSSHDATLGPSGGTSLSKTGALTLANSVVSTPGGPEGQWTSASASTSPDTAAAMTHTHQAESTEASGQTQTSEPASSGSRTTSAGTATPSSSGASGTTPSGSEGISTSGETTRFSSNPSRDSHTTQSTTELLSASASHGAIPVSTGMASSIVPGTFHPTLSEASTAGRPTGQSSPTSPSASPQETAAISRMAQTQRTRTSRGSDTISLASQATDTFSTVPPTPPSITSTGLTSPQTETHTLSPSGSGKTFTTALISNATPLPVTYASSASTGHTTPLHVTDASSVSTGHATPLPVTSPSSVSTGHTTPLPVTDTSSESTGHVTPLPVTSFSSASTGDSTPLPVTDTSSASTGHVTPLPVTSLSSASTGDTTPLPVTDTSSASTGHATSLPVTDTSSVSTGHTTPLPVTDTSSASTGHATSLPVTDTSSVSTGHTTPLHVTDASSASTGQATPLPVTSLSSVSTGDTTPLPVTSPSSASTGHATPLLVTDTSSASTGHATPLPVTDASSVSTDHATSLPVTIPSAASTGHTTPLPVTDTSSASTGQATSLLVTDTSSVSTGDTTPLPVTSTSSASTGHVTPLHVTSPSSASTGHATPLPVTSLSSASTGDTMPLPVTSPSSASTGDTTPLPVTDASSVSTGHTTPLHVTDASSASTGQATPLPVTSLSSVSTGDTTPLPVTSPSSASTGHATPLLVTDTSSASTGHATPLPVTDASSVSTDHATSLPVTIPSAASTGHTTPLPVTDTSSASTGQATSLLVTDTSSVSTGDTTPLPVTSTSSASTGHVTPLHVTSPSSASTGHATPLPVTSLSSASTGDTMPLPVTSPSSASTGDTTPLPVTDASSVSTGHTTPLPVTSPSSASTGHTTPLPVTDTSSASKGDTTPLPVTSPSSASTGHTTPLPVTDTSSASTGDTTPLPVTNASSLSTGHATPLHVTSPSSASTGHATPLPVTSTSSASTGHATPLPVTGLSSATTDDTTRLPVTDVSSASTGQATPLPVTSLSSVSTGDTTPLPVTSPSSASTGHASPLLVTDASSASTGQATPLPVTDTSSVSTAHATPLPVTGLSSASTDDTTRLPVTDVSSASTGQAIPLPVTSPSSASTGDTTPLPVTDASSASTGDTTSLPVTIPSSASSGHTTSLPVTDASSVSTGHATSLLVTDASSVSTGDTTPLPVTDTNSASTGDTTPLHVTDASSVSTGHATSLPVTSLSSASTGDTTPLPVTSPSSASSGHTTPLPVTDASSVPTGHATSLPVTDASSVSTGHATPLPVTDASSVSTGHATPLPVTDTSSVSTGQATPLPVTSLSSASTGDTTPLPVTDTSSASTGHAPHLPVTGLSSASTGDTTRLPVTNVSSASTGHATPLPVTSTSSASTGDTTPLPGTDTSSVSTGHTTPLLVTDASSVSTGDTTRLPVTSPSSASTGHTTPLHVTDASSVSTGHTTPLPVTDTSSASTGQATSLLVTDTSSVSTGDTTPLPVTSTSSASTGHVTPLHVTSPSSASTGHATPLPVTSLSSASTGDTTPLPVTDTSSVSTGHTTPLPVTSPSSASTGHTTPLPVTDTSSASKGDTTPLPVTSPSSASTGHTTPLPVTDTSSASTGDTTPLPVTNASSLSTGHATPLHVTSPSSASTGHATPLPVTSTSSASTGHATPLPVTSTSSASTGHATPLPVTDNSSVSTGHATPLPVTGLSSATTDDTTRLPVTDVSSASTGQATPLPVTSLSSVSTGDTTPLPVTSPSSASTGHASPLLVTDASSASTGQATPLPVTDTSSVSTAHATPLPVTGLSSASTDDTTRLPVTDVSSASTGQAIPLPVTSPSSASTGDTTPLPVTDASSASTGDTTSLPVTIPSSASSGHTTSLPVTDASSVSTGHATSLLVTDASSVSTGDTTPLPVTDTNSASTGDTTPLHVTDASSVSTGHATSLPVTSLSSASTGDTTPLPVTSPSSASSGHTTSLPVTDASSVSTGHATSLPVTIPSSASSGHTTPLPVTDASSVPTGHATSLPVTDASSVSTGHATPLPVTDASSVSTGHATPLPVTDTSSVSTGQATPLPVTSLSSASSTGDTTPLPVTDTSSASTGQDTPLPVTSLFSVSTGDTTPLPVTSPSSASTGHATHLLVTDASSVSTGHATSLLVTDASSVSTGHATALHVTDASSLSTGDTTPLPVTSPSSASTGDTTPLPVTDTSSVSTGHATSLPVTDTSSASTGHATSLPVTDTSSASTGQATPLPVTSPSSASTGHAIPLLVTDTSSASTGQATPLPVTSLSSASTGDTTPLPVTDASSVSTGHATSLPVTSLSSVSTGDTTPLPVTSPSSASTGHATPLHVTSPSSASTGHATPLPVTSLSSASTGDTTPLPVTSPSSASTGHATPLHVTDASSVSTGDTTPLPVTSPSSASSGHTTPLPVTDASSASTGDTTPLPVTDTSSASTGHATHLPVTGLSSASTGDTTRLPVTDVSSASTGHATPLPVTSTSSASTGDTTPLPGTDTSSVSTGHTTPLLVTDASSVSTGDTTRLPVTSPSSASTGHTTPLPVTDTPSASTGDTTPLPVTNASSLSTRHATSLHVTSPSSASTGHATPLPVTDTSAASTGHATPLPVTSTSSASTGDTTPLPVTDTSSASTGHATPLPVTNTSSVSTGHATPLHVTSPSSASTGHTTPLPVTDASSVSTGHATSLPVTDASSVSTGHATPLPVTDASSVSTGHATPLPLTSLSSVSTGDTTPLPVTDTSSASTGQATPLPVTSLSSVSTGDTTPLPVTDTSSASTGHATSLPVTDTSSASTGHATPLHVTSPSSASTGHATPLPVTDTSSASTGHATPLPVTSLSSVSTGDTTPLPVTSPSSASTGHATPLLVTDASSASTGQATPLPVTSLSSVSTGDTTPLPVTSPSSASTGHATSLPVTDTSSASTGDTTSLPVTDTSSAYTGDTTSLPVTDTSSSSTGDTTPLLVTETSSASTGDTTPVPVTDTSSVSTGHATPLPVTGLSSASTGDTTRLPVTDISSASTGQATPLPVTNTSSVSTGDTMPLPVTSPSSASTGHATPLPVTSTSSASTGHATPVPVTSTSSASTGHTTPLPVTSPSSASTGHTTPLPVTDTSSASTGDTTPLPVTNASSLSTGHTTPLHVTIPSSASTGDTSTLPVTGASSASTGHATPLPVTDTSSVSTGHATPLPVTSFSSVSTGDTTPLPVTDASSASTGHATPLPVTDTSSASTGDTTPLPVTDASSASTGQATPLPVTSLSSVSTGDTTPLPVTIPSSASSGHTTSLPVSDTSSASTGQATPLPVTSLSSVSTGDTTPLLVTDASSVSTGHATPLPVTDTSSASTGDTTRLPVTDTSSASTGQATPLPVTSLSSVSTGDTTPLLVTNTSSVSTGHATSLPVTIPSSSSSGHTTPLPVTSTSSVSTGHVTPLHVTSPSSSSTGQATPLPVTSTSSSSTGQATPLPVTSTSSASTGHATPLPVTDASSVSTGHATPLPVTDTSSASTGDTTPLPVTDTSSASTGQATPLPVTSLSSVSTGHATPLAVSSATSASTVSSDSPLKMETSGMTTPSLKTDGGRRTATSPPPTTSQTIISTIPSTAMHTRSTAAPIPILPERGVSLFPYGADAGDLEFVRRTVDFTSPLFKPATGFPLGSSLRDSLYFTDNGQIIFPESDYQIFSYPNPLPTGFTGRDPVALVAPFWDDADFSTGRGTTFYQEYETFYGEHSLLVQQAESWIRKITNNGGYKARWALKVTWVNAHAYPAQWTLGSNTYQAILSTDGSRSYALFLYQSGGMQWDVAQRSGKPVLMGFSSGDGYFENSPLMSQPVWERYRPDRFLNSNSGLQGLQFYRLHREERPNYRLECLQWLKSQPRWPSWGWNQVSCPCSWQQGRRDLRFQPVSIGRWGLGSRQLCSFTSWRGGVCCSYGPWGEFREGWHVQRPWQLAQELEPQSWCCRWNDKPYLCALYQQRRPHVGCATYRPPQPAWMFGDPHITTLDGVSYTFNGLGDFLLVGAQDGNSSFLLQGRTAQTGSAQATNFIAFAAQYRSSSLGPVTVQWLLEPHDAIRVLLDNQTVTFQPDHEDGGGQETFNATGVLLSRNGSEVSASFDGWATVSVIALSNILHSSASLPPEYQNRTEGLLGVWNNNPEDDFRMPNGSTIPPGSPEEMLFHFGMTWQINGTGLLGKRNDQLPSNFTPVFYSQLQKNSSWAEHLISNCDGDSSCIYDTLALRNASIGLHTREVSKNYEQANATLNQYPPSINGGRVIEAYKGQTTLIQYTSNAEDANFTLRDSCTDLELFENGTLLWTPKSLEPFTLEILARSAKIGLASALQPRTVVCHCNAESQCLYNQTSRVGNSSLELWGALSCVRTSPAL

SEQ ID NO: 53232 - protein, 6436 aa, Homo sapiens
  Payload ID: 10597
  Gene Symbol: MUC4
  Gene Name: mucin 4, cell surface associated
  ENSP ID: ENSP00000485768
MKGARWRRVPWVSLSCLCLCLLPHVVPGTTEDTLITGSKTPAPVTSTGSTTATLEGQSTAASSRTSNQDISASSQNHQTKSTETTSKAQTDTLTQMMTSTLFSSPSVHNVMETVTQETAPPDEMTTSFPSSVTNTLMMTSKTITMTTSTDSTLGNTEETSTAGTESSTPVTSAVSITAGQEGQSRTTSWRTSIQDTSASSQNHWTRSTQTTRESQTSTLTHRTTSTPSFSPSVHNVTGTVSQKTSPSGETATSSLCSVTNTSMMTSEKITVTTSTGSTLGNPGETSSVPVTGSLMPVTSAALVTVDPEGQSPVTFSRTSTQDTTAFSKNHQTQSVETTRVSQINTLNTLTPVTTSTVLSSPSGFNPSGTVSQETFPSGETTISSPSSVSNTFLVTSKVFRMPISRDSTLGNTEETSLSVSGTISAITSKVSTIWWSDTLSTALSPSSLPPKISTAFHTQQSEGAETTGRPHERSSFSPGVSQEIFTLHETTTWPSSFSSKGHTTWSQTELPSTSTGAATRLVTGNPSTGAAGTIPRVPSKVSAIGEPGEPTTYSSHSTTLPKTTGAGAQTQWTQETGTTGEALLSSPSYSVTQMIKTATSPSSSPMLDRHTSQQITTAPSTNHSTIHSTSTSPQESPAVSQRGHTQAPQTTQESQTTRSVSPMTDTKTVTTPGSSFTASGHSPSEIVPQDAPTISAATTFAPAPTGDGHTTQAPTTALQAAPSSHDATLGPSGGTSLSKTGALTLANSVVSTPGGPEGQWTSASASTSPDTAAAMTHTHQAESTEASGQTQTSEPASSGSRTTSAGTATPSSSGASGTTPSGSEGISTSGETTRFSSNPSRDSHTTQSTTELLSASASHGAIPVSTGMASSIVPGTFHPTLSEASTAGRPTGQSSPTSPSASPQETAAISRMAQTQRTRTSRGSDTISLASQATDTFSTVPPTPPSITSSGLTSPQTQTHTLSPSGSGKTFTTALISNATPLPVTYASSASTGHTTPLHVTDASSVSTGHATPLPVTDTSSESTGHATPLPVTSPSSVSTGHTTPLPVTDTSSESTGHVTPLPVTSLSSASTGDSTPLPVTDTSSASTGHVTPLPVTSLSSASTGDTTPLPVTDTSSASTGHATSLPVTDTSSVSTGHTTPLPVTDTSSASTGHATSLPVTDTSSVSTAHATPLPVTGLSSASTDDTTRLPVTDVSSASTGQAIPLPVTSPSSASTGDTTPLPVTDASSASTGDTTSLPVTIPSSASSGHTTSLPVTDASSVSTGHATSLLVTDASSVSTGDTTPLPVTDTNSASTGDTTPLHVTDASSVSTGHATSLPVTSLSSASTGDTTPLPVTSPSSASSGHTTPLPVTDASSVPTGHATSLPVTDASSVSTGHATPLPVTDASSVSTGHATPLPVTDTSSVSTGQATPLPVTSLSSASTGDTTPLPVTDTSSASTGQDTPLPVTSLSSVSTGDTTPLPVTSPSSASTGHATPLLVTDASSVSTGHATSLLVTDASSVSTGHATALHVTDASSLSTGDTTPLPVTSPSSASTGDTTPLPVTDTSSASTGHATSLPVTDTSSASTGHATPLPVTDTSSASTGQATPLPVTGPSSASTGHAIPLLVTDTSSASTGQATPLPVTSLSSASTGDTTPLPVTDASSVSTGHATSLPVTSLSSVSTGDTTPLPVTSPSSASSGHTTPLPVTDASSVSTGDTTPLPVTSPSSASSGHTTPLPVTSPSSASSGHTTPLPVTDASSASTGDTTPLPVTDTSSASTGHATHLPVTGLSSASTGDTTRLPVTNVSSASTGHATPLPVTSTSSASTGDTTPLPGTDTSSVSTGHTTPLLVTDASSVSTGDTTRLPVTSPSSASTGHTTPLPVTDTPSASTGDTTPLPVTNASSLSTRHTTSLHVTSPSSASTGHATSLPVTDTSSVSTGHATPLHVTSPSSASTGDTTPLPVTDTYSASTGQATPLPVTDTSSASTGDTTPLPVTDTSSASTGHATPLPVTNTSSVSTGHATPLHVTSPSSASTGHTTPLPVTDASSVSTGHATSLPVTDASSVFTGHATSLPVTIPSSASSGHTTPLPVTDASSVSTGHATSLPVTDASSVSTGHATPLPVTDASSVSTGHATPLPVTDTSSVSTGHATPLPLTSLSSVSTGDTTPLPVTDTSSASTGQATPLPVTSLSSVSTGDTTPLPVTDTSSASTGHATSLPVTDTSSASTGHATPLPDTDTSSASTGHATPLPVTDTSSASTGHATLLPVTDTSSASIGHATPLPVTDTSSISTGHATPLHVTSPSSASTGHATPLPVTDTSSASTGHANPLHVTSPSSASTGHATPLPVTDTSSASTGHATPLPVTSLSSVSTGDTTPLPVTSPSSASTGHTTPLPVTDTSSASTGQATALPVTSTSSASTGDTTPLPVTDTSSASTGQATPLPVTSLSSVSTGDTTPLPVTSPSSASTGHATPLLVTDASSASTGQATPLPVTDTSSAYTGDTTSLPVTDTSSSSTGDTTPLLVTETSSASTGHATPLHVTSPSSASTGDTTPVPVTDTSSVSTGHATPLPVTGLSSASTGDTTRLPVTDISSASTGQATPLPVTNTSSASTGHATPLPVTGLSSASTGDTTRLPVTDISSASTGQATPLPVTNTSSVSTGDTMPLPVTSPSSASTGHATPLPVTSTSSASTGHATPVPVTSTSSASTGHTTPLPVTDTSSASTGDTTPLPVTSPSSASTGHTTPLHVTIPSSASTGDTSTLPVTGASSASTGHATPLPVTDTSSVSTGHATPLPVTSFSSVSTGDTTPLPVTDTSSVSTGHATPLPVTSFSSVSTGDTTPLPVTDASSASTGHATPLPVTDTSSVSTGHATPLPLTSLSSVSTGDTTTLPVTDTSSVSTGHATPLPVTSFSSVSTGDTTPLPVTDASSASTGHATPLPVTDTSSVSTGHATPLPVTSLSSVSTGDTTPLPVTDASSASTGQATPLPVTSLSSVSTGDTTPLPVTIPSSASSGHTTSLPVTDTSSASTGQATPLPVTSLSSVSTGDTTPLLVTDASSVSTGHATPLPVTDTSSASTGDTTRLPVTDTSSASTGQATPLPVTSLSSVSTGDTTPLLVTNTSSVSRGHATSLPVTIPSSSSSGHTTPLPVTSTSSVSTGHVTPLPVTSTSSASTGHATSLPVTDTSSVSTGHATSLPVTDTSSVSTGHATPLPVTDASSVSTGHATPLPVTDASSASTGDTTPLPVTNTSSASTGQATPLPVTSLSSVSTGDTMPLPVTSPSSASTGHATPLPVTGLSSASTGDTTPLPVTDTSSASTGHVTPLPVTSLSSASTGDSTPLPVTDTSSASTGHVTPLPVTSLSSASTGDTTPLPVTDTSSASTGHATPLHVTDASSASTGQATLLPVTSLSSVSTGDTTPLPVTSPSSASTGHATPLLVTDTSSASTGHATPLPVTDASSVSTGHATSLPVTIRSSGSTGHTTPLPVTDTSSASTGQATSLLVTDTSSVSTGDTTPLPVTSTSSASTGHVTPLHVTSPSSASTGHATPLPVTSLSSASTGDTMPLPVTSPSSASTGDTTPLPVTDASSVSTGHTTPLPVTSPSSASTGHTTPLPVTDTTSASKGDTTPLPVTSPSSASTGHTTPLPVTDTSSASTGDTTPLPVTSPSSASTGHATPLPVTNASSLSTGHATPLHVTSPSSASTGHATPLPVTSTSSASTGHATSLPVTSTSSASTGHATPLPVTDNSSVSTGHATPLPVTGLSSATTDDTTRLPVTDVSSASTGQATPLPVTSLSSVSTGDTTPLPVTSPSSASTGHASPLLVTDASSASTGQATPLPVTDTSSVSTAHATPLPVTGLSSASTDDTTRLPVTDVSSASTGQAIPLPVTSPSSASTGDTTPLPVTDASSASTGDTTSLPVTIPSSASSGHTTSLPVTDASSVSTGHATSLLVTDASSVSTGDTTPLPVTDTNSASTGDTTPLHVTDASSVSTGHATSLPVTSLSSASTGDTTPLPVTSPSSASSGDTTPLPVTDTSSASTGHATHLPVTGLSSASTGDTTRLPVTNVSSASTGHATPLPVTSTSSASTGDTTPLPGTDTSSVSTGHTTPLLVTDASSVSTGDTTRLPVTSPSSASTGHTTPLHVTDASSVSTGHTTPLPVTDTSSASTGQATSLLVTDTSSVSTGDTTPLPVTSTSSASTGHVTPLHVTSPSSASTGHATPLPVTSLSSASTGDTTPLPVTDTSSVSTGHTTPLPVTSPSSASTGHTTPLPVTDTSSASKGDTTPLPVTSPSSASTGHTTPLPVTDTSSASTGDTTPLPVTNASSLSTGHATPLHVTSPSSASTGHATPLPVTSTSSASTGHATPLPVTSTSSASTGHATPLPVTDNSSVSTGHATPLPVTGLSSATTDDTTRLPVTDVSSASTGQATPLPVTSLSSVSTGDTTPLPVTSPSSASTGHASPLLVTDASSASTGQATPLPVTDTSSVSTAHATPLPVTGLSSASTDDTTRLPVTDVSSASTGQAIPLPVTSPSSASTGDTTPLPVTDASSASTGDTTSLPVTIPSSASSGHTTSLPVTDASSVSTGHATSLLVTDASSVSTGDTTPLPVTDTNSASTGDTTPLHVTDASSVSTGHATSLPVTSLSSASTGDTTPLPVTSPSSASSGHTTSLPVTDASSVSTGHATSLPVTIPSSASSGHTTPLPVTDASSVPTGHATSLPVTDASSVSTGHATPLPVTDASSVSTGHATPLPVTDTSSVSTGQATPLPVTSLSSASSTGDTTPLPVTDTSSASTGQDTPLPVTSLFSVSTGDTTPLPVTSPSSASTGHATHLLVTDASSVSTGHATSLLVTDASSVSTGHATALHVTDASSLSTGDTTPLPVTSPSSASTGDTTPLPVTDTSSVSTGHATSLPVTDTSSASTGHATSLPVTDTSSASTGQATPLPVTSPSSASTGHAIPLLVTDTSSASTGQATPLPVTSLSSASTGDTTPLPVTDASSVSTGHATSLPVTSLSSVSTGDTTPLPVTSPSSASTGHATPLHVTSPSSASTGHATPLPVTSLSSASTGDTTPLPVTSPSSASTGHATPLHVTDASSVSTGDTTPLPVTSPSSASSGHTTPLPVTDASSASTGDTTPLPVTDTSSASTGHATHLPVTGLSSASTGDTTRLPVTDVSSASTGHATPLPVTSTSSASTGDTTPLPGTDTSSVSTGHTTPLLVTDASSVSTGDTTRLPVTSPSSASTGHTTPLPVTDTPSASTGDTTPLPVTNASSLSTRHATSLHVTSPSSASTGHATPLPVTDTSAASTGHATPLPVTSTSSASTGDTTPLPVTDTSSASTGHATPLPVTNTSSVSTGHATPLHVTSPSSASTGHTTPLPVTDASSVSTGHATSLPVTDASSVSTGHATPLPVTDASSVSTGHATPLPLTSLSSVSTGDTTPLPVTDTSSASTGQATPLPVTSLSSVSTGDTTPLPVTDTSSASTGHATSLPVTDTSSASTGHATPLPVTDTSSISTGHATPLHVTSPSSASTGHATPLPVTDTSSASTGHATPLPVTSLSSVSTGDTTPLPVTSPSSASTGHATPLLVTDASSASTGQATPLPVTSLSSVSTGDTTPLPVTSPSSASTGHATSLPVTDTSSASTGDTTSLPVTDTSSAYTGDTTSLPVTDTSSSSTGDTTPLLVTETSSASTGDTTPVPVTDTSSVSTGHATPLPVTGLSSASTGDTTRLPVTDISSASTGQATPLPVTNTSSVSTGDTMPLPVTSPSSASTGHATPLPVTSTSSASTGHATPVPVTSTSLASTGHTTPLPVTSPSSASTGHTTPLPVTDTSSASTGDTTPLPVTNASSLSTGHTTPLHVTIPSSASTGDTSTLPVTGASSASTGHATPLPVTDTSSVSTGHATPLPVTSFSSVSTGDTTPLPVTDASSASTGHATPLPVTDTSSASTGDTTPLPVTDASSASTGQATPLPVTSLSSVSTGDTTPLPVTIPSSASSGHTTSLPVSDTSSASTGQATPLPVTSLSSVSTGDTTPLLVTDASSVSTGHATPLPVTDTSSASTGDTTRLPVTDTSSASTGQATPLPVTSLSSVSTGDTTPLLVTNTSSVSTGHATSLPVTIPSSSSSGHTTPLPVTSTSSVSTGHVTPLHVTSPSSSSTGQATPLPVTSTSSVSTGHVTPLHVTSPSSASTGHATPLPVTSTSSASTGHATPLPVTDASSVSTGHATPLPVTDTSSASTGDTTPLPVTDTSSASTGQATPLPVTSLSSVSTGHATPLAVSSATSASTVSSDSPLKMETSGMTTPSLKTDGGRRTATSPPPTTSQTIISTIPSTAMHTRSTAAPIPILPERGEAIQEFPSSPMGQTPGTWSSSGGPWTSPPHSSSRRLASPLAPLSVIPSTSQTMARSSSQSQTTRFSPTPTHSQQASQAGTLWPWWLRSGTMLTSPLVGGPHFIRNTRRSMVNTAC

SEQ ID NO: 53233 - protein, 4373 aa, Homo sapiens
  Payload ID: 10597
  Gene Symbol: MUC4
  Gene Name: mucin 4, cell surface associated
  ENSP ID: ENSP00000485821
  MOD_RES (1)..(1): Any amino acid
XTTEDTLITGSKTAAPVTSTGSTTATLEGQSTAASSRTSNQDISASSQNHQTKSTETTSKAQTDTLTQMMTSTLFSSPSVHNVMETAPPDEMTTSFPSSVTNTLMMTSKTITMTTSTDSTLGNTEETSTAGTESSTPVTSAVSITAGQEGQSRTTSWRTSIQDTSASSQNHWTRSTQTTRESQTSTLTHRTTSTPSFSPSVHNVTGTVSQKTSPSGETATSSLCSVTNTSMMTSEKITVTTSTGSTLGNPGETSSVPVTGSLMPVTSAALVTFDPEGQSPATFSRTSTQDTTAFSKNHQTQSVETTRVSQINTLNTLTPVTTSTVLSSPSGFNPSGTVSQETFPSGETTTSSPSSVSNTFLVTSKVFRMPTSRDSTLGNTEETSLSVSGTISAITSKVSTIWWSDTLSTALSPSSLPPKISTAFHTQQSEGAETTGRPHERSSFSPGVSQEIFTLHETTTWPSSFSSKGHTTWSQTELPSTSTGAATRLVTGNPSTGTAGTIPRVPSKVSAIGEPGEPTTYSSHSTTLPKTTGAGAQTQWTQETGTTGEALLSSPSYSVTQMIKTATSPSSSPMLDRHTSQQITTAPSTNHSTIHSTSTSPQESPAVSQRGHTQAPQTTQESQTTRSVSPMTDTKTVTTPGSSFTASGHSPSEIVPQDAPTISAATTFAPAPTGDGHTTQAPTTALQAAPSSHDATLGPSGGTSLSKTGALTLANSVVSTPGGPEGQWTSASASTSPDTAAAMTHTHQAESTEASGQTQTSEPASSGSRTTSAGTATPSSSGASGTTPSGSEGISTSGETTRFSSNPSRDSHTTQSTTELLSASASHGAIPVSTGMASSIVPGTFHPTLSEASTAGRPTGQSSPTSPSASPQETAAISRMAQTQRTRTSRGSDTISLASQATDTFSTVPPTPPSITSTGLTSPQTETHTLSPSGSGKTFTTALISNATPLPVTYASSASTGHTTPLHVTDASSVSTGHATPLPVTSPSSVSTGHTTPLPVTDTSSESTGHVTPLPVTSFSSASTGDSTPLPVTDTSSASTGHVTPLPVTSLSSASTGDTTPLPVTDTSSASTGHATSLPVTDTSSVSTGHTTPLPVTDTSSASTGHATSLPVTDTSSVSTGHTTPLHVTDASSASTGQATPLPVTSLSSVSTGDTTPLPVTSPSSASTGHATPLLVTDTSSASTGHATPLPVTDASSVSTDHATSLPVTIPSAASTGHTTPLPVTDTSSASTGQATSLLVTDTSSVSTGDTTPLPVTSTSSASTGHVTPLHVTSPSSASTGHATPLPVTSLSSASTGDTMPLPVTSPSSASTGDTTPLPVTDASSVSTGHTTPLHVTDASSASTGQATPLPVTSLSSVSTGDTTPLPVTSPSSASTGHATPLLVTDTSSASTGHATPLPVTDASSVSTDHATSLPVTIPSAASTGHTTPLPVTDTSSASTGQATSLLVTDTSSVSTGDTTPLPVTSTSSASTGHVTPLHVTSPSSASTGHATPLPVTSLSSASTGDTMPLPVTSPSSASTGDTTPLPVTDASSVSTGHTTPLPVTSPSSASTGHTTPLPVTDTSSASKGDTTPLPVTSPSSASTGHTTPLPVTDTSSASTGDTTPLPVTNASSLSTGHATPLHVTSPSSASTGHATPLPVTSTSSASTGHATPLPVTGLSSATTDDTTRLPVTDVSSASTGQATPLPVTSLSSVSTGDTTPLPVTSPSSASTGHASPLLVTDASSASTGQATPLPVTDTSSVSTAHATPLPVTGLSSASTDDTTRLPVTDVSSASTGQAIPLPVTSPSSASTGDTTPLPVTDASSASTGDTTSLPVTIPSSASSGHTTSLPVTDASSVSTGHATSLLVTDASSVSTGDTTPLPVTDTNSASTGDTTPLHVTDASSVSTGHATSLPVTSLSSASTGDTTPLPVTSPSSASSGHTTPLPVTDASSVPTGHATSLPVTDASSVSTGHATPLPVTDASSVSTGHATPLPVTDTSSVSTGQATPLPVTSLSSASTGDTTPLPVTDTSSASTGQDTPLPVTSLSSVSTGDTTPLPVTNPSSASTGHATPLLVTDASSISTGHATSLLVTDASSVSTGHATALHDTDASSLSTGDTTPLPVTSPSSTSTGDTTPLPVTETSSVSTGHATSLPVTDTSSASTGHATSLPVTDTSSASTGHATPLPVTDTSSASTGQATPLPVTSPSSASTGHAIPLLVTDTSSASTGQATPLPVTSLSSASTGDTTPLPVTDASSVSTGHATSLPVTSLSSVSTGDTTPLPVTSPSSASTGHATPLHVTDASSASTGHATPLPVTSLSSASTGDTTPLPVTSPSSASTGHATPLHVTDASSVSTGDTTPLPVTSSSSASSGHTTPLPVTDASSASTGDTTPLPVTDTSSASTGHATHLPVTGLSSASTGDTTRLPVTNVSSASTGHATPLPVTSTSSASTGDTTPLPGTDTSSVSTGHTTPLLVTDASSVSTGDTTRLPVTSPSSASTGHTTPLPVTDTPSASTGDTTPLPVTNASSLSTRHATSLHVTSPSSASTGHATSLPVTDTSAASTGHATPLPVTSTSSASTGDTTPLPVTDTYSASTGQATPLPVTSLSSVSTGDTTPLPVTSPSSASTGHATPLLVTDASSASTGQATPLPVTSLSSVSTGDTTPLPVTSPSSASTGHATSLPVTDTSSASTGDTTSLPVTDTSSAYTGDTTSLPVTDTSSSSTGDTTPLLVTETSSVSTGDTTPLPVTDTSSASTGHATPLPVTNTSSVSTGHATPLHVTSPSSASTGHTTPLPVTDASSVSTGHATSLPVTDASSVFTGHATSLPVTIPSSASSGHTTPLPVTDASSVSTGHATSLPVTDASSVSTGHATPLPVTDASSVSTGHATPLPLTSLSSVSTGDTTPLPVTDTSSASTGQATPLPVTSLSSVSTGDTTPLPVTDTSSASTGHATSLPVTDTSSASTGHATPLPDTDTSSASTGHATLLPVTDTSSASIGHATSLPVTDTSSISTGHATPLHVTSPSSASTGHATPLPVTDTSSASTGHANPLHVTSPSSASTGHATPLPVTDTSSASTGHATPLPVTSLSSVSTGDTTPLPVTSPSSASTGHTTPLPVTDTSSASTGQATALPVTSTSSASTGDTTPLPVTDTSSASTGQATPLPVTSLSSVSTGDTTPLPVTSPSSASTGHATPLLVTDASSASTGQATPLPVTSLSSVSTGDTTPLPVTSPSSASTGHATSLPVTDTSSASTGDTTSLPVTDTSSAYTGDTTSLPVTDTSSSSTGDTTPLLVTETSSVSTGHATPLLVTDASSASTGHATPLHVTSPSSASTGDTTPVPVTDTSSVSTGHATPLPVTGLSSASTGDTTRLPVTDISSASTGQATPLPVTNTSSVSTGDTMPLPVTSPSSASTGHATPLPVTSTSSASTGHATPVPVTSTSSASTGHTTPLPVTDTSSASTGDTTPLPVTSPSSASTGHTTPLHVTIPSSASTGDTSTLPVTGASSASTGHATPLPVTDTSSVSTGHATPLPVTSLSSVSTGDTTPLPVTDASSASTGQATPLPVTSLSSVSTGDTTPLLVTDASSVSTGHATPLPVTDTSSASTGDTTRLPVTDTSSASTGQATPLPVTSLSSVSTGDTTPLLVTDASSVSTGHATPLPVTDTSSASTGDTTRLPVTDTSSASTGQATPLPVTIPSSSSSGHTTPLPVTSTSSVSTGHVTPLHVTSPSSASTGHVTPLPVTSTSSASTGHATPLLVTDASSVSTGHATPLPVTDASSASTGDTTPLPVTDTSSASTGQATPLPVTSLSSVSTGDTTPLPVTDASSASTGHATPLPVTIPSSVSTGDTMPLPVTSPSSASTGHATPLPVTGLSSASTGDTTPLPVTDTSSASTRHATPLPVTDTSSASTDDTTRLPVTDVSSASTGHATPLPVTSTSSASTGDTTPLPVTDTSSVSTGHATSLPVTSRSSASTGHATPLPVTDTSSVSTGHATPLPVTSTSSVSTGHATPLPVTSPSSASTGHATPVPVTSTSSASTGDTTPLPVTNASSLSTGHATPLHVTSPSSASRGDTSTLPVTDASSASTGHATPLPLTSLSSVSTGDTTPLPVTDTSSASTGQATPLPVTSLSSVSTGDTTPLPVTIPSSASSGHTTSLPVTDASSVSTGHGTPLPVTSTSSASTGDTTPLPVTDTSSASTGHATPLPVTDTSSASTGHATPLPVTSLSSVSTGHATPLAVSSATSASTVSSDSPLKMETPGMTTPSLKTDGGRRTATSPPPTTSQTIISTIPSTAMHTRSTAAPIPILPERGVSLFPYGAGAGDLEFVRRTVDFTSPLFKPATGFPLGSSLRDSLYASQAGTLWPWWLRSGTMLTSPLVGGPHFIRNTRRSMVNTAC

SEQ ID NO: 53234 - protein, 5333 aa, Homo sapiens; identical to SEQ ID NO: 53215
  Payload ID: 10597
  Gene Symbol: MUC4
  Gene Name: mucin 4, cell surface associated
  ENSP ID: ENSP00000485835
  MOD_RES (1)..(1): Any amino acid

SEQ ID NO: 53235 - protein, 6516 aa, Homo sapiens
  Payload ID: 10597
  Gene Symbol: MUC4
  Gene Name: mucin 4, cell surface associated
  ENSP ID: ENSP00000485865
MKGARWRRVPWVSLSCLCLCLLPHVVPGTTEDTLITGSKTPAPVTSTGSTTATLEGQSTAASSRTSNQDISASSQNHQTKSTETTSKAQTDTLTQMMTSTLFSSPSVHNVMETVTQETAPPDEMTTSFPSSVTNTLMMTSKTITMTTSTDSTLGNTEETSTAGTESSTPVTSAVSITAGQEGQSRTTSWRTSIQDTSASSQNHWTRSTQTTRESQTSTLTHRTTSTPSFSPSVHNVTGTVSQKTSPSGETATSSLCSVTNTSMMTSEKITVTTSTGSTLGNPGETSSVPVTGSLMPVTSAALVTVDPEGQSPVTFSRTSTQDTTAFSKNHQTQSVETTRVSQINTLNTLTPVTTSTVLSSPSGFNPSGTVSQETFPSGETTISSPSSVSNTFLVTSKVFRMPISRDSTLGNTEETSLSVSGTISAITSKVSTIWWSDTLSTALSPSSLPPKISTAFHTQQSEGAETTGRPHERSSFSPGVSQEIFTLHETTTWPSSFSSKGHTTWSQTELPSTSTGAATRLVTGNPSTGAAGTIPRVPSKVSAIGEPGEPTTYSSHSTTLPKTTGAGAQTQWTQETGTTGEALLSSPSYSVTQMIKTATSPSSSPMLDRHTSQQITTAPSTNHSTIHSTSTSPQESPAVSQRGHTQAPQTTQESQTTRSVSPMTDTKTVTTPGSSFTASGHSPSEIVPQDAPTISAATTFAPAPTGDGHTTQAPTTALQAAPSSHDATLGPSGGTSLSKTGALTLANSVVSTPGGPEGQWTSASASTSPDTAAAMTHTHQAESTEASGQTQTSEPASSGSRTTSAGTATPSSSGASGTTPSGSEGISTSGETTRFSSNPSRDSHTTQSTTELLSASASHGAIPVSTGMASSIVPGTFHPTLSEASTAGRPTGQSSPTSPSASPQETAAISRMAQTQRTRTSRGSDTISLASQATDTFSTVPPTPPSITSSGLTSPQTQTHTLSPSGSGKTFTTALISNATPLPVTYASSASTGHTTPLHVTDASSVSTGHATPLPVTDTSSESTGHATPLPVTSPSSVSTGHTTPLPVTDTSSESTGHVTPLPVTSLSSASTGDSTPLPVTDTSSASTGHVTPLPVTSLSSASTGDTTPLPVTDTSSASTGHATSLPVTDTSSVSTGHTTPLPVTDTSSASTGHATSLPVTDTSSVSTAHATPLPVTGLSSASTDDTTRLPVTDVSSASTGQAIPLPVTSPSSASTGDTTPLPVTDASSASTGDTTSLPVTIPSSASSGHTTSLPVTDASSVSTGHATSLLVTDASSVSTGDTTPLPVTDTNSASTGDTTPLHVTDASSVSTGHATSLPVTSLSSASTGDTTPLPVTSPSSASSGHTTPLPVTDASSVPTGHATSLPVTDASSVSTGHATPLPVTDASSVSTGHATPLPVTDTSSVSTGQATPLPVTSLSSASTGDTTPLPVTDTSSASTGQDTPLPVTSLSSVSTGDTTPLPVTSPSSASTGHATPLLVTDASSVSTGHATSLLVTDASSVSTGHATALHVTDASSLSTGDTTPLPVTSPSSASTGDTTPLPVTDTSSASTGHATSLPVTDTSSASTGHATPLPVTDTSSASTGQATPLPVTGPSSASTGHAIPLLVTDTSSASTGQATPLPVTSLSSASTGDTTPLPVTDASSVSTGHATSLPVTSLSSVSTGDTTPLPVTSPSSASSGHTTPLPVTDASSVSTGDTTPLPVTSPSSASSGHTTPLPVTSPSSASSGHTTPLPVTDASSASTGDTTPLPVTDTSSASTGHATHLPVTGLSSASTGDTTRLPVTNVSSASTGHATPLPVTSTSSASTGDTTPLPGTDTSSVSTGHTTPLLVTDASSVSTGDTTRLPVTSPSSASTGHTTPLPVTDTPSASTGDTTPLPVTNASSLSTRHTTSLHVTSPSSASTGHATSLPVTDTSSVSTGHATPLHVTSPSSASTGDTTPLPVTDTYSASTGQATPLPVTDTSSASTGDTTPLPVTDTSSASTGHATPLPVTNTSSVSTGHATPLHVTSPSSASTGHTTPLPVTDASSVSTGHATSLPVTDASSVFTGHATSLPVTIPSSASSGHTTPLPVTDASSVSTGHATSLPVTDASSVSTGHATPLPVTDASSVSTGHATPLPVTDTSSVSTGHATPLPLTSLSSVSTGDTTPLPVTDTSSASTGQATPLPVTSLSSVSTGDTTPLPVTDTSSASTGHATSLPVTDTSSASTGHATPLPDTDTSSASTGHATPLPVTDTSSASTGHATLLPVTDTSSASIGHATPLPVTDTSSISTGHATPLHVTSPSSASTGHATPLPVTDTSSASTGHANPLHVTSPSSASTGHATPLPVTDTSSASTGHATPLPVTSLSSVSTGDTTPLPVTSPSSASTGHTTPLPVTDTSSASTGQATALPVTSTSSASTGDTTPLPVTDTSSASTGQATPLPVTSLSSVSTGDTTPLPVTSPSSASTGHATPLLVTDASSASTGQATPLPVTDTSSAYTGDTTSLPVTDTSSSSTGDTTPLLVTETSSASTGHATPLHVTSPSSASTGDTTPVPVTDTSSVSTGHATPLPVTGLSSASTGDTTRLPVTDISSASTGQATPLPVTNTSSASTGHATPLPVTGLSSASTGDTTRLPVTDISSASTGQATPLPVTNTSSVSTGDTMPLPVTSPSSASTGHATPLPVTSTSSASTGHATPVPVTSTSSASTGHTTPLPVTDTSSASTGDTTPLPVTSPSSASTGHTTPLHVTIPSSASTGDTSTLPVTGASSASTGHATPLPVTDTSSVSTGHATPLPVTSFSSVSTGDTTPLPVTDTSSVSTGHATPLPVTSFSSVSTGDTTPLPVTDASSASTGHATPLPVTDTSSVSTGHATPLPLTSLSSVSTGDTTTLPVTDTSSVSTGHATPLPVTSFSSVSTGDTTPLPVTDASSASTGHATPLPVTDTSSVSTGHATPLPVTSLSSVSTGDTTPLPVTDASSASTGQATPLPVTSLSSVSTGDTTPLPVTIPSSASSGHTTSLPVTDTSSASTGQATPLPVTSLSSVSTGDTTPLLVTDASSVSTGHATPLPVTDTSSASTGDTTRLPVTDTSSASTGQATPLPVTSLSSVSTGDTTPLLVTNTSSVSRGHATSLPVTIPSSSSSGHTTPLPVTSTSSVSTGHVTPLPVTSTSSASTGHATSLPVTDTSSVSTGHATSLPVTDTSSVSTGHATPLPVTDASSVSTGHATPLPVTDASSASTGDTTPLPVTNTSSASTGQATPLPVTSLSSVSTGDTMPLPVTSPSSASTGHATPLPVTGLSSASTGDTTPLPVTDTSSASTGHVTPLPVTSLSSASTGDSTPLPVTDTSSASTGHVTPLPVTSLSSASTGDTTPLPVTDTSSASTGHATPLHVTDASSASTGQATLLPVTSLSSVSTGDTTPLPVTSPSSASTGHATPLLVTDTSSASTGHATPLPVTDASSVSTGHATSLPVTIRSSGSTGHTTPLPVTDTSSASTGQATSLLVTDTSSVSTGDTTPLPVTSTSSASTGHVTPLHVTSPSSASTGHATPLPVTSLSSASTGDTMPLPVTSPSSASTGDTTPLPVTDASSVSTGHTTPLPVTSPSSASTGHTTPLPVTDTTSASKGDTTPLPVTSPSSASTGHTTPLPVTDTSSASTGDTTPLPVTSPSSASTGHATPLPVTNASSLSTGHATPLHVTSPSSASTGHATPLPVTSTSSASTGHATSLPVTSTSSASTGHATPLPVTDNSSVSTGHATPLPVTGLSSATTDDTTRLPVTDVSSASTGQATPLPVTSLSSVSTGDTTPLPVTSPSSASTGHASPLLVTDASSASTGQATPLPVTDTSSVSTAHATPLPVTGLSSASTDDTTRLPVTDVSSASTGQAIPLPVTSPSSASTGDTTPLPVTDASSASTGDTTSLPVTIPSSASSGHTTSLPVTDASSVSTGHATSLLVTDASSVSTGDTTPLPVTDTNSASTGDTTPLHVTDASSVSTGHATSLPVTSLSSASTGDTTPLPVTSPSSASSGDTTPLPVTDTSSASTGHATHLPVTGLSSASTGDTTRLPVTNVSSASTGHATPLPVTSTSSASTGDTTPLPGTDTSSVSTGHTTPLLVTDASSVSTGDTTRLPVTSPSSASTGHTTPLHVTDASSVSTGHTTPLPVTDTSSASTGQATSLLVTDTSSVSTGDTTPLPVTSTSSASTGHVTPLHVTSPSSASTGHATPLPVTSLSSASTGDTTPLPVTDTSSVSTGHTTPLPVTSPSSASTGHTTPLPVTDTSSASKGDTTPLPVTSPSSASTGHTTPLPVTDTSSASTGDTTPLPVTNASSLSTGHATPLHVTSPSSASTGHATPLPVTSTSSASTGHATPLPVTSTSSASTGHATPLPVTDNSSVSTGHATPLPVTGLSSATTDDTTRLPVTDVSSASTGQATPLPVTSLSSVSTGDTTPLPVTSPSSASTGHASPLLVTDASSASTGQATPLPVTDTSSVSTAHATPLPVTGLSSASTDDTTRLPVTDVSSASTGQAIPLPVTSPSSASTGDTTPLPVTDASSASTGDTTSLPVTIPSSASSGHTTSLPVTDASSVSTGHATSLLVTDASSVSTGDTTPLPVTDTNSASTGDTTPLHVTDASSVSTGHATSLPVTSLSSASTGDTTPLPVTSPSSASSGHTTSLPVTDASSVSTGHATSLPVTIPSSASSGHTTPLPVTDASSVPTGHATSLPVTDASSVSTGHATPLPVTDASSVSTGHATPLPVTDTSSVSTGQATPLPVTSLSSASSTGDTTPLPVTDTSSASTGQDTPLPVTSLFSVSTGDTTPLPVTSPSSASTGHATHLLVTDASSVSTGHATSLLVTDASSVSTGHATALHVTDASSLSTGDTTPLPVTSPSSASTGDTTPLPVTDTSSVSTGHATSLPVTDTSSASTGHATSLPVTDTSSASTGQATPLPVTSPSSASTGHAIPLLVTDTSSASTGQATPLPVTSLSSASTGDTTPLPVTDASSVSTGHATSLPVTSLSSVSTGDTTPLPVTSPSSASTGHATPLHVTSPSSASTGHATPLPVTSLSSASTGDTTPLPVTSPSSASTGHATPLHVTDASSVSTGDTTPLPVTSPSSASSGHTTPLPVTDASSASTGDTTPLPVTDTSSASTGHATHLPVTGLSSASTGDTTRLPVTDVSSASTGHATPLPVTSTSSASTGDTTPLPGTDTSSVSTGHTTPLLVTDASSVSTGDTTRLPVTSPSSASTGHTTPLPVTDTPSASTGDTTPLPVTNASSLSTRHATSLHVTSPSSASTGHATPLPVTDTSAASTGHATPLPVTSTSSASTGDTTPLPVTDTSSASTGHATPLPVTNTSSVSTGHATPLHVTSPSSASTGHTTPLPVTDASSVSTGHATSLPVTDASSVSTGHATPLPVTDASSVSTGHATPLPLTSLSSVSTGDTTPLPVTDTSSASTGQATPLPVTSLSSVSTGDTTPLPVTDTSSASTGHATSLPVTDTSSASTGHATPLPVTDTSSISTGHATPLHVTSPSSASTGHATPLPVTDTSSASTGHATPLPVTSLSSVSTGDTTPLPVTSPSSASTGHATPLLVTDASSASTGQATPLPVTSLSSVSTGDTTPLPVTSPSSASTGHATSLPVTDTSSASTGDTTSLPVTDTSSAYTGDTTSLPVTDTSSSSTGDTTPLLVTETSSASTGDTTPVPVTDTSSVSTGHATPLPVTGLSSASTGDTTRLPVTDISSASTGQATPLPVTNTSSVSTGDTMPLPVTSPSSASTGHATPLPVTSTSSASTGHATPVPVTSTSLASTGHTTPLPVTSPSSASTGHTTPLPVTDTSSASTGDTTPLPVTNASSLSTGHTTPLHVTIPSSASTGDTSTLPVTGASSASTGHATPLPVTDTSSVSTGHATPLPVTSFSSVSTGDTTPLPVTDASSASTGHATPLPVTDTSSASTGDTTPLPVTDASSASTGQATPLPVTSLSSVSTGDTTPLPVTIPSSASSGHTTSLPVSDTSSASTGQATPLPVTSLSSVSTGDTTPLLVTDASSVSTGHATPLPVTDTSSASTGDTTRLPVTDTSSASTGQATPLPVTSLSSVSTGDTTPLLVTNTSSVSTGHATSLPVTIPSSSSSGHTTPLPVTSTSSVSTGHVTPLHVTSPSSSSTGQATPLPVTSTSSVSTGHVTPLHVTSPSSASTGHATPLPVTSTSSASTGHATPLPVTDASSVSTGHATPLPVTDTSSASTGDTTPLPVTDTSSASTGQATPLPVTSLSSVSTGHATPLAVSSATSASTVSSDSPLKMETSGMTTPSLKTDGGRRTATSPPPTTSQTIISTIPSTAMHTRSTAAPIPILPERGVSLFPYGADAGDLEFVRRTVDFTSPLFKPATGFPLGSSLRDSLYFTDNGQIIFPESDYQIFSYPNPLPTGFTGRDPVALVAPFWDDADFSTGRGTTFYQEYETFYGEHSLLVQQAESWIRKMTNNGGYKARWALKVTWVNAHAYPAQWTLGSNTYQAILSTDGSRSYALFLYQSGGMQWDVAQRSVEMAISKTAH

SEQ ID NO: 53236 - protein, 4403 aa, Homo sapiens
  Payload ID: 10597
  Gene Symbol: MUC4
  Gene Name: mucin 4, cell surface associated
  ENSP ID: ENSP00000485874
  MOD_RES (1)..(1): Any amino acid
XTTEDTLITGSKTAAPVTSTGSTTATLEGQSTAASSRTSNQDISASSQNHQTKSTETTSKAQTDTLTQMMTSTLFSSPSVHNVMETAPPDEMTTSFPSSVTNTLMMTSKTITMTTSTDSTLGNTEETSTAGTESSTPVTSAVSITAGQEGQSRTTSWRTSIQDTSASSQNHWTRSTQTTRESQTSTLTHRTTSTPSFSPSVHNVTGTVSQKTSPSGETATSSLCSVTNTSMMTSEKITVTTSTGSTLGNPGETSSVPVTGSLMPVTSAALVTFDPEGQSPATFSRTSTQDTTAFSKNHQTQSVETTRVSQINTLNTLTPVTTSTVLSSPSGFNPSGTVSQETFPSGETTTSSPSSVSNTFLVTSKVFRMPTSRDSTLGNTEETSLSVSGTISAITSKVSTIWWSDTLSTALSPSSLPPKISTAFHTQQSEGAETTGRPHERSSFSPGVSQEIFTLHETTTWPSSFSSKGHTTWSQTELPSTSTGAATRLVTGNPSTGTAGTIPRVPSKVSAIGEPGEPTTYSSHSTTLPKTTGAGAQTQWTQETGTTGEALLSSPSYSVTQMIKTATSPSSSPMLDRHTSQQITTAPSTNHSTIHSTSTSPQESPAVSQRGHTQAPQTTQESQTTRSVSPMTDTKTVTTPGSSFTASGHSPSEIVPQDAPTISAATTFAPAPTGDGHTTQAPTTALQAAPSSHDATLGPSGGTSLSKTGALTLANSVVSTPGGPEGQWTSASASTSPDTAAAMTHTHQAESTEASGQTQTSEPASSGSRTTSAGTATPSSSGASGTTPSGSEGISTSGETTRFSSNPSRDSHTTQSTTELLSASASHGAIPVSTGMASSIVPGTFHPTLSEASTAGRPTGQSSPTSPSASPQETAAISRMAQTQRTRTSRGSDTISLASQATDTFSTVPPTPPSITSTGLTSPQTETHTLSPSGSGKTFTTALISNATPLPVTYASSASTGHTTPLHVTDASSVSTGHATPLPVTSPSSVSTGHTTPLPVTDTSSESTGHVTPLPVTSFSSASTGDSTPLPVTDTSSASTGHVTPLPVTSLSSASTGDTTPLPVTDTSSASTGHATSLPVTDTSSVSTGHTTPLPVTDTSSASTGHATSLPVTDTSSVSTGHTTPLHVTDASSASTGQATPLPVTSLSSVSTGDTTPLPVTSPSSASTGHATPLLVTDTSSASTGHATPLPVTDASSVSTDHATSLPVTIPSAASTGHTTPLPVTDTSSASTGQATSLLVTDTSSVSTGDTTPLPVTSTSSASTGHVTPLHVTSPSSASTGHATPLPVTSLSSASTGDTMPLPVTSPSSASTGDTTPLPVTDASSVSTGHTTPLHVTDASSASTGQATPLPVTSLSSVSTGDTTPLPVTSPSSASTGHATPLLVTDTSSASTGHATPLPVTDASSVSTDHATSLPVTIPSAASTGHTTPLPVTDTSSASTGQATSLLVTDTSSVSTGDTTPLPVTSTSSASTGHVTPLHVTSPSSASTGHATPLPVTSLSSASTGDTMPLPVTSPSSASTGDTTPLPVTDASSVSTGHTTPLPVTSPSSASTGHTTPLPVTDTSSASKGDTTPLPVTSPSSASTGHTTPLPVTDTSSASTGDTTPLPVTNASSLSTGHATPLHVTSPSSASTGHATPLPVTSTSSASTGHATPLPVTGLSSATTDDTTRLPVTDVSSASTGQATPLPVTSLSSVSTGDTTPLPVTSPSSASTGHASPLLVTDASSASTGQATPLPVTDTSSVSTAHATPLPVTGLSSASTDDTTRLPVTDVSSASTGQAIPLPVTSPSSASTGDTTPLPVTDASSASTGDTTSLPVTIPSSASSGHTTSLPVTDASSVSTGHATSLLVTDASSVSTGDTTPLPVTDTNSASTGDTTPLHVTDASSVSTGHATSLPVTSLSSASTGDTTPLPVTSPSSASSGHTTPLPVTDASSVPTGHATSLPVTDASSVSTGHATPLPVTDASSVSTGHATPLPVTDTSSVSTGQATPLPVTSLSSASTGDTTPLPVTDTSSASTGQDTPLPVTSLSSVSTGDTTPLPVTNPSSASTGHATPLLVTDASSISTGHATSLLVTDASSVSTGHATALHDTDASSLSTGDTTPLPVTSPSSTSTGDTTPLPVTETSSVSTGHATSLPVTDTSSASTGHATSLPVTDTSSASTGHATPLPVTDTSSASTGQATPLPVTSPSSASTGHAIPLLVTDTSSASTGQATPLPVTSLSSASTGDTTPLPVTDASSVSTGHATSLPVTSLSSVSTGDTTPLPVTSPSSASTGHATPLHVTDASSASTGHATPLPVTSLSSASTGDTTPLPVTSPSSASTGHATPLHVTDASSVSTGDTTPLPVTSSSSASSGHTTPLPVTDASSASTGDTTPLPVTDTSSASTGHATHLPVTGLSSASTGDTTRLPVTNVSSASTGHATPLPVTSTSSASTGDTTPLPGTDTSSVSTGHTTPLLVTDASSVSTGDTTRLPVTSPSSASTGHTTPLPVTDTPSASTGDTTPLPVTNASSLSTRHATSLHVTSPSSASTGHATSLPVTDTSAASTGHATPLPVTSTSSASTGDTTPLPVTDTYSASTGQATPLPVTSLSSVSTGDTTPLPVTSPSSASTGHATPLLVTDASSASTGQATPLPVTSLSSVSTGDTTPLPVTSPSSASTGHATSLPVTDTSSASTGDTTSLPVTDTSSAYTGDTTSLPVTDTSSSSTGDTTPLLVTETSSVSTGDTTPLPVTDTSSASTGHATPLPVTNTSSVSTGHATPLHVTSPSSASTGHTTPLPVTDASSVSTGHATSLPVTDASSVFTGHATSLPVTIPSSASSGHTTPLPVTDASSVSTGHATSLPVTDASSVSTGHATPLPVTDASSVSTGHATPLPLTSLSSVSTGDTTPLPVTDTSSASTGQATPLPVTSLSSVSTGDTTPLPVTDTSSASTGHATSLPVTDTSSASTGHATPLPDTDTSSASTGHATLLPVTDTSSASIGHATSLPVTDTSSISTGHATPLHVTSPSSASTGHATPLPVTDTSSASTGHANPLHVTSPSSASTGHATPLPVTDTSSASTGHATPLPVTSLSSVSTGDTTPLPVTSPSSASTGHTTPLPVTDTSSASTGQATALPVTSTSSASTGDTTPLPVTDTSSASTGQATPLPVTSLSSVSTGDTTPLPVTSPSSASTGHATPLLVTDASSASTGQATPLPVTSLSSVSTGDTTPLPVTSPSSASTGHATSLPVTDTSSASTGDTTSLPVTDTSSAYTGDTTSLPVTDTSSSSTGDTTPLLVTETSSVSTGHATPLLVTDASSASTGHATPLHVTSPSSASTGDTTPVPVTDTSSVSTGHATPLPVTGLSSASTGDTTRLPVTDISSASTGQATPLPVTNTSSVSTGDTMPLPVTSPSSASTGHATPLPVTSTSSASTGHATPVPVTSTSSASTGHTTPLPVTDTSSASTGDTTPLPVTSPSSASTGHTTPLHVTIPSSASTGDTSTLPVTGASSASTGHATPLPVTDTSSVSTGHATPLPVTSLSSVSTGDTTPLPVTDASSASTGQATPLPVTSLSSVSTGDTTPLLVTDASSVSTGHATPLPVTDTSSASTGDTTRLPVTDTSSASTGQATPLPVTSLSSVSTGDTTPLLVTDASSVSTGHATPLPVTDTSSASTGDTTRLPVTDTSSASTGQATPLPVTIPSSSSSGHTTPLPVTSTSSVSTGHVTPLHVTSPSSASTGHVTPLPVTSTSSASTGHATPLLVTDASSVSTGHATPLPVTDASSASTGDTTPLPVTDTSSASTGQATPLPVTSLSSVSTGDTTPLPVTDASSASTGHATPLPVTIPSSVSTGDTMPLPVTSPSSASTGHATPLPVTGLSSASTGDTTPLPVTDTSSASTRHATPLPVTDTSSASTDDTTRLPVTDVSSASTGHATPLPVTSTSSASTGDTTPLPVTDTSSVSTGHATSLPVTSRSSASTGHATPLPVTDTSSVSTGHATPLPVTSTSSVSTGHATPLPVTSPSSASTGHATPVPVTSTSSASTGDTTPLPVTNASSLSTGHATPLHVTSPSSASRGDTSTLPVTDASSASTGHATPLPLTSLSSVSTGDTTPLPVTDTSSASTGQATPLPVTSLSSVSTGDTTPLPVTIPSSASSGHTTSLPVTDASSVSTGHGTPLPVTSTSSASTGDTTPLPVTDTSSASTGHATPLPVTDTSSASTGHATPLPVTSLSSVSTGHATPLAVSSATSASTVSSDSPLKMETPGMTTPSLKTDGGRRTATSPPPTTSQTIISTIPSTAMHTRSTAAPIPILPERGEAIQEFPSSPMGQAPGTWSSSGGPWTSPPHSSSRRLASPLAPLSVIPSTSQTMARSSSQSQTTRFSPTPTHSQQASQAGTLWPWWLRSGTMLTSPLVGGPHFIRNTRRSMVNTAC

SEQ ID NO: 53237 - protein, 1149 aa, Homo sapiens
  Payload ID: 10597
  Gene Symbol: MUC4
  Gene Name: mucin 4, cell surface associated
  ENSP ID: ENSP00000485898
  MOD_RES (1)..(1): Any amino acid
XMTTPSLKTDGGRRTATSPPPTTSQTIISTIPSTAMHTRSTAAPIPILPERGVSLFPYGADAGDLEFVRRTVDFTSPLFKPATGFPLGSSLRDSLYFTDNGQIIFPESDYQIFSYPNPLPTGFTGRDPVALVAPFWDDADFSTGRGTTFYQEYETFYGEHSLLVQQAESWIRKITNNGGYKARWALKVTWVNAHAYPAQWTLGSNTYQAILSTDGSRSYALFLYQSGGMQWDVAQRSGKPVLMGFSSGDGYFENSPLMSQPVWERYRPDRFLNSNSGLQGLQFYRLHREERPNYRLECLQWLKSQPRWPSWGWNQVSCPCSWQQGRRDLRFQPVSIGRWGLGSRQLCSFTSWRGGVCCSYGPWGEFREGWHVQRPWQLAQELEPQSWCCRWNDKPYLCALYQQRRPHVGCATYRPPQPAWMFGDPHITTLDGVSYTFNGLGDFLLVGAQDGNSSFLLQGRTAQTGSAQATNFIAFAAQYRSSSLGPVTVQWLLEPHDAIRVLLDNQTVTFQPDHEDGGGQETFNATGVLLSRNGSEVSASFDGWATVSVIALSNILHSSASLPPEYQNRTEGLLGVWNNNPEDDFRMPNGSTIPPGSPEEMLFHFGMTWQINGTGLLGKRNDQLPSNFTPVFYSQLQKNSSWAEHLISNCDGDSSCIYDTLALRNASIGLHTREVSKNYEQANATLNQYPPSINGGRVIEAYKGQTTLIQYTSNAEDANFTLRDSCTDLELFENGTLLWTPKSLEPFTLEILARSAKIGLASALQPRTVVCHCNAESQCLYNQTSRVGNSSLEVAGCKCDGGTFGRYCEGSEDACEEPCFPSVHCVPGKGCEACPPNLTGDGRHCAALGSSFLCQNQSCPVNYCYNQGHCYISQTLGCQPMCTCPPAFTDSRCFLAGNNFSPTVNLELPLRVIQLLLSEEENASMAEVNASVAYRLGTLDMRAFLRNSQVERIDSAAPASGSPIQHWMVISEFQYRPRGPVIDFLNNQLLAAVVEAFLYHVPRRSEEPRNDVVFQPISGEDVRDVTALNVSTLKAYFRCDGYKGYDLVYSPQSGFTCVSPCSRGYCDHGGQCQHLPSGPRCSCVSFSIYTAWGEHCEHLSMKLDAFFGIFFGALGGLLLLGVGTFVVLRFWGCSGARFSYFLNSAEALP

SEQ ID NO: 53238 - protein, 7076 aa, Homo sapiens
  Payload ID: 10597
  Gene Symbol: MUC4
  Gene Name: mucin 4, cell surface associated
  ENSP ID: ENSP00000485944
MKGARWRRVPWVSLSCLCLCLLPHVVPGTTEDTLITGSKTPAPVTSTGSTTATLEGQSTAASSRTSNQDISASSQNHQTKSTETTSKAQTDTLTQMMTSTLFSSPSVHNVMETVTQETAPPDEMTTSFPSSVTNTLMMTSKTITMTTSTDSTLGNTEETSTAGTESSTPVTSAVSITAGQEGQSRTTSWRTSIQDTSASSQNHWTRSTQTTRESQTSTLTHRTTSTPSFSPSVHNVTGTVSQKTSPSGETATSSLCSVTNTSMMTSEKITVTTSTGSTLGNPGETSSVPVTGSLMPVTSAALVTVDPEGQSPVTFSRTSTQDTTAFSKNHQTQSVETTRVSQINTLNTLTPVTTSTVLSSPSGFNPSGTVSQETFPSGETTISSPSSVSNTFLVTSKVFRMPISRDSTLGNTEETSLSVSGTISAITSKVSTIWWSDTLSTALSPSSLPPKISTAFHTQQSEGAETTGRPHERSSFSPGVSQEIFTLHETTTWPSSFSSKGHTTWSQTELPSTSTGAATRLVTGNPSTGAAGTIPRVPSKVSAIGEPGEPTTYSSHSTTLPKTTGAGAQTQWTQETGTTGEALLSSPSYSVTQMIKTATSPSSSPMLDRHTSQQITTAPSTNHSTIHSTSTSPQESPAVSQRGHTQAPQTTQESQTTRSVSPMTDTKTVTTPGSSFTASGHSPSEIVPQDAPTISAATTFAPAPTGDGHTTQAPTTALQAAPSSHDATLGPSGGTSLSKTGALTLANSVVSTPGGPEGQWTSASASTSPDTAAAMTHTHQAESTEASGQTQTSEPASSGSRTTSAGTATPSSSGASGTTPSGSEGISTSGETTRFSSNPSRDSHTTQSTTELLSASASHGAIPVSTGMASSIVPGTFHPTLSEASTAGRPTGQSSPTSPSASPQETAAISRMAQTQRTRTSRGSDTISLASQATDTFSTVPPTPPSITSSGLTSPQTQTHTLSPSGSGKTFTTALISNATPLPVTYASSASTGHTTPLHVTDASSVSTGHATPLPVTDTSSESTGHATPLPVTSPSSVSTGHTTPLPVTDTSSESTGHVTPLPVTSLSSASTGDSTPLPVTDTSSASTGHVTPLPVTSLSSASTGDTTPLPVTDTSSASTGHATSLPVTDTSSVSTGHTTPLPVTDTSSASTGHATSLPVTDTSSVSTAHATPLPVTGLSSASTDDTTRLPVTDVSSASTGQAIPLPVTSPSSASTGDTTPLPVTDASSASTGDTTSLPVTIPSSASSGHTTSLPVTDASSVSTGHATSLLVTDASSVSTGDTTPLPVTDTNSASTGDTTPLHVTDASSVSTGHATSLPVTSLSSASTGDTTPLPVTSPSSASSGHTTPLPVTDASSVPTGHATSLPVTDASSVSTGHATPLPVTDASSVSTGHATPLPVTDTSSVSTGQATPLPVTSLSSASTGDTTPLPVTDTSSASTGQDTPLPVTSLSSVSTGDTTPLPVTSPSSASTGHATPLLVTDASSVSTGHATSLLVTDASSVSTGHATALHVTDASSLSTGDTTPLPVTSPSSASTGDTTPLPVTDTSSASTGHATSLPVTDTSSASTGHATPLPVTDTSSASTGQATPLPVTGPSSASTGHAIPLLVTDTSSASTGQATPLPVTSLSSASTGDTTPLPVTDASSVSTGHATSLPVTSLSSVSTGDTTPLPVTSPSSASSGHTTPLPVTDASSVSTGDTTPLPVTSPSSASSGHTTPLPVTSPSSASSGHTTPLPVTDASSASTGDTTPLPVTDTSSASTGHATHLPVTGLSSASTGDTTRLPVTNVSSASTGHATPLPVTSTSSASTGDTTPLPGTDTSSVSTGHTTPLLVTDASSVSTGDTTRLPVTSPSSASTGHTTPLPVTDTPSASTGDTTPLPVTNASSLSTRHTTSLHVTSPSSASTGHATSLPVTDTSSVSTGHATPLHVTSPSSASTGDTTPLPVTDTYSASTGQATPLPVTDTSSASTGDTTPLPVTDTSSASTGHATPLPVTNTSSVSTGHATPLHVTSPSSASTGHTTPLPVTDASSVSTGHATSLPVTDASSVFTGHATSLPVTIPSSASSGHTTPLPVTDASSVSTGHATSLPVTDASSVSTGHATPLPVTDASSVSTGHATPLPVTDTSSVSTGHATPLPLTSLSSVSTGDTTPLPVTDTSSASTGQATPLPVTSLSSVSTGDTTPLPVTDTSSASTGHATSLPVTDTSSASTGHATPLPDTDTSSASTGHATPLPVTDTSSASTGHATLLPVTDTSSASIGHATPLPVTDTSSISTGHATPLHVTSPSSASTGHATPLPVTDTSSASTGHANPLHVTSPSSASTGHATPLPVTDTSSASTGHATPLPVTSLSSVSTGDTTPLPVTSPSSASTGHTTPLPVTDTSSASTGQATALPVTSTSSASTGDTTPLPVTDTSSASTGQATPLPVTSLSSVSTGDTTPLPVTSPSSASTGHATPLLVTDASSASTGQATPLPVTDTSSAYTGDTTSLPVTDTSSSSTGDTTPLLVTETSSASTGHATPLHVTSPSSASTGDTTPVPVTDTSSVSTGHATPLPVTGLSSASTGDTTRLPVTDISSASTGQATPLPVTNTSSASTGHATPLPVTGLSSASTGDTTRLPVTDISSASTGQATPLPVTNTSSVSTGDTMPLPVTSPSSASTGHATPLPVTSTSSASTGHATPVPVTSTSSASTGHTTPLPVTDTSSASTGDTTPLPVTSPSSASTGHTTPLHVTIPSSASTGDTSTLPVTGASSASTGHATPLPVTDTSSVSTGHATPLPVTSFSSVSTGDTTPLPVTDTSSVSTGHATPLPVTSFSSVSTGDTTPLPVTDASSASTGHATPLPVTDTSSVSTGHATPLPLTSLSSVSTGDTTTLPVTDTSSVSTGHATPLPVTSFSSVSTGDTTPLPVTDASSASTGHATPLPVTDTSSVSTGHATPLPVTSLSSVSTGDTTPLPVTDASSASTGQATPLPVTSLSSVSTGDTTPLPVTIPSSASSGHTTSLPVTDTSSASTGQATPLPVTSLSSVSTGDTTPLLVTDASSVSTGHATPLPVTDTSSASTGDTTRLPVTDTSSASTGQATPLPVTSLSSVSTGDTTPLLVTNTSSVSRGHATSLPVTIPSSSSSGHTTPLPVTSTSSVSTGHVTPLPVTSTSSASTGHATSLPVTDTSSVSTGHATSLPVTDTSSVSTGHATPLPVTDASSVSTGHATPLPVTDASSASTGDTTPLPVTNTSSASTGQATPLPVTSLSSVSTGDTMPLPVTSPSSASTGHATPLPVTGLSSASTGDTTPLPVTDTSSASTGHVTPLPVTSLSSASTGDSTPLPVTDTSSASTGHVTPLPVTSLSSASTGDTTPLPVTDTSSASTGHATPLHVTDASSASTGQATLLPVTSLSSVSTGDTTPLPVTSPSSASTGHATPLLVTDTSSASTGHATPLPVTDASSVSTGHATSLPVTIRSSGSTGHTTPLPVTDTSSASTGQATSLLVTDTSSVSTGDTTPLPVTSTSSASTGHVTPLHVTSPSSASTGHATPLPVTSLSSASTGDTMPLPVTSPSSASTGDTTPLPVTDASSVSTGHTTPLPVTSPSSASTGHTTPLPVTDTTSASKGDTTPLPVTSPSSASTGHTTPLPVTDTSSASTGDTTPLPVTSPSSASTGHATPLPVTNASSLSTGHATPLHVTSPSSASTGHATPLPVTSTSSASTGHATSLPVTSTSSASTGHATPLPVTDNSSVSTGHATPLPVTGLSSATTDDTTRLPVTDVSSASTGQATPLPVTSLSSVSTGDTTPLPVTSPSSASTGHASPLLVTDASSASTGQATPLPVTDTSSVSTAHATPLPVTGLSSASTDDTTRLPVTDVSSASTGQAIPLPVTSPSSASTGDTTPLPVTDASSASTGDTTSLPVTIPSSASSGHTTSLPVTDASSVSTGHATSLLVTDASSVSTGDTTPLPVTDTNSASTGDTTPLHVTDASSVSTGHATSLPVTSLSSASTGDTTPLPVTSPSSASSGDTTPLPVTDTSSASTGHATHLPVTGLSSASTGDTTRLPVTNVSSASTGHATPLPVTSTSSASTGDTTPLPGTDTSSVSTGHTTPLLVTDASSVSTGDTTRLPVTSPSSASTGHTTPLHVTDASSVSTGHTTPLPVTDTSSASTGQATSLLVTDTSSVSTGDTTPLPVTSTSSASTGHVTPLHVTSPSSASTGHATPLPVTSLSSASTGDTTPLPVTDTSSVSTGHTTPLPVTSPSSASTGHTTPLPVTDTSSASKGDTTPLPVTSPSSASTGHTTPLPVTDTSSASTGDTTPLPVTNASSLSTGHATPLHVTSPSSASTGHATPLPVTSTSSASTGHATPLPVTSTSSASTGHATPLPVTDNSSVSTGHATPLPVTGLSSATTDDTTRLPVTDVSSASTGQATPLPVTSLSSVSTGDTTPLPVTSPSSASTGHASPLLVTDASSASTGQATPLPVTDTSSVSTAHATPLPVTGLSSASTDDTTRLPVTDVSSASTGQAIPLPVTSPSSASTGDTTPLPVTDASSASTGDTTSLPVTIPSSASSGHTTSLPVTDASSVSTGHATSLLVTDASSVSTGDTTPLPVTDTNSASTGDTTPLHVTDASSVSTGHATSLPVTSLSSASTGDTTPLPVTSPSSASSGHTTSLPVTDASSVSTGHATSLPVTIPSSASSGHTTPLPVTDASSVPTGHATSLPVTDASSVSTGHATPLPVTDASSVSTGHATPLPVTDTSSVSTGQATPLPVTSLSSASSTGDTTPLPVTDTSSASTGQDTPLPVTSLFSVSTGDTTPLPVTSPSSASTGHATHLLVTDASSVSTGHATSLLVTDASSVSTGHATALHVTDASSLSTGDTTPLPVTSPSSASTGDTTPLPVTDTSSVSTGHATSLPVTDTSSASTGHATSLPVTDTSSASTGQATPLPVTSPSSASTGHAIPLLVTDTSSASTGQATPLPVTSLSSASTGDTTPLPVTDASSVSTGHATSLPVTSLSSVSTGDTTPLPVTSPSSASTGHATPLHVTSPSSASTGHATPLPVTSLSSASTGDTTPLPVTSPSSASTGHATPLHVTDASSVSTGDTTPLPVTSPSSASSGHTTPLPVTDASSASTGDTTPLPVTDTSSASTGHATHLPVTGLSSASTGDTTRLPVTDVSSASTGHATPLPVTSTSSASTGDTTPLPGTDTSSVSTGHTTPLLVTDASSVSTGDTTRLPVTSPSSASTGHTTPLPVTDTPSASTGDTTPLPVTNASSLSTRHATSLHVTSPSSASTGHATPLPVTDTSAASTGHATPLPVTSTSSASTGDTTPLPVTDTSSASTGHATPLPVTNTSSVSTGHATPLHVTSPSSASTGHTTPLPVTDASSVSTGHATSLPVTDASSVSTGHATPLPVTDASSVSTGHATPLPLTSLSSVSTGDTTPLPVTDTSSASTGQATPLPVTSLSSVSTGDTTPLPVTDTSSASTGHATSLPVTDTSSASTGHATPLPVTDTSSISTGHATPLHVTSPSSASTGHATPLPVTDTSSASTGHATPLPVTSLSSVSTGDTTPLPVTSPSSASTGHATPLLVTDASSASTGQATPLPVTSLSSVSTGDTTPLPVTSPSSASTGHATSLPVTDTSSASTGDTTSLPVTDTSSAYTGDTTSLPVTDTSSSSTGDTTPLLVTETSSASTGDTTPVPVTDTSSVSTGHATPLPVTGLSSASTGDTTRLPVTDISSASTGQATPLPVTNTSSVSTGDTMPLPVTSPSSASTGHATPLPVTSTSSASTGHATPVPVTSTSLASTGHTTPLPVTSPSSASTGHTTPLPVTDTSSASTGDTTPLPVTNASSLSTGHTTPLHVTIPSSASTGDTSTLPVTGASSASTGHATPLPVTDTSSVSTGHATPLPVTSFSSVSTGDTTPLPVTDASSASTGHATPLPVTDTSSASTGDTTPLPVTDASSASTGQATPLPVTSLSSVSTGDTTPLPVTIPSSASSGHTTSLPVSDTSSASTGQATPLPVTSLSSVSTGDTTPLLVTDASSVSTGHATPLPVTDTSSASTGDTTRLPVTDTSSASTGQATPLPVTSLSSVSTGDTTPLLVTNTSSVSTGHATSLPVTIPSSSSSGHTTPLPVTSTSSVSTGHVTPLHVTSPSSSSTGQATPLPVTSTSSVSTGHVTPLHVTSPSSASTGHATPLPVTSTSSASTGHATPLPVTDASSVSTGHATPLPVTDTSSASTGDTTPLPVTDTSSASTGQATPLPVTSLSSVSTGHATPLAVSSATSASTVSSDSPLKMETSGMTTPSLKTDGGRRTATSPPPTTSQTIISTIPSTAMHTRSTAAPIPILPERGVSLFPYGADAGDLEFVRRTVDFTSPLFKPATGFPLGSSLRDSLYFTDNGQIIFPESDYQIFSYPNPLPTGFTGRDPVALVAPFWDDADFSTGRGTTFYQEYETFYGEHSLLVQQAESWIRKMTNNGGYKARWALKVTWVNAHAYPAQWTLGSNTYQAILSTDGSRSYALFLYQSGGMQWDVAQRSGNPVLMGFSSGDGYFENSPLMSQPVWERYRPDRFLNSNSGLQGLQFYRLHREERPNYRLECLQWLKSQPRWPSWGWNQVSCPCSWQQGRRDLRFQPVSIGRWGLGSRQLCSFTSWRGGVCCSYGPWGEFREGWHVQRPWQLAQELEPQSWCCRWNDKPYLCALYQQRRPHVGCATYRPPQPAWMFGDPHITTLDGVSYTFNGLGDFLLVGAQDGNSSFLLQGRTAQTGSAQATNFIAFAAQYRSSSLGPVTVQWLLEPHDAIRVLLDNQTVTFQPDHEDGGGQETFNATGVLLSRNGSEVSASFDGWATVSVIALSNILHASASLPPEYQNRTEGLLGVWNNNPEDDFRMPNGSTIPPGSPEEMLFHFGMTWQINGTGLLGKRNDQLPSNFTPVFYSQLQKNSSWAEHLISNCDGDSSCIYDTLALRNASIGLHTREVSKNYEQANATLNQYPPSINGGRVIEAYKGQTTLIQYTSNAEDANFTLRDSCTDLELFENGTLLWTPKSLEPFTLEILARSAKIGLASALQPRTVVCHCNAESQCLYNQTSRVGNSSLELWGALSCVRTSPAL

SEQ ID NO: 53239 - protein, 4403 aa, Homo sapiens; identical to SEQ ID NO: 53236
  Payload ID: 10597
  Gene Symbol: MUC4
  Gene Name: mucin 4, cell surface associated
  ENSP ID: ENSP00000485964
  MOD_RES (1)..(1): Any amino acid

SEQ ID NO: 53240 - protein, 174 aa, Homo sapiens; identical to SEQ ID NO: 53194
  Payload ID: 10597
  Gene Symbol: MUC4
  Gene Name: mucin 4, cell surface associated
  ENSP ID: ENSP00000486002
  MOD_RES (1)..(1): Any amino acid

SEQ ID NO: 53241 - protein, 4431 aa, Homo sapiens
  Payload ID: 10597
  Gene Symbol: MUC4
  Gene Name: mucin 4, cell surface associated
  ENSP ID: ENSP00000486023
  MOD_RES (1)..(1): Any amino acid
XTTEDTLITGSKTAAPVTSTGSTTATLEGQSTAASSRTSNQDISASSQNHQTKSTETTSKAQTDTLTQMMTSTLFSSPSVHNVMETAPPDEMTTSFPSSVTNTLMMTSKTITMTTSTDSTLGNTEETSTAGTESSTPVTSAVSITAGQEGQSRTTSWRTSIQDTSASSQNHWTRSTQTTRESQTSTLTHRTTSTPSFSPSVHNVTGTVSQKTSPSGETATSSLCSVTNTSMMTSEKITVTTSTGSTLGNPGETSSVPVTGSLMPVTSAALVTFDPEGQSPATFSRTSTQDTTAFSKNHQTQSVETTRVSQINTLNTLTPVTTSTVLSSPSGFNPSGTVSQETFPSGETTTSSPSSVSNTFLVTSKVFRMPTSRDSTLGNTEETSLSVSGTISAITSKVSTIWWSDTLSTALSPSSLPPKISTAFHTQQSEGAETTGRPHERSSFSPGVSQEIFTLHETTTWPSSFSSKGHTTWSQTELPSTSTGAATRLVTGNPSTGTAGTIPRVPSKVSAIGEPGEPTTYSSHSTTLPKTTGAGAQTQWTQETGTTGEALLSSPSYSVTQMIKTATSPSSSPMLDRHTSQQITTAPSTNHSTIHSTSTSPQESPAVSQRGHTQAPQTTQESQTTRSVSPMTDTKTVTTPGSSFTASGHSPSEIVPQDAPTISAATTFAPAPTGDGHTTQAPTTALQAAPSSHDATLGPSGGTSLSKTGALTLANSVVSTPGGPEGQWTSASASTSPDTAAAMTHTHQAESTEASGQTQTSEPASSGSRTTSAGTATPSSSGASGTTPSGSEGISTSGETTRFSSNPSRDSHTTQSTTELLSASASHGAIPVSTGMASSIVPGTFHPTLSEASTAGRPTGQSSPTSPSASPQETAAISRMAQTQRTRTSRGSDTISLASQATDTFSTVPPTPPSITSTGLTSPQTETHTLSPSGSGKTFTTALISNATPLPVTYASSASTGHTTPLHVTDASSVSTGHATPLPVTSPSSVSTGHTTPLPVTDTSSESTGHVTPLPVTSFSSASTGDSTPLPVTDTSSASTGHVTPLPVTSLSSASTGDTTPLPVTDTSSASTGHATSLPVTDTSSVSTGHTTPLPVTDTSSASTGHATSLPVTDTSSVSTGHTTPLHVTDASSASTGQATPLPVTSLSSVSTGDTTPLPVTSPSSASTGHATPLLVTDTSSASTGHATPLPVTDASSVSTDHATSLPVTIPSAASTGHTTPLPVTDTSSASTGQATSLLVTDTSSVSTGDTTPLPVTSTSSASTGHVTPLHVTSPSSASTGHATPLPVTSLSSASTGDTMPLPVTSPSSASTGDTTPLPVTDASSVSTGHTTPLHVTDASSASTGQATPLPVTSLSSVSTGDTTPLPVTSPSSASTGHATPLLVTDTSSASTGHATPLPVTDASSVSTDHATSLPVTIPSAASTGHTTPLPVTDTSSASTGQATSLLVTDTSSVSTGDTTPLPVTSTSSASTGHVTPLHVTSPSSASTGHATPLPVTSLSSASTGDTMPLPVTSPSSASTGDTTPLPVTDASSVSTGHTTPLPVTSPSSASTGHTTPLPVTDTSSASKGDTTPLPVTSPSSASTGHTTPLPVTDTSSASTGDTTPLPVTNASSLSTGHATPLHVTSPSSASTGHATPLPVTSTSSASTGHATPLPVTGLSSATTDDTTRLPVTDVSSASTGQATPLPVTSLSSVSTGDTTPLPVTSPSSASTGHASPLLVTDASSASTGQATPLPVTDTSSVSTAHATPLPVTGLSSASTDDTTRLPVTDVSSASTGQAIPLPVTSPSSASTGDTTPLPVTDASSASTGDTTSLPVTIPSSASSGHTTSLPVTDASSVSTGHATSLLVTDASSVSTGDTTPLPVTDTNSASTGDTTPLHVTDASSVSTGHATSLPVTSLSSASTGDTTPLPVTSPSSASSGHTTPLPVTDASSVPTGHATSLPVTDASSVSTGHATPLPVTDASSVSTGHATPLPVTDTSSVSTGQATPLPVTSLSSASTGDTTPLPVTDTSSASTGQDTPLPVTSLSSVSTGDTTPLPVTNPSSASTGHATPLLVTDASSISTGHATSLLVTDASSVSTGHATALHDTDASSLSTGDTTPLPVTSPSSTSTGDTTPLPVTETSSVSTGHATSLPVTDTSSASTGHATSLPVTDTSSASTGHATPLPVTDTSSASTGQATPLPVTSPSSASTGHAIPLLVTDTSSASTGQATPLPVTSLSSASTGDTTPLPVTDASSVSTGHATSLPVTSLSSVSTGDTTPLPVTSPSSASTGHATPLHVTDASSASTGHATPLPVTSLSSASTGDTTPLPVTSPSSASTGHATPLHVTDASSVSTGDTTPLPVTSSSSASSGHTTPLPVTDASSASTGDTTPLPVTDTSSASTGHATHLPVTGLSSASTGDTTRLPVTNVSSASTGHATPLPVTSTSSASTGDTTPLPGTDTSSVSTGHTTPLLVTDASSVSTGDTTRLPVTSPSSASTGHTTPLPVTDTPSASTGDTTPLPVTNASSLSTRHATSLHVTSPSSASTGHATSLPVTDTSAASTGHATPLPVTSTSSASTGDTTPLPVTDTYSASTGQATPLPVTSLSSVSTGDTTPLPVTSPSSASTGHATPLLVTDASSASTGQATPLPVTSLSSVSTGDTTPLPVTSPSSASTGHATSLPVTDTSSASTGDTTSLPVTDTSSAYTGDTTSLPVTDTSSSSTGDTTPLLVTETSSVSTGDTTPLPVTDTSSASTGHATPLPVTNTSSVSTGHATPLHVTSPSSASTGHTTPLPVTDASSVSTGHATSLPVTDASSVFTGHATSLPVTIPSSASSGHTTPLPVTDASSVSTGHATSLPVTDASSVSTGHATPLPVTDASSVSTGHATPLPLTSLSSVSTGDTTPLPVTDTSSASTGQATPLPVTSLSSVSTGDTTPLPVTDTSSASTGHATSLPVTDTSSASTGHATPLPDTDTSSASTGHATLLPVTDTSSASIGHATSLPVTDTSSISTGHATPLHVTSPSSASTGHATPLPVTDTSSASTGHANPLHVTSPSSASTGHATPLPVTDTSSASTGHATPLPVTSLSSVSTGDTTPLPVTSPSSASTGHTTPLPVTDTSSASTGQATALPVTSTSSASTGDTTPLPVTDTSSASTGQATPLPVTSLSSVSTGDTTPLPVTSPSSASTGHATPLLVTDASSASTGQATPLPVTSLSSVSTGDTTPLPVTSPSSASTGHATSLPVTDTSSASTGDTTSLPVTDTSSAYTGDTTSLPVTDTSSSSTGDTTPLLVTETSSVSTGHATPLLVTDASSASTGHATPLHVTSPSSASTGDTTPVPVTDTSSVSTGHATPLPVTGLSSASTGDTTRLPVTDISSASTGQATPLPVTNTSSVSTGDTMPLPVTSPSSASTGHATPLPVTSTSSASTGHATPVPVTSTSSASTGHTTPLPVTDTSSASTGDTTPLPVTSPSSASTGHTTPLHVTIPSSASTGDTSTLPVTGASSASTGHATPLPVTDTSSVSTGHATPLPVTSLSSVSTGDTTPLPVTDASSASTGQATPLPVTSLSSVSTGDTTPLLVTDASSVSTGHATPLPVTDTSSASTGDTTRLPVTDTSSASTGQATPLPVTSLSSVSTGDTTPLLVTDASSVSTGHATPLPVTDTSSASTGDTTRLPVTDTSSASTGQATPLPVTIPSSSSSGHTTPLPVTSTSSVSTGHVTPLHVTSPSSASTGHVTPLPVTSTSSASTGHATPLLVTDASSVSTGHATPLPVTDASSASTGDTTPLPVTDTSSASTGQATPLPVTSLSSVSTGDTTPLPVTDASSASTGHATPLPVTIPSSVSTGDTMPLPVTSPSSASTGHATPLPVTGLSSASTGDTTPLPVTDTSSASTRHATPLPVTDTSSASTDDTTRLPVTDVSSASTGHATPLPVTSTSSASTGDTTPLPVTDTSSVSTGHATSLPVTSRSSASTGHATPLPVTDTSSVSTGHATPLPVTSTSSVSTGHATPLPVTSPSSASTGHATPVPVTSTSSASTGDTTPLPVTNASSLSTGHATPLHVTSPSSASRGDTSTLPVTDASSASTGHATPLPLTSLSSVSTGDTTPLPVTDTSSASTGQATPLPVTSLSSVSTGDTTPLPVTIPSSASSGHTTSLPVTDASSVSTGHGTPLPVTSTSSASTGDTTPLPVTDTSSASTGHATPLPVTDTSSASTGHATPLPVTSLSSVSTGHATPLAVSSATSASTVSSDSPLKMETPGMTTPSLKTDGGRRTATSPPPTTSQTIISTIPSTAMHTRSTAAPIPILPERGVSLFPYGAGAGDLEFVRRTVDFTSPLFKPATGFPLGSSLRDSLYFTDNGQIIFPESDYQIFSYPNPLPTGFTGRDPVALVAPFWDDADFSTGRGTTFYQSNTYQAILSTDGSRSYALFLYQSGGMQWDVAQRSVEMAISKTAH

SEQ ID NO: 53242 - protein, 5385 aa, Homo sapiens; identical to SEQ ID NO: 53214
  Payload ID: 10597
  Gene Symbol: MUC4
  Gene Name: mucin 4, cell surface associated
  ENSP ID: ENSP00000486046
  MOD_RES (1)..(1): Any amino acid

SEQ ID NO: 53243 - protein, 4415 aa, Homo sapiens
  Payload ID: 10597
  Gene Symbol: MUC4
  Gene Name: mucin 4, cell surface associated
  ENSP ID: ENSP00000486075
  MOD_RES (1)..(1): Any amino acid
XTTEDTLITGSKTAAPVTSTGSTTATLEGQSTAASSRTSNQDISASSQNHQTKSTETTSKAQTDTLTQMMTSTLFSSPSVHNVMETAPPDEMTTSFPSSVTNTLMMTSKTITMTTSTDSTLGNTEETSTAGTESSTPVTSAVSITAGQEGQSRTTSWRTSIQDTSASSQNHWTRSTQTTRESQTSTLTHRTTSTPSFSPSVHNVTGTVSQKTSPSGETATSSLCSVTNTSMMTSEKITVTTSTGSTLGNPGETSSVPVTGSLMPVTSAALVTFDPEGQSPATFSRTSTQDTTAFSKNHQTQSVETTRVSQINTLNTLTPVTTSTVLSSPSGFNPSGTVSQETFPSGETTTSSPSSVSNTFLVTSKVFRMPTSRDSTLGNTEETSLSVSGTISAITSKVSTIWWSDTLSTALSPSSLPPKISTAFHTQQSEGAETTGRPHERSSFSPGVSQEIFTLHETTTWPSSFSSKGHTTWSQTELPSTSTGAATRLVTGNPSTGTAGTIPRVPSKVSAIGEPGEPTTYSSHSTTLPKTTGAGAQTQWTQETGTTGEALLSSPSYSVTQMIKTATSPSSSPMLDRHTSQQITTAPSTNHSTIHSTSTSPQESPAVSQRGHTQAPQTTQESQTTRSVSPMTDTKTVTTPGSSFTASGHSPSEIVPQDAPTISAATTFAPAPTGDGHTTQAPTTALQAAPSSHDATLGPSGGTSLSKTGALTLANSVVSTPGGPEGQWTSASASTSPDTAAAMTHTHQAESTEASGQTQTSEPASSGSRTTSAGTATPSSSGASGTTPSGSEGISTSGETTRFSSNPSRDSHTTQSTTELLSASASHGAIPVSTGMASSIVPGTFHPTLSEASTAGRPTGQSSPTSPSASPQETAAISRMAQTQRTRTSRGSDTISLASQATDTFSTVPPTPPSITSTGLTSPQTETHTLSPSGSGKTFTTALISNATPLPVTYASSASTGHTTPLHVTDASSVSTGHATPLPVTSPSSVSTGHTTPLPVTDTSSESTGHVTPLPVTSFSSASTGDSTPLPVTDTSSASTGHVTPLPVTSLSSASTGDTTPLPVTDTSSASTGHATSLPVTDTSSVSTGHTTPLPVTDTSSASTGHATSLPVTDTSSVSTGHTTPLHVTDASSASTGQATPLPVTSLSSVSTGDTTPLPVTSPSSASTGHATPLLVTDTSSASTGHATPLPVTDASSVSTDHATSLPVTIPSAASTGHTTPLPVTDTSSASTGQATSLLVTDTSSVSTGDTTPLPVTSTSSASTGHVTPLHVTSPSSASTGHATPLPVTSLSSASTGDTMPLPVTSPSSASTGDTTPLPVTDASSVSTGHTTPLHVTDASSASTGQATPLPVTSLSSVSTGDTTPLPVTSPSSASTGHATPLLVTDTSSASTGHATPLPVTDASSVSTDHATSLPVTIPSAASTGHTTPLPVTDTSSASTGQATSLLVTDTSSVSTGDTTPLPVTSTSSASTGHVTPLHVTSPSSASTGHATPLPVTSLSSASTGDTMPLPVTSPSSASTGDTTPLPVTDASSVSTGHTTPLPVTSPSSASTGHTTPLPVTDTSSASKGDTTPLPVTSPSSASTGHTTPLPVTDTSSASTGDTTPLPVTNASSLSTGHATPLHVTSPSSASTGHATPLPVTSTSSASTGHATPLPVTGLSSATTDDTTRLPVTDVSSASTGQATPLPVTSLSSVSTGDTTPLPVTSPSSASTGHASPLLVTDASSASTGQATPLPVTDTSSVSTAHATPLPVTGLSSASTDDTTRLPVTDVSSASTGQAIPLPVTSPSSASTGDTTPLPVTDASSASTGDTTSLPVTIPSSASSGHTTSLPVTDASSVSTGHATSLLVTDASSVSTGDTTPLPVTDTNSASTGDTTPLHVTDASSVSTGHATSLPVTSLSSASTGDTTPLPVTSPSSASSGHTTPLPVTDASSVPTGHATSLPVTDASSVSTGHATPLPVTDASSVSTGHATPLPVTDTSSVSTGQATPLPVTSLSSASTGDTTPLPVTDTSSASTGQDTPLPVTSLSSVSTGDTTPLPVTNPSSASTGHATPLLVTDASSISTGHATSLLVTDASSVSTGHATALHDTDASSLSTGDTTPLPVTSPSSTSTGDTTPLPVTETSSVSTGHATSLPVTDTSSASTGHATSLPVTDTSSASTGHATPLPVTDTSSASTGQATPLPVTSPSSASTGHAIPLLVTDTSSASTGQATPLPVTSLSSASTGDTTPLPVTDASSVSTGHATSLPVTSLSSVSTGDTTPLPVTSPSSASTGHATPLHVTDASSASTGHATPLPVTSLSSASTGDTTPLPVTSPSSASTGHATPLHVTDASSVSTGDTTPLPVTSSSSASSGHTTPLPVTDASSASTGDTTPLPVTDTSSASTGHATHLPVTGLSSASTGDTTRLPVTNVSSASTGHATPLPVTSTSSASTGDTTPLPGTDTSSVSTGHTTPLLVTDASSVSTGDTTRLPVTSPSSASTGHTTPLPVTDTPSASTGDTTPLPVTNASSLSTRHATSLHVTSPSSASTGHATSLPVTDTSAASTGHATPLPVTSTSSASTGDTTPLPVTDTYSASTGQATPLPVTSLSSVSTGDTTPLPVTSPSSASTGHATPLLVTDASSASTGQATPLPVTSLSSVSTGDTTPLPVTSPSSASTGHATSLPVTDTSSASTGDTTSLPVTDTSSAYTGDTTSLPVTDTSSSSTGDTTPLLVTETSSVSTGDTTPLPVTDTSSASTGHATPLPVTNTSSVSTGHATPLHVTSPSSASTGHTTPLPVTDASSVSTGHATSLPVTDASSVFTGHATSLPVTIPSSASSGHTTPLPVTDASSVSTGHATSLPVTDASSVSTGHATPLPVTDASSVSTGHATPLPLTSLSSVSTGDTTPLPVTDTSSASTGQATPLPVTSLSSVSTGDTTPLPVTDTSSASTGHATSLPVTDTSSASTGHATPLPDTDTSSASTGHATLLPVTDTSSASIGHATSLPVTDTSSISTGHATPLHVTSPSSASTGHATPLPVTDTSSASTGHANPLHVTSPSSASTGHATPLPVTDTSSASTGHATPLPVTSLSSVSTGDTTPLPVTSPSSASTGHTTPLPVTDTSSASTGQATALPVTSTSSASTGDTTPLPVTDTSSASTGQATPLPVTSLSSVSTGDTTPLPVTSPSSASTGHATPLLVTDASSASTGQATPLPVTSLSSVSTGDTTPLPVTSPSSASTGHATSLPVTDTSSASTGDTTSLPVTDTSSAYTGDTTSLPVTDTSSSSTGDTTPLLVTETSSVSTGHATPLLVTDASSASTGHATPLHVTSPSSASTGDTTPVPVTDTSSVSTGHATPLPVTGLSSASTGDTTRLPVTDISSASTGQATPLPVTNTSSVSTGDTMPLPVTSPSSASTGHATPLPVTSTSSASTGHATPVPVTSTSSASTGHTTPLPVTDTSSASTGDTTPLPVTSPSSASTGHTTPLHVTIPSSASTGDTSTLPVTGASSASTGHATPLPVTDTSSVSTGHATPLPVTSLSSVSTGDTTPLPVTDASSASTGQATPLPVTSLSSVSTGDTTPLLVTDASSVSTGHATPLPVTDTSSASTGDTTRLPVTDTSSASTGQATPLPVTSLSSVSTGDTTPLLVTDASSVSTGHATPLPVTDTSSASTGDTTRLPVTDTSSASTGQATPLPVTIPSSSSSGHTTPLPVTSTSSVSTGHVTPLHVTSPSSASTGHVTPLPVTSTSSASTGHATPLLVTDASSVSTGHATPLPVTDASSASTGDTTPLPVTDTSSASTGQATPLPVTSLSSVSTGDTTPLPVTDASSASTGHATPLPVTIPSSVSTGDTMPLPVTSPSSASTGHATPLPVTGLSSASTGDTTPLPVTDTSSASTRHATPLPVTDTSSASTDDTTRLPVTDVSSASTGHATPLPVTSTSSASTGDTTPLPVTDTSSVSTGHATSLPVTSRSSASTGHATPLPVTDTSSVSTGHATPLPVTSTSSVSTGHATPLPVTSPSSASTGHATPVPVTSTSSASTGDTTPLPVTNASSLSTGHATPLHVTSPSSASRGDTSTLPVTDASSASTGHATPLPLTSLSSVSTGDTTPLPVTDTSSASTGQATPLPVTSLSSVSTGDTTPLPVTIPSSASSGHTTSLPVTDASSVSTGHGTPLPVTSTSSASTGDTTPLPVTDTSSASTGHATPLPVTDTSSASTGHATPLPVTSLSSVSTGHATPLAVSSATSASTVSSDSPLKMETPGMTTPSLKTDGGRRTATSPPPTTSQTIISTIPSTAMHTRSTAAPIPILPERGVSLFPYGAGAGDLEFVRRTVDFTSPLFKPATGFPLGSSLRDSLYASQAGTLWPWWLRSGTMLTSPLVGGPHFIRATPTKPSSPRTGAGPMPCFSTRAVGCSGTWPSAQATRCSWASLVEMAISKTAH

SEQ ID NO: 53244 - protein, 4417 aa, Homo sapiens
  Payload ID: 10597
  Gene Symbol: MUC4
  Gene Name: mucin 4, cell surface associated
  ENSP ID: ENSP00000486101
  MOD_RES (1)..(1): Any amino acid
XTTEDTLITGSKTAAPVTSTGSTTATLEGQSTAASSRTSNQDISASSQNHQTKSTETTSKAQTDTLTQMMTSTLFSSPSVHNVMETAPPDEMTTSFPSSVTNTLMMTSKTITMTTSTDSTLGNTEETSTAGTESSTPVTSAVSITAGQEGQSRTTSWRTSIQDTSASSQNHWTRSTQTTRESQTSTLTHRTTSTPSFSPSVHNVTGTVSQKTSPSGETATSSLCSVTNTSMMTSEKITVTTSTGSTLGNPGETSSVPVTGSLMPVTSAALVTFDPEGQSPATFSRTSTQDTTAFSKNHQTQSVETTRVSQINTLNTLTPVTTSTVLSSPSGFNPSGTVSQETFPSGETTTSSPSSVSNTFLVTSKVFRMPTSRDSTLGNTEETSLSVSGTISAITSKVSTIWWSDTLSTALSPSSLPPKISTAFHTQQSEGAETTGRPHERSSFSPGVSQEIFTLHETTTWPSSFSSKGHTTWSQTELPSTSTGAATRLVTGNPSTGTAGTIPRVPSKVSAIGEPGEPTTYSSHSTTLPKTTGAGAQTQWTQETGTTGEALLSSPSYSVTQMIKTATSPSSSPMLDRHTSQQITTAPSTNHSTIHSTSTSPQESPAVSQRGHTQAPQTTQESQTTRSVSPMTDTKTVTTPGSSFTASGHSPSEIVPQDAPTISAATTFAPAPTGDGHTTQAPTTALQAAPSSHDATLGPSGGTSLSKTGALTLANSVVSTPGGPEGQWTSASASTSPDTAAAMTHTHQAESTEASGQTQTSEPASSGSRTTSAGTATPSSSGASGTTPSGSEGISTSGETTRFSSNPSRDSHTTQSTTELLSASASHGAIPVSTGMASSIVPGTFHPTLSEASTAGRPTGQSSPTSPSASPQETAAISRMAQTQRTRTSRGSDTISLASQATDTFSTVPPTPPSITSTGLTSPQTETHTLSPSGSGKTFTTALISNATPLPVTYASSASTGHTTPLHVTDASSVSTGHATPLPVTSPSSVSTGHTTPLPVTDTSSESTGHVTPLPVTSFSSASTGDSTPLPVTDTSSASTGHVTPLPVTSLSSASTGDTTPLPVTDTSSASTGHATSLPVTDTSSVSTGHTTPLPVTDTSSASTGHATSLPVTDTSSVSTGHTTPLHVTDASSASTGQATPLPVTSLSSVSTGDTTPLPVTSPSSASTGHATPLLVTDTSSASTGHATPLPVTDASSVSTDHATSLPVTIPSAASTGHTTPLPVTDTSSASTGQATSLLVTDTSSVSTGDTTPLPVTSTSSASTGHVTPLHVTSPSSASTGHATPLPVTSLSSASTGDTMPLPVTSPSSASTGDTTPLPVTDASSVSTGHTTPLHVTDASSASTGQATPLPVTSLSSVSTGDTTPLPVTSPSSASTGHATPLLVTDTSSASTGHATPLPVTDASSVSTDHATSLPVTIPSAASTGHTTPLPVTDTSSASTGQATSLLVTDTSSVSTGDTTPLPVTSTSSASTGHVTPLHVTSPSSASTGHATPLPVTSLSSASTGDTMPLPVTSPSSASTGDTTPLPVTDASSVSTGHTTPLPVTSPSSASTGHTTPLPVTDTSSASKGDTTPLPVTSPSSASTGHTTPLPVTDTSSASTGDTTPLPVTNASSLSTGHATPLHVTSPSSASTGHATPLPVTSTSSASTGHATPLPVTGLSSATTDDTTRLPVTDVSSASTGQATPLPVTSLSSVSTGDTTPLPVTSPSSASTGHASPLLVTDASSASTGQATPLPVTDTSSVSTAHATPLPVTGLSSASTDDTTRLPVTDVSSASTGQAIPLPVTSPSSASTGDTTPLPVTDASSASTGDTTSLPVTIPSSASSGHTTSLPVTDASSVSTGHATSLLVTDASSVSTGDTTPLPVTDTNSASTGDTTPLHVTDASSVSTGHATSLPVTSLSSASTGDTTPLPVTSPSSASSGHTTPLPVTDASSVPTGHATSLPVTDASSVSTGHATPLPVTDASSVSTGHATPLPVTDTSSVSTGQATPLPVTSLSSASTGDTTPLPVTDTSSASTGQDTPLPVTSLSSVSTGDTTPLPVTNPSSASTGHATPLLVTDASSISTGHATSLLVTDASSVSTGHATALHDTDASSLSTGDTTPLPVTSPSSTSTGDTTPLPVTETSSVSTGHATSLPVTDTSSASTGHATSLPVTDTSSASTGHATPLPVTDTSSASTGQATPLPVTSPSSASTGHAIPLLVTDTSSASTGQATPLPVTSLSSASTGDTTPLPVTDASSVSTGHATSLPVTSLSSVSTGDTTPLPVTSPSSASTGHATPLHVTDASSASTGHATPLPVTSLSSASTGDTTPLPVTSPSSASTGHATPLHVTDASSVSTGDTTPLPVTSSSSASSGHTTPLPVTDASSASTGDTTPLPVTDTSSASTGHATHLPVTGLSSASTGDTTRLPVTNVSSASTGHATPLPVTSTSSASTGDTTPLPGTDTSSVSTGHTTPLLVTDASSVSTGDTTRLPVTSPSSASTGHTTPLPVTDTPSASTGDTTPLPVTNASSLSTRHATSLHVTSPSSASTGHATSLPVTDTSAASTGHATPLPVTSTSSASTGDTTPLPVTDTYSASTGQATPLPVTSLSSVSTGDTTPLPVTSPSSASTGHATPLLVTDASSASTGQATPLPVTSLSSVSTGDTTPLPVTSPSSASTGHATSLPVTDTSSASTGDTTSLPVTDTSSAYTGDTTSLPVTDTSSSSTGDTTPLLVTETSSVSTGDTTPLPVTDTSSASTGHATPLPVTNTSSVSTGHATPLHVTSPSSASTGHTTPLPVTDASSVSTGHATSLPVTDASSVFTGHATSLPVTIPSSASSGHTTPLPVTDASSVSTGHATSLPVTDASSVSTGHATPLPVTDASSVSTGHATPLPLTSLSSVSTGDTTPLPVTDTSSASTGQATPLPVTSLSSVSTGDTTPLPVTDTSSASTGHATSLPVTDTSSASTGHATPLPDTDTSSASTGHATLLPVTDTSSASIGHATSLPVTDTSSISTGHATPLHVTSPSSASTGHATPLPVTDTSSASTGHANPLHVTSPSSASTGHATPLPVTDTSSASTGHATPLPVTSLSSVSTGDTTPLPVTSPSSASTGHTTPLPVTDTSSASTGQATALPVTSTSSASTGDTTPLPVTDTSSASTGQATPLPVTSLSSVSTGDTTPLPVTSPSSASTGHATPLLVTDASSASTGQATPLPVTSLSSVSTGDTTPLPVTSPSSASTGHATSLPVTDTSSASTGDTTSLPVTDTSSAYTGDTTSLPVTDTSSSSTGDTTPLLVTETSSVSTGHATPLLVTDASSASTGHATPLHVTSPSSASTGDTTPVPVTDTSSVSTGHATPLPVTGLSSASTGDTTRLPVTDISSASTGQATPLPVTNTSSVSTGDTMPLPVTSPSSASTGHATPLPVTSTSSASTGHATPVPVTSTSSASTGHTTPLPVTDTSSASTGDTTPLPVTSPSSASTGHTTPLHVTIPSSASTGDTSTLPVTGASSASTGHATPLPVTDTSSVSTGHATPLPVTSLSSVSTGDTTPLPVTDASSASTGQATPLPVTSLSSVSTGDTTPLLVTDASSVSTGHATPLPVTDTSSASTGDTTRLPVTDTSSASTGQATPLPVTSLSSVSTGDTTPLLVTDASSVSTGHATPLPVTDTSSASTGDTTRLPVTDTSSASTGQATPLPVTIPSSSSSGHTTPLPVTSTSSVSTGHVTPLHVTSPSSASTGHVTPLPVTSTSSASTGHATPLLVTDASSVSTGHATPLPVTDASSASTGDTTPLPVTDTSSASTGQATPLPVTSLSSVSTGDTTPLPVTDASSASTGHATPLPVTIPSSVSTGDTMPLPVTSPSSASTGHATPLPVTGLSSASTGDTTPLPVTDTSSASTRHATPLPVTDTSSASTDDTTRLPVTDVSSASTGHATPLPVTSTSSASTGDTTPLPVTDTSSVSTGHATSLPVTSRSSASTGHATPLPVTDTSSVSTGHATPLPVTSTSSVSTGHATPLPVTSPSSASTGHATPVPVTSTSSASTGDTTPLPVTNASSLSTGHATPLHVTSPSSASRGDTSTLPVTDASSASTGHATPLPLTSLSSVSTGDTTPLPVTDTSSASTGQATPLPVTSLSSVSTGDTTPLPVTIPSSASSGHTTSLPVTDASSVSTGHGTPLPVTSTSSASTGDTTPLPVTDTSSASTGHATPLPVTDTSSASTGHATPLPVTSLSSVSTGHATPLAVSSATSASTVSSDSPLKMETPGMTTPSLKTDGGRRTATSPPPTTSQTIISTIPSTAMHTRSTAAPIPILPERGVSLFPYGAGAGDLEFVRRTVDFTSPLFKPATGFPLGSSLRDSLYASQAGTLWPWWLRSGTMLTSPLVGGPHFIRATPTKPSSPRTGAGPMPCFSTRAVGCSGTWPSAQWRWLFRKQPTDVPASVGEVSP

SEQ ID NO: 53245 - protein, 4415 aa, Homo sapiens; identical to SEQ ID NO: 53243
  Payload ID: 10597
  Gene Symbol: MUC4
  Gene Name: mucin 4, cell surface associated
  ENSP ID: ENSP00000486102
  MOD_RES (1)..(1): Any amino acid

SEQ ID NO: 53246 - protein, 164 aa, Homo sapiens; identical to SEQ ID NO: 53198
  Payload ID: 10597
  Gene Symbol: MUC4
  Gene Name: mucin 4, cell surface associated
  ENSP ID: ENSP00000486103
  MOD_RES (1)..(1): Any amino acid

SEQ ID NO: 53247 - protein, 5334 aa, Homo sapiens
  Payload ID: 10597
  Gene Symbol: MUC4
  Gene Name: mucin 4, cell surface associated
  ENSP ID: ENSP00000486164
  MOD_RES (1)..(1): Any amino acid
XTTEDTLITGSKTAAPVTSTGSTTATLEGQSTAASSRTSNQDISASSQNHQTKSTETTSKAQTDTLTQMMTSTLFSSPSVHNVMETAPPDEMTTSFPSSVTNTLMMTSKTITMTTSTDSTLGNTEETSTAGTESSTPVTSAVSITAGQEGQSRTTSWRTSIQDTSASSQNHWTRSTQTTRESQTSTLTHRTTSTPSFSPSVHNVTGTVSQKTSPSGETATSSLCSVTNTSMMTSEKITVTTSTGSTLGNPGETSSVPVTGSLMPVTSAALVTFDPEGQSPATFSRTSTQDTTAFSKNHQTQSVETTRVSQINTLNTLTPVTTSTVLSSPSGFNPSGTVSQETFPSGETTTSSPSSVSNTFLVTSKVFRMPTSRDSTLGNTEETSLSVSGTISAITSKVSTIWWSDTLSTALSPSSLPPKISTAFHTQQSEGAETTGRPHERSSFSPGVSQEIFTLHETTTWPSSFSSKGHTTWSQTELPSTSTGAATRLVTGNPSTGTAGTIPRVPSKVSAIGEPGEPTTYSSHSTTLPKTTGAGAQTQWTQETGTTGEALLSSPSYSVTQMIKTATSPSSSPMLDRHTSQQITTAPSTNHSTIHSTSTSPQESPAVSQRGHTQAPQTTQESQTTRSVSPMTDTKTVTTPGSSFTASGHSPSEIVPQDAPTISAATTFAPAPTGDGHTTQAPTTALQAAPSSHDATLGPSGGTSLSKTGALTLANSVVSTPGGPEGQWTSASASTSPDTAAAMTHTHQAESTEASGQTQTSEPASSGSRTTSAGTATPSSSGASGTTPSGSEGISTSGETTRFSSNPSRDSHTTQSTTELLSASASHGAIPVSTGMASSIVPGTFHPTLSEASTAGRPTGQSSPTSPSASPQETAAISRMAQTQRTRTSRGSDTISLASQATDTFSTVPPTPPSITSTGLTSPQTETHTLSPSGSGKTFTTALISNATPLPVTYASSASTGHTTPLHVTDASSVSTGHATPLPVTSPSSVSTGHTTPLPVTDTSSESTGHVTPLPVTSFSSASTGDSTPLPVTDTSSASTGHVTPLPVTSLSSASTGDTTPLPVTDTSSASTGHATSLPVTDTSSVSTGHTTPLPVTDTSSASTGHATSLPVTDTSSVSTGHTTPLHVTDASSASTGQATPLPVTSLSSVSTGDTTPLPVTSPSSASTGHATPLLVTDTSSASTGHATPLPVTDASSVSTDHATSLPVTIPSAASTGHTTPLPVTDTSSASTGQATSLLVTDTSSVSTGDTTPLPVTSTSSASTGHVTPLHVTSPSSASTGHATPLPVTSLSSASTGDTMPLPVTSPSSASTGDTTPLPVTDASSVSTGHTTPLHVTDASSASTGQATPLPVTSLSSVSTGDTTPLPVTSPSSASTGHATPLLVTDTSSASTGHATPLPVTDASSVSTDHATSLPVTIPSAASTGHTTPLPVTDTSSASTGQATSLLVTDTSSVSTGDTTPLPVTSTSSASTGHVTPLHVTSPSSASTGHATPLPVTSLSSASTGDTMPLPVTSPSSASTGDTTPLPVTDASSVSTGHTTPLPVTSPSSASTGHTTPLPVTDTSSASKGDTTPLPVTSPSSASTGHTTPLPVTDTSSASTGDTTPLPVTNASSLSTGHATPLHVTSPSSASTGHATPLPVTSTSSASTGHATPLPVTGLSSATTDDTTRLPVTDVSSASTGQATPLPVTSLSSVSTGDTTPLPVTSPSSASTGHASPLLVTDASSASTGQATPLPVTDTSSVSTAHATPLPVTGLSSASTDDTTRLPVTDVSSASTGQAIPLPVTSPSSASTGDTTPLPVTDASSASTGDTTSLPVTIPSSASSGHTTSLPVTDASSVSTGHATSLLVTDASSVSTGDTTPLPVTDTNSASTGDTTPLHVTDASSVSTGHATSLPVTSLSSASTGDTTPLPVTSPSSASSGHTTPLPVTDASSVPTGHATSLPVTDASSVSTGHATPLPVTDASSVSTGHATPLPVTDTSSVSTGQATPLPVTSLSSASTGDTTPLPVTDTSSASTGHAPHLPVTGLSSASTGDTTRLPVTNVSSASTGHATPLPVTSTSSASTGDTTPLPGTDTSSVSTGHTTPLLVTDASSVSTGDTTRLPVTSPSSASTGHTTPLHVTDASSVSTGHTTPLPVTDTSSASTGQATSLLVTDTSSVSTGDTTPLPVTSTSSASTGHVTPLHVTSPSSASTGHATPLPVTSLSSASTGDTTPLPVTDTSSVSTGHTTPLPVTSPSSASTGHTTPLPVTDTSSASKGDTTPLPVTSPSSASTGHTTPLPVTDTSSASTGDTTPLPVTNASSLSTGHATPLHVTSPSSASTGHATPLPVTSTSSASTGHATPLPVTSTSSASTGHATPLPVTDNSSVSTGHATPLPVTGLSSATTDDTTRLPVTDVSSASTGQATPLPVTSLSSVSTGDTTPLPVTSPSSASTGHASPLLVTDASSASTGQATPLPVTDTSSVSTAHATPLPVTGLSSASTDDTTRLPVTDVSSASTGQAIPLPVTSPSSASTGDTTPLPVTDASSASTGDTTSLPVTIPSSASSGHTTSLPVTDASSVSTGHATSLLVTDASSVSTGDTTPLPVTDTNSASTGDTTPLHVTDASSVSTGHATSLPVTSLSSASTGDTTPLPVTSPSSASSGHTTSLPVTDASSVSTGHATSLPVTIPSSASSGHTTPLPVTDASSVPTGHATSLPVTDASSVSTGHATPLPVTDASSVSTGHATPLPVTDTSSVSTGQATPLPVTSLSSASSTGDTTPLPVTDTSSASTGQDTPLPVTSLFSVSTGDTTPLPVTSPSSASTGHATHLLVTDASSVSTGHATSLLVTDASSVSTGHATALHVTDASSLSTGDTTPLPVTSPSSASTGDTTPLPVTDTSSVSTGHATSLPVTDTSSASTGHATSLPVTDTSSASTGQATPLPVTSPSSASTGHAIPLLVTDTSSASTGQATPLPVTSLSSASTGDTTPLPVTDASSVSTGHATSLPVTSLSSVSTGDTTPLPVTSPSSASTGHATPLHVTSPSSASTGHATPLPVTSLSSASTGDTTPLPVTSPSSASTGHATPLHVTDASSVSTGDTTPLPVTSPSSASSGHTTPLPVTDASSASTGDTTPLPVTDTSSASTGHATHLPVTGLSSASTGDTTRLPVTDVSSASTGHATPLPVTSTSSASTGDTTPLPGTDTSSVSTGHTTPLLVTDASSVSTGDTTRLPVTSPSSASTGHTTPLPVTDTPSASTGDTTPLPVTNASSLSTRHATSLHVTSPSSASTGHATPLPVTDTSAASTGHATPLPVTSTSSASTGDTTPLPVTDTSSASTGHATPLPVTNTSSVSTGHATPLHVTSPSSASTGHTTPLPVTDASSVSTGHATSLPVTDASSVSTGHATPLPVTDASSVSTGHATPLPLTSLSSVSTGDTTPLPVTDTSSASTGQATPLPVTSLSSVSTGDTTPLPVTDTSSASTGHATSLPVTDTSSASTGHATPLHVTSPSSASTGHATPLPVTDTSSASTGHATPLPVTSLSSVSTGDTTPLPVTSPSSASTGHATPLLVTDASSASTGQATPLPVTSLSSVSTGDTTPLPVTSPSSASTGHATSLPVTDTSSASTGDTTSLPVTDTSSAYTGDTTSLPVTDTSSSSTGDTTPLLVTETSSASTGDTTPVPVTDTSSVSTGHATPLPVTGLSSASTGDTTRLPVTDISSASTGQATPLPVTNTSSVSTGDTMPLPVTSPSSASTGHATPLPVTSTSSASTGHATPVPVTSTSSASTGHTTPLPVTSPSSASTGHTTPLPVTDTSSASTGDTTPLPVTNASSLSTGHTTPLHVTIPSSASTGDTSTLPVTGASSASTGHATPLPVTDTSSVSTGHATPLPVTSFSSVSTGDTTPLPVTDASSASTGHATPLPVTDTSSASTGDTTPLPVTDASSASTGQATPLPVTSLSSVSTGDTTPLPVTIPSSASSGHTTSLPVSDTSSASTGQATPLPVTSLSSVSTGDTTPLLVTDASSVSTGHATPLPVTDTSSASTGDTTRLPVTDTSSASTGQATPLPVTSLSSVSTGDTTPLLVTNTSSVSTGHATSLPVTIPSSSSSGHTTPLPVTSTSSVSTGHVTPLHVTSPSSSSTGQATPLPVTSTSSSSTGQATPLPVTSTSSASTGHATPLPVTDASSVSTGHATPLPVTDTSSASTGDTTPLPVTDTSSASTGQATPLPVTSLSSVSTGHATPLAVSSATSASTVSSDSPLKMETSGMTTPSLKTDGGRRTATSPPPTTSQTIISTIPSTAMHTRSTAAPIPILPERGVSLFPYGADAGDLEFVRRTVDFTSPLFKPATGFPLGSSLRDSLYFTDNGQIIFPESDYQIFSYPNPLPTGFTGRDPVALVAPFWDDADFSTGRGTTFYQSNTYQAILSTDGSRSYALFLYQSGGMQWDVAQRSGKPVLMGFSSGDGYFENSPLMSQPVWERYRPDRFLNSNSGLQGLQFYRLHREERPNYRLECLQWLKSQPRWPSWGWNQVSCPCSWQQGRRDLRFQPVSIGRWGLGSRQLCSFTSWRGGVCCSYGPWGEFREGWHVQRPWQLAQELEPQSWCCRWNDKPYLCALYQQRRPHVGCATYRPPQPAWMFGDPHITTLDGVSYTFNGLGDFLLVGAQDGNSSFLLQGRTAQTGSAQATNFIAFAAQYRSSSLGPVTVQWLLEPHDAIRVLLDNQTVTFQPDHEDGGGQETFNATGVLLSRNGSEVSASFDGWATVSVIALSNILHSSASLPPEYQNRTEGLLGVWNNNPEDDFRMPNGSTIPPGSPEEMLFHFGMTWQINGTGLLGKRNDQLPSNFTPVFYSQLQKNSSWAEHLISNCDGDSSCIYDTLALRNASIGLHTREVSKNYEQANATLNQYPPSINGGRVIEAYKGQTTLIQYTSNAEDANFTLRDSCTDLELFENGTLLWTPKSLEPFTLEILARSAKIGLASALQPRTVVCHCNAESQCLYNQTSRVGNSSLEVAGCKCDGGTFGRYCEGSEDACEEPCFPSVHCVPGKGCEACPPNLTGDGRHCAALGSSFLCQNQSCPVNYCYNQGHCYISQTLGCQPMCTCPPAFTDSRCFLAGNNFSPTVNLELPLRVIQLLLSEEENASMAEVNASVAYRLGTLDMRAFLRNSQVERIDSAAPASGSPIQHWMVISEFQYRPRGPVIDFLNNQLLAAVVEAFLYHVPRRSEEPRNDVVFQPISGEDVRDVTALNVSTLKAYFRCDGYKGYDLVYSPQSGFTCVSPCSRGYCDHGGQCQHLPSGPRCSCVSFSIYTAWGEHCEHLSMKLDAFFGIFFGALGGLLLLGVGTFVVLRFWGCSGARFSYFLNSAEALP

SEQ ID NO: 53248 - protein, 5385 aa, Homo sapiens; identical to SEQ ID NO: 53214
  Payload ID: 10597
  Gene Symbol: MUC4
  Gene Name: mucin 4, cell surface associated
  ENSP ID: ENSP00000486183
  MOD_RES (1)..(1): Any amino acid

SEQ ID NO: 53249 - protein, 4417 aa, Homo sapiens; identical to SEQ ID NO: 53244
  Payload ID: 10597
  Gene Symbol: MUC4
  Gene Name: mucin 4, cell surface associated
  ENSP ID: ENSP00000486205
  MOD_RES (1)..(1): Any amino acid

SEQ ID NO: 53250 - protein, 5043 aa, Homo sapiens
  Payload ID: 10597
  Gene Symbol: MUC4
  Gene Name: mucin 4, cell surface associated
  ENSP ID: ENSP00000486210
  MOD_RES (1)..(1): Any amino acid
XTTEDTLITGSKTAAPVTSTGSTTATLEGQSTAASSRTSNQDISASSQNHQTKSTETTSKAQTDTLTQMMTSTLFSSPSVHNVMETAPPDEMTTSFPSSVTNTLMMTSKTITMTTSTDSTLGNTEETSTAGTESSTPVTSAVSITAGQEGQSRTTSWRTSIQDTSASSQNHWTRSTQTTRESQTSTLTHRTTSTPSFSPSVHNVTGTVSQKTSPSGETATSSLCSVTNTSMMTSEKITVTTSTGSTLGNPGETSSVPVTGSLMPVTSAALVTFDPEGQSPATFSRTSTQDTTAFSKNHQTQSVETTRVSQINTLNTLTPVTTSTVLSSPSGFNPSGTVSQETFPSGETTTSSPSSVSNTFLVTSKVFRMPTSRDSTLGNTEETSLSVSGTISAITSKVSTIWWSDTLSTALSPSSLPPKISTAFHTQQSEGAETTGRPHERSSFSPGVSQEIFTLHETTTWPSSFSSKGHTTWSQTELPSTSTGAATRLVTGNPSTGTAGTIPRVPSKVSAIGEPGEPTTYSSHSTTLPKTTGAGAQTQWTQETGTTGEALLSSPSYSVTQMIKTATSPSSSPMLDRHTSQQITTAPSTNHSTIHSTSTSPQESPAVSQRGHTQAPQTTQESQTTRSVSPMTDTKTVTTPGSSFTASGHSPSEIVPQDAPTISAATTFAPAPTGDGHTTQAPTTALQAAPSSHDATLGPSGGTSLSKTGALTLANSVVSTPGGPEGQWTSASASTSPDTAAAMTHTHQAESTEASGQTQTSEPASSGSRTTSAGTATPSSSGASGTTPSGSEGISTSGETTRFSSNPSRDSHTTQSTTELLSASASHGAIPVSTGMASSIVPGTFHPTLSEASTAGRPTGQSSPTSPSASPQETAAISRMAQTQRTRTSRGSDTISLASQATDTFSTVPPTPPSITSTGLTSPQTETHTLSPSGSGKTFTTALISNATPLPVTYASSASTGHTTPLHVTDASSVSTGHATPLPVTSPSSVSTGHTTPLPVTDTSSESTGHVTPLPVTSFSSASTGDSTPLPVTDTSSASTGHVTPLPVTSLSSASTGDTTPLPVTDTSSASTGHATSLPVTDTSSVSTGHTTPLPVTDTSSASTGHATSLPVTDTSSVSTGHTTPLHVTDASSASTGQATPLPVTSLSSVSTGDTTPLPVTSPSSASTGHATPLLVTDTSSASTGHATPLPVTDASSVSTDHATSLPVTIPSAASTGHTTPLPVTDTSSASTGQATSLLVTDTSSVSTGDTTPLPVTSTSSASTGHVTPLHVTSPSSASTGHATPLPVTSLSSASTGDTMPLPVTSPSSASTGDTTPLPVTDASSVSTGHTTPLHVTDASSASTGQATPLPVTSLSSVSTGDTTPLPVTSPSSASTGHATPLLVTDTSSASTGHATPLPVTDASSVSTDHATSLPVTIPSAASTGHTTPLPVTDTSSASTGQATSLLVTDTSSVSTGDTTPLPVTSTSSASTGHVTPLHVTSPSSASTGHATPLPVTSLSSASTGDTMPLPVTSPSSASTGDTTPLPVTDASSVSTGHTTPLPVTSPSSASTGHTTPLPVTDTSSASKGDTTPLPVTSPSSASTGHTTPLPVTDTSSASTGDTTPLPVTNASSLSTGHATPLHVTSPSSASTGHATPLPVTSTSSASTGHATPLPVTGLSSATTDDTTRLPVTDVSSASTGQATPLPVTSLSSVSTGDTTPLPVTSPSSASTGHASPLLVTDASSASTGQATPLPVTDTSSVSTAHATPLPVTGLSSASTDDTTRLPVTDVSSASTGQAIPLPVTSPSSASTGDTTPLPVTDASSASTGDTTSLPVTIPSSASSGHTTSLPVTDASSVSTGHATSLLVTDASSVSTGDTTPLPVTDTNSASTGDTTPLHVTDASSVSTGHATSLPVTSLSSASTGDTTPLPVTSPSSASSGHTTPLPVTDASSVPTGHATSLPVTDASSVSTGHATPLPVTDASSVSTGHATPLPVTDTSSVSTGQATPLPVTSLSSASTGDTTPLPVTDTSSASTGQDTPLPVTSLSSVSTGDTTPLPVTNPSSASTGHATPLLVTDASSISTGHATSLLVTDASSVSTGHATALHDTDASSLSTGDTTPLPVTSPSSTSTGDTTPLPVTETSSVSTGHATSLPVTDTSSASTGHATSLPVTDTSSASTGHATPLPVTDTSSASTGQATPLPVTSPSSASTGHAIPLLVTDTSSASTGQATPLPVTSLSSASTGDTTPLPVTDASSVSTGHATSLPVTSLSSVSTGDTTPLPVTSPSSASTGHATPLHVTDASSASTGHATPLPVTSLSSASTGDTTPLPVTSPSSASTGHATPLHVTDASSVSTGDTTPLPVTSSSSASSGHTTPLPVTDASSASTGDTTPLPVTDTSSASTGHATHLPVTGLSSASTGDTTRLPVTNVSSASTGHATPLPVTSTSSASTGDTTPLPGTDTSSVSTGHTTPLLVTDASSVSTGDTTRLPVTSPSSASTGHTTPLPVTDTPSASTGDTTPLPVTNASSLSTRHATSLHVTSPSSASTGHATSLPVTDTSAASTGHATPLPVTSTSSASTGDTTPLPVTDTYSASTGQATPLPVTSLSSVSTGDTTPLPVTSPSSASTGHATPLLVTDASSASTGQATPLPVTSLSSVSTGDTTPLPVTSPSSASTGHATSLPVTDTSSASTGDTTSLPVTDTSSAYTGDTTSLPVTDTSSSSTGDTTPLLVTETSSVSTGDTTPLPVTDTSSASTGHATPLPVTNTSSVSTGHATPLHVTSPSSASTGHTTPLPVTDASSVSTGHATSLPVTDASSVFTGHATSLPVTIPSSASSGHTTPLPVTDASSVSTGHATSLPVTDASSVSTGHATPLPVTDASSVSTGHATPLPLTSLSSVSTGDTTPLPVTDTSSASTGQATPLPVTSLSSVSTGDTTPLPVTDTSSASTGHATSLPVTDTSSASTGHATPLPDTDTSSASTGHATLLPVTDTSSASIGHATSLPVTDTSSISTGHATPLHVTSPSSASTGHATPLPVTDTSSASTGHANPLHVTSPSSASTGHATPLPVTDTSSASTGHATPLPVTSLSSVSTGDTTPLPVTSPSSASTGHTTPLPVTDTSSASTGQATALPVTSTSSASTGDTTPLPVTDTSSASTGQATPLPVTSLSSVSTGDTTPLPVTSPSSASTGHATPLLVTDASSASTGQATPLPVTSLSSVSTGDTTPLPVTSPSSASTGHATSLPVTDTSSASTGDTTSLPVTDTSSAYTGDTTSLPVTDTSSSSTGDTTPLLVTETSSVSTGHATPLLVTDASSASTGHATPLHVTSPSSASTGDTTPVPVTDTSSVSTGHATPLPVTGLSSASTGDTTRLPVTDISSASTGQATPLPVTNTSSVSTGDTMPLPVTSPSSASTGHATPLPVTSTSSASTGHATPVPVTSTSSASTGHTTPLPVTDTSSASTGDTTPLPVTSPSSASTGHTTPLHVTIPSSASTGDTSTLPVTGASSASTGHATPLPVTDTSSVSTGHATPLPVTSLSSVSTGDTTPLPVTDASSASTGQATPLPVTSLSSVSTGDTTPLLVTDASSVSTGHATPLPVTDTSSASTGDTTRLPVTDTSSASTGQATPLPVTSLSSVSTGDTTPLLVTDASSVSTGHATPLPVTDTSSASTGDTTRLPVTDTSSASTGQATPLPVTIPSSSSSGHTTPLPVTSTSSVSTGHVTPLHVTSPSSASTGHVTPLPVTSTSSASTGHATPLLVTDASSVSTGHATPLPVTDASSASTGDTTPLPVTDTSSASTGQATPLPVTSLSSVSTGDTTPLPVTDASSASTGHATPLPVTIPSSVSTGDTMPLPVTSPSSASTGHATPLPVTGLSSASTGDTTPLPVTDTSSASTRHATPLPVTDTSSASTDDTTRLPVTDVSSASTGHATPLPVTSTSSASTGDTTPLPVTDTSSVSTGHATSLPVTSRSSASTGHATPLPVTDTSSVSTGHATPLPVTSTSSVSTGHATPLPVTSPSSASTGHATPVPVTSTSSASTGDTTPLPVTNASSLSTGHATPLHVTSPSSASRGDTSTLPVTDASSASTGHATPLPLTSLSSVSTGDTTPLPVTDTSSASTGQATPLPVTSLSSVSTGDTTPLPVTIPSSASSGHTTSLPVTDASSVSTGHGTPLPVTSTSSASTGDTTPLPVTDTSSASTGHATPLPVTDTSSASTGHATPLPVTSLSSVSTGHATPLAVSSATSASTVSSDSPLKMETPGMTTPSLKTDGGRRTATSPPPTTSQTIISTIPSTAMHTRSTAAPIPILPERGVSLFPYGAGAGDLEFVRRTVDFTSPLFKPATGFPLGSSLRDSLYFTDNGQIIFPESDYQIFSYPNPLPTGFTGRDPVALVAPFWDDADFSTGRGTTFYQEYETFYGEHSLLVQQAESWIRKMTNNGGYKARWALKVTWVNAHAYPAQWTLGSNTYQAILSTDGSRSYALFLYQSGGMQWDVAQRSGNPVLMGFSSGDGYFENSPLMSQPVWERYRPDRFLNSNSGLQGLQFYRLHREERPNYRLECLQWLKSQPRWPSWGWNQVSCPCSWQQGRRDLRFQPVSIGRWGLGSRQLCSFTSWRGGVCCSYGPWGEFREGWHVQRPWQLAQELEPQSWCCRWNDKPYLCALYQQRRPHVGCATYRPPQPAWMFGDPHITTLDGVSYTFNGLGDFLLVGAQDGNSSFLLQGRTAQTGSAQATNFIAFAAQYRSSSLGPVTVQWLLEPHDAIRVLLDNQTVTFQPDHEDGGGQETFNATGVLLSRNGSEVSASFDGWATVSVIALSNILHASASLPPEYQNRTEGLLGVWNNNPEDDFRMPNGSTIPPGSPEEMLFHFGMTWQINGTGLLGKRNDQLPSNFTPVFYSQLQKNSSWAEHLISNCDGDSSCIYDTLALRNASIGLHTREVSKNYEQANATLNQYPPSINGGRVIEAYKGQTTLIQYTSNAEDANFTLRDSCTDLELFENGTLLWTPKSLEPFTLEILARSAKIGLASALQPRTVVCHCNAESQCLYNQTSRVGNSSLELWGALSCVRTSPAL

SEQ ID NO: 53251 - protein, 4417 aa, Homo sapiens; identical to SEQ ID NO: 53244
  Payload ID: 10597
  Gene Symbol: MUC4
  Gene Name: mucin 4, cell surface associated
  ENSP ID: ENSP00000486243
  MOD_RES (1)..(1): Any amino acid

SEQ ID NO: 53252 - protein, 4415 aa, Homo sapiens; identical to SEQ ID NO: 53243
  Payload ID: 10597
  Gene Symbol: MUC4
  Gene Name: mucin 4, cell surface associated
  ENSP ID: ENSP00000486256
  MOD_RES (1)..(1): Any amino acid

SEQ ID NO: 53253 - protein, 174 aa, Homo sapiens; identical to SEQ ID NO: 53194
  Payload ID: 10597
  Gene Symbol: MUC4
  Gene Name: mucin 4, cell surface associated
  ENSP ID: ENSP00000486267
  MOD_RES (1)..(1): Any amino acid

SEQ ID NO: 53254 - protein, 4431 aa, Homo sapiens; identical to SEQ ID NO: 53241
  Payload ID: 10597
  Gene Symbol: MUC4
  Gene Name: mucin 4, cell surface associated
  ENSP ID: ENSP00000486305
  MOD_RES (1)..(1): Any amino acid

SEQ ID NO: 53255 - protein, 164 aa, Homo sapiens; identical to SEQ ID NO: 53198
  Payload ID: 10597
  Gene Symbol: MUC4
  Gene Name: mucin 4, cell surface associated
  ENSP ID: ENSP00000486358
  MOD_RES (1)..(1): Any amino acid

SEQ ID NO: 53256 - protein, 137 aa, Homo sapiens
  Payload ID: 10597
  Gene Symbol: MUC4
  Gene Name: mucin 4, cell surface associated
  ENSP ID: ENSP00000486372
  MOD_RES (1)..(1): Any amino acid
XMTTPSLKTDGGRRTATSPPPTTSQTIISTIPSTAMHTRSTAAPIPILPERGVSLFPYGADAGDLEFVRRTVDFTSPLFKPATGFPLGSSLRDSLYASQAGTLWPWWLRSGTMLTSPLVGGPHFIRNTRRSMVNTAC

SEQ ID NO: 53257 - protein, 4484 aa, Homo sapiens
  Payload ID: 10597
  Gene Symbol: MUC4
  Gene Name: mucin 4, cell surface associated
  ENSP ID: ENSP00000486425
  MOD_RES (1)..(1): Any amino acid
XTTEDTLITGSKTAAPVTSTGSTTATLEGQSTAASSRTSNQDISASSQNHQTKSTETTSKAQTDTLTQMMTSTLFSSPSVHNVMETAPPDEMTTSFPSSVTNTLMMTSKTITMTTSTDSTLGNTEETSTAGTESSTPVTSAVSITAGQEGQSRTTSWRTSIQDTSASSQNHWTRSTQTTRESQTSTLTHRTTSTPSFSPSVHNVTGTVSQKTSPSGETATSSLCSVTNTSMMTSEKITVTTSTGSTLGNPGETSSVPVTGSLMPVTSAALVTFDPEGQSPATFSRTSTQDTTAFSKNHQTQSVETTRVSQINTLNTLTPVTTSTVLSSPSGFNPSGTVSQETFPSGETTTSSPSSVSNTFLVTSKVFRMPTSRDSTLGNTEETSLSVSGTISAITSKVSTIWWSDTLSTALSPSSLPPKISTAFHTQQSEGAETTGRPHERSSFSPGVSQEIFTLHETTTWPSSFSSKGHTTWSQTELPSTSTGAATRLVTGNPSTGTAGTIPRVPSKVSAIGEPGEPTTYSSHSTTLPKTTGAGAQTQWTQETGTTGEALLSSPSYSVTQMIKTATSPSSSPMLDRHTSQQITTAPSTNHSTIHSTSTSPQESPAVSQRGHTQAPQTTQESQTTRSVSPMTDTKTVTTPGSSFTASGHSPSEIVPQDAPTISAATTFAPAPTGDGHTTQAPTTALQAAPSSHDATLGPSGGTSLSKTGALTLANSVVSTPGGPEGQWTSASASTSPDTAAAMTHTHQAESTEASGQTQTSEPASSGSRTTSAGTATPSSSGASGTTPSGSEGISTSGETTRFSSNPSRDSHTTQSTTELLSASASHGAIPVSTGMASSIVPGTFHPTLSEASTAGRPTGQSSPTSPSASPQETAAISRMAQTQRTRTSRGSDTISLASQATDTFSTVPPTPPSITSTGLTSPQTETHTLSPSGSGKTFTTALISNATPLPVTYASSASTGHTTPLHVTDASSVSTGHATPLPVTSPSSVSTGHTTPLPVTDTSSESTGHVTPLPVTSFSSASTGDSTPLPVTDTSSASTGHVTPLPVTSLSSASTGDTTPLPVTDTSSASTGHATSLPVTDTSSVSTGHTTPLPVTDTSSASTGHATSLPVTDTSSVSTGHTTPLHVTDASSASTGQATPLPVTSLSSVSTGDTTPLPVTSPSSASTGHATPLLVTDTSSASTGHATPLPVTDASSVSTDHATSLPVTIPSAASTGHTTPLPVTDTSSASTGQATSLLVTDTSSVSTGDTTPLPVTSTSSASTGHVTPLHVTSPSSASTGHATPLPVTSLSSASTGDTMPLPVTSPSSASTGDTTPLPVTDASSVSTGHTTPLHVTDASSASTGQATPLPVTSLSSVSTGDTTPLPVTSPSSASTGHATPLLVTDTSSASTGHATPLPVTDASSVSTDHATSLPVTIPSAASTGHTTPLPVTDTSSASTGQATSLLVTDTSSVSTGDTTPLPVTSTSSASTGHVTPLHVTSPSSASTGHATPLPVTSLSSASTGDTMPLPVTSPSSASTGDTTPLPVTDASSVSTGHTTPLPVTSPSSASTGHTTPLPVTDTSSASKGDTTPLPVTSPSSASTGHTTPLPVTDTSSASTGDTTPLPVTNASSLSTGHATPLHVTSPSSASTGHATPLPVTSTSSASTGHATPLPVTGLSSATTDDTTRLPVTDVSSASTGQATPLPVTSLSSVSTGDTTPLPVTSPSSASTGHASPLLVTDASSASTGQATPLPVTDTSSVSTAHATPLPVTGLSSASTDDTTRLPVTDVSSASTGQAIPLPVTSPSSASTGDTTPLPVTDASSASTGDTTSLPVTIPSSASSGHTTSLPVTDASSVSTGHATSLLVTDASSVSTGDTTPLPVTDTNSASTGDTTPLHVTDASSVSTGHATSLPVTSLSSASTGDTTPLPVTSPSSASSGHTTPLPVTDASSVPTGHATSLPVTDASSVSTGHATPLPVTDASSVSTGHATPLPVTDTSSVSTGQATPLPVTSLSSASTGDTTPLPVTDTSSASTGHAPHLPVTGLSSASTGDTTRLPVTNVSSASTGHATPLPVTSTSSASTGDTTPLPGTDTSSVSTGHTTPLLVTDASSVSTGDTTRLPVTSPSSASTGHTTPLHVTDASSVSTGHTTPLPVTDTSSASTGQATSLLVTDTSSVSTGDTTPLPVTSTSSASTGHVTPLHVTSPSSASTGHATPLPVTSLSSASTGDTTPLPVTDTSSVSTGHTTPLPVTSPSSASTGHTTPLPVTDTSSASKGDTTPLPVTSPSSASTGHTTPLPVTDTSSASTGDTTPLPVTNASSLSTGHATPLHVTSPSSASTGHATPLPVTSTSSASTGHATPLPVTSTSSASTGHATPLPVTDNSSVSTGHATPLPVTGLSSATTDDTTRLPVTDVSSASTGQATPLPVTSLSSVSTGDTTPLPVTSPSSASTGHASPLLVTDASSASTGQATPLPVTDTSSVSTAHATPLPVTGLSSASTDDTTRLPVTDVSSASTGQAIPLPVTSPSSASTGDTTPLPVTDASSASTGDTTSLPVTIPSSASSGHTTSLPVTDASSVSTGHATSLLVTDASSVSTGDTTPLPVTDTNSASTGDTTPLHVTDASSVSTGHATSLPVTSLSSASTGDTTPLPVTSPSSASSGHTTSLPVTDASSVSTGHATSLPVTIPSSASSGHTTPLPVTDASSVPTGHATSLPVTDASSVSTGHATPLPVTDASSVSTGHATPLPVTDTSSVSTGQATPLPVTSLSSASSTGDTTPLPVTDTSSASTGQDTPLPVTSLFSVSTGDTTPLPVTSPSSASTGHATHLLVTDASSVSTGHATSLLVTDASSVSTGHATALHVTDASSLSTGDTTPLPVTSPSSASTGDTTPLPVTDTSSVSTGHATSLPVTDTSSASTGHATSLPVTDTSSASTGQATPLPVTSPSSASTGHAIPLLVTDTSSASTGQATPLPVTSLSSASTGDTTPLPVTDASSVSTGHATSLPVTSLSSVSTGDTTPLPVTSPSSASTGHATPLHVTSPSSASTGHATPLPVTSLSSASTGDTTPLPVTSPSSASTGHATPLHVTDASSVSTGDTTPLPVTSPSSASSGHTTPLPVTDASSASTGDTTPLPVTDTSSASTGHATHLPVTGLSSASTGDTTRLPVTDVSSASTGHATPLPVTSTSSASTGDTTPLPGTDTSSVSTGHTTPLLVTDASSVSTGDTTRLPVTSPSSASTGHTTPLPVTDTPSASTGDTTPLPVTNASSLSTRHATSLHVTSPSSASTGHATPLPVTDTSAASTGHATPLPVTSTSSASTGDTTPLPVTDTSSASTGHATPLPVTNTSSVSTGHATPLHVTSPSSASTGHTTPLPVTDASSVSTGHATSLPVTDASSVSTGHATPLPVTDASSVSTGHATPLPLTSLSSVSTGDTTPLPVTDTSSASTGQATPLPVTSLSSVSTGDTTPLPVTDTSSASTGHATSLPVTDTSSASTGHATPLHVTSPSSASTGHATPLPVTDTSSASTGHATPLPVTSLSSVSTGDTTPLPVTSPSSASTGHATPLLVTDASSASTGQATPLPVTSLSSVSTGDTTPLPVTSPSSASTGHATSLPVTDTSSASTGDTTSLPVTDTSSAYTGDTTSLPVTDTSSSSTGDTTPLLVTETSSASTGDTTPVPVTDTSSVSTGHATPLPVTGLSSASTGDTTRLPVTDISSASTGQATPLPVTNTSSVSTGDTMPLPVTSPSSASTGHATPLPVTSTSSASTGHATPVPVTSTSSASTGHTTPLPVTSPSSASTGHTTPLPVTDTSSASTGDTTPLPVTNASSLSTGHTTPLHVTIPSSASTGDTSTLPVTGASSASTGHATPLPVTDTSSVSTGHATPLPVTSFSSVSTGDTTPLPVTDASSASTGHATPLPVTDTSSASTGDTTPLPVTDASSASTGQATPLPVTSLSSVSTGDTTPLPVTIPSSASSGHTTSLPVSDTSSASTGQATPLPVTSLSSVSTGDTTPLLVTDASSVSTGHATPLPVTDTSSASTGDTTRLPVTDTSSASTGQATPLPVTSLSSVSTGDTTPLLVTNTSSVSTGHATSLPVTIPSSSSSGHTTPLPVTSTSSVSTGHVTPLHVTSPSSSSTGQATPLPVTSTSSSSTGQATPLPVTSTSSASTGHATPLPVTDASSVSTGHATPLPVTDTSSASTGDTTPLPVTDTSSASTGQATPLPVTSLSSVSTGHATPLAVSSATSASTVSSDSPLKMETSGMTTPSLKTDGGRRTATSPPPTTSQTIISTIPSTAMHTRSTAAPIPILPERGVSLFPYGADAGDLEFVRRTVDFTSPLFKPATGFPLGSSLRDSLYFTDNGQIIFPESDYQIFSYPNPLPTGFTGRDPVALVAPFWDDADFSTGRGTTFYQEYETFYGEHSLLVQQAESWIRKITNNGGYKARWALKVTWVNAHAYPAQWTLGSNTYQAILSTDGSRSYALFLYQSGGMQWDVAQRSVEMAISKTAH

SEQ ID NO: 53258 - protein, 6436 aa, Homo sapiens; identical to SEQ ID NO: 53232
  Payload ID: 10597
  Gene Symbol: MUC4
  Gene Name: mucin 4, cell surface associated
  ENSP ID: ENSP00000486429

SEQ ID NO: 53259 - protein, 157 aa, Homo sapiens
  Payload ID: 10597
  Gene Symbol: MUC4
  Gene Name: mucin 4, cell surface associated
  ENSP ID: ENSP00000486460
  MOD_RES (1)..(1): Any amino acid
XMTTPSLKTDGGRRTATSPPPTTSQTIISTIPSTAMHTRSTAAPIPILPERGEAIQEFPSSPMGQTPGTWSSSGGPWTSPPHSSSRRLASPLAPLSVIPSTSQTMARSSSQSQTTRFSPTPTHSQQASQAGTLWPWWLRSGTMLTSPLVGGPHFIRL

SEQ ID NO: 53260 - protein, 5043 aa, Homo sapiens; identical to SEQ ID NO: 53250
  Payload ID: 10597
  Gene Symbol: MUC4
  Gene Name: mucin 4, cell surface associated
  ENSP ID: ENSP00000486465
  MOD_RES (1)..(1): Any amino acid

SEQ ID NO: 53261 - protein, 4373 aa, Homo sapiens; identical to SEQ ID NO: 53233
  Payload ID: 10597
  Gene Symbol: MUC4
  Gene Name: mucin 4, cell surface associated
  ENSP ID: ENSP00000486489
  MOD_RES (1)..(1): Any amino acid

SEQ ID NO: 53262 - protein, 144 aa, Homo sapiens; identical to SEQ ID NO: 53196
  Payload ID: 10597
  Gene Symbol: MUC4
  Gene Name: mucin 4, cell surface associated
  ENSP ID: ENSP00000486497
  MOD_RES (1)..(1): Any amino acid

SEQ ID NO: 53263 - protein, 5333 aa, Homo sapiens; identical to SEQ ID NO: 53215
  Payload ID: 10597
  Gene Symbol: MUC4
  Gene Name: mucin 4, cell surface associated
  ENSP ID: ENSP00000486518
  MOD_RES (1)..(1): Any amino acid

SEQ ID NO: 53264 - protein, 4403 aa, Homo sapiens; identical to SEQ ID NO: 53236
  Payload ID: 10597
  Gene Symbol: MUC4
  Gene Name: mucin 4, cell surface associated
  ENSP ID: ENSP00000486522
  MOD_RES (1)..(1): Any amino acid

SEQ ID NO: 53265 - protein, 144 aa, Homo sapiens; identical to SEQ ID NO: 53196
  Payload ID: 10597
  Gene Symbol: MUC4
  Gene Name: mucin 4, cell surface associated
  ENSP ID: ENSP00000486529
  MOD_RES (1)..(1): Any amino acid

SEQ ID NO: 53266 - protein, 4403 aa, Homo sapiens; identical to SEQ ID NO: 53236
  Payload ID: 10597
  Gene Symbol: MUC4
  Gene Name: mucin 4, cell surface associated
  ENSP ID: ENSP00000486533
  MOD_RES (1)..(1): Any amino acid

SEQ ID NO: 53267 - protein, 4403 aa, Homo sapiens; identical to SEQ ID NO: 53236
  Payload ID: 10597
  Gene Symbol: MUC4
  Gene Name: mucin 4, cell surface associated
  ENSP ID: ENSP00000486541
  MOD_RES (1)..(1): Any amino acid

SEQ ID NO: 53268 - protein, 7366 aa, Homo sapiens
  Payload ID: 10597
  Gene Symbol: MUC4
  Gene Name: mucin 4, cell surface associated
  ENSP ID: ENSP00000486556
MKGARWRRVPWVSLSCLCLCLLPHVVPGTTEDTLITGSKTPAPVTSTGSTTATLEGQSTAASSRTSNQDISASSQNHQTKSTETTSKAQTDTLTQMMTSTLFSSPSVHNVMETVTQETAPPDEMTTSFPSSVTNTLMMTSKTITMTTSTDSTLGNTEETSTAGTESSTPVTSAVSITAGQEGQSRTTSWRTSIQDTSASSQNHWTRSTQTTRESQTSTLTHRTTSTPSFSPSVHNVTGTVSQKTSPSGETATSSLCSVTNTSMMTSEKITVTTSTGSTLGNPGETSSVPVTGSLMPVTSAALVTVDPEGQSPVTFSRTSTQDTTAFSKNHQTQSVETTRVSQINTLNTLTPVTTSTVLSSPSGFNPSGTVSQETFPSGETTISSPSSVSNTFLVTSKVFRMPISRDSTLGNTEETSLSVSGTISAITSKVSTIWWSDTLSTALSPSSLPPKISTAFHTQQSEGAETTGRPHERSSFSPGVSQEIFTLHETTTWPSSFSSKGHTTWSQTELPSTSTGAATRLVTGNPSTGAAGTIPRVPSKVSAIGEPGEPTTYSSHSTTLPKTTGAGAQTQWTQETGTTGEALLSSPSYSVTQMIKTATSPSSSPMLDRHTSQQITTAPSTNHSTIHSTSTSPQESPAVSQRGHTQAPQTTQESQTTRSVSPMTDTKTVTTPGSSFTASGHSPSEIVPQDAPTISAATTFAPAPTGDGHTTQAPTTALQAAPSSHDATLGPSGGTSLSKTGALTLANSVVSTPGGPEGQWTSASASTSPDTAAAMTHTHQAESTEASGQTQTSEPASSGSRTTSAGTATPSSSGASGTTPSGSEGISTSGETTRFSSNPSRDSHTTQSTTELLSASASHGAIPVSTGMASSIVPGTFHPTLSEASTAGRPTGQSSPTSPSASPQETAAISRMAQTQRTRTSRGSDTISLASQATDTFSTVPPTPPSITSSGLTSPQTQTHTLSPSGSGKTFTTALISNATPLPVTYASSASTGHTTPLHVTDASSVSTGHATPLPVTDTSSESTGHATPLPVTSPSSVSTGHTTPLPVTDTSSESTGHVTPLPVTSLSSASTGDSTPLPVTDTSSASTGHVTPLPVTSLSSASTGDTTPLPVTDTSSASTGHATSLPVTDTSSVSTGHTTPLPVTDTSSASTGHATSLPVTDTSSVSTAHATPLPVTGLSSASTDDTTRLPVTDVSSASTGQAIPLPVTSPSSASTGDTTPLPVTDASSASTGDTTSLPVTIPSSASSGHTTSLPVTDASSVSTGHATSLLVTDASSVSTGDTTPLPVTDTNSASTGDTTPLHVTDASSVSTGHATSLPVTSLSSASTGDTTPLPVTSPSSASSGHTTPLPVTDASSVPTGHATSLPVTDASSVSTGHATPLPVTDASSVSTGHATPLPVTDTSSVSTGQATPLPVTSLSSASTGDTTPLPVTDTSSASTGQDTPLPVTSLSSVSTGDTTPLPVTSPSSASTGHATPLLVTDASSVSTGHATSLLVTDASSVSTGHATALHVTDASSLSTGDTTPLPVTSPSSASTGDTTPLPVTDTSSASTGHATSLPVTDTSSASTGHATPLPVTDTSSASTGQATPLPVTGPSSASTGHAIPLLVTDTSSASTGQATPLPVTSLSSASTGDTTPLPVTDASSVSTGHATSLPVTSLSSVSTGDTTPLPVTSPSSASSGHTTPLPVTDASSVSTGDTTPLPVTSPSSASSGHTTPLPVTSPSSASSGHTTPLPVTDASSASTGDTTPLPVTDTSSASTGHATHLPVTGLSSASTGDTTRLPVTNVSSASTGHATPLPVTSTSSASTGDTTPLPGTDTSSVSTGHTTPLLVTDASSVSTGDTTRLPVTSPSSASTGHTTPLPVTDTPSASTGDTTPLPVTNASSLSTRHTTSLHVTSPSSASTGHATSLPVTDTSSVSTGHATPLHVTSPSSASTGDTTPLPVTDTYSASTGQATPLPVTDTSSASTGDTTPLPVTDTSSASTGHATPLPVTNTSSVSTGHATPLHVTSPSSASTGHTTPLPVTDASSVSTGHATSLPVTDASSVFTGHATSLPVTIPSSASSGHTTPLPVTDASSVSTGHATSLPVTDASSVSTGHATPLPVTDASSVSTGHATPLPVTDTSSVSTGHATPLPLTSLSSVSTGDTTPLPVTDTSSASTGQATPLPVTSLSSVSTGDTTPLPVTDTSSASTGHATSLPVTDTSSASTGHATPLPDTDTSSASTGHATPLPVTDTSSASTGHATLLPVTDTSSASIGHATPLPVTDTSSISTGHATPLHVTSPSSASTGHATPLPVTDTSSASTGHANPLHVTSPSSASTGHATPLPVTDTSSASTGHATPLPVTSLSSVSTGDTTPLPVTSPSSASTGHTTPLPVTDTSSASTGQATALPVTSTSSASTGDTTPLPVTDTSSASTGQATPLPVTSLSSVSTGDTTPLPVTSPSSASTGHATPLLVTDASSASTGQATPLPVTDTSSAYTGDTTSLPVTDTSSSSTGDTTPLLVTETSSASTGHATPLHVTSPSSASTGDTTPVPVTDTSSVSTGHATPLPVTGLSSASTGDTTRLPVTDISSASTGQATPLPVTNTSSASTGHATPLPVTGLSSASTGDTTRLPVTDISSASTGQATPLPVTNTSSVSTGDTMPLPVTSPSSASTGHATPLPVTSTSSASTGHATPVPVTSTSSASTGHTTPLPVTDTSSASTGDTTPLPVTSPSSASTGHTTPLHVTIPSSASTGDTSTLPVTGASSASTGHATPLPVTDTSSVSTGHATPLPVTSFSSVSTGDTTPLPVTDTSSVSTGHATPLPVTSFSSVSTGDTTPLPVTDASSASTGHATPLPVTDTSSVSTGHATPLPLTSLSSVSTGDTTTLPVTDTSSVSTGHATPLPVTSFSSVSTGDTTPLPVTDASSASTGHATPLPVTDTSSVSTGHATPLPVTSLSSVSTGDTTPLPVTDASSASTGQATPLPVTSLSSVSTGDTTPLPVTIPSSASSGHTTSLPVTDTSSASTGQATPLPVTSLSSVSTGDTTPLLVTDASSVSTGHATPLPVTDTSSASTGDTTRLPVTDTSSASTGQATPLPVTSLSSVSTGDTTPLLVTNTSSVSRGHATSLPVTIPSSSSSGHTTPLPVTSTSSVSTGHVTPLPVTSTSSASTGHATSLPVTDTSSVSTGHATSLPVTDTSSVSTGHATPLPVTDASSVSTGHATPLPVTDASSASTGDTTPLPVTNTSSASTGQATPLPVTSLSSVSTGDTMPLPVTSPSSASTGHATPLPVTGLSSASTGDTTPLPVTDTSSASTGHVTPLPVTSLSSASTGDSTPLPVTDTSSASTGHVTPLPVTSLSSASTGDTTPLPVTDTSSASTGHATPLHVTDASSASTGQATLLPVTSLSSVSTGDTTPLPVTSPSSASTGHATPLLVTDTSSASTGHATPLPVTDASSVSTGHATSLPVTIRSSGSTGHTTPLPVTDTSSASTGQATSLLVTDTSSVSTGDTTPLPVTSTSSASTGHVTPLHVTSPSSASTGHATPLPVTSLSSASTGDTMPLPVTSPSSASTGDTTPLPVTDASSVSTGHTTPLPVTSPSSASTGHTTPLPVTDTTSASKGDTTPLPVTSPSSASTGHTTPLPVTDTSSASTGDTTPLPVTSPSSASTGHATPLPVTNASSLSTGHATPLHVTSPSSASTGHATPLPVTSTSSASTGHATSLPVTSTSSASTGHATPLPVTDNSSVSTGHATPLPVTGLSSATTDDTTRLPVTDVSSASTGQATPLPVTSLSSVSTGDTTPLPVTSPSSASTGHASPLLVTDASSASTGQATPLPVTDTSSVSTAHATPLPVTGLSSASTDDTTRLPVTDVSSASTGQAIPLPVTSPSSASTGDTTPLPVTDASSASTGDTTSLPVTIPSSASSGHTTSLPVTDASSVSTGHATSLLVTDASSVSTGDTTPLPVTDTNSASTGDTTPLHVTDASSVSTGHATSLPVTSLSSASTGDTTPLPVTSPSSASSGDTTPLPVTDTSSASTGHATHLPVTGLSSASTGDTTRLPVTNVSSASTGHATPLPVTSTSSASTGDTTPLPGTDTSSVSTGHTTPLLVTDASSVSTGDTTRLPVTSPSSASTGHTTPLHVTDASSVSTGHTTPLPVTDTSSASTGQATSLLVTDTSSVSTGDTTPLPVTSTSSASTGHVTPLHVTSPSSASTGHATPLPVTSLSSASTGDTTPLPVTDTSSVSTGHTTPLPVTSPSSASTGHTTPLPVTDTSSASKGDTTPLPVTSPSSASTGHTTPLPVTDTSSASTGDTTPLPVTNASSLSTGHATPLHVTSPSSASTGHATPLPVTSTSSASTGHATPLPVTSTSSASTGHATPLPVTDNSSVSTGHATPLPVTGLSSATTDDTTRLPVTDVSSASTGQATPLPVTSLSSVSTGDTTPLPVTSPSSASTGHASPLLVTDASSASTGQATPLPVTDTSSVSTAHATPLPVTGLSSASTDDTTRLPVTDVSSASTGQAIPLPVTSPSSASTGDTTPLPVTDASSASTGDTTSLPVTIPSSASSGHTTSLPVTDASSVSTGHATSLLVTDASSVSTGDTTPLPVTDTNSASTGDTTPLHVTDASSVSTGHATSLPVTSLSSASTGDTTPLPVTSPSSASSGHTTSLPVTDASSVSTGHATSLPVTIPSSASSGHTTPLPVTDASSVPTGHATSLPVTDASSVSTGHATPLPVTDASSVSTGHATPLPVTDTSSVSTGQATPLPVTSLSSASSTGDTTPLPVTDTSSASTGQDTPLPVTSLFSVSTGDTTPLPVTSPSSASTGHATHLLVTDASSVSTGHATSLLVTDASSVSTGHATALHVTDASSLSTGDTTPLPVTSPSSASTGDTTPLPVTDTSSVSTGHATSLPVTDTSSASTGHATSLPVTDTSSASTGQATPLPVTSPSSASTGHAIPLLVTDTSSASTGQATPLPVTSLSSASTGDTTPLPVTDASSVSTGHATSLPVTSLSSVSTGDTTPLPVTSPSSASTGHATPLHVTSPSSASTGHATPLPVTSLSSASTGDTTPLPVTSPSSASTGHATPLHVTDASSVSTGDTTPLPVTSPSSASSGHTTPLPVTDASSASTGDTTPLPVTDTSSASTGHATHLPVTGLSSASTGDTTRLPVTDVSSASTGHATPLPVTSTSSASTGDTTPLPGTDTSSVSTGHTTPLLVTDASSVSTGDTTRLPVTSPSSASTGHTTPLPVTDTPSASTGDTTPLPVTNASSLSTRHATSLHVTSPSSASTGHATPLPVTDTSAASTGHATPLPVTSTSSASTGDTTPLPVTDTSSASTGHATPLPVTNTSSVSTGHATPLHVTSPSSASTGHTTPLPVTDASSVSTGHATSLPVTDASSVSTGHATPLPVTDASSVSTGHATPLPLTSLSSVSTGDTTPLPVTDTSSASTGQATPLPVTSLSSVSTGDTTPLPVTDTSSASTGHATSLPVTDTSSASTGHATPLPVTDTSSISTGHATPLHVTSPSSASTGHATPLPVTDTSSASTGHATPLPVTSLSSVSTGDTTPLPVTSPSSASTGHATPLLVTDASSASTGQATPLPVTSLSSVSTGDTTPLPVTSPSSASTGHATSLPVTDTSSASTGDTTSLPVTDTSSAYTGDTTSLPVTDTSSSSTGDTTPLLVTETSSASTGDTTPVPVTDTSSVSTGHATPLPVTGLSSASTGDTTRLPVTDISSASTGQATPLPVTNTSSVSTGDTMPLPVTSPSSASTGHATPLPVTSTSSASTGHATPVPVTSTSLASTGHTTPLPVTSPSSASTGHTTPLPVTDTSSASTGDTTPLPVTNASSLSTGHTTPLHVTIPSSASTGDTSTLPVTGASSASTGHATPLPVTDTSSVSTGHATPLPVTSFSSVSTGDTTPLPVTDASSASTGHATPLPVTDTSSASTGDTTPLPVTDASSASTGQATPLPVTSLSSVSTGDTTPLPVTIPSSASSGHTTSLPVSDTSSASTGQATPLPVTSLSSVSTGDTTPLLVTDASSVSTGHATPLPVTDTSSASTGDTTRLPVTDTSSASTGQATPLPVTSLSSVSTGDTTPLLVTNTSSVSTGHATSLPVTIPSSSSSGHTTPLPVTSTSSVSTGHVTPLHVTSPSSSSTGQATPLPVTSTSSVSTGHVTPLHVTSPSSASTGHATPLPVTSTSSASTGHATPLPVTDASSVSTGHATPLPVTDTSSASTGDTTPLPVTDTSSASTGQATPLPVTSLSSVSTGHATPLAVSSATSASTVSSDSPLKMETSGMTTPSLKTDGGRRTATSPPPTTSQTIISTIPSTAMHTRSTAAPIPILPERGVSLFPYGADAGDLEFVRRTVDFTSPLFKPATGFPLGSSLRDSLYFTDNGQIIFPESDYQIFSYPNPLPTGFTGRDPVALVAPFWDDADFSTGRGTTFYQSNTYQAILSTDGSRSYALFLYQSGGMQWDVAQRSGNPVLMGFSSGDGYFENSPLMSQPVWERYRPDRFLNSNSGLQGLQFYRLHREERPNYRLECLQWLKSQPRWPSWGWNQVSCPCSWQQGRRDLRFQPVSIGRWGLGSRQLCSFTSWRGGVCCSYGPWGEFREGWHVQRPWQLAQELEPQSWCCRWNDKPYLCALYQQRRPHVGCATYRPPQPAWMFGDPHITTLDGVSYTFNGLGDFLLVGAQDGNSSFLLQGRTAQTGSAQATNFIAFAAQYRSSSLGPVTVQWLLEPHDAIRVLLDNQTVTFQPDHEDGGGQETFNATGVLLSRNGSEVSASFDGWATVSVIALSNILHASASLPPEYQNRTEGLLGVWNNNPEDDFRMPNGSTIPPGSPEEMLFHFGMTWQINGTGLLGKRNDQLPSNFTPVFYSQLQKNSSWAEHLISNCDGDSSCIYDTLALRNASIGLHTREVSKNYEQANATLNQYPPSINGGRVIEAYKGQTTLIQYTSNAEDANFTLRDSCTDLELFENGTLLWTPKSLEPFTLEILARSAKIGLASALQPRTVVCHCNAESQCLYNQTSRVGNSSLEVAGCKCDGGTFGRYCEGSEDACEEPCFPSVHCVPGKGCEACPPNLTGDGRHCAALGSSFLCQNQSCPVNYCYNQGHCYISQTLGCQPMCTCPPAFTDSRCFLAGNNFSPTVNLELPLRVIQLLLSEEENASMAEVNASVAYRLGTLDMRAFLRNSQVERIDSAAPASGSPIQHWMVISEFQYRPRGPVIDFLNNQLLAAVVEAFLYHVPRRSEEPRNDVVFQPISGEDVRDVTALNVSTLKAYFRCDGYKGYDLVYSPQSGFTCVSPCSRGYCDHGGQCQHLPSGPRCSCVSFSIYTAWGEHCEHLSMKLDAFFGIFFGALGGLLLLGVGTFVVLRFWGCSGARFSYFLNSAEALP

SEQ ID NO: 53269 - protein, 5386 aa, Homo sapiens
  Payload ID: 10597
  Gene Symbol: MUC4
  Gene Name: mucin 4, cell surface associated
  ENSP ID: ENSP00000486565
  MOD_RES (1)..(1): Any amino acid
XTTEDTLITGSKTAAPVTSTGSTTATLEGQSTAASSRTSNQDISASSQNHQTKSTETTSKAQTDTLTQMMTSTLFSSPSVHNVMETAPPDEMTTSFPSSVTNTLMMTSKTITMTTSTDSTLGNTEETSTAGTESSTPVTSAVSITAGQEGQSRTTSWRTSIQDTSASSQNHWTRSTQTTRESQTSTLTHRTTSTPSFSPSVHNVTGTVSQKTSPSGETATSSLCSVTNTSMMTSEKITVTTSTGSTLGNPGETSSVPVTGSLMPVTSAALVTFDPEGQSPATFSRTSTQDTTAFSKNHQTQSVETTRVSQINTLNTLTPVTTSTVLSSPSGFNPSGTVSQETFPSGETTTSSPSSVSNTFLVTSKVFRMPTSRDSTLGNTEETSLSVSGTISAITSKVSTIWWSDTLSTALSPSSLPPKISTAFHTQQSEGAETTGRPHERSSFSPGVSQEIFTLHETTTWPSSFSSKGHTTWSQTELPSTSTGAATRLVTGNPSTGTAGTIPRVPSKVSAIGEPGEPTTYSSHSTTLPKTTGAGAQTQWTQETGTTGEALLSSPSYSVTQMIKTATSPSSSPMLDRHTSQQITTAPSTNHSTIHSTSTSPQESPAVSQRGHTQAPQTTQESQTTRSVSPMTDTKTVTTPGSSFTASGHSPSEIVPQDAPTISAATTFAPAPTGDGHTTQAPTTALQAAPSSHDATLGPSGGTSLSKTGALTLANSVVSTPGGPEGQWTSASASTSPDTAAAMTHTHQAESTEASGQTQTSEPASSGSRTTSAGTATPSSSGASGTTPSGSEGISTSGETTRFSSNPSRDSHTTQSTTELLSASASHGAIPVSTGMASSIVPGTFHPTLSEASTAGRPTGQSSPTSPSASPQETAAISRMAQTQRTRTSRGSDTISLASQATDTFSTVPPTPPSITSTGLTSPQTETHTLSPSGSGKTFTTALISNATPLPVTYASSASTGHTTPLHVTDASSVSTGHATPLPVTSPSSVSTGHTTPLPVTDTSSESTGHVTPLPVTSFSSASTGDSTPLPVTDTSSASTGHVTPLPVTSLSSASTGDTTPLPVTDTSSASTGHATSLPVTDTSSVSTGHTTPLPVTDTSSASTGHATSLPVTDTSSVSTGHTTPLHVTDASSASTGQATPLPVTSLSSVSTGDTTPLPVTSPSSASTGHATPLLVTDTSSASTGHATPLPVTDASSVSTDHATSLPVTIPSAASTGHTTPLPVTDTSSASTGQATSLLVTDTSSVSTGDTTPLPVTSTSSASTGHVTPLHVTSPSSASTGHATPLPVTSLSSASTGDTMPLPVTSPSSASTGDTTPLPVTDASSVSTGHTTPLHVTDASSASTGQATPLPVTSLSSVSTGDTTPLPVTSPSSASTGHATPLLVTDTSSASTGHATPLPVTDASSVSTDHATSLPVTIPSAASTGHTTPLPVTDTSSASTGQATSLLVTDTSSVSTGDTTPLPVTSTSSASTGHVTPLHVTSPSSASTGHATPLPVTSLSSASTGDTMPLPVTSPSSASTGDTTPLPVTDASSVSTGHTTPLPVTSPSSASTGHTTPLPVTDTSSASKGDTTPLPVTSPSSASTGHTTPLPVTDTSSASTGDTTPLPVTNASSLSTGHATPLHVTSPSSASTGHATPLPVTSTSSASTGHATPLPVTGLSSATTDDTTRLPVTDVSSASTGQATPLPVTSLSSVSTGDTTPLPVTSPSSASTGHASPLLVTDASSASTGQATPLPVTDTSSVSTAHATPLPVTGLSSASTDDTTRLPVTDVSSASTGQAIPLPVTSPSSASTGDTTPLPVTDASSASTGDTTSLPVTIPSSASSGHTTSLPVTDASSVSTGHATSLLVTDASSVSTGDTTPLPVTDTNSASTGDTTPLHVTDASSVSTGHATSLPVTSLSSASTGDTTPLPVTSPSSASSGHTTPLPVTDASSVPTGHATSLPVTDASSVSTGHATPLPVTDASSVSTGHATPLPVTDTSSVSTGQATPLPVTSLSSASTGDTTPLPVTDTSSASTGHAPHLPVTGLSSASTGDTTRLPVTNVSSASTGHATPLPVTSTSSASTGDTTPLPGTDTSSVSTGHTTPLLVTDASSVSTGDTTRLPVTSPSSASTGHTTPLHVTDASSVSTGHTTPLPVTDTSSASTGQATSLLVTDTSSVSTGDTTPLPVTSTSSASTGHVTPLHVTSPSSASTGHATPLPVTSLSSASTGDTTPLPVTDTSSVSTGHTTPLPVTSPSSASTGHTTPLPVTDTSSASKGDTTPLPVTSPSSASTGHTTPLPVTDTSSASTGDTTPLPVTNASSLSTGHATPLHVTSPSSASTGHATPLPVTSTSSASTGHATPLPVTSTSSASTGHATPLPVTDNSSVSTGHATPLPVTGLSSATTDDTTRLPVTDVSSASTGQATPLPVTSLSSVSTGDTTPLPVTSPSSASTGHASPLLVTDASSASTGQATPLPVTDTSSVSTAHATPLPVTGLSSASTDDTTRLPVTDVSSASTGQAIPLPVTSPSSASTGDTTPLPVTDASSASTGDTTSLPVTIPSSASSGHTTSLPVTDASSVSTGHATSLLVTDASSVSTGDTTPLPVTDTNSASTGDTTPLHVTDASSVSTGHATSLPVTSLSSASTGDTTPLPVTSPSSASSGHTTSLPVTDASSVSTGHATSLPVTIPSSASSGHTTPLPVTDASSVPTGHATSLPVTDASSVSTGHATPLPVTDASSVSTGHATPLPVTDTSSVSTGQATPLPVTSLSSASSTGDTTPLPVTDTSSASTGQDTPLPVTSLFSVSTGDTTPLPVTSPSSASTGHATHLLVTDASSVSTGHATSLLVTDASSVSTGHATALHVTDASSLSTGDTTPLPVTSPSSASTGDTTPLPVTDTSSVSTGHATSLPVTDTSSASTGHATSLPVTDTSSASTGQATPLPVTSPSSASTGHAIPLLVTDTSSASTGQATPLPVTSLSSASTGDTTPLPVTDASSVSTGHATSLPVTSLSSVSTGDTTPLPVTSPSSASTGHATPLHVTSPSSASTGHATPLPVTSLSSASTGDTTPLPVTSPSSASTGHATPLHVTDASSVSTGDTTPLPVTSPSSASSGHTTPLPVTDASSASTGDTTPLPVTDTSSASTGHATHLPVTGLSSASTGDTTRLPVTDVSSASTGHATPLPVTSTSSASTGDTTPLPGTDTSSVSTGHTTPLLVTDASSVSTGDTTRLPVTSPSSASTGHTTPLPVTDTPSASTGDTTPLPVTNASSLSTRHATSLHVTSPSSASTGHATPLPVTDTSAASTGHATPLPVTSTSSASTGDTTPLPVTDTSSASTGHATPLPVTNTSSVSTGHATPLHVTSPSSASTGHTTPLPVTDASSVSTGHATSLPVTDASSVSTGHATPLPVTDASSVSTGHATPLPLTSLSSVSTGDTTPLPVTDTSSASTGQATPLPVTSLSSVSTGDTTPLPVTDTSSASTGHATSLPVTDTSSASTGHATPLHVTSPSSASTGHATPLPVTDTSSASTGHATPLPVTSLSSVSTGDTTPLPVTSPSSASTGHATPLLVTDASSASTGQATPLPVTSLSSVSTGDTTPLPVTSPSSASTGHATSLPVTDTSSASTGDTTSLPVTDTSSAYTGDTTSLPVTDTSSSSTGDTTPLLVTETSSASTGDTTPVPVTDTSSVSTGHATPLPVTGLSSASTGDTTRLPVTDISSASTGQATPLPVTNTSSVSTGDTMPLPVTSPSSASTGHATPLPVTSTSSASTGHATPVPVTSTSSASTGHTTPLPVTSPSSASTGHTTPLPVTDTSSASTGDTTPLPVTNASSLSTGHTTPLHVTIPSSASTGDTSTLPVTGASSASTGHATPLPVTDTSSVSTGHATPLPVTSFSSVSTGDTTPLPVTDASSASTGHATPLPVTDTSSASTGDTTPLPVTDASSASTGQATPLPVTSLSSVSTGDTTPLPVTIPSSASSGHTTSLPVSDTSSASTGQATPLPVTSLSSVSTGDTTPLLVTDASSVSTGHATPLPVTDTSSASTGDTTRLPVTDTSSASTGQATPLPVTSLSSVSTGDTTPLLVTNTSSVSTGHATSLPVTIPSSSSSGHTTPLPVTSTSSVSTGHVTPLHVTSPSSSSTGQATPLPVTSTSSSSTGQATPLPVTSTSSASTGHATPLPVTDASSVSTGHATPLPVTDTSSASTGDTTPLPVTDTSSASTGQATPLPVTSLSSVSTGHATPLAVSSATSASTVSSDSPLKMETSGMTTPSLKTDGGRRTATSPPPTTSQTIISTIPSTAMHTRSTAAPIPILPERGVSLFPYGADAGDLEFVRRTVDFTSPLFKPATGFPLGSSLRDSLYFTDNGQIIFPESDYQIFSYPNPLPTGFTGRDPVALVAPFWDDADFSTGRGTTFYQEYETFYGEHSLLVQQAESWIRKITNNGGYKARWALKVTWVNAHAYPAQWTLGSNTYQAILSTDGSRSYALFLYQSGGMQWDVAQRSGKPVLMGFSSGDGYFENSPLMSQPVWERYRPDRFLNSNSGLQGLQFYRLHREERPNYRLECLQWLKSQPRWPSWGWNQVSCPCSWQQGRRDLRFQPVSIGRWGLGSRQLCSFTSWRGGVCCSYGPWGEFREGWHVQRPWQLAQELEPQSWCCRWNDKPYLCALYQQRRPHVGCATYRPPQPAWMFGDPHITTLDGVSYTFNGLGDFLLVGAQDGNSSFLLQGRTAQTGSAQATNFIAFAAQYRSSSLGPVTVQWLLEPHDAIRVLLDNQTVTFQPDHEDGGGQETFNATGVLLSRNGSEVSASFDGWATVSVIALSNILHSSASLPPEYQNRTEGLLGVWNNNPEDDFRMPNGSTIPPGSPEEMLFHFGMTWQINGTGLLGKRNDQLPSNFTPVFYSQLQKNSSWAEHLISNCDGDSSCIYDTLALRNASIGLHTREVSKNYEQANATLNQYPPSINGGRVIEAYKGQTTLIQYTSNAEDANFTLRDSCTDLELFENGTLLWTPKSLEPFTLEILARSAKIGLASALQPRTVVCHCNAESQCLYNQTSRVGNSSLEVAGCKCDGGTFGRYCEGSEDACEEPCFPSVHCVPGKGCEACPPNLTGDGRHCAALGSSFLCQNQSCPVNYCYNQGHCYISQTLGCQPMCTCPPAFTDSRCFLAGNNFSPTVNLELPLRVIQLLLSEEENASMAEVNASVAYRLGTLDMRAFLRNSQVERIDSAAPASGSPIQHWMVISEFQYRPRGPVIDFLNNQLLAAVVEAFLYHVPRRSEEPRNDVVFQPISGEDVRDVTALNVSTLKAYFRCDGYKGYDLVYSPQSGFTCVSPCSRGYCDHGGQCQHLPSGPRCSCVSFSIYTAWGEHCEHLSMKLDAFFGIFFGALGGLLLLGVGTFVVLRFWGCSGARFSYFLNSAEALP

SEQ ID NO: 53270 - protein, 137 aa, Homo sapiens; identical to SEQ ID NO: 53256
  Payload ID: 10597
  Gene Symbol: MUC4
  Gene Name: mucin 4, cell surface associated
  ENSP ID: ENSP00000486641
  MOD_RES (1)..(1): Any amino acid

SEQ ID NO: 53271 - protein, 6448 aa, Homo sapiens
  Payload ID: 10597
  Gene Symbol: MUC4
  Gene Name: mucin 4, cell surface associated
  ENSP ID: ENSP00000486657
MKGARWRRVPWVSLSCLCLCLLPHVVPGTTEDTLITGSKTPAPVTSTGSTTATLEGQSTAASSRTSNQDISASSQNHQTKSTETTSKAQTDTLTQMMTSTLFSSPSVHNVMETVTQETAPPDEMTTSFPSSVTNTLMMTSKTITMTTSTDSTLGNTEETSTAGTESSTPVTSAVSITAGQEGQSRTTSWRTSIQDTSASSQNHWTRSTQTTRESQTSTLTHRTTSTPSFSPSVHNVTGTVSQKTSPSGETATSSLCSVTNTSMMTSEKITVTTSTGSTLGNPGETSSVPVTGSLMPVTSAALVTVDPEGQSPVTFSRTSTQDTTAFSKNHQTQSVETTRVSQINTLNTLTPVTTSTVLSSPSGFNPSGTVSQETFPSGETTISSPSSVSNTFLVTSKVFRMPISRDSTLGNTEETSLSVSGTISAITSKVSTIWWSDTLSTALSPSSLPPKISTAFHTQQSEGAETTGRPHERSSFSPGVSQEIFTLHETTTWPSSFSSKGHTTWSQTELPSTSTGAATRLVTGNPSTGAAGTIPRVPSKVSAIGEPGEPTTYSSHSTTLPKTTGAGAQTQWTQETGTTGEALLSSPSYSVTQMIKTATSPSSSPMLDRHTSQQITTAPSTNHSTIHSTSTSPQESPAVSQRGHTQAPQTTQESQTTRSVSPMTDTKTVTTPGSSFTASGHSPSEIVPQDAPTISAATTFAPAPTGDGHTTQAPTTALQAAPSSHDATLGPSGGTSLSKTGALTLANSVVSTPGGPEGQWTSASASTSPDTAAAMTHTHQAESTEASGQTQTSEPASSGSRTTSAGTATPSSSGASGTTPSGSEGISTSGETTRFSSNPSRDSHTTQSTTELLSASASHGAIPVSTGMASSIVPGTFHPTLSEASTAGRPTGQSSPTSPSASPQETAAISRMAQTQRTRTSRGSDTISLASQATDTFSTVPPTPPSITSSGLTSPQTQTHTLSPSGSGKTFTTALISNATPLPVTYASSASTGHTTPLHVTDASSVSTGHATPLPVTDTSSESTGHATPLPVTSPSSVSTGHTTPLPVTDTSSESTGHVTPLPVTSLSSASTGDSTPLPVTDTSSASTGHVTPLPVTSLSSASTGDTTPLPVTDTSSASTGHATSLPVTDTSSVSTGHTTPLPVTDTSSASTGHATSLPVTDTSSVSTAHATPLPVTGLSSASTDDTTRLPVTDVSSASTGQAIPLPVTSPSSASTGDTTPLPVTDASSASTGDTTSLPVTIPSSASSGHTTSLPVTDASSVSTGHATSLLVTDASSVSTGDTTPLPVTDTNSASTGDTTPLHVTDASSVSTGHATSLPVTSLSSASTGDTTPLPVTSPSSASSGHTTPLPVTDASSVPTGHATSLPVTDASSVSTGHATPLPVTDASSVSTGHATPLPVTDTSSVSTGQATPLPVTSLSSASTGDTTPLPVTDTSSASTGQDTPLPVTSLSSVSTGDTTPLPVTSPSSASTGHATPLLVTDASSVSTGHATSLLVTDASSVSTGHATALHVTDASSLSTGDTTPLPVTSPSSASTGDTTPLPVTDTSSASTGHATSLPVTDTSSASTGHATPLPVTDTSSASTGQATPLPVTGPSSASTGHAIPLLVTDTSSASTGQATPLPVTSLSSASTGDTTPLPVTDASSVSTGHATSLPVTSLSSVSTGDTTPLPVTSPSSASSGHTTPLPVTDASSVSTGDTTPLPVTSPSSASSGHTTPLPVTSPSSASSGHTTPLPVTDASSASTGDTTPLPVTDTSSASTGHATHLPVTGLSSASTGDTTRLPVTNVSSASTGHATPLPVTSTSSASTGDTTPLPGTDTSSVSTGHTTPLLVTDASSVSTGDTTRLPVTSPSSASTGHTTPLPVTDTPSASTGDTTPLPVTNASSLSTRHTTSLHVTSPSSASTGHATSLPVTDTSSVSTGHATPLHVTSPSSASTGDTTPLPVTDTYSASTGQATPLPVTDTSSASTGDTTPLPVTDTSSASTGHATPLPVTNTSSVSTGHATPLHVTSPSSASTGHTTPLPVTDASSVSTGHATSLPVTDASSVFTGHATSLPVTIPSSASSGHTTPLPVTDASSVSTGHATSLPVTDASSVSTGHATPLPVTDASSVSTGHATPLPVTDTSSVSTGHATPLPLTSLSSVSTGDTTPLPVTDTSSASTGQATPLPVTSLSSVSTGDTTPLPVTDTSSASTGHATSLPVTDTSSASTGHATPLPDTDTSSASTGHATPLPVTDTSSASTGHATLLPVTDTSSASIGHATPLPVTDTSSISTGHATPLHVTSPSSASTGHATPLPVTDTSSASTGHANPLHVTSPSSASTGHATPLPVTDTSSASTGHATPLPVTSLSSVSTGDTTPLPVTSPSSASTGHTTPLPVTDTSSASTGQATALPVTSTSSASTGDTTPLPVTDTSSASTGQATPLPVTSLSSVSTGDTTPLPVTSPSSASTGHATPLLVTDASSASTGQATPLPVTDTSSAYTGDTTSLPVTDTSSSSTGDTTPLLVTETSSASTGHATPLHVTSPSSASTGDTTPVPVTDTSSVSTGHATPLPVTGLSSASTGDTTRLPVTDISSASTGQATPLPVTNTSSASTGHATPLPVTGLSSASTGDTTRLPVTDISSASTGQATPLPVTNTSSVSTGDTMPLPVTSPSSASTGHATPLPVTSTSSASTGHATPVPVTSTSSASTGHTTPLPVTDTSSASTGDTTPLPVTSPSSASTGHTTPLHVTIPSSASTGDTSTLPVTGASSASTGHATPLPVTDTSSVSTGHATPLPVTSFSSVSTGDTTPLPVTDTSSVSTGHATPLPVTSFSSVSTGDTTPLPVTDASSASTGHATPLPVTDTSSVSTGHATPLPLTSLSSVSTGDTTTLPVTDTSSVSTGHATPLPVTSFSSVSTGDTTPLPVTDASSASTGHATPLPVTDTSSVSTGHATPLPVTSLSSVSTGDTTPLPVTDASSASTGQATPLPVTSLSSVSTGDTTPLPVTIPSSASSGHTTSLPVTDTSSASTGQATPLPVTSLSSVSTGDTTPLLVTDASSVSTGHATPLPVTDTSSASTGDTTRLPVTDTSSASTGQATPLPVTSLSSVSTGDTTPLLVTNTSSVSRGHATSLPVTIPSSSSSGHTTPLPVTSTSSVSTGHVTPLPVTSTSSASTGHATSLPVTDTSSVSTGHATSLPVTDTSSVSTGHATPLPVTDASSVSTGHATPLPVTDASSASTGDTTPLPVTNTSSASTGQATPLPVTSLSSVSTGDTMPLPVTSPSSASTGHATPLPVTGLSSASTGDTTPLPVTDTSSASTGHVTPLPVTSLSSASTGDSTPLPVTDTSSASTGHVTPLPVTSLSSASTGDTTPLPVTDTSSASTGHATPLHVTDASSASTGQATLLPVTSLSSVSTGDTTPLPVTSPSSASTGHATPLLVTDTSSASTGHATPLPVTDASSVSTGHATSLPVTIRSSGSTGHTTPLPVTDTSSASTGQATSLLVTDTSSVSTGDTTPLPVTSTSSASTGHVTPLHVTSPSSASTGHATPLPVTSLSSASTGDTMPLPVTSPSSASTGDTTPLPVTDASSVSTGHTTPLPVTSPSSASTGHTTPLPVTDTTSASKGDTTPLPVTSPSSASTGHTTPLPVTDTSSASTGDTTPLPVTSPSSASTGHATPLPVTNASSLSTGHATPLHVTSPSSASTGHATPLPVTSTSSASTGHATSLPVTSTSSASTGHATPLPVTDNSSVSTGHATPLPVTGLSSATTDDTTRLPVTDVSSASTGQATPLPVTSLSSVSTGDTTPLPVTSPSSASTGHASPLLVTDASSASTGQATPLPVTDTSSVSTAHATPLPVTGLSSASTDDTTRLPVTDVSSASTGQAIPLPVTSPSSASTGDTTPLPVTDASSASTGDTTSLPVTIPSSASSGHTTSLPVTDASSVSTGHATSLLVTDASSVSTGDTTPLPVTDTNSASTGDTTPLHVTDASSVSTGHATSLPVTSLSSASTGDTTPLPVTSPSSASSGDTTPLPVTDTSSASTGHATHLPVTGLSSASTGDTTRLPVTNVSSASTGHATPLPVTSTSSASTGDTTPLPGTDTSSVSTGHTTPLLVTDASSVSTGDTTRLPVTSPSSASTGHTTPLHVTDASSVSTGHTTPLPVTDTSSASTGQATSLLVTDTSSVSTGDTTPLPVTSTSSASTGHVTPLHVTSPSSASTGHATPLPVTSLSSASTGDTTPLPVTDTSSVSTGHTTPLPVTSPSSASTGHTTPLPVTDTSSASKGDTTPLPVTSPSSASTGHTTPLPVTDTSSASTGDTTPLPVTNASSLSTGHATPLHVTSPSSASTGHATPLPVTSTSSASTGHATPLPVTSTSSASTGHATPLPVTDNSSVSTGHATPLPVTGLSSATTDDTTRLPVTDVSSASTGQATPLPVTSLSSVSTGDTTPLPVTSPSSASTGHASPLLVTDASSASTGQATPLPVTDTSSVSTAHATPLPVTGLSSASTDDTTRLPVTDVSSASTGQAIPLPVTSPSSASTGDTTPLPVTDASSASTGDTTSLPVTIPSSASSGHTTSLPVTDASSVSTGHATSLLVTDASSVSTGDTTPLPVTDTNSASTGDTTPLHVTDASSVSTGHATSLPVTSLSSASTGDTTPLPVTSPSSASSGHTTSLPVTDASSVSTGHATSLPVTIPSSASSGHTTPLPVTDASSVPTGHATSLPVTDASSVSTGHATPLPVTDASSVSTGHATPLPVTDTSSVSTGQATPLPVTSLSSASSTGDTTPLPVTDTSSASTGQDTPLPVTSLFSVSTGDTTPLPVTSPSSASTGHATHLLVTDASSVSTGHATSLLVTDASSVSTGHATALHVTDASSLSTGDTTPLPVTSPSSASTGDTTPLPVTDTSSVSTGHATSLPVTDTSSASTGHATSLPVTDTSSASTGQATPLPVTSPSSASTGHAIPLLVTDTSSASTGQATPLPVTSLSSASTGDTTPLPVTDASSVSTGHATSLPVTSLSSVSTGDTTPLPVTSPSSASTGHATPLHVTSPSSASTGHATPLPVTSLSSASTGDTTPLPVTSPSSASTGHATPLHVTDASSVSTGDTTPLPVTSPSSASSGHTTPLPVTDASSASTGDTTPLPVTDTSSASTGHATHLPVTGLSSASTGDTTRLPVTDVSSASTGHATPLPVTSTSSASTGDTTPLPGTDTSSVSTGHTTPLLVTDASSVSTGDTTRLPVTSPSSASTGHTTPLPVTDTPSASTGDTTPLPVTNASSLSTRHATSLHVTSPSSASTGHATPLPVTDTSAASTGHATPLPVTSTSSASTGDTTPLPVTDTSSASTGHATPLPVTNTSSVSTGHATPLHVTSPSSASTGHTTPLPVTDASSVSTGHATSLPVTDASSVSTGHATPLPVTDASSVSTGHATPLPLTSLSSVSTGDTTPLPVTDTSSASTGQATPLPVTSLSSVSTGDTTPLPVTDTSSASTGHATSLPVTDTSSASTGHATPLPVTDTSSISTGHATPLHVTSPSSASTGHATPLPVTDTSSASTGHATPLPVTSLSSVSTGDTTPLPVTSPSSASTGHATPLLVTDASSASTGQATPLPVTSLSSVSTGDTTPLPVTSPSSASTGHATSLPVTDTSSASTGDTTSLPVTDTSSAYTGDTTSLPVTDTSSSSTGDTTPLLVTETSSASTGDTTPVPVTDTSSVSTGHATPLPVTGLSSASTGDTTRLPVTDISSASTGQATPLPVTNTSSVSTGDTMPLPVTSPSSASTGHATPLPVTSTSSASTGHATPVPVTSTSLASTGHTTPLPVTSPSSASTGHTTPLPVTDTSSASTGDTTPLPVTNASSLSTGHTTPLHVTIPSSASTGDTSTLPVTGASSASTGHATPLPVTDTSSVSTGHATPLPVTSFSSVSTGDTTPLPVTDASSASTGHATPLPVTDTSSASTGDTTPLPVTDASSASTGQATPLPVTSLSSVSTGDTTPLPVTIPSSASSGHTTSLPVSDTSSASTGQATPLPVTSLSSVSTGDTTPLLVTDASSVSTGHATPLPVTDTSSASTGDTTRLPVTDTSSASTGQATPLPVTSLSSVSTGDTTPLLVTNTSSVSTGHATSLPVTIPSSSSSGHTTPLPVTSTSSVSTGHVTPLHVTSPSSSSTGQATPLPVTSTSSVSTGHVTPLHVTSPSSASTGHATPLPVTSTSSASTGHATPLPVTDASSVSTGHATPLPVTDTSSASTGDTTPLPVTDTSSASTGQATPLPVTSLSSVSTGHATPLAVSSATSASTVSSDSPLKMETSGMTTPSLKTDGGRRTATSPPPTTSQTIISTIPSTAMHTRSTAAPIPILPERGVSLFPYGADAGDLEFVRRTVDFTSPLFKPATGFPLGSSLRDSLYASQAGTLWPWWLRSGTMLTSPLVGGPHFIRATPTKPSSPRTGAGPMPCFSTRAVGCSGTWPSAQATRCSWASLVEMAISKTAH

SEQ ID NO: 53272 - protein, 4374 aa, Homo sapiens
  Payload ID: 10597
  Gene Symbol: MUC4
  Gene Name: mucin 4, cell surface associated
  ENSP ID: ENSP00000486683
  MOD_RES (1)..(1): Any amino acid
XTTEDTLITGSKTAAPVTSTGSTTATLEGQSTAASSRTSNQDISASSQNHQTKSTETTSKAQTDTLTQMMTSTLFSSPSVHNVMETAPPDEMTTSFPSSVTNTLMMTSKTITMTTSTDSTLGNTEETSTAGTESSTPVTSAVSITAGQEGQSRTTSWRTSIQDTSASSQNHWTRSTQTTRESQTSTLTHRTTSTPSFSPSVHNVTGTVSQKTSPSGETATSSLCSVTNTSMMTSEKITVTTSTGSTLGNPGETSSVPVTGSLMPVTSAALVTFDPEGQSPATFSRTSTQDTTAFSKNHQTQSVETTRVSQINTLNTLTPVTTSTVLSSPSGFNPSGTVSQETFPSGETTTSSPSSVSNTFLVTSKVFRMPTSRDSTLGNTEETSLSVSGTISAITSKVSTIWWSDTLSTALSPSSLPPKISTAFHTQQSEGAETTGRPHERSSFSPGVSQEIFTLHETTTWPSSFSSKGHTTWSQTELPSTSTGAATRLVTGNPSTGTAGTIPRVPSKVSAIGEPGEPTTYSSHSTTLPKTTGAGAQTQWTQETGTTGEALLSSPSYSVTQMIKTATSPSSSPMLDRHTSQQITTAPSTNHSTIHSTSTSPQESPAVSQRGHTQAPQTTQESQTTRSVSPMTDTKTVTTPGSSFTASGHSPSEIVPQDAPTISAATTFAPAPTGDGHTTQAPTTALQAAPSSHDATLGPSGGTSLSKTGALTLANSVVSTPGGPEGQWTSASASTSPDTAAAMTHTHQAESTEASGQTQTSEPASSGSRTTSAGTATPSSSGASGTTPSGSEGISTSGETTRFSSNPSRDSHTTQSTTELLSASASHGAIPVSTGMASSIVPGTFHPTLSEASTAGRPTGQSSPTSPSASPQETAAISRMAQTQRTRTSRGSDTISLASQATDTFSTVPPTPPSITSTGLTSPQTETHTLSPSGSGKTFTTALISNATPLPVTYASSASTGHTTPLHVTDASSVSTGHATPLPVTSPSSVSTGHTTPLPVTDTSSESTGHVTPLPVTSFSSASTGDSTPLPVTDTSSASTGHVTPLPVTSLSSASTGDTTPLPVTDTSSASTGHATSLPVTDTSSVSTGHTTPLPVTDTSSASTGHATSLPVTDTSSVSTGHTTPLHVTDASSASTGQATPLPVTSLSSVSTGDTTPLPVTSPSSASTGHATPLLVTDTSSASTGHATPLPVTDASSVSTDHATSLPVTIPSAASTGHTTPLPVTDTSSASTGQATSLLVTDTSSVSTGDTTPLPVTSTSSASTGHVTPLHVTSPSSASTGHATPLPVTSLSSASTGDTMPLPVTSPSSASTGDTTPLPVTDASSVSTGHTTPLHVTDASSASTGQATPLPVTSLSSVSTGDTTPLPVTSPSSASTGHATPLLVTDTSSASTGHATPLPVTDASSVSTDHATSLPVTIPSAASTGHTTPLPVTDTSSASTGQATSLLVTDTSSVSTGDTTPLPVTSTSSASTGHVTPLHVTSPSSASTGHATPLPVTSLSSASTGDTMPLPVTSPSSASTGDTTPLPVTDASSVSTGHTTPLPVTSPSSASTGHTTPLPVTDTSSASKGDTTPLPVTSPSSASTGHTTPLPVTDTSSASTGDTTPLPVTNASSLSTGHATPLHVTSPSSASTGHATPLPVTSTSSASTGHATPLPVTGLSSATTDDTTRLPVTDVSSASTGQATPLPVTSLSSVSTGDTTPLPVTSPSSASTGHASPLLVTDASSASTGQATPLPVTDTSSVSTAHATPLPVTGLSSASTDDTTRLPVTDVSSASTGQAIPLPVTSPSSASTGDTTPLPVTDASSASTGDTTSLPVTIPSSASSGHTTSLPVTDASSVSTGHATSLLVTDASSVSTGDTTPLPVTDTNSASTGDTTPLHVTDASSVSTGHATSLPVTSLSSASTGDTTPLPVTSPSSASSGHTTPLPVTDASSVPTGHATSLPVTDASSVSTGHATPLPVTDASSVSTGHATPLPVTDTSSVSTGQATPLPVTSLSSASTGDTTPLPVTDTSSASTGHAPHLPVTGLSSASTGDTTRLPVTNVSSASTGHATPLPVTSTSSASTGDTTPLPGTDTSSVSTGHTTPLLVTDASSVSTGDTTRLPVTSPSSASTGHTTPLHVTDASSVSTGHTTPLPVTDTSSASTGQATSLLVTDTSSVSTGDTTPLPVTSTSSASTGHVTPLHVTSPSSASTGHATPLPVTSLSSASTGDTTPLPVTDTSSVSTGHTTPLPVTSPSSASTGHTTPLPVTDTSSASKGDTTPLPVTSPSSASTGHTTPLPVTDTSSASTGDTTPLPVTNASSLSTGHATPLHVTSPSSASTGHATPLPVTSTSSASTGHATPLPVTSTSSASTGHATPLPVTDNSSVSTGHATPLPVTGLSSATTDDTTRLPVTDVSSASTGQATPLPVTSLSSVSTGDTTPLPVTSPSSASTGHASPLLVTDASSASTGQATPLPVTDTSSVSTAHATPLPVTGLSSASTDDTTRLPVTDVSSASTGQAIPLPVTSPSSASTGDTTPLPVTDASSASTGDTTSLPVTIPSSASSGHTTSLPVTDASSVSTGHATSLLVTDASSVSTGDTTPLPVTDTNSASTGDTTPLHVTDASSVSTGHATSLPVTSLSSASTGDTTPLPVTSPSSASSGHTTSLPVTDASSVSTGHATSLPVTIPSSASSGHTTPLPVTDASSVPTGHATSLPVTDASSVSTGHATPLPVTDASSVSTGHATPLPVTDTSSVSTGQATPLPVTSLSSASSTGDTTPLPVTDTSSASTGQDTPLPVTSLFSVSTGDTTPLPVTSPSSASTGHATHLLVTDASSVSTGHATSLLVTDASSVSTGHATALHVTDASSLSTGDTTPLPVTSPSSASTGDTTPLPVTDTSSVSTGHATSLPVTDTSSASTGHATSLPVTDTSSASTGQATPLPVTSPSSASTGHAIPLLVTDTSSASTGQATPLPVTSLSSASTGDTTPLPVTDASSVSTGHATSLPVTSLSSVSTGDTTPLPVTSPSSASTGHATPLHVTSPSSASTGHATPLPVTSLSSASTGDTTPLPVTSPSSASTGHATPLHVTDASSVSTGDTTPLPVTSPSSASSGHTTPLPVTDASSASTGDTTPLPVTDTSSASTGHATHLPVTGLSSASTGDTTRLPVTDVSSASTGHATPLPVTSTSSASTGDTTPLPGTDTSSVSTGHTTPLLVTDASSVSTGDTTRLPVTSPSSASTGHTTPLPVTDTPSASTGDTTPLPVTNASSLSTRHATSLHVTSPSSASTGHATPLPVTDTSAASTGHATPLPVTSTSSASTGDTTPLPVTDTSSASTGHATPLPVTNTSSVSTGHATPLHVTSPSSASTGHTTPLPVTDASSVSTGHATSLPVTDASSVSTGHATPLPVTDASSVSTGHATPLPLTSLSSVSTGDTTPLPVTDTSSASTGQATPLPVTSLSSVSTGDTTPLPVTDTSSASTGHATSLPVTDTSSASTGHATPLHVTSPSSASTGHATPLPVTDTSSASTGHATPLPVTSLSSVSTGDTTPLPVTSPSSASTGHATPLLVTDASSASTGQATPLPVTSLSSVSTGDTTPLPVTSPSSASTGHATSLPVTDTSSASTGDTTSLPVTDTSSAYTGDTTSLPVTDTSSSSTGDTTPLLVTETSSASTGDTTPVPVTDTSSVSTGHATPLPVTGLSSASTGDTTRLPVTDISSASTGQATPLPVTNTSSVSTGDTMPLPVTSPSSASTGHATPLPVTSTSSASTGHATPVPVTSTSSASTGHTTPLPVTSPSSASTGHTTPLPVTDTSSASTGDTTPLPVTNASSLSTGHTTPLHVTIPSSASTGDTSTLPVTGASSASTGHATPLPVTDTSSVSTGHATPLPVTSFSSVSTGDTTPLPVTDASSASTGHATPLPVTDTSSASTGDTTPLPVTDASSASTGQATPLPVTSLSSVSTGDTTPLPVTIPSSASSGHTTSLPVSDTSSASTGQATPLPVTSLSSVSTGDTTPLLVTDASSVSTGHATPLPVTDTSSASTGDTTRLPVTDTSSASTGQATPLPVTSLSSVSTGDTTPLLVTNTSSVSTGHATSLPVTIPSSSSSGHTTPLPVTSTSSVSTGHVTPLHVTSPSSSSTGQATPLPVTSTSSSSTGQATPLPVTSTSSASTGHATPLPVTDASSVSTGHATPLPVTDTSSASTGDTTPLPVTDTSSASTGQATPLPVTSLSSVSTGHATPLAVSSATSASTVSSDSPLKMETSGMTTPSLKTDGGRRTATSPPPTTSQTIISTIPSTAMHTRSTAAPIPILPERGVSLFPYGADAGDLEFVRRTVDFTSPLFKPATGFPLGSSLRDSLYASQAGTLWPWWLRSGTMLTSPLVGGPHFIRNTRRSMVNTAC

SEQ ID NO: 53273 - protein, 6464 aa, Homo sapiens
  Payload ID: 10597
  Gene Symbol: MUC4
  Gene Name: mucin 4, cell surface associated
  ENSP ID: ENSP00000486822
MKGARWRRVPWVSLSCLCLCLLPHVVPGTTEDTLITGSKTPAPVTSTGSTTATLEGQSTAASSRTSNQDISASSQNHQTKSTETTSKAQTDTLTQMMTSTLFSSPSVHNVMETVTQETAPPDEMTTSFPSSVTNTLMMTSKTITMTTSTDSTLGNTEETSTAGTESSTPVTSAVSITAGQEGQSRTTSWRTSIQDTSASSQNHWTRSTQTTRESQTSTLTHRTTSTPSFSPSVHNVTGTVSQKTSPSGETATSSLCSVTNTSMMTSEKITVTTSTGSTLGNPGETSSVPVTGSLMPVTSAALVTVDPEGQSPVTFSRTSTQDTTAFSKNHQTQSVETTRVSQINTLNTLTPVTTSTVLSSPSGFNPSGTVSQETFPSGETTISSPSSVSNTFLVTSKVFRMPISRDSTLGNTEETSLSVSGTISAITSKVSTIWWSDTLSTALSPSSLPPKISTAFHTQQSEGAETTGRPHERSSFSPGVSQEIFTLHETTTWPSSFSSKGHTTWSQTELPSTSTGAATRLVTGNPSTGAAGTIPRVPSKVSAIGEPGEPTTYSSHSTTLPKTTGAGAQTQWTQETGTTGEALLSSPSYSVTQMIKTATSPSSSPMLDRHTSQQITTAPSTNHSTIHSTSTSPQESPAVSQRGHTQAPQTTQESQTTRSVSPMTDTKTVTTPGSSFTASGHSPSEIVPQDAPTISAATTFAPAPTGDGHTTQAPTTALQAAPSSHDATLGPSGGTSLSKTGALTLANSVVSTPGGPEGQWTSASASTSPDTAAAMTHTHQAESTEASGQTQTSEPASSGSRTTSAGTATPSSSGASGTTPSGSEGISTSGETTRFSSNPSRDSHTTQSTTELLSASASHGAIPVSTGMASSIVPGTFHPTLSEASTAGRPTGQSSPTSPSASPQETAAISRMAQTQRTRTSRGSDTISLASQATDTFSTVPPTPPSITSSGLTSPQTQTHTLSPSGSGKTFTTALISNATPLPVTYASSASTGHTTPLHVTDASSVSTGHATPLPVTDTSSESTGHATPLPVTSPSSVSTGHTTPLPVTDTSSESTGHVTPLPVTSLSSASTGDSTPLPVTDTSSASTGHVTPLPVTSLSSASTGDTTPLPVTDTSSASTGHATSLPVTDTSSVSTGHTTPLPVTDTSSASTGHATSLPVTDTSSVSTAHATPLPVTGLSSASTDDTTRLPVTDVSSASTGQAIPLPVTSPSSASTGDTTPLPVTDASSASTGDTTSLPVTIPSSASSGHTTSLPVTDASSVSTGHATSLLVTDASSVSTGDTTPLPVTDTNSASTGDTTPLHVTDASSVSTGHATSLPVTSLSSASTGDTTPLPVTSPSSASSGHTTPLPVTDASSVPTGHATSLPVTDASSVSTGHATPLPVTDASSVSTGHATPLPVTDTSSVSTGQATPLPVTSLSSASTGDTTPLPVTDTSSASTGQDTPLPVTSLSSVSTGDTTPLPVTSPSSASTGHATPLLVTDASSVSTGHATSLLVTDASSVSTGHATALHVTDASSLSTGDTTPLPVTSPSSASTGDTTPLPVTDTSSASTGHATSLPVTDTSSASTGHATPLPVTDTSSASTGQATPLPVTGPSSASTGHAIPLLVTDTSSASTGQATPLPVTSLSSASTGDTTPLPVTDASSVSTGHATSLPVTSLSSVSTGDTTPLPVTSPSSASSGHTTPLPVTDASSVSTGDTTPLPVTSPSSASSGHTTPLPVTSPSSASSGHTTPLPVTDASSASTGDTTPLPVTDTSSASTGHATHLPVTGLSSASTGDTTRLPVTNVSSASTGHATPLPVTSTSSASTGDTTPLPGTDTSSVSTGHTTPLLVTDASSVSTGDTTRLPVTSPSSASTGHTTPLPVTDTPSASTGDTTPLPVTNASSLSTRHTTSLHVTSPSSASTGHATSLPVTDTSSVSTGHATPLHVTSPSSASTGDTTPLPVTDTYSASTGQATPLPVTDTSSASTGDTTPLPVTDTSSASTGHATPLPVTNTSSVSTGHATPLHVTSPSSASTGHTTPLPVTDASSVSTGHATSLPVTDASSVFTGHATSLPVTIPSSASSGHTTPLPVTDASSVSTGHATSLPVTDASSVSTGHATPLPVTDASSVSTGHATPLPVTDTSSVSTGHATPLPLTSLSSVSTGDTTPLPVTDTSSASTGQATPLPVTSLSSVSTGDTTPLPVTDTSSASTGHATSLPVTDTSSASTGHATPLPDTDTSSASTGHATPLPVTDTSSASTGHATLLPVTDTSSASIGHATPLPVTDTSSISTGHATPLHVTSPSSASTGHATPLPVTDTSSASTGHANPLHVTSPSSASTGHATPLPVTDTSSASTGHATPLPVTSLSSVSTGDTTPLPVTSPSSASTGHTTPLPVTDTSSASTGQATALPVTSTSSASTGDTTPLPVTDTSSASTGQATPLPVTSLSSVSTGDTTPLPVTSPSSASTGHATPLLVTDASSASTGQATPLPVTDTSSAYTGDTTSLPVTDTSSSSTGDTTPLLVTETSSASTGHATPLHVTSPSSASTGDTTPVPVTDTSSVSTGHATPLPVTGLSSASTGDTTRLPVTDISSASTGQATPLPVTNTSSASTGHATPLPVTGLSSASTGDTTRLPVTDISSASTGQATPLPVTNTSSVSTGDTMPLPVTSPSSASTGHATPLPVTSTSSASTGHATPVPVTSTSSASTGHTTPLPVTDTSSASTGDTTPLPVTSPSSASTGHTTPLHVTIPSSASTGDTSTLPVTGASSASTGHATPLPVTDTSSVSTGHATPLPVTSFSSVSTGDTTPLPVTDTSSVSTGHATPLPVTSFSSVSTGDTTPLPVTDASSASTGHATPLPVTDTSSVSTGHATPLPLTSLSSVSTGDTTTLPVTDTSSVSTGHATPLPVTSFSSVSTGDTTPLPVTDASSASTGHATPLPVTDTSSVSTGHATPLPVTSLSSVSTGDTTPLPVTDASSASTGQATPLPVTSLSSVSTGDTTPLPVTIPSSASSGHTTSLPVTDTSSASTGQATPLPVTSLSSVSTGDTTPLLVTDASSVSTGHATPLPVTDTSSASTGDTTRLPVTDTSSASTGQATPLPVTSLSSVSTGDTTPLLVTNTSSVSRGHATSLPVTIPSSSSSGHTTPLPVTSTSSVSTGHVTPLPVTSTSSASTGHATSLPVTDTSSVSTGHATSLPVTDTSSVSTGHATPLPVTDASSVSTGHATPLPVTDASSASTGDTTPLPVTNTSSASTGQATPLPVTSLSSVSTGDTMPLPVTSPSSASTGHATPLPVTGLSSASTGDTTPLPVTDTSSASTGHVTPLPVTSLSSASTGDSTPLPVTDTSSASTGHVTPLPVTSLSSASTGDTTPLPVTDTSSASTGHATPLHVTDASSASTGQATLLPVTSLSSVSTGDTTPLPVTSPSSASTGHATPLLVTDTSSASTGHATPLPVTDASSVSTGHATSLPVTIRSSGSTGHTTPLPVTDTSSASTGQATSLLVTDTSSVSTGDTTPLPVTSTSSASTGHVTPLHVTSPSSASTGHATPLPVTSLSSASTGDTMPLPVTSPSSASTGDTTPLPVTDASSVSTGHTTPLPVTSPSSASTGHTTPLPVTDTTSASKGDTTPLPVTSPSSASTGHTTPLPVTDTSSASTGDTTPLPVTSPSSASTGHATPLPVTNASSLSTGHATPLHVTSPSSASTGHATPLPVTSTSSASTGHATSLPVTSTSSASTGHATPLPVTDNSSVSTGHATPLPVTGLSSATTDDTTRLPVTDVSSASTGQATPLPVTSLSSVSTGDTTPLPVTSPSSASTGHASPLLVTDASSASTGQATPLPVTDTSSVSTAHATPLPVTGLSSASTDDTTRLPVTDVSSASTGQAIPLPVTSPSSASTGDTTPLPVTDASSASTGDTTSLPVTIPSSASSGHTTSLPVTDASSVSTGHATSLLVTDASSVSTGDTTPLPVTDTNSASTGDTTPLHVTDASSVSTGHATSLPVTSLSSASTGDTTPLPVTSPSSASSGDTTPLPVTDTSSASTGHATHLPVTGLSSASTGDTTRLPVTNVSSASTGHATPLPVTSTSSASTGDTTPLPGTDTSSVSTGHTTPLLVTDASSVSTGDTTRLPVTSPSSASTGHTTPLHVTDASSVSTGHTTPLPVTDTSSASTGQATSLLVTDTSSVSTGDTTPLPVTSTSSASTGHVTPLHVTSPSSASTGHATPLPVTSLSSASTGDTTPLPVTDTSSVSTGHTTPLPVTSPSSASTGHTTPLPVTDTSSASKGDTTPLPVTSPSSASTGHTTPLPVTDTSSASTGDTTPLPVTNASSLSTGHATPLHVTSPSSASTGHATPLPVTSTSSASTGHATPLPVTSTSSASTGHATPLPVTDNSSVSTGHATPLPVTGLSSATTDDTTRLPVTDVSSASTGQATPLPVTSLSSVSTGDTTPLPVTSPSSASTGHASPLLVTDASSASTGQATPLPVTDTSSVSTAHATPLPVTGLSSASTDDTTRLPVTDVSSASTGQAIPLPVTSPSSASTGDTTPLPVTDASSASTGDTTSLPVTIPSSASSGHTTSLPVTDASSVSTGHATSLLVTDASSVSTGDTTPLPVTDTNSASTGDTTPLHVTDASSVSTGHATSLPVTSLSSASTGDTTPLPVTSPSSASSGHTTSLPVTDASSVSTGHATSLPVTIPSSASSGHTTPLPVTDASSVPTGHATSLPVTDASSVSTGHATPLPVTDASSVSTGHATPLPVTDTSSVSTGQATPLPVTSLSSASSTGDTTPLPVTDTSSASTGQDTPLPVTSLFSVSTGDTTPLPVTSPSSASTGHATHLLVTDASSVSTGHATSLLVTDASSVSTGHATALHVTDASSLSTGDTTPLPVTSPSSASTGDTTPLPVTDTSSVSTGHATSLPVTDTSSASTGHATSLPVTDTSSASTGQATPLPVTSPSSASTGHAIPLLVTDTSSASTGQATPLPVTSLSSASTGDTTPLPVTDASSVSTGHATSLPVTSLSSVSTGDTTPLPVTSPSSASTGHATPLHVTSPSSASTGHATPLPVTSLSSASTGDTTPLPVTSPSSASTGHATPLHVTDASSVSTGDTTPLPVTSPSSASSGHTTPLPVTDASSASTGDTTPLPVTDTSSASTGHATHLPVTGLSSASTGDTTRLPVTDVSSASTGHATPLPVTSTSSASTGDTTPLPGTDTSSVSTGHTTPLLVTDASSVSTGDTTRLPVTSPSSASTGHTTPLPVTDTPSASTGDTTPLPVTNASSLSTRHATSLHVTSPSSASTGHATPLPVTDTSAASTGHATPLPVTSTSSASTGDTTPLPVTDTSSASTGHATPLPVTNTSSVSTGHATPLHVTSPSSASTGHTTPLPVTDASSVSTGHATSLPVTDASSVSTGHATPLPVTDASSVSTGHATPLPLTSLSSVSTGDTTPLPVTDTSSASTGQATPLPVTSLSSVSTGDTTPLPVTDTSSASTGHATSLPVTDTSSASTGHATPLPVTDTSSISTGHATPLHVTSPSSASTGHATPLPVTDTSSASTGHATPLPVTSLSSVSTGDTTPLPVTSPSSASTGHATPLLVTDASSASTGQATPLPVTSLSSVSTGDTTPLPVTSPSSASTGHATSLPVTDTSSASTGDTTSLPVTDTSSAYTGDTTSLPVTDTSSSSTGDTTPLLVTETSSASTGDTTPVPVTDTSSVSTGHATPLPVTGLSSASTGDTTRLPVTDISSASTGQATPLPVTNTSSVSTGDTMPLPVTSPSSASTGHATPLPVTSTSSASTGHATPVPVTSTSLASTGHTTPLPVTSPSSASTGHTTPLPVTDTSSASTGDTTPLPVTNASSLSTGHTTPLHVTIPSSASTGDTSTLPVTGASSASTGHATPLPVTDTSSVSTGHATPLPVTSFSSVSTGDTTPLPVTDASSASTGHATPLPVTDTSSASTGDTTPLPVTDASSASTGQATPLPVTSLSSVSTGDTTPLPVTIPSSASSGHTTSLPVSDTSSASTGQATPLPVTSLSSVSTGDTTPLLVTDASSVSTGHATPLPVTDTSSASTGDTTRLPVTDTSSASTGQATPLPVTSLSSVSTGDTTPLLVTNTSSVSTGHATSLPVTIPSSSSSGHTTPLPVTSTSSVSTGHVTPLHVTSPSSSSTGQATPLPVTSTSSVSTGHVTPLHVTSPSSASTGHATPLPVTSTSSASTGHATPLPVTDASSVSTGHATPLPVTDTSSASTGDTTPLPVTDTSSASTGQATPLPVTSLSSVSTGHATPLAVSSATSASTVSSDSPLKMETSGMTTPSLKTDGGRRTATSPPPTTSQTIISTIPSTAMHTRSTAAPIPILPERGVSLFPYGADAGDLEFVRRTVDFTSPLFKPATGFPLGSSLRDSLYFTDNGQIIFPESDYQIFSYPNPLPTGFTGRDPVALVAPFWDDADFSTGRGTTFYQSNTYQAILSTDGSRSYALFLYQSGGMQWDVAQRSVEMAISKTAH

SEQ ID NO: 53274 - protein, 137 aa, Homo sapiens; identical to SEQ ID NO: 53256
  Payload ID: 10597
  Gene Symbol: MUC4
  Gene Name: mucin 4, cell surface associated
  ENSP ID: ENSP00000486827
  MOD_RES (1)..(1): Any amino acid

SEQ ID NO: 53275 - protein, 4483 aa, Homo sapiens
  Payload ID: 10597
  Gene Symbol: MUC4
  Gene Name: mucin 4, cell surface associated
  ENSP ID: ENSP00000486851
  MOD_RES (1)..(1): Any amino acid
XTTEDTLITGSKTAAPVTSTGSTTATLEGQSTAASSRTSNQDISASSQNHQTKSTETTSKAQTDTLTQMMTSTLFSSPSVHNVMETAPPDEMTTSFPSSVTNTLMMTSKTITMTTSTDSTLGNTEETSTAGTESSTPVTSAVSITAGQEGQSRTTSWRTSIQDTSASSQNHWTRSTQTTRESQTSTLTHRTTSTPSFSPSVHNVTGTVSQKTSPSGETATSSLCSVTNTSMMTSEKITVTTSTGSTLGNPGETSSVPVTGSLMPVTSAALVTFDPEGQSPATFSRTSTQDTTAFSKNHQTQSVETTRVSQINTLNTLTPVTTSTVLSSPSGFNPSGTVSQETFPSGETTTSSPSSVSNTFLVTSKVFRMPTSRDSTLGNTEETSLSVSGTISAITSKVSTIWWSDTLSTALSPSSLPPKISTAFHTQQSEGAETTGRPHERSSFSPGVSQEIFTLHETTTWPSSFSSKGHTTWSQTELPSTSTGAATRLVTGNPSTGTAGTIPRVPSKVSAIGEPGEPTTYSSHSTTLPKTTGAGAQTQWTQETGTTGEALLSSPSYSVTQMIKTATSPSSSPMLDRHTSQQITTAPSTNHSTIHSTSTSPQESPAVSQRGHTQAPQTTQESQTTRSVSPMTDTKTVTTPGSSFTASGHSPSEIVPQDAPTISAATTFAPAPTGDGHTTQAPTTALQAAPSSHDATLGPSGGTSLSKTGALTLANSVVSTPGGPEGQWTSASASTSPDTAAAMTHTHQAESTEASGQTQTSEPASSGSRTTSAGTATPSSSGASGTTPSGSEGISTSGETTRFSSNPSRDSHTTQSTTELLSASASHGAIPVSTGMASSIVPGTFHPTLSEASTAGRPTGQSSPTSPSASPQETAAISRMAQTQRTRTSRGSDTISLASQATDTFSTVPPTPPSITSTGLTSPQTETHTLSPSGSGKTFTTALISNATPLPVTYASSASTGHTTPLHVTDASSVSTGHATPLPVTSPSSVSTGHTTPLPVTDTSSESTGHVTPLPVTSFSSASTGDSTPLPVTDTSSASTGHVTPLPVTSLSSASTGDTTPLPVTDTSSASTGHATSLPVTDTSSVSTGHTTPLPVTDTSSASTGHATSLPVTDTSSVSTGHTTPLHVTDASSASTGQATPLPVTSLSSVSTGDTTPLPVTSPSSASTGHATPLLVTDTSSASTGHATPLPVTDASSVSTDHATSLPVTIPSAASTGHTTPLPVTDTSSASTGQATSLLVTDTSSVSTGDTTPLPVTSTSSASTGHVTPLHVTSPSSASTGHATPLPVTSLSSASTGDTMPLPVTSPSSASTGDTTPLPVTDASSVSTGHTTPLHVTDASSASTGQATPLPVTSLSSVSTGDTTPLPVTSPSSASTGHATPLLVTDTSSASTGHATPLPVTDASSVSTDHATSLPVTIPSAASTGHTTPLPVTDTSSASTGQATSLLVTDTSSVSTGDTTPLPVTSTSSASTGHVTPLHVTSPSSASTGHATPLPVTSLSSASTGDTMPLPVTSPSSASTGDTTPLPVTDASSVSTGHTTPLPVTSPSSASTGHTTPLPVTDTSSASKGDTTPLPVTSPSSASTGHTTPLPVTDTSSASTGDTTPLPVTNASSLSTGHATPLHVTSPSSASTGHATPLPVTSTSSASTGHATPLPVTGLSSATTDDTTRLPVTDVSSASTGQATPLPVTSLSSVSTGDTTPLPVTSPSSASTGHASPLLVTDASSASTGQATPLPVTDTSSVSTAHATPLPVTGLSSASTDDTTRLPVTDVSSASTGQAIPLPVTSPSSASTGDTTPLPVTDASSASTGDTTSLPVTIPSSASSGHTTSLPVTDASSVSTGHATSLLVTDASSVSTGDTTPLPVTDTNSASTGDTTPLHVTDASSVSTGHATSLPVTSLSSASTGDTTPLPVTSPSSASSGHTTPLPVTDASSVPTGHATSLPVTDASSVSTGHATPLPVTDASSVSTGHATPLPVTDTSSVSTGQATPLPVTSLSSASTGDTTPLPVTDTSSASTGQDTPLPVTSLSSVSTGDTTPLPVTNPSSASTGHATPLLVTDASSISTGHATSLLVTDASSVSTGHATALHDTDASSLSTGDTTPLPVTSPSSTSTGDTTPLPVTETSSVSTGHATSLPVTDTSSASTGHATSLPVTDTSSASTGHATPLPVTDTSSASTGQATPLPVTSPSSASTGHAIPLLVTDTSSASTGQATPLPVTSLSSASTGDTTPLPVTDASSVSTGHATSLPVTSLSSVSTGDTTPLPVTSPSSASTGHATPLHVTDASSASTGHATPLPVTSLSSASTGDTTPLPVTSPSSASTGHATPLHVTDASSVSTGDTTPLPVTSSSSASSGHTTPLPVTDASSASTGDTTPLPVTDTSSASTGHATHLPVTGLSSASTGDTTRLPVTNVSSASTGHATPLPVTSTSSASTGDTTPLPGTDTSSVSTGHTTPLLVTDASSVSTGDTTRLPVTSPSSASTGHTTPLPVTDTPSASTGDTTPLPVTNASSLSTRHATSLHVTSPSSASTGHATSLPVTDTSAASTGHATPLPVTSTSSASTGDTTPLPVTDTYSASTGQATPLPVTSLSSVSTGDTTPLPVTSPSSASTGHATPLLVTDASSASTGQATPLPVTSLSSVSTGDTTPLPVTSPSSASTGHATSLPVTDTSSASTGDTTSLPVTDTSSAYTGDTTSLPVTDTSSSSTGDTTPLLVTETSSVSTGDTTPLPVTDTSSASTGHATPLPVTNTSSVSTGHATPLHVTSPSSASTGHTTPLPVTDASSVSTGHATSLPVTDASSVFTGHATSLPVTIPSSASSGHTTPLPVTDASSVSTGHATSLPVTDASSVSTGHATPLPVTDASSVSTGHATPLPLTSLSSVSTGDTTPLPVTDTSSASTGQATPLPVTSLSSVSTGDTTPLPVTDTSSASTGHATSLPVTDTSSASTGHATPLPDTDTSSASTGHATLLPVTDTSSASIGHATSLPVTDTSSISTGHATPLHVTSPSSASTGHATPLPVTDTSSASTGHANPLHVTSPSSASTGHATPLPVTDTSSASTGHATPLPVTSLSSVSTGDTTPLPVTSPSSASTGHTTPLPVTDTSSASTGQATALPVTSTSSASTGDTTPLPVTDTSSASTGQATPLPVTSLSSVSTGDTTPLPVTSPSSASTGHATPLLVTDASSASTGQATPLPVTSLSSVSTGDTTPLPVTSPSSASTGHATSLPVTDTSSASTGDTTSLPVTDTSSAYTGDTTSLPVTDTSSSSTGDTTPLLVTETSSVSTGHATPLLVTDASSASTGHATPLHVTSPSSASTGDTTPVPVTDTSSVSTGHATPLPVTGLSSASTGDTTRLPVTDISSASTGQATPLPVTNTSSVSTGDTMPLPVTSPSSASTGHATPLPVTSTSSASTGHATPVPVTSTSSASTGHTTPLPVTDTSSASTGDTTPLPVTSPSSASTGHTTPLHVTIPSSASTGDTSTLPVTGASSASTGHATPLPVTDTSSVSTGHATPLPVTSLSSVSTGDTTPLPVTDASSASTGQATPLPVTSLSSVSTGDTTPLLVTDASSVSTGHATPLPVTDTSSASTGDTTRLPVTDTSSASTGQATPLPVTSLSSVSTGDTTPLLVTDASSVSTGHATPLPVTDTSSASTGDTTRLPVTDTSSASTGQATPLPVTIPSSSSSGHTTPLPVTSTSSVSTGHVTPLHVTSPSSASTGHVTPLPVTSTSSASTGHATPLLVTDASSVSTGHATPLPVTDASSASTGDTTPLPVTDTSSASTGQATPLPVTSLSSVSTGDTTPLPVTDASSASTGHATPLPVTIPSSVSTGDTMPLPVTSPSSASTGHATPLPVTGLSSASTGDTTPLPVTDTSSASTRHATPLPVTDTSSASTDDTTRLPVTDVSSASTGHATPLPVTSTSSASTGDTTPLPVTDTSSVSTGHATSLPVTSRSSASTGHATPLPVTDTSSVSTGHATPLPVTSTSSVSTGHATPLPVTSPSSASTGHATPVPVTSTSSASTGDTTPLPVTNASSLSTGHATPLHVTSPSSASRGDTSTLPVTDASSASTGHATPLPLTSLSSVSTGDTTPLPVTDTSSASTGQATPLPVTSLSSVSTGDTTPLPVTIPSSASSGHTTSLPVTDASSVSTGHGTPLPVTSTSSASTGDTTPLPVTDTSSASTGHATPLPVTDTSSASTGHATPLPVTSLSSVSTGHATPLAVSSATSASTVSSDSPLKMETPGMTTPSLKTDGGRRTATSPPPTTSQTIISTIPSTAMHTRSTAAPIPILPERGVSLFPYGAGAGDLEFVRRTVDFTSPLFKPATGFPLGSSLRDSLYFTDNGQIIFPESDYQIFSYPNPLPTGFTGRDPVALVAPFWDDADFSTGRGTTFYQEYETFYGEHSLLVQQAESWIRKMTNNGGYKARWALKVTWVNAHAYPAQWTLGSNTYQAILSTDGSRSYALFLYQSGGMQWDVAQRSVEMAISKTAH

SEQ ID NO: 53276 - protein, 1149 aa, Homo sapiens; identical to SEQ ID NO: 53213
  Payload ID: 10597
  Gene Symbol: MUC4
  Gene Name: mucin 4, cell surface associated
  ENSP ID: ENSP00000486902
  MOD_RES (1)..(1): Any amino acid

SEQ ID NO: 53277 - protein, 137 aa, Homo sapiens; identical to SEQ ID NO: 53256
  Payload ID: 10597
  Gene Symbol: MUC4
  Gene Name: mucin 4, cell surface associated
  ENSP ID: ENSP00000486904
  MOD_RES (1)..(1): Any amino acid

SEQ ID NO: 53278 - protein, 144 aa, Homo sapiens; identical to SEQ ID NO: 53196
  Payload ID: 10597
  Gene Symbol: MUC4
  Gene Name: mucin 4, cell surface associated
  ENSP ID: ENSP00000486906
  MOD_RES (1)..(1): Any amino acid

SEQ ID NO: 53279 - protein, 4403 aa, Homo sapiens; identical to SEQ ID NO: 53236
  Payload ID: 10597
  Gene Symbol: MUC4
  Gene Name: mucin 4, cell surface associated
  ENSP ID: ENSP00000486911
  MOD_RES (1)..(1): Any amino acid

SEQ ID NO: 53280 - protein, 144 aa, Homo sapiens; identical to SEQ ID NO: 53196
  Payload ID: 10597
  Gene Symbol: MUC4
  Gene Name: mucin 4, cell surface associated
  ENSP ID: ENSP00000486925
  MOD_RES (1)..(1): Any amino acid

SEQ ID NO: 53281 - protein, 5043 aa, Homo sapiens; identical to SEQ ID NO: 53250
  Payload ID: 10597
  Gene Symbol: MUC4
  Gene Name: mucin 4, cell surface associated
  ENSP ID: ENSP00000486965
  MOD_RES (1)..(1): Any amino acid

SEQ ID NO: 53282 - protein, 4483 aa, Homo sapiens; identical to SEQ ID NO: 53275
  Payload ID: 10597
  Gene Symbol: MUC4
  Gene Name: mucin 4, cell surface associated
  ENSP ID: ENSP00000486982
  MOD_RES (1)..(1): Any amino acid

SEQ ID NO: 53283 - protein, 6406 aa, Homo sapiens
  Payload ID: 10597
  Gene Symbol: MUC4
  Gene Name: mucin 4, cell surface associated
  ENSP ID: ENSP00000487020
MKGARWRRVPWVSLSCLCLCLLPHVVPGTTEDTLITGSKTPAPVTSTGSTTATLEGQSTAASSRTSNQDISASSQNHQTKSTETTSKAQTDTLTQMMTSTLFSSPSVHNVMETVTQETAPPDEMTTSFPSSVTNTLMMTSKTITMTTSTDSTLGNTEETSTAGTESSTPVTSAVSITAGQEGQSRTTSWRTSIQDTSASSQNHWTRSTQTTRESQTSTLTHRTTSTPSFSPSVHNVTGTVSQKTSPSGETATSSLCSVTNTSMMTSEKITVTTSTGSTLGNPGETSSVPVTGSLMPVTSAALVTVDPEGQSPVTFSRTSTQDTTAFSKNHQTQSVETTRVSQINTLNTLTPVTTSTVLSSPSGFNPSGTVSQETFPSGETTISSPSSVSNTFLVTSKVFRMPISRDSTLGNTEETSLSVSGTISAITSKVSTIWWSDTLSTALSPSSLPPKISTAFHTQQSEGAETTGRPHERSSFSPGVSQEIFTLHETTTWPSSFSSKGHTTWSQTELPSTSTGAATRLVTGNPSTGAAGTIPRVPSKVSAIGEPGEPTTYSSHSTTLPKTTGAGAQTQWTQETGTTGEALLSSPSYSVTQMIKTATSPSSSPMLDRHTSQQITTAPSTNHSTIHSTSTSPQESPAVSQRGHTQAPQTTQESQTTRSVSPMTDTKTVTTPGSSFTASGHSPSEIVPQDAPTISAATTFAPAPTGDGHTTQAPTTALQAAPSSHDATLGPSGGTSLSKTGALTLANSVVSTPGGPEGQWTSASASTSPDTAAAMTHTHQAESTEASGQTQTSEPASSGSRTTSAGTATPSSSGASGTTPSGSEGISTSGETTRFSSNPSRDSHTTQSTTELLSASASHGAIPVSTGMASSIVPGTFHPTLSEASTAGRPTGQSSPTSPSASPQETAAISRMAQTQRTRTSRGSDTISLASQATDTFSTVPPTPPSITSSGLTSPQTQTHTLSPSGSGKTFTTALISNATPLPVTYASSASTGHTTPLHVTDASSVSTGHATPLPVTDTSSESTGHATPLPVTSPSSVSTGHTTPLPVTDTSSESTGHVTPLPVTSLSSASTGDSTPLPVTDTSSASTGHVTPLPVTSLSSASTGDTTPLPVTDTSSASTGHATSLPVTDTSSVSTGHTTPLPVTDTSSASTGHATSLPVTDTSSVSTAHATPLPVTGLSSASTDDTTRLPVTDVSSASTGQAIPLPVTSPSSASTGDTTPLPVTDASSASTGDTTSLPVTIPSSASSGHTTSLPVTDASSVSTGHATSLLVTDASSVSTGDTTPLPVTDTNSASTGDTTPLHVTDASSVSTGHATSLPVTSLSSASTGDTTPLPVTSPSSASSGHTTPLPVTDASSVPTGHATSLPVTDASSVSTGHATPLPVTDASSVSTGHATPLPVTDTSSVSTGQATPLPVTSLSSASTGDTTPLPVTDTSSASTGQDTPLPVTSLSSVSTGDTTPLPVTSPSSASTGHATPLLVTDASSVSTGHATSLLVTDASSVSTGHATALHVTDASSLSTGDTTPLPVTSPSSASTGDTTPLPVTDTSSASTGHATSLPVTDTSSASTGHATPLPVTDTSSASTGQATPLPVTGPSSASTGHAIPLLVTDTSSASTGQATPLPVTSLSSASTGDTTPLPVTDASSVSTGHATSLPVTSLSSVSTGDTTPLPVTSPSSASSGHTTPLPVTDASSVSTGDTTPLPVTSPSSASSGHTTPLPVTSPSSASSGHTTPLPVTDASSASTGDTTPLPVTDTSSASTGHATHLPVTGLSSASTGDTTRLPVTNVSSASTGHATPLPVTSTSSASTGDTTPLPGTDTSSVSTGHTTPLLVTDASSVSTGDTTRLPVTSPSSASTGHTTPLPVTDTPSASTGDTTPLPVTNASSLSTRHTTSLHVTSPSSASTGHATSLPVTDTSSVSTGHATPLHVTSPSSASTGDTTPLPVTDTYSASTGQATPLPVTDTSSASTGDTTPLPVTDTSSASTGHATPLPVTNTSSVSTGHATPLHVTSPSSASTGHTTPLPVTDASSVSTGHATSLPVTDASSVFTGHATSLPVTIPSSASSGHTTPLPVTDASSVSTGHATSLPVTDASSVSTGHATPLPVTDASSVSTGHATPLPVTDTSSVSTGHATPLPLTSLSSVSTGDTTPLPVTDTSSASTGQATPLPVTSLSSVSTGDTTPLPVTDTSSASTGHATSLPVTDTSSASTGHATPLPDTDTSSASTGHATPLPVTDTSSASTGHATLLPVTDTSSASIGHATPLPVTDTSSISTGHATPLHVTSPSSASTGHATPLPVTDTSSASTGHANPLHVTSPSSASTGHATPLPVTDTSSASTGHATPLPVTSLSSVSTGDTTPLPVTSPSSASTGHTTPLPVTDTSSASTGQATALPVTSTSSASTGDTTPLPVTDTSSASTGQATPLPVTSLSSVSTGDTTPLPVTSPSSASTGHATPLLVTDASSASTGQATPLPVTDTSSAYTGDTTSLPVTDTSSSSTGDTTPLLVTETSSASTGHATPLHVTSPSSASTGDTTPVPVTDTSSVSTGHATPLPVTGLSSASTGDTTRLPVTDISSASTGQATPLPVTNTSSASTGHATPLPVTGLSSASTGDTTRLPVTDISSASTGQATPLPVTNTSSVSTGDTMPLPVTSPSSASTGHATPLPVTSTSSASTGHATPVPVTSTSSASTGHTTPLPVTDTSSASTGDTTPLPVTSPSSASTGHTTPLHVTIPSSASTGDTSTLPVTGASSASTGHATPLPVTDTSSVSTGHATPLPVTSFSSVSTGDTTPLPVTDTSSVSTGHATPLPVTSFSSVSTGDTTPLPVTDASSASTGHATPLPVTDTSSVSTGHATPLPLTSLSSVSTGDTTTLPVTDTSSVSTGHATPLPVTSFSSVSTGDTTPLPVTDASSASTGHATPLPVTDTSSVSTGHATPLPVTSLSSVSTGDTTPLPVTDASSASTGQATPLPVTSLSSVSTGDTTPLPVTIPSSASSGHTTSLPVTDTSSASTGQATPLPVTSLSSVSTGDTTPLLVTDASSVSTGHATPLPVTDTSSASTGDTTRLPVTDTSSASTGQATPLPVTSLSSVSTGDTTPLLVTNTSSVSRGHATSLPVTIPSSSSSGHTTPLPVTSTSSVSTGHVTPLPVTSTSSASTGHATSLPVTDTSSVSTGHATSLPVTDTSSVSTGHATPLPVTDASSVSTGHATPLPVTDASSASTGDTTPLPVTNTSSASTGQATPLPVTSLSSVSTGDTMPLPVTSPSSASTGHATPLPVTGLSSASTGDTTPLPVTDTSSASTGHVTPLPVTSLSSASTGDSTPLPVTDTSSASTGHVTPLPVTSLSSASTGDTTPLPVTDTSSASTGHATPLHVTDASSASTGQATLLPVTSLSSVSTGDTTPLPVTSPSSASTGHATPLLVTDTSSASTGHATPLPVTDASSVSTGHATSLPVTIRSSGSTGHTTPLPVTDTSSASTGQATSLLVTDTSSVSTGDTTPLPVTSTSSASTGHVTPLHVTSPSSASTGHATPLPVTSLSSASTGDTMPLPVTSPSSASTGDTTPLPVTDASSVSTGHTTPLPVTSPSSASTGHTTPLPVTDTTSASKGDTTPLPVTSPSSASTGHTTPLPVTDTSSASTGDTTPLPVTSPSSASTGHATPLPVTNASSLSTGHATPLHVTSPSSASTGHATPLPVTSTSSASTGHATSLPVTSTSSASTGHATPLPVTDNSSVSTGHATPLPVTGLSSATTDDTTRLPVTDVSSASTGQATPLPVTSLSSVSTGDTTPLPVTSPSSASTGHASPLLVTDASSASTGQATPLPVTDTSSVSTAHATPLPVTGLSSASTDDTTRLPVTDVSSASTGQAIPLPVTSPSSASTGDTTPLPVTDASSASTGDTTSLPVTIPSSASSGHTTSLPVTDASSVSTGHATSLLVTDASSVSTGDTTPLPVTDTNSASTGDTTPLHVTDASSVSTGHATSLPVTSLSSASTGDTTPLPVTSPSSASSGDTTPLPVTDTSSASTGHATHLPVTGLSSASTGDTTRLPVTNVSSASTGHATPLPVTSTSSASTGDTTPLPGTDTSSVSTGHTTPLLVTDASSVSTGDTTRLPVTSPSSASTGHTTPLHVTDASSVSTGHTTPLPVTDTSSASTGQATSLLVTDTSSVSTGDTTPLPVTSTSSASTGHVTPLHVTSPSSASTGHATPLPVTSLSSASTGDTTPLPVTDTSSVSTGHTTPLPVTSPSSASTGHTTPLPVTDTSSASKGDTTPLPVTSPSSASTGHTTPLPVTDTSSASTGDTTPLPVTNASSLSTGHATPLHVTSPSSASTGHATPLPVTSTSSASTGHATPLPVTSTSSASTGHATPLPVTDNSSVSTGHATPLPVTGLSSATTDDTTRLPVTDVSSASTGQATPLPVTSLSSVSTGDTTPLPVTSPSSASTGHASPLLVTDASSASTGQATPLPVTDTSSVSTAHATPLPVTGLSSASTDDTTRLPVTDVSSASTGQAIPLPVTSPSSASTGDTTPLPVTDASSASTGDTTSLPVTIPSSASSGHTTSLPVTDASSVSTGHATSLLVTDASSVSTGDTTPLPVTDTNSASTGDTTPLHVTDASSVSTGHATSLPVTSLSSASTGDTTPLPVTSPSSASSGHTTSLPVTDASSVSTGHATSLPVTIPSSASSGHTTPLPVTDASSVPTGHATSLPVTDASSVSTGHATPLPVTDASSVSTGHATPLPVTDTSSVSTGQATPLPVTSLSSASSTGDTTPLPVTDTSSASTGQDTPLPVTSLFSVSTGDTTPLPVTSPSSASTGHATHLLVTDASSVSTGHATSLLVTDASSVSTGHATALHVTDASSLSTGDTTPLPVTSPSSASTGDTTPLPVTDTSSVSTGHATSLPVTDTSSASTGHATSLPVTDTSSASTGQATPLPVTSPSSASTGHAIPLLVTDTSSASTGQATPLPVTSLSSASTGDTTPLPVTDASSVSTGHATSLPVTSLSSVSTGDTTPLPVTSPSSASTGHATPLHVTSPSSASTGHATPLPVTSLSSASTGDTTPLPVTSPSSASTGHATPLHVTDASSVSTGDTTPLPVTSPSSASSGHTTPLPVTDASSASTGDTTPLPVTDTSSASTGHATHLPVTGLSSASTGDTTRLPVTDVSSASTGHATPLPVTSTSSASTGDTTPLPGTDTSSVSTGHTTPLLVTDASSVSTGDTTRLPVTSPSSASTGHTTPLPVTDTPSASTGDTTPLPVTNASSLSTRHATSLHVTSPSSASTGHATPLPVTDTSAASTGHATPLPVTSTSSASTGDTTPLPVTDTSSASTGHATPLPVTNTSSVSTGHATPLHVTSPSSASTGHTTPLPVTDASSVSTGHATSLPVTDASSVSTGHATPLPVTDASSVSTGHATPLPLTSLSSVSTGDTTPLPVTDTSSASTGQATPLPVTSLSSVSTGDTTPLPVTDTSSASTGHATSLPVTDTSSASTGHATPLPVTDTSSISTGHATPLHVTSPSSASTGHATPLPVTDTSSASTGHATPLPVTSLSSVSTGDTTPLPVTSPSSASTGHATPLLVTDASSASTGQATPLPVTSLSSVSTGDTTPLPVTSPSSASTGHATSLPVTDTSSASTGDTTSLPVTDTSSAYTGDTTSLPVTDTSSSSTGDTTPLLVTETSSASTGDTTPVPVTDTSSVSTGHATPLPVTGLSSASTGDTTRLPVTDISSASTGQATPLPVTNTSSVSTGDTMPLPVTSPSSASTGHATPLPVTSTSSASTGHATPVPVTSTSLASTGHTTPLPVTSPSSASTGHTTPLPVTDTSSASTGDTTPLPVTNASSLSTGHTTPLHVTIPSSASTGDTSTLPVTGASSASTGHATPLPVTDTSSVSTGHATPLPVTSFSSVSTGDTTPLPVTDASSASTGHATPLPVTDTSSASTGDTTPLPVTDASSASTGQATPLPVTSLSSVSTGDTTPLPVTIPSSASSGHTTSLPVSDTSSASTGQATPLPVTSLSSVSTGDTTPLLVTDASSVSTGHATPLPVTDTSSASTGDTTRLPVTDTSSASTGQATPLPVTSLSSVSTGDTTPLLVTNTSSVSTGHATSLPVTIPSSSSSGHTTPLPVTSTSSVSTGHVTPLHVTSPSSSSTGQATPLPVTSTSSVSTGHVTPLHVTSPSSASTGHATPLPVTSTSSASTGHATPLPVTDASSVSTGHATPLPVTDTSSASTGDTTPLPVTDTSSASTGQATPLPVTSLSSVSTGHATPLAVSSATSASTVSSDSPLKMETSGMTTPSLKTDGGRRTATSPPPTTSQTIISTIPSTAMHTRSTAAPIPILPERGVSLFPYGADAGDLEFVRRTVDFTSPLFKPATGFPLGSSLRDSLYASQAGTLWPWWLRSGTMLTSPLVGGPHFIRNTRRSMVNTAC

SEQ ID NO: 53284 - protein, 5043 aa, Homo sapiens; identical to SEQ ID NO: 53250
  Payload ID: 10597
  Gene Symbol: MUC4
  Gene Name: mucin 4, cell surface associated
  ENSP ID: ENSP00000487046
  MOD_RES (1)..(1): Any amino acid

SEQ ID NO: 53285 - protein, 164 aa, Homo sapiens; identical to SEQ ID NO: 53198
  Payload ID: 10597
  Gene Symbol: MUC4
  Gene Name: mucin 4, cell surface associated
  ENSP ID: ENSP00000487052
  MOD_RES (1)..(1): Any amino acid

SEQ ID NO: 53286 - protein, 4373 aa, Homo sapiens; identical to SEQ ID NO: 53233
  Payload ID: 10597
  Gene Symbol: MUC4
  Gene Name: mucin 4, cell surface associated
  ENSP ID: ENSP00000487060
  MOD_RES (1)..(1): Any amino acid

SEQ ID NO: 53287 - protein, 137 aa, Homo sapiens; identical to SEQ ID NO: 53256
  Payload ID: 10597
  Gene Symbol: MUC4
  Gene Name: mucin 4, cell surface associated
  ENSP ID: ENSP00000487069
  MOD_RES (1)..(1): Any amino acid

SEQ ID NO: 53288 - protein, 1125 aa, Homo sapiens
  Payload ID: 10597
  Gene Symbol: MUC4
  Gene Name: mucin 4, cell surface associated
  ENSP ID: ENSP00000487084
MKGARWRRVPWVSLSCLCLCLLPHVVPGVSLFPYGADAGDLEFVRRTVDFTSPLFKPATGFPLGSSLRDSLYFTDNGQIIFPESDYQIFSYPNPLPTGFTGRDPVALVAPFWDDADFSTGRGTTFYQEYETFYGEHSLLVQQAESWIRKMTNNGGYKARWALKVTWVNAHAYPAQWTLGSNTYQAILSTDGSRSYALFLYQSGGMQWDVAQRSGNPVLMGFSSGDGYFENSPLMSQPVWERYRPDRFLNSNSGLQGLQFYRLHREERPNYRLECLQWLKSQPRWPSWGWNQVSCPCSWQQGRRDLRFQPVSIGRWGLGSRQLCSFTSWRGGVCCSYGPWGEFREGWHVQRPWQLAQELEPQSWCCRWNDKPYLCALYQQRRPHVGCATYRPPQPAWMFGDPHITTLDGVSYTFNGLGDFLLVGAQDGNSSFLLQGRTAQTGSAQATNFIAFAAQYRSSSLGPVTVQWLLEPHDAIRVLLDNQTVTFQPDHEDGGGQETFNATGVLLSRNGSEVSASFDGWATVSVIALSNILHASASLPPEYQNRTEGLLGVWNNNPEDDFRMPNGSTIPPGSPEEMLFHFGMTWQINGTGLLGKRNDQLPSNFTPVFYSQLQKNSSWAEHLISNCDGDSSCIYDTLALRNASIGLHTREVSKNYEQANATLNQYPPSINGGRVIEAYKGQTTLIQYTSNAEDANFTLRDSCTDLELFENGTLLWTPKSLEPFTLEILARSAKIGLASALQPRTVVCHCNAESQCLYNQTSRVGNSSLEVAGCKCDGGTFGRYCEGSEDACEEPCFPSVHCVPGKGCEACPPNLTGDGRHCAALGSSFLCQNQSCPVNYCYNQGHCYISQTLGCQPMCTCPPAFTDSRCFLAGNNFSPTVNLELPLRVIQLLLSEEENASMAEVNASVAYRLGTLDMRAFLRNSQVERIDSAAPASGSPIQHWMVISEFQYRPRGPVIDFLNNQLLAAVVEAFLYHVPRRSEEPRNDVVFQPISGEDVRDVTALNVSTLKAYFRCDGYKGYDLVYSPQSGFTCVSPCSRGYCDHGGQCQHLPSGPRCSCVSFSIYTAWGEHCEHLSMKLDAFFGIFFGALGGLLLLGVGTFVVLRFWGCSGARFSYFLNSAEALP

SEQ ID NO: 53289 - protein, 174 aa, Homo sapiens; identical to SEQ ID NO: 53194
  Payload ID: 10597
  Gene Symbol: MUC4
  Gene Name: mucin 4, cell surface associated
  ENSP ID: ENSP00000487090
  MOD_RES (1)..(1): Any amino acid

SEQ ID NO: 53290 - protein, 4417 aa, Homo sapiens; identical to SEQ ID NO: 53244
  Payload ID: 10597
  Gene Symbol: MUC4
  Gene Name: mucin 4, cell surface associated
  ENSP ID: ENSP00000487096
  MOD_RES (1)..(1): Any amino acid

SEQ ID NO: 53291 - protein, 4373 aa, Homo sapiens; identical to SEQ ID NO: 53233
  Payload ID: 10597
  Gene Symbol: MUC4
  Gene Name: mucin 4, cell surface associated
  ENSP ID: ENSP00000487123
  MOD_RES (1)..(1): Any amino acid

SEQ ID NO: 53292 - protein, 144 aa, Homo sapiens; identical to SEQ ID NO: 53196
  Payload ID: 10597
  Gene Symbol: MUC4
  Gene Name: mucin 4, cell surface associated
  ENSP ID: ENSP00000487126
  MOD_RES (1)..(1): Any amino acid

SEQ ID NO: 53293 - protein, 4415 aa, Homo sapiens; identical to SEQ ID NO: 53243
  Payload ID: 10597
  Gene Symbol: MUC4
  Gene Name: mucin 4, cell surface associated
  ENSP ID: ENSP00000487131
  MOD_RES (1)..(1): Any amino acid

SEQ ID NO: 53294 - protein, 6450 aa, Homo sapiens
  Payload ID: 10597
  Gene Symbol: MUC4
  Gene Name: mucin 4, cell surface associated
  ENSP ID: ENSP00000487180
MKGARWRRVPWVSLSCLCLCLLPHVVPGTTEDTLITGSKTPAPVTSTGSTTATLEGQSTAASSRTSNQDISASSQNHQTKSTETTSKAQTDTLTQMMTSTLFSSPSVHNVMETVTQETAPPDEMTTSFPSSVTNTLMMTSKTITMTTSTDSTLGNTEETSTAGTESSTPVTSAVSITAGQEGQSRTTSWRTSIQDTSASSQNHWTRSTQTTRESQTSTLTHRTTSTPSFSPSVHNVTGTVSQKTSPSGETATSSLCSVTNTSMMTSEKITVTTSTGSTLGNPGETSSVPVTGSLMPVTSAALVTVDPEGQSPVTFSRTSTQDTTAFSKNHQTQSVETTRVSQINTLNTLTPVTTSTVLSSPSGFNPSGTVSQETFPSGETTISSPSSVSNTFLVTSKVFRMPISRDSTLGNTEETSLSVSGTISAITSKVSTIWWSDTLSTALSPSSLPPKISTAFHTQQSEGAETTGRPHERSSFSPGVSQEIFTLHETTTWPSSFSSKGHTTWSQTELPSTSTGAATRLVTGNPSTGAAGTIPRVPSKVSAIGEPGEPTTYSSHSTTLPKTTGAGAQTQWTQETGTTGEALLSSPSYSVTQMIKTATSPSSSPMLDRHTSQQITTAPSTNHSTIHSTSTSPQESPAVSQRGHTQAPQTTQESQTTRSVSPMTDTKTVTTPGSSFTASGHSPSEIVPQDAPTISAATTFAPAPTGDGHTTQAPTTALQAAPSSHDATLGPSGGTSLSKTGALTLANSVVSTPGGPEGQWTSASASTSPDTAAAMTHTHQAESTEASGQTQTSEPASSGSRTTSAGTATPSSSGASGTTPSGSEGISTSGETTRFSSNPSRDSHTTQSTTELLSASASHGAIPVSTGMASSIVPGTFHPTLSEASTAGRPTGQSSPTSPSASPQETAAISRMAQTQRTRTSRGSDTISLASQATDTFSTVPPTPPSITSSGLTSPQTQTHTLSPSGSGKTFTTALISNATPLPVTYASSASTGHTTPLHVTDASSVSTGHATPLPVTDTSSESTGHATPLPVTSPSSVSTGHTTPLPVTDTSSESTGHVTPLPVTSLSSASTGDSTPLPVTDTSSASTGHVTPLPVTSLSSASTGDTTPLPVTDTSSASTGHATSLPVTDTSSVSTGHTTPLPVTDTSSASTGHATSLPVTDTSSVSTAHATPLPVTGLSSASTDDTTRLPVTDVSSASTGQAIPLPVTSPSSASTGDTTPLPVTDASSASTGDTTSLPVTIPSSASSGHTTSLPVTDASSVSTGHATSLLVTDASSVSTGDTTPLPVTDTNSASTGDTTPLHVTDASSVSTGHATSLPVTSLSSASTGDTTPLPVTSPSSASSGHTTPLPVTDASSVPTGHATSLPVTDASSVSTGHATPLPVTDASSVSTGHATPLPVTDTSSVSTGQATPLPVTSLSSASTGDTTPLPVTDTSSASTGQDTPLPVTSLSSVSTGDTTPLPVTSPSSASTGHATPLLVTDASSVSTGHATSLLVTDASSVSTGHATALHVTDASSLSTGDTTPLPVTSPSSASTGDTTPLPVTDTSSASTGHATSLPVTDTSSASTGHATPLPVTDTSSASTGQATPLPVTGPSSASTGHAIPLLVTDTSSASTGQATPLPVTSLSSASTGDTTPLPVTDASSVSTGHATSLPVTSLSSVSTGDTTPLPVTSPSSASSGHTTPLPVTDASSVSTGDTTPLPVTSPSSASSGHTTPLPVTSPSSASSGHTTPLPVTDASSASTGDTTPLPVTDTSSASTGHATHLPVTGLSSASTGDTTRLPVTNVSSASTGHATPLPVTSTSSASTGDTTPLPGTDTSSVSTGHTTPLLVTDASSVSTGDTTRLPVTSPSSASTGHTTPLPVTDTPSASTGDTTPLPVTNASSLSTRHTTSLHVTSPSSASTGHATSLPVTDTSSVSTGHATPLHVTSPSSASTGDTTPLPVTDTYSASTGQATPLPVTDTSSASTGDTTPLPVTDTSSASTGHATPLPVTNTSSVSTGHATPLHVTSPSSASTGHTTPLPVTDASSVSTGHATSLPVTDASSVFTGHATSLPVTIPSSASSGHTTPLPVTDASSVSTGHATSLPVTDASSVSTGHATPLPVTDASSVSTGHATPLPVTDTSSVSTGHATPLPLTSLSSVSTGDTTPLPVTDTSSASTGQATPLPVTSLSSVSTGDTTPLPVTDTSSASTGHATSLPVTDTSSASTGHATPLPDTDTSSASTGHATPLPVTDTSSASTGHATLLPVTDTSSASIGHATPLPVTDTSSISTGHATPLHVTSPSSASTGHATPLPVTDTSSASTGHANPLHVTSPSSASTGHATPLPVTDTSSASTGHATPLPVTSLSSVSTGDTTPLPVTSPSSASTGHTTPLPVTDTSSASTGQATALPVTSTSSASTGDTTPLPVTDTSSASTGQATPLPVTSLSSVSTGDTTPLPVTSPSSASTGHATPLLVTDASSASTGQATPLPVTDTSSAYTGDTTSLPVTDTSSSSTGDTTPLLVTETSSASTGHATPLHVTSPSSASTGDTTPVPVTDTSSVSTGHATPLPVTGLSSASTGDTTRLPVTDISSASTGQATPLPVTNTSSASTGHATPLPVTGLSSASTGDTTRLPVTDISSASTGQATPLPVTNTSSVSTGDTMPLPVTSPSSASTGHATPLPVTSTSSASTGHATPVPVTSTSSASTGHTTPLPVTDTSSASTGDTTPLPVTSPSSASTGHTTPLHVTIPSSASTGDTSTLPVTGASSASTGHATPLPVTDTSSVSTGHATPLPVTSFSSVSTGDTTPLPVTDTSSVSTGHATPLPVTSFSSVSTGDTTPLPVTDASSASTGHATPLPVTDTSSVSTGHATPLPLTSLSSVSTGDTTTLPVTDTSSVSTGHATPLPVTSFSSVSTGDTTPLPVTDASSASTGHATPLPVTDTSSVSTGHATPLPVTSLSSVSTGDTTPLPVTDASSASTGQATPLPVTSLSSVSTGDTTPLPVTIPSSASSGHTTSLPVTDTSSASTGQATPLPVTSLSSVSTGDTTPLLVTDASSVSTGHATPLPVTDTSSASTGDTTRLPVTDTSSASTGQATPLPVTSLSSVSTGDTTPLLVTNTSSVSRGHATSLPVTIPSSSSSGHTTPLPVTSTSSVSTGHVTPLPVTSTSSASTGHATSLPVTDTSSVSTGHATSLPVTDTSSVSTGHATPLPVTDASSVSTGHATPLPVTDASSASTGDTTPLPVTNTSSASTGQATPLPVTSLSSVSTGDTMPLPVTSPSSASTGHATPLPVTGLSSASTGDTTPLPVTDTSSASTGHVTPLPVTSLSSASTGDSTPLPVTDTSSASTGHVTPLPVTSLSSASTGDTTPLPVTDTSSASTGHATPLHVTDASSASTGQATLLPVTSLSSVSTGDTTPLPVTSPSSASTGHATPLLVTDTSSASTGHATPLPVTDASSVSTGHATSLPVTIRSSGSTGHTTPLPVTDTSSASTGQATSLLVTDTSSVSTGDTTPLPVTSTSSASTGHVTPLHVTSPSSASTGHATPLPVTSLSSASTGDTMPLPVTSPSSASTGDTTPLPVTDASSVSTGHTTPLPVTSPSSASTGHTTPLPVTDTTSASKGDTTPLPVTSPSSASTGHTTPLPVTDTSSASTGDTTPLPVTSPSSASTGHATPLPVTNASSLSTGHATPLHVTSPSSASTGHATPLPVTSTSSASTGHATSLPVTSTSSASTGHATPLPVTDNSSVSTGHATPLPVTGLSSATTDDTTRLPVTDVSSASTGQATPLPVTSLSSVSTGDTTPLPVTSPSSASTGHASPLLVTDASSASTGQATPLPVTDTSSVSTAHATPLPVTGLSSASTDDTTRLPVTDVSSASTGQAIPLPVTSPSSASTGDTTPLPVTDASSASTGDTTSLPVTIPSSASSGHTTSLPVTDASSVSTGHATSLLVTDASSVSTGDTTPLPVTDTNSASTGDTTPLHVTDASSVSTGHATSLPVTSLSSASTGDTTPLPVTSPSSASSGDTTPLPVTDTSSASTGHATHLPVTGLSSASTGDTTRLPVTNVSSASTGHATPLPVTSTSSASTGDTTPLPGTDTSSVSTGHTTPLLVTDASSVSTGDTTRLPVTSPSSASTGHTTPLHVTDASSVSTGHTTPLPVTDTSSASTGQATSLLVTDTSSVSTGDTTPLPVTSTSSASTGHVTPLHVTSPSSASTGHATPLPVTSLSSASTGDTTPLPVTDTSSVSTGHTTPLPVTSPSSASTGHTTPLPVTDTSSASKGDTTPLPVTSPSSASTGHTTPLPVTDTSSASTGDTTPLPVTNASSLSTGHATPLHVTSPSSASTGHATPLPVTSTSSASTGHATPLPVTSTSSASTGHATPLPVTDNSSVSTGHATPLPVTGLSSATTDDTTRLPVTDVSSASTGQATPLPVTSLSSVSTGDTTPLPVTSPSSASTGHASPLLVTDASSASTGQATPLPVTDTSSVSTAHATPLPVTGLSSASTDDTTRLPVTDVSSASTGQAIPLPVTSPSSASTGDTTPLPVTDASSASTGDTTSLPVTIPSSASSGHTTSLPVTDASSVSTGHATSLLVTDASSVSTGDTTPLPVTDTNSASTGDTTPLHVTDASSVSTGHATSLPVTSLSSASTGDTTPLPVTSPSSASSGHTTSLPVTDASSVSTGHATSLPVTIPSSASSGHTTPLPVTDASSVPTGHATSLPVTDASSVSTGHATPLPVTDASSVSTGHATPLPVTDTSSVSTGQATPLPVTSLSSASSTGDTTPLPVTDTSSASTGQDTPLPVTSLFSVSTGDTTPLPVTSPSSASTGHATHLLVTDASSVSTGHATSLLVTDASSVSTGHATALHVTDASSLSTGDTTPLPVTSPSSASTGDTTPLPVTDTSSVSTGHATSLPVTDTSSASTGHATSLPVTDTSSASTGQATPLPVTSPSSASTGHAIPLLVTDTSSASTGQATPLPVTSLSSASTGDTTPLPVTDASSVSTGHATSLPVTSLSSVSTGDTTPLPVTSPSSASTGHATPLHVTSPSSASTGHATPLPVTSLSSASTGDTTPLPVTSPSSASTGHATPLHVTDASSVSTGDTTPLPVTSPSSASSGHTTPLPVTDASSASTGDTTPLPVTDTSSASTGHATHLPVTGLSSASTGDTTRLPVTDVSSASTGHATPLPVTSTSSASTGDTTPLPGTDTSSVSTGHTTPLLVTDASSVSTGDTTRLPVTSPSSASTGHTTPLPVTDTPSASTGDTTPLPVTNASSLSTRHATSLHVTSPSSASTGHATPLPVTDTSAASTGHATPLPVTSTSSASTGDTTPLPVTDTSSASTGHATPLPVTNTSSVSTGHATPLHVTSPSSASTGHTTPLPVTDASSVSTGHATSLPVTDASSVSTGHATPLPVTDASSVSTGHATPLPLTSLSSVSTGDTTPLPVTDTSSASTGQATPLPVTSLSSVSTGDTTPLPVTDTSSASTGHATSLPVTDTSSASTGHATPLPVTDTSSISTGHATPLHVTSPSSASTGHATPLPVTDTSSASTGHATPLPVTSLSSVSTGDTTPLPVTSPSSASTGHATPLLVTDASSASTGQATPLPVTSLSSVSTGDTTPLPVTSPSSASTGHATSLPVTDTSSASTGDTTSLPVTDTSSAYTGDTTSLPVTDTSSSSTGDTTPLLVTETSSASTGDTTPVPVTDTSSVSTGHATPLPVTGLSSASTGDTTRLPVTDISSASTGQATPLPVTNTSSVSTGDTMPLPVTSPSSASTGHATPLPVTSTSSASTGHATPVPVTSTSLASTGHTTPLPVTSPSSASTGHTTPLPVTDTSSASTGDTTPLPVTNASSLSTGHTTPLHVTIPSSASTGDTSTLPVTGASSASTGHATPLPVTDTSSVSTGHATPLPVTSFSSVSTGDTTPLPVTDASSASTGHATPLPVTDTSSASTGDTTPLPVTDASSASTGQATPLPVTSLSSVSTGDTTPLPVTIPSSASSGHTTSLPVSDTSSASTGQATPLPVTSLSSVSTGDTTPLLVTDASSVSTGHATPLPVTDTSSASTGDTTRLPVTDTSSASTGQATPLPVTSLSSVSTGDTTPLLVTNTSSVSTGHATSLPVTIPSSSSSGHTTPLPVTSTSSVSTGHVTPLHVTSPSSSSTGQATPLPVTSTSSVSTGHVTPLHVTSPSSASTGHATPLPVTSTSSASTGHATPLPVTDASSVSTGHATPLPVTDTSSASTGDTTPLPVTDTSSASTGQATPLPVTSLSSVSTGHATPLAVSSATSASTVSSDSPLKMETSGMTTPSLKTDGGRRTATSPPPTTSQTIISTIPSTAMHTRSTAAPIPILPERGVSLFPYGADAGDLEFVRRTVDFTSPLFKPATGFPLGSSLRDSLYASQAGTLWPWWLRSGTMLTSPLVGGPHFIRATPTKPSSPRTGAGPMPCFSTRAVGCSGTWPSAQWRWLFRKQPTDVPASVGEVSP

SEQ ID NO: 53295 - protein, 4431 aa, Homo sapiens; identical to SEQ ID NO: 53241
  Payload ID: 10597
  Gene Symbol: MUC4
  Gene Name: mucin 4, cell surface associated
  ENSP ID: ENSP00000487226
  MOD_RES (1)..(1): Any amino acid

SEQ ID NO: 53296 - protein, 4483 aa, Homo sapiens; identical to SEQ ID NO: 53275
  Payload ID: 10597
  Gene Symbol: MUC4
  Gene Name: mucin 4, cell surface associated
  ENSP ID: ENSP00000487233
  MOD_RES (1)..(1): Any amino acid

SEQ ID NO: 53297 - protein, 1098 aa, Homo sapiens; identical to SEQ ID NO: 53230
  Payload ID: 10597
  Gene Symbol: MUC4
  Gene Name: mucin 4, cell surface associated
  ENSP ID: ENSP00000487235
  MOD_RES (1)..(1): Any amino acid

SEQ ID NO: 53298 - protein, 4373 aa, Homo sapiens; identical to SEQ ID NO: 53233
  Payload ID: 10597
  Gene Symbol: MUC4
  Gene Name: mucin 4, cell surface associated
  ENSP ID: ENSP00000487243
  MOD_RES (1)..(1): Any amino acid

SEQ ID NO: 53299 - protein, 144 aa, Homo sapiens; identical to SEQ ID NO: 53196
  Payload ID: 10597
  Gene Symbol: MUC4
  Gene Name: mucin 4, cell surface associated
  ENSP ID: ENSP00000487258
  MOD_RES (1)..(1): Any amino acid

SEQ ID NO: 53300 - protein, 4432 aa, Homo sapiens
  Payload ID: 10597
  Gene Symbol: MUC4
  Gene Name: mucin 4, cell surface associated
  ENSP ID: ENSP00000487270
  MOD_RES (1)..(1): Any amino acid
XTTEDTLITGSKTAAPVTSTGSTTATLEGQSTAASSRTSNQDISASSQNHQTKSTETTSKAQTDTLTQMMTSTLFSSPSVHNVMETAPPDEMTTSFPSSVTNTLMMTSKTITMTTSTDSTLGNTEETSTAGTESSTPVTSAVSITAGQEGQSRTTSWRTSIQDTSASSQNHWTRSTQTTRESQTSTLTHRTTSTPSFSPSVHNVTGTVSQKTSPSGETATSSLCSVTNTSMMTSEKITVTTSTGSTLGNPGETSSVPVTGSLMPVTSAALVTFDPEGQSPATFSRTSTQDTTAFSKNHQTQSVETTRVSQINTLNTLTPVTTSTVLSSPSGFNPSGTVSQETFPSGETTTSSPSSVSNTFLVTSKVFRMPTSRDSTLGNTEETSLSVSGTISAITSKVSTIWWSDTLSTALSPSSLPPKISTAFHTQQSEGAETTGRPHERSSFSPGVSQEIFTLHETTTWPSSFSSKGHTTWSQTELPSTSTGAATRLVTGNPSTGTAGTIPRVPSKVSAIGEPGEPTTYSSHSTTLPKTTGAGAQTQWTQETGTTGEALLSSPSYSVTQMIKTATSPSSSPMLDRHTSQQITTAPSTNHSTIHSTSTSPQESPAVSQRGHTQAPQTTQESQTTRSVSPMTDTKTVTTPGSSFTASGHSPSEIVPQDAPTISAATTFAPAPTGDGHTTQAPTTALQAAPSSHDATLGPSGGTSLSKTGALTLANSVVSTPGGPEGQWTSASASTSPDTAAAMTHTHQAESTEASGQTQTSEPASSGSRTTSAGTATPSSSGASGTTPSGSEGISTSGETTRFSSNPSRDSHTTQSTTELLSASASHGAIPVSTGMASSIVPGTFHPTLSEASTAGRPTGQSSPTSPSASPQETAAISRMAQTQRTRTSRGSDTISLASQATDTFSTVPPTPPSITSTGLTSPQTETHTLSPSGSGKTFTTALISNATPLPVTYASSASTGHTTPLHVTDASSVSTGHATPLPVTSPSSVSTGHTTPLPVTDTSSESTGHVTPLPVTSFSSASTGDSTPLPVTDTSSASTGHVTPLPVTSLSSASTGDTTPLPVTDTSSASTGHATSLPVTDTSSVSTGHTTPLPVTDTSSASTGHATSLPVTDTSSVSTGHTTPLHVTDASSASTGQATPLPVTSLSSVSTGDTTPLPVTSPSSASTGHATPLLVTDTSSASTGHATPLPVTDASSVSTDHATSLPVTIPSAASTGHTTPLPVTDTSSASTGQATSLLVTDTSSVSTGDTTPLPVTSTSSASTGHVTPLHVTSPSSASTGHATPLPVTSLSSASTGDTMPLPVTSPSSASTGDTTPLPVTDASSVSTGHTTPLHVTDASSASTGQATPLPVTSLSSVSTGDTTPLPVTSPSSASTGHATPLLVTDTSSASTGHATPLPVTDASSVSTDHATSLPVTIPSAASTGHTTPLPVTDTSSASTGQATSLLVTDTSSVSTGDTTPLPVTSTSSASTGHVTPLHVTSPSSASTGHATPLPVTSLSSASTGDTMPLPVTSPSSASTGDTTPLPVTDASSVSTGHTTPLPVTSPSSASTGHTTPLPVTDTSSASKGDTTPLPVTSPSSASTGHTTPLPVTDTSSASTGDTTPLPVTNASSLSTGHATPLHVTSPSSASTGHATPLPVTSTSSASTGHATPLPVTGLSSATTDDTTRLPVTDVSSASTGQATPLPVTSLSSVSTGDTTPLPVTSPSSASTGHASPLLVTDASSASTGQATPLPVTDTSSVSTAHATPLPVTGLSSASTDDTTRLPVTDVSSASTGQAIPLPVTSPSSASTGDTTPLPVTDASSASTGDTTSLPVTIPSSASSGHTTSLPVTDASSVSTGHATSLLVTDASSVSTGDTTPLPVTDTNSASTGDTTPLHVTDASSVSTGHATSLPVTSLSSASTGDTTPLPVTSPSSASSGHTTPLPVTDASSVPTGHATSLPVTDASSVSTGHATPLPVTDASSVSTGHATPLPVTDTSSVSTGQATPLPVTSLSSASTGDTTPLPVTDTSSASTGHAPHLPVTGLSSASTGDTTRLPVTNVSSASTGHATPLPVTSTSSASTGDTTPLPGTDTSSVSTGHTTPLLVTDASSVSTGDTTRLPVTSPSSASTGHTTPLHVTDASSVSTGHTTPLPVTDTSSASTGQATSLLVTDTSSVSTGDTTPLPVTSTSSASTGHVTPLHVTSPSSASTGHATPLPVTSLSSASTGDTTPLPVTDTSSVSTGHTTPLPVTSPSSASTGHTTPLPVTDTSSASKGDTTPLPVTSPSSASTGHTTPLPVTDTSSASTGDTTPLPVTNASSLSTGHATPLHVTSPSSASTGHATPLPVTSTSSASTGHATPLPVTSTSSASTGHATPLPVTDNSSVSTGHATPLPVTGLSSATTDDTTRLPVTDVSSASTGQATPLPVTSLSSVSTGDTTPLPVTSPSSASTGHASPLLVTDASSASTGQATPLPVTDTSSVSTAHATPLPVTGLSSASTDDTTRLPVTDVSSASTGQAIPLPVTSPSSASTGDTTPLPVTDASSASTGDTTSLPVTIPSSASSGHTTSLPVTDASSVSTGHATSLLVTDASSVSTGDTTPLPVTDTNSASTGDTTPLHVTDASSVSTGHATSLPVTSLSSASTGDTTPLPVTSPSSASSGHTTSLPVTDASSVSTGHATSLPVTIPSSASSGHTTPLPVTDASSVPTGHATSLPVTDASSVSTGHATPLPVTDASSVSTGHATPLPVTDTSSVSTGQATPLPVTSLSSASSTGDTTPLPVTDTSSASTGQDTPLPVTSLFSVSTGDTTPLPVTSPSSASTGHATHLLVTDASSVSTGHATSLLVTDASSVSTGHATALHVTDASSLSTGDTTPLPVTSPSSASTGDTTPLPVTDTSSVSTGHATSLPVTDTSSASTGHATSLPVTDTSSASTGQATPLPVTSPSSASTGHAIPLLVTDTSSASTGQATPLPVTSLSSASTGDTTPLPVTDASSVSTGHATSLPVTSLSSVSTGDTTPLPVTSPSSASTGHATPLHVTSPSSASTGHATPLPVTSLSSASTGDTTPLPVTSPSSASTGHATPLHVTDASSVSTGDTTPLPVTSPSSASSGHTTPLPVTDASSASTGDTTPLPVTDTSSASTGHATHLPVTGLSSASTGDTTRLPVTDVSSASTGHATPLPVTSTSSASTGDTTPLPGTDTSSVSTGHTTPLLVTDASSVSTGDTTRLPVTSPSSASTGHTTPLPVTDTPSASTGDTTPLPVTNASSLSTRHATSLHVTSPSSASTGHATPLPVTDTSAASTGHATPLPVTSTSSASTGDTTPLPVTDTSSASTGHATPLPVTNTSSVSTGHATPLHVTSPSSASTGHTTPLPVTDASSVSTGHATSLPVTDASSVSTGHATPLPVTDASSVSTGHATPLPLTSLSSVSTGDTTPLPVTDTSSASTGQATPLPVTSLSSVSTGDTTPLPVTDTSSASTGHATSLPVTDTSSASTGHATPLHVTSPSSASTGHATPLPVTDTSSASTGHATPLPVTSLSSVSTGDTTPLPVTSPSSASTGHATPLLVTDASSASTGQATPLPVTSLSSVSTGDTTPLPVTSPSSASTGHATSLPVTDTSSASTGDTTSLPVTDTSSAYTGDTTSLPVTDTSSSSTGDTTPLLVTETSSASTGDTTPVPVTDTSSVSTGHATPLPVTGLSSASTGDTTRLPVTDISSASTGQATPLPVTNTSSVSTGDTMPLPVTSPSSASTGHATPLPVTSTSSASTGHATPVPVTSTSSASTGHTTPLPVTSPSSASTGHTTPLPVTDTSSASTGDTTPLPVTNASSLSTGHTTPLHVTIPSSASTGDTSTLPVTGASSASTGHATPLPVTDTSSVSTGHATPLPVTSFSSVSTGDTTPLPVTDASSASTGHATPLPVTDTSSASTGDTTPLPVTDASSASTGQATPLPVTSLSSVSTGDTTPLPVTIPSSASSGHTTSLPVSDTSSASTGQATPLPVTSLSSVSTGDTTPLLVTDASSVSTGHATPLPVTDTSSASTGDTTRLPVTDTSSASTGQATPLPVTSLSSVSTGDTTPLLVTNTSSVSTGHATSLPVTIPSSSSSGHTTPLPVTSTSSVSTGHVTPLHVTSPSSSSTGQATPLPVTSTSSSSTGQATPLPVTSTSSASTGHATPLPVTDASSVSTGHATPLPVTDTSSASTGDTTPLPVTDTSSASTGQATPLPVTSLSSVSTGHATPLAVSSATSASTVSSDSPLKMETSGMTTPSLKTDGGRRTATSPPPTTSQTIISTIPSTAMHTRSTAAPIPILPERGVSLFPYGADAGDLEFVRRTVDFTSPLFKPATGFPLGSSLRDSLYFTDNGQIIFPESDYQIFSYPNPLPTGFTGRDPVALVAPFWDDADFSTGRGTTFYQSNTYQAILSTDGSRSYALFLYQSGGMQWDVAQRSVEMAISKTAH

SEQ ID NO: 53301 - protein, 4431 aa, Homo sapiens; identical to SEQ ID NO: 53241
  Payload ID: 10597
  Gene Symbol: MUC4
  Gene Name: mucin 4, cell surface associated
  ENSP ID: ENSP00000487312
  MOD_RES (1)..(1): Any amino acid

SEQ ID NO: 53302 - protein, 144 aa, Homo sapiens; identical to SEQ ID NO: 53196
  Payload ID: 10597
  Gene Symbol: MUC4
  Gene Name: mucin 4, cell surface associated
  ENSP ID: ENSP00000487320
  MOD_RES (1)..(1): Any amino acid

SEQ ID NO: 53303 - protein, 4403 aa, Homo sapiens; identical to SEQ ID NO: 53236
  Payload ID: 10597
  Gene Symbol: MUC4
  Gene Name: mucin 4, cell surface associated
  ENSP ID: ENSP00000487329
  MOD_RES (1)..(1): Any amino acid

SEQ ID NO: 53304 - protein, 4373 aa, Homo sapiens; identical to SEQ ID NO: 53233
  Payload ID: 10597
  Gene Symbol: MUC4
  Gene Name: mucin 4, cell surface associated
  ENSP ID: ENSP00000487354
  MOD_RES (1)..(1): Any amino acid

SEQ ID NO: 53305 - protein, 4373 aa, Homo sapiens; identical to SEQ ID NO: 53233
  Payload ID: 10597
  Gene Symbol: MUC4
  Gene Name: mucin 4, cell surface associated
  ENSP ID: ENSP00000487364
  MOD_RES (1)..(1): Any amino acid

SEQ ID NO: 53306 - protein, 7418 aa, Homo sapiens
  Payload ID: 10597
  Gene Symbol: MUC4
  Gene Name: mucin 4, cell surface associated
  ENSP ID: ENSP00000487383
MKGARWRRVPWVSLSCLCLCLLPHVVPGTTEDTLITGSKTPAPVTSTGSTTATLEGQSTAASSRTSNQDISASSQNHQTKSTETTSKAQTDTLTQMMTSTLFSSPSVHNVMETVTQETAPPDEMTTSFPSSVTNTLMMTSKTITMTTSTDSTLGNTEETSTAGTESSTPVTSAVSITAGQEGQSRTTSWRTSIQDTSASSQNHWTRSTQTTRESQTSTLTHRTTSTPSFSPSVHNVTGTVSQKTSPSGETATSSLCSVTNTSMMTSEKITVTTSTGSTLGNPGETSSVPVTGSLMPVTSAALVTVDPEGQSPVTFSRTSTQDTTAFSKNHQTQSVETTRVSQINTLNTLTPVTTSTVLSSPSGFNPSGTVSQETFPSGETTISSPSSVSNTFLVTSKVFRMPISRDSTLGNTEETSLSVSGTISAITSKVSTIWWSDTLSTALSPSSLPPKISTAFHTQQSEGAETTGRPHERSSFSPGVSQEIFTLHETTTWPSSFSSKGHTTWSQTELPSTSTGAATRLVTGNPSTGAAGTIPRVPSKVSAIGEPGEPTTYSSHSTTLPKTTGAGAQTQWTQETGTTGEALLSSPSYSVTQMIKTATSPSSSPMLDRHTSQQITTAPSTNHSTIHSTSTSPQESPAVSQRGHTQAPQTTQESQTTRSVSPMTDTKTVTTPGSSFTASGHSPSEIVPQDAPTISAATTFAPAPTGDGHTTQAPTTALQAAPSSHDATLGPSGGTSLSKTGALTLANSVVSTPGGPEGQWTSASASTSPDTAAAMTHTHQAESTEASGQTQTSEPASSGSRTTSAGTATPSSSGASGTTPSGSEGISTSGETTRFSSNPSRDSHTTQSTTELLSASASHGAIPVSTGMASSIVPGTFHPTLSEASTAGRPTGQSSPTSPSASPQETAAISRMAQTQRTRTSRGSDTISLASQATDTFSTVPPTPPSITSSGLTSPQTQTHTLSPSGSGKTFTTALISNATPLPVTYASSASTGHTTPLHVTDASSVSTGHATPLPVTDTSSESTGHATPLPVTSPSSVSTGHTTPLPVTDTSSESTGHVTPLPVTSLSSASTGDSTPLPVTDTSSASTGHVTPLPVTSLSSASTGDTTPLPVTDTSSASTGHATSLPVTDTSSVSTGHTTPLPVTDTSSASTGHATSLPVTDTSSVSTAHATPLPVTGLSSASTDDTTRLPVTDVSSASTGQAIPLPVTSPSSASTGDTTPLPVTDASSASTGDTTSLPVTIPSSASSGHTTSLPVTDASSVSTGHATSLLVTDASSVSTGDTTPLPVTDTNSASTGDTTPLHVTDASSVSTGHATSLPVTSLSSASTGDTTPLPVTSPSSASSGHTTPLPVTDASSVPTGHATSLPVTDASSVSTGHATPLPVTDASSVSTGHATPLPVTDTSSVSTGQATPLPVTSLSSASTGDTTPLPVTDTSSASTGQDTPLPVTSLSSVSTGDTTPLPVTSPSSASTGHATPLLVTDASSVSTGHATSLLVTDASSVSTGHATALHVTDASSLSTGDTTPLPVTSPSSASTGDTTPLPVTDTSSASTGHATSLPVTDTSSASTGHATPLPVTDTSSASTGQATPLPVTGPSSASTGHAIPLLVTDTSSASTGQATPLPVTSLSSASTGDTTPLPVTDASSVSTGHATSLPVTSLSSVSTGDTTPLPVTSPSSASSGHTTPLPVTDASSVSTGDTTPLPVTSPSSASSGHTTPLPVTSPSSASSGHTTPLPVTDASSASTGDTTPLPVTDTSSASTGHATHLPVTGLSSASTGDTTRLPVTNVSSASTGHATPLPVTSTSSASTGDTTPLPGTDTSSVSTGHTTPLLVTDASSVSTGDTTRLPVTSPSSASTGHTTPLPVTDTPSASTGDTTPLPVTNASSLSTRHTTSLHVTSPSSASTGHATSLPVTDTSSVSTGHATPLHVTSPSSASTGDTTPLPVTDTYSASTGQATPLPVTDTSSASTGDTTPLPVTDTSSASTGHATPLPVTNTSSVSTGHATPLHVTSPSSASTGHTTPLPVTDASSVSTGHATSLPVTDASSVFTGHATSLPVTIPSSASSGHTTPLPVTDASSVSTGHATSLPVTDASSVSTGHATPLPVTDASSVSTGHATPLPVTDTSSVSTGHATPLPLTSLSSVSTGDTTPLPVTDTSSASTGQATPLPVTSLSSVSTGDTTPLPVTDTSSASTGHATSLPVTDTSSASTGHATPLPDTDTSSASTGHATPLPVTDTSSASTGHATLLPVTDTSSASIGHATPLPVTDTSSISTGHATPLHVTSPSSASTGHATPLPVTDTSSASTGHANPLHVTSPSSASTGHATPLPVTDTSSASTGHATPLPVTSLSSVSTGDTTPLPVTSPSSASTGHTTPLPVTDTSSASTGQATALPVTSTSSASTGDTTPLPVTDTSSASTGQATPLPVTSLSSVSTGDTTPLPVTSPSSASTGHATPLLVTDASSASTGQATPLPVTDTSSAYTGDTTSLPVTDTSSSSTGDTTPLLVTETSSASTGHATPLHVTSPSSASTGDTTPVPVTDTSSVSTGHATPLPVTGLSSASTGDTTRLPVTDISSASTGQATPLPVTNTSSASTGHATPLPVTGLSSASTGDTTRLPVTDISSASTGQATPLPVTNTSSVSTGDTMPLPVTSPSSASTGHATPLPVTSTSSASTGHATPVPVTSTSSASTGHTTPLPVTDTSSASTGDTTPLPVTSPSSASTGHTTPLHVTIPSSASTGDTSTLPVTGASSASTGHATPLPVTDTSSVSTGHATPLPVTSFSSVSTGDTTPLPVTDTSSVSTGHATPLPVTSFSSVSTGDTTPLPVTDASSASTGHATPLPVTDTSSVSTGHATPLPLTSLSSVSTGDTTTLPVTDTSSVSTGHATPLPVTSFSSVSTGDTTPLPVTDASSASTGHATPLPVTDTSSVSTGHATPLPVTSLSSVSTGDTTPLPVTDASSASTGQATPLPVTSLSSVSTGDTTPLPVTIPSSASSGHTTSLPVTDTSSASTGQATPLPVTSLSSVSTGDTTPLLVTDASSVSTGHATPLPVTDTSSASTGDTTRLPVTDTSSASTGQATPLPVTSLSSVSTGDTTPLLVTNTSSVSRGHATSLPVTIPSSSSSGHTTPLPVTSTSSVSTGHVTPLPVTSTSSASTGHATSLPVTDTSSVSTGHATSLPVTDTSSVSTGHATPLPVTDASSVSTGHATPLPVTDASSASTGDTTPLPVTNTSSASTGQATPLPVTSLSSVSTGDTMPLPVTSPSSASTGHATPLPVTGLSSASTGDTTPLPVTDTSSASTGHVTPLPVTSLSSASTGDSTPLPVTDTSSASTGHVTPLPVTSLSSASTGDTTPLPVTDTSSASTGHATPLHVTDASSASTGQATLLPVTSLSSVSTGDTTPLPVTSPSSASTGHATPLLVTDTSSASTGHATPLPVTDASSVSTGHATSLPVTIRSSGSTGHTTPLPVTDTSSASTGQATSLLVTDTSSVSTGDTTPLPVTSTSSASTGHVTPLHVTSPSSASTGHATPLPVTSLSSASTGDTMPLPVTSPSSASTGDTTPLPVTDASSVSTGHTTPLPVTSPSSASTGHTTPLPVTDTTSASKGDTTPLPVTSPSSASTGHTTPLPVTDTSSASTGDTTPLPVTSPSSASTGHATPLPVTNASSLSTGHATPLHVTSPSSASTGHATPLPVTSTSSASTGHATSLPVTSTSSASTGHATPLPVTDNSSVSTGHATPLPVTGLSSATTDDTTRLPVTDVSSASTGQATPLPVTSLSSVSTGDTTPLPVTSPSSASTGHASPLLVTDASSASTGQATPLPVTDTSSVSTAHATPLPVTGLSSASTDDTTRLPVTDVSSASTGQAIPLPVTSPSSASTGDTTPLPVTDASSASTGDTTSLPVTIPSSASSGHTTSLPVTDASSVSTGHATSLLVTDASSVSTGDTTPLPVTDTNSASTGDTTPLHVTDASSVSTGHATSLPVTSLSSASTGDTTPLPVTSPSSASSGDTTPLPVTDTSSASTGHATHLPVTGLSSASTGDTTRLPVTNVSSASTGHATPLPVTSTSSASTGDTTPLPGTDTSSVSTGHTTPLLVTDASSVSTGDTTRLPVTSPSSASTGHTTPLHVTDASSVSTGHTTPLPVTDTSSASTGQATSLLVTDTSSVSTGDTTPLPVTSTSSASTGHVTPLHVTSPSSASTGHATPLPVTSLSSASTGDTTPLPVTDTSSVSTGHTTPLPVTSPSSASTGHTTPLPVTDTSSASKGDTTPLPVTSPSSASTGHTTPLPVTDTSSASTGDTTPLPVTNASSLSTGHATPLHVTSPSSASTGHATPLPVTSTSSASTGHATPLPVTSTSSASTGHATPLPVTDNSSVSTGHATPLPVTGLSSATTDDTTRLPVTDVSSASTGQATPLPVTSLSSVSTGDTTPLPVTSPSSASTGHASPLLVTDASSASTGQATPLPVTDTSSVSTAHATPLPVTGLSSASTDDTTRLPVTDVSSASTGQAIPLPVTSPSSASTGDTTPLPVTDASSASTGDTTSLPVTIPSSASSGHTTSLPVTDASSVSTGHATSLLVTDASSVSTGDTTPLPVTDTNSASTGDTTPLHVTDASSVSTGHATSLPVTSLSSASTGDTTPLPVTSPSSASSGHTTSLPVTDASSVSTGHATSLPVTIPSSASSGHTTPLPVTDASSVPTGHATSLPVTDASSVSTGHATPLPVTDASSVSTGHATPLPVTDTSSVSTGQATPLPVTSLSSASSTGDTTPLPVTDTSSASTGQDTPLPVTSLFSVSTGDTTPLPVTSPSSASTGHATHLLVTDASSVSTGHATSLLVTDASSVSTGHATALHVTDASSLSTGDTTPLPVTSPSSASTGDTTPLPVTDTSSVSTGHATSLPVTDTSSASTGHATSLPVTDTSSASTGQATPLPVTSPSSASTGHAIPLLVTDTSSASTGQATPLPVTSLSSASTGDTTPLPVTDASSVSTGHATSLPVTSLSSVSTGDTTPLPVTSPSSASTGHATPLHVTSPSSASTGHATPLPVTSLSSASTGDTTPLPVTSPSSASTGHATPLHVTDASSVSTGDTTPLPVTSPSSASSGHTTPLPVTDASSASTGDTTPLPVTDTSSASTGHATHLPVTGLSSASTGDTTRLPVTDVSSASTGHATPLPVTSTSSASTGDTTPLPGTDTSSVSTGHTTPLLVTDASSVSTGDTTRLPVTSPSSASTGHTTPLPVTDTPSASTGDTTPLPVTNASSLSTRHATSLHVTSPSSASTGHATPLPVTDTSAASTGHATPLPVTSTSSASTGDTTPLPVTDTSSASTGHATPLPVTNTSSVSTGHATPLHVTSPSSASTGHTTPLPVTDASSVSTGHATSLPVTDASSVSTGHATPLPVTDASSVSTGHATPLPLTSLSSVSTGDTTPLPVTDTSSASTGQATPLPVTSLSSVSTGDTTPLPVTDTSSASTGHATSLPVTDTSSASTGHATPLPVTDTSSISTGHATPLHVTSPSSASTGHATPLPVTDTSSASTGHATPLPVTSLSSVSTGDTTPLPVTSPSSASTGHATPLLVTDASSASTGQATPLPVTSLSSVSTGDTTPLPVTSPSSASTGHATSLPVTDTSSASTGDTTSLPVTDTSSAYTGDTTSLPVTDTSSSSTGDTTPLLVTETSSASTGDTTPVPVTDTSSVSTGHATPLPVTGLSSASTGDTTRLPVTDISSASTGQATPLPVTNTSSVSTGDTMPLPVTSPSSASTGHATPLPVTSTSSASTGHATPVPVTSTSLASTGHTTPLPVTSPSSASTGHTTPLPVTDTSSASTGDTTPLPVTNASSLSTGHTTPLHVTIPSSASTGDTSTLPVTGASSASTGHATPLPVTDTSSVSTGHATPLPVTSFSSVSTGDTTPLPVTDASSASTGHATPLPVTDTSSASTGDTTPLPVTDASSASTGQATPLPVTSLSSVSTGDTTPLPVTIPSSASSGHTTSLPVSDTSSASTGQATPLPVTSLSSVSTGDTTPLLVTDASSVSTGHATPLPVTDTSSASTGDTTRLPVTDTSSASTGQATPLPVTSLSSVSTGDTTPLLVTNTSSVSTGHATSLPVTIPSSSSSGHTTPLPVTSTSSVSTGHVTPLHVTSPSSSSTGQATPLPVTSTSSVSTGHVTPLHVTSPSSASTGHATPLPVTSTSSASTGHATPLPVTDASSVSTGHATPLPVTDTSSASTGDTTPLPVTDTSSASTGQATPLPVTSLSSVSTGHATPLAVSSATSASTVSSDSPLKMETSGMTTPSLKTDGGRRTATSPPPTTSQTIISTIPSTAMHTRSTAAPIPILPERGVSLFPYGADAGDLEFVRRTVDFTSPLFKPATGFPLGSSLRDSLYFTDNGQIIFPESDYQIFSYPNPLPTGFTGRDPVALVAPFWDDADFSTGRGTTFYQEYETFYGEHSLLVQQAESWIRKMTNNGGYKARWALKVTWVNAHAYPAQWTLGSNTYQAILSTDGSRSYALFLYQSGGMQWDVAQRSGNPVLMGFSSGDGYFENSPLMSQPVWERYRPDRFLNSNSGLQGLQFYRLHREERPNYRLECLQWLKSQPRWPSWGWNQVSCPCSWQQGRRDLRFQPVSIGRWGLGSRQLCSFTSWRGGVCCSYGPWGEFREGWHVQRPWQLAQELEPQSWCCRWNDKPYLCALYQQRRPHVGCATYRPPQPAWMFGDPHITTLDGVSYTFNGLGDFLLVGAQDGNSSFLLQGRTAQTGSAQATNFIAFAAQYRSSSLGPVTVQWLLEPHDAIRVLLDNQTVTFQPDHEDGGGQETFNATGVLLSRNGSEVSASFDGWATVSVIALSNILHASASLPPEYQNRTEGLLGVWNNNPEDDFRMPNGSTIPPGSPEEMLFHFGMTWQINGTGLLGKRNDQLPSNFTPVFYSQLQKNSSWAEHLISNCDGDSSCIYDTLALRNASIGLHTREVSKNYEQANATLNQYPPSINGGRVIEAYKGQTTLIQYTSNAEDANFTLRDSCTDLELFENGTLLWTPKSLEPFTLEILARSAKIGLASALQPRTVVCHCNAESQCLYNQTSRVGNSSLEVAGCKCDGGTFGRYCEGSEDACEEPCFPSVHCVPGKGCEACPPNLTGDGRHCAALGSSFLCQNQSCPVNYCYNQGHCYISQTLGCQPMCTCPPAFTDSRCFLAGNNFSPTVNLELPLRVIQLLLSEEENASMAEVNASVAYRLGTLDMRAFLRNSQVERIDSAAPASGSPIQHWMVISEFQYRPRGPVIDFLNNQLLAAVVEAFLYHVPRRSEEPRNDVVFQPISGEDVRDVTALNVSTLKAYFRCDGYKGYDLVYSPQSGFTCVSPCSRGYCDHGGQCQHLPSGPRCSCVSFSIYTAWGEHCEHLSMKLDAFFGIFFGALGGLLLLGVGTFVVLRFWGCSGARFSYFLNSAEALP

SEQ ID NO: 53307 - protein, 4483 aa, Homo sapiens; identical to SEQ ID NO: 53275
  Payload ID: 10597
  Gene Symbol: MUC4
  Gene Name: mucin 4, cell surface associated
  ENSP ID: ENSP00000487389
  MOD_RES (1)..(1): Any amino acid

SEQ ID NO: 53308 - protein, 4404 aa, Homo sapiens
  Payload ID: 10597
  Gene Symbol: MUC4
  Gene Name: mucin 4, cell surface associated
  ENSP ID: ENSP00000487409
  MOD_RES (1)..(1): Any amino acid
XTTEDTLITGSKTAAPVTSTGSTTATLEGQSTAASSRTSNQDISASSQNHQTKSTETTSKAQTDTLTQMMTSTLFSSPSVHNVMETAPPDEMTTSFPSSVTNTLMMTSKTITMTTSTDSTLGNTEETSTAGTESSTPVTSAVSITAGQEGQSRTTSWRTSIQDTSASSQNHWTRSTQTTRESQTSTLTHRTTSTPSFSPSVHNVTGTVSQKTSPSGETATSSLCSVTNTSMMTSEKITVTTSTGSTLGNPGETSSVPVTGSLMPVTSAALVTFDPEGQSPATFSRTSTQDTTAFSKNHQTQSVETTRVSQINTLNTLTPVTTSTVLSSPSGFNPSGTVSQETFPSGETTTSSPSSVSNTFLVTSKVFRMPTSRDSTLGNTEETSLSVSGTISAITSKVSTIWWSDTLSTALSPSSLPPKISTAFHTQQSEGAETTGRPHERSSFSPGVSQEIFTLHETTTWPSSFSSKGHTTWSQTELPSTSTGAATRLVTGNPSTGTAGTIPRVPSKVSAIGEPGEPTTYSSHSTTLPKTTGAGAQTQWTQETGTTGEALLSSPSYSVTQMIKTATSPSSSPMLDRHTSQQITTAPSTNHSTIHSTSTSPQESPAVSQRGHTQAPQTTQESQTTRSVSPMTDTKTVTTPGSSFTASGHSPSEIVPQDAPTISAATTFAPAPTGDGHTTQAPTTALQAAPSSHDATLGPSGGTSLSKTGALTLANSVVSTPGGPEGQWTSASASTSPDTAAAMTHTHQAESTEASGQTQTSEPASSGSRTTSAGTATPSSSGASGTTPSGSEGISTSGETTRFSSNPSRDSHTTQSTTELLSASASHGAIPVSTGMASSIVPGTFHPTLSEASTAGRPTGQSSPTSPSASPQETAAISRMAQTQRTRTSRGSDTISLASQATDTFSTVPPTPPSITSTGLTSPQTETHTLSPSGSGKTFTTALISNATPLPVTYASSASTGHTTPLHVTDASSVSTGHATPLPVTSPSSVSTGHTTPLPVTDTSSESTGHVTPLPVTSFSSASTGDSTPLPVTDTSSASTGHVTPLPVTSLSSASTGDTTPLPVTDTSSASTGHATSLPVTDTSSVSTGHTTPLPVTDTSSASTGHATSLPVTDTSSVSTGHTTPLHVTDASSASTGQATPLPVTSLSSVSTGDTTPLPVTSPSSASTGHATPLLVTDTSSASTGHATPLPVTDASSVSTDHATSLPVTIPSAASTGHTTPLPVTDTSSASTGQATSLLVTDTSSVSTGDTTPLPVTSTSSASTGHVTPLHVTSPSSASTGHATPLPVTSLSSASTGDTMPLPVTSPSSASTGDTTPLPVTDASSVSTGHTTPLHVTDASSASTGQATPLPVTSLSSVSTGDTTPLPVTSPSSASTGHATPLLVTDTSSASTGHATPLPVTDASSVSTDHATSLPVTIPSAASTGHTTPLPVTDTSSASTGQATSLLVTDTSSVSTGDTTPLPVTSTSSASTGHVTPLHVTSPSSASTGHATPLPVTSLSSASTGDTMPLPVTSPSSASTGDTTPLPVTDASSVSTGHTTPLPVTSPSSASTGHTTPLPVTDTSSASKGDTTPLPVTSPSSASTGHTTPLPVTDTSSASTGDTTPLPVTNASSLSTGHATPLHVTSPSSASTGHATPLPVTSTSSASTGHATPLPVTGLSSATTDDTTRLPVTDVSSASTGQATPLPVTSLSSVSTGDTTPLPVTSPSSASTGHASPLLVTDASSASTGQATPLPVTDTSSVSTAHATPLPVTGLSSASTDDTTRLPVTDVSSASTGQAIPLPVTSPSSASTGDTTPLPVTDASSASTGDTTSLPVTIPSSASSGHTTSLPVTDASSVSTGHATSLLVTDASSVSTGDTTPLPVTDTNSASTGDTTPLHVTDASSVSTGHATSLPVTSLSSASTGDTTPLPVTSPSSASSGHTTPLPVTDASSVPTGHATSLPVTDASSVSTGHATPLPVTDASSVSTGHATPLPVTDTSSVSTGQATPLPVTSLSSASTGDTTPLPVTDTSSASTGHAPHLPVTGLSSASTGDTTRLPVTNVSSASTGHATPLPVTSTSSASTGDTTPLPGTDTSSVSTGHTTPLLVTDASSVSTGDTTRLPVTSPSSASTGHTTPLHVTDASSVSTGHTTPLPVTDTSSASTGQATSLLVTDTSSVSTGDTTPLPVTSTSSASTGHVTPLHVTSPSSASTGHATPLPVTSLSSASTGDTTPLPVTDTSSVSTGHTTPLPVTSPSSASTGHTTPLPVTDTSSASKGDTTPLPVTSPSSASTGHTTPLPVTDTSSASTGDTTPLPVTNASSLSTGHATPLHVTSPSSASTGHATPLPVTSTSSASTGHATPLPVTSTSSASTGHATPLPVTDNSSVSTGHATPLPVTGLSSATTDDTTRLPVTDVSSASTGQATPLPVTSLSSVSTGDTTPLPVTSPSSASTGHASPLLVTDASSASTGQATPLPVTDTSSVSTAHATPLPVTGLSSASTDDTTRLPVTDVSSASTGQAIPLPVTSPSSASTGDTTPLPVTDASSASTGDTTSLPVTIPSSASSGHTTSLPVTDASSVSTGHATSLLVTDASSVSTGDTTPLPVTDTNSASTGDTTPLHVTDASSVSTGHATSLPVTSLSSASTGDTTPLPVTSPSSASSGHTTSLPVTDASSVSTGHATSLPVTIPSSASSGHTTPLPVTDASSVPTGHATSLPVTDASSVSTGHATPLPVTDASSVSTGHATPLPVTDTSSVSTGQATPLPVTSLSSASSTGDTTPLPVTDTSSASTGQDTPLPVTSLFSVSTGDTTPLPVTSPSSASTGHATHLLVTDASSVSTGHATSLLVTDASSVSTGHATALHVTDASSLSTGDTTPLPVTSPSSASTGDTTPLPVTDTSSVSTGHATSLPVTDTSSASTGHATSLPVTDTSSASTGQATPLPVTSPSSASTGHAIPLLVTDTSSASTGQATPLPVTSLSSASTGDTTPLPVTDASSVSTGHATSLPVTSLSSVSTGDTTPLPVTSPSSASTGHATPLHVTSPSSASTGHATPLPVTSLSSASTGDTTPLPVTSPSSASTGHATPLHVTDASSVSTGDTTPLPVTSPSSASSGHTTPLPVTDASSASTGDTTPLPVTDTSSASTGHATHLPVTGLSSASTGDTTRLPVTDVSSASTGHATPLPVTSTSSASTGDTTPLPGTDTSSVSTGHTTPLLVTDASSVSTGDTTRLPVTSPSSASTGHTTPLPVTDTPSASTGDTTPLPVTNASSLSTRHATSLHVTSPSSASTGHATPLPVTDTSAASTGHATPLPVTSTSSASTGDTTPLPVTDTSSASTGHATPLPVTNTSSVSTGHATPLHVTSPSSASTGHTTPLPVTDASSVSTGHATSLPVTDASSVSTGHATPLPVTDASSVSTGHATPLPLTSLSSVSTGDTTPLPVTDTSSASTGQATPLPVTSLSSVSTGDTTPLPVTDTSSASTGHATSLPVTDTSSASTGHATPLHVTSPSSASTGHATPLPVTDTSSASTGHATPLPVTSLSSVSTGDTTPLPVTSPSSASTGHATPLLVTDASSASTGQATPLPVTSLSSVSTGDTTPLPVTSPSSASTGHATSLPVTDTSSASTGDTTSLPVTDTSSAYTGDTTSLPVTDTSSSSTGDTTPLLVTETSSASTGDTTPVPVTDTSSVSTGHATPLPVTGLSSASTGDTTRLPVTDISSASTGQATPLPVTNTSSVSTGDTMPLPVTSPSSASTGHATPLPVTSTSSASTGHATPVPVTSTSSASTGHTTPLPVTSPSSASTGHTTPLPVTDTSSASTGDTTPLPVTNASSLSTGHTTPLHVTIPSSASTGDTSTLPVTGASSASTGHATPLPVTDTSSVSTGHATPLPVTSFSSVSTGDTTPLPVTDASSASTGHATPLPVTDTSSASTGDTTPLPVTDASSASTGQATPLPVTSLSSVSTGDTTPLPVTIPSSASSGHTTSLPVSDTSSASTGQATPLPVTSLSSVSTGDTTPLLVTDASSVSTGHATPLPVTDTSSASTGDTTRLPVTDTSSASTGQATPLPVTSLSSVSTGDTTPLLVTNTSSVSTGHATSLPVTIPSSSSSGHTTPLPVTSTSSVSTGHVTPLHVTSPSSSSTGQATPLPVTSTSSSSTGQATPLPVTSTSSASTGHATPLPVTDASSVSTGHATPLPVTDTSSASTGDTTPLPVTDTSSASTGQATPLPVTSLSSVSTGHATPLAVSSATSASTVSSDSPLKMETSGMTTPSLKTDGGRRTATSPPPTTSQTIISTIPSTAMHTRSTAAPIPILPERGEAIQEFPSSPMGQTPGTWSSSGGPWTSPPHSSSRRLASPLAPLSVIPSTSQTMARSSSQSQTTRFSPTPTHSQQASQAGTLWPWWLRSGTMLTSPLVGGPHFIRNTRRSMVNTAC

SEQ ID NO: 53309 - protein, 1098 aa, Homo sapiens; identical to SEQ ID NO: 53230
  Payload ID: 10597
  Gene Symbol: MUC4
  Gene Name: mucin 4, cell surface associated
  ENSP ID: ENSP00000487412
  MOD_RES (1)..(1): Any amino acid

SEQ ID NO: 53310 - protein, 144 aa, Homo sapiens; identical to SEQ ID NO: 53196
  Payload ID: 10597
  Gene Symbol: MUC4
  Gene Name: mucin 4, cell surface associated
  ENSP ID: ENSP00000487427
  MOD_RES (1)..(1): Any amino acid

SEQ ID NO: 53311 - protein, 4404 aa, Homo sapiens; identical to SEQ ID NO: 53308
  Payload ID: 10597
  Gene Symbol: MUC4
  Gene Name: mucin 4, cell surface associated
  ENSP ID: ENSP00000487451
  MOD_RES (1)..(1): Any amino acid

SEQ ID NO: 53312 - protein, 4403 aa, Homo sapiens; identical to SEQ ID NO: 53236
  Payload ID: 10597
  Gene Symbol: MUC4
  Gene Name: mucin 4, cell surface associated
  ENSP ID: ENSP00000487471
  MOD_RES (1)..(1): Any amino acid

SEQ ID NO: 53313 - protein, 1098 aa, Homo sapiens
  Payload ID: 10597
  Gene Symbol: MUC4
  Gene Name: mucin 4, cell surface associated
  ENSP ID: ENSP00000487492
  MOD_RES (1)..(1): Any amino acid
XVSLFPYGADAGDLEFVRRTVDFTSPLFKPATGFPLGSSLRDSLYFTDNGQIIFPESDYQIFSYPNPLPTGFTGRDPVALVAPFWDDADFSTGRGTTFYQEYETFYGEHSLLVQQAESWIRKITNNGGYKARWALKVTWVNAHAYPAQWTLGSNTYQAILSTDGSRSYALFLYQSGGMQWDVAQRSGKPVLMGFSSGDGYFENSPLMSQPVWERYRPDRFLNSNSGLQGLQFYRLHREERPNYRLECLQWLKSQPRWPSWGWNQVSCPCSWQQGRRDLRFQPVSIGRWGLGSRQLCSFTSWRGGVCCSYGPWGEFREGWHVQRPWQLAQELEPQSWCCRWNDKPYLCALYQQRRPHVGCATYRPPQPAWMFGDPHITTLDGVSYTFNGLGDFLLVGAQDGNSSFLLQGRTAQTGSAQATNFIAFAAQYRSSSLGPVTVQWLLEPHDAIRVLLDNQTVTFQPDHEDGGGQETFNATGVLLSRNGSEVSASFDGWATVSVIALSNILHSSASLPPEYQNRTEGLLGVWNNNPEDDFRMPNGSTIPPGSPEEMLFHFGMTWQINGTGLLGKRNDQLPSNFTPVFYSQLQKNSSWAEHLISNCDGDSSCIYDTLALRNASIGLHTREVSKNYEQANATLNQYPPSINGGRVIEAYKGQTTLIQYTSNAEDANFTLRDSCTDLELFENGTLLWTPKSLEPFTLEILARSAKIGLASALQPRTVVCHCNAESQCLYNQTSRVGNSSLEVAGCKCDGGTFGRYCEGSEDACEEPCFPSVHCVPGKGCEACPPNLTGDGRHCAALGSSFLCQNQSCPVNYCYNQGHCYISQTLGCQPMCTCPPAFTDSRCFLAGNNFSPTVNLELPLRVIQLLLSEEENASMAEVNASVAYRLGTLDMRAFLRNSQVERIDSAAPASGSPIQHWMVISEFQYRPRGPVIDFLNNQLLAAVVEAFLYHVPRRSEEPRNDVVFQPISGEDVRDVTALNVSTLKAYFRCDGYKGYDLVYSPQSGFTCVSPCSRGYCDHGGQCQHLPSGPRCSCVSFSIYTAWGEHCEHLSMKLDAFFGIFFGALGGLLLLGVGTFVVLRFWGCSGARFSYFLNSAEALP

SEQ ID NO: 53314 - protein, 4416 aa, Homo sapiens
  Payload ID: 10597
  Gene Symbol: MUC4
  Gene Name: mucin 4, cell surface associated
  ENSP ID: ENSP00000487502
  MOD_RES (1)..(1): Any amino acid
XTTEDTLITGSKTAAPVTSTGSTTATLEGQSTAASSRTSNQDISASSQNHQTKSTETTSKAQTDTLTQMMTSTLFSSPSVHNVMETAPPDEMTTSFPSSVTNTLMMTSKTITMTTSTDSTLGNTEETSTAGTESSTPVTSAVSITAGQEGQSRTTSWRTSIQDTSASSQNHWTRSTQTTRESQTSTLTHRTTSTPSFSPSVHNVTGTVSQKTSPSGETATSSLCSVTNTSMMTSEKITVTTSTGSTLGNPGETSSVPVTGSLMPVTSAALVTFDPEGQSPATFSRTSTQDTTAFSKNHQTQSVETTRVSQINTLNTLTPVTTSTVLSSPSGFNPSGTVSQETFPSGETTTSSPSSVSNTFLVTSKVFRMPTSRDSTLGNTEETSLSVSGTISAITSKVSTIWWSDTLSTALSPSSLPPKISTAFHTQQSEGAETTGRPHERSSFSPGVSQEIFTLHETTTWPSSFSSKGHTTWSQTELPSTSTGAATRLVTGNPSTGTAGTIPRVPSKVSAIGEPGEPTTYSSHSTTLPKTTGAGAQTQWTQETGTTGEALLSSPSYSVTQMIKTATSPSSSPMLDRHTSQQITTAPSTNHSTIHSTSTSPQESPAVSQRGHTQAPQTTQESQTTRSVSPMTDTKTVTTPGSSFTASGHSPSEIVPQDAPTISAATTFAPAPTGDGHTTQAPTTALQAAPSSHDATLGPSGGTSLSKTGALTLANSVVSTPGGPEGQWTSASASTSPDTAAAMTHTHQAESTEASGQTQTSEPASSGSRTTSAGTATPSSSGASGTTPSGSEGISTSGETTRFSSNPSRDSHTTQSTTELLSASASHGAIPVSTGMASSIVPGTFHPTLSEASTAGRPTGQSSPTSPSASPQETAAISRMAQTQRTRTSRGSDTISLASQATDTFSTVPPTPPSITSTGLTSPQTETHTLSPSGSGKTFTTALISNATPLPVTYASSASTGHTTPLHVTDASSVSTGHATPLPVTSPSSVSTGHTTPLPVTDTSSESTGHVTPLPVTSFSSASTGDSTPLPVTDTSSASTGHVTPLPVTSLSSASTGDTTPLPVTDTSSASTGHATSLPVTDTSSVSTGHTTPLPVTDTSSASTGHATSLPVTDTSSVSTGHTTPLHVTDASSASTGQATPLPVTSLSSVSTGDTTPLPVTSPSSASTGHATPLLVTDTSSASTGHATPLPVTDASSVSTDHATSLPVTIPSAASTGHTTPLPVTDTSSASTGQATSLLVTDTSSVSTGDTTPLPVTSTSSASTGHVTPLHVTSPSSASTGHATPLPVTSLSSASTGDTMPLPVTSPSSASTGDTTPLPVTDASSVSTGHTTPLHVTDASSASTGQATPLPVTSLSSVSTGDTTPLPVTSPSSASTGHATPLLVTDTSSASTGHATPLPVTDASSVSTDHATSLPVTIPSAASTGHTTPLPVTDTSSASTGQATSLLVTDTSSVSTGDTTPLPVTSTSSASTGHVTPLHVTSPSSASTGHATPLPVTSLSSASTGDTMPLPVTSPSSASTGDTTPLPVTDASSVSTGHTTPLPVTSPSSASTGHTTPLPVTDTSSASKGDTTPLPVTSPSSASTGHTTPLPVTDTSSASTGDTTPLPVTNASSLSTGHATPLHVTSPSSASTGHATPLPVTSTSSASTGHATPLPVTGLSSATTDDTTRLPVTDVSSASTGQATPLPVTSLSSVSTGDTTPLPVTSPSSASTGHASPLLVTDASSASTGQATPLPVTDTSSVSTAHATPLPVTGLSSASTDDTTRLPVTDVSSASTGQAIPLPVTSPSSASTGDTTPLPVTDASSASTGDTTSLPVTIPSSASSGHTTSLPVTDASSVSTGHATSLLVTDASSVSTGDTTPLPVTDTNSASTGDTTPLHVTDASSVSTGHATSLPVTSLSSASTGDTTPLPVTSPSSASSGHTTPLPVTDASSVPTGHATSLPVTDASSVSTGHATPLPVTDASSVSTGHATPLPVTDTSSVSTGQATPLPVTSLSSASTGDTTPLPVTDTSSASTGHAPHLPVTGLSSASTGDTTRLPVTNVSSASTGHATPLPVTSTSSASTGDTTPLPGTDTSSVSTGHTTPLLVTDASSVSTGDTTRLPVTSPSSASTGHTTPLHVTDASSVSTGHTTPLPVTDTSSASTGQATSLLVTDTSSVSTGDTTPLPVTSTSSASTGHVTPLHVTSPSSASTGHATPLPVTSLSSASTGDTTPLPVTDTSSVSTGHTTPLPVTSPSSASTGHTTPLPVTDTSSASKGDTTPLPVTSPSSASTGHTTPLPVTDTSSASTGDTTPLPVTNASSLSTGHATPLHVTSPSSASTGHATPLPVTSTSSASTGHATPLPVTSTSSASTGHATPLPVTDNSSVSTGHATPLPVTGLSSATTDDTTRLPVTDVSSASTGQATPLPVTSLSSVSTGDTTPLPVTSPSSASTGHASPLLVTDASSASTGQATPLPVTDTSSVSTAHATPLPVTGLSSASTDDTTRLPVTDVSSASTGQAIPLPVTSPSSASTGDTTPLPVTDASSASTGDTTSLPVTIPSSASSGHTTSLPVTDASSVSTGHATSLLVTDASSVSTGDTTPLPVTDTNSASTGDTTPLHVTDASSVSTGHATSLPVTSLSSASTGDTTPLPVTSPSSASSGHTTSLPVTDASSVSTGHATSLPVTIPSSASSGHTTPLPVTDASSVPTGHATSLPVTDASSVSTGHATPLPVTDASSVSTGHATPLPVTDTSSVSTGQATPLPVTSLSSASSTGDTTPLPVTDTSSASTGQDTPLPVTSLFSVSTGDTTPLPVTSPSSASTGHATHLLVTDASSVSTGHATSLLVTDASSVSTGHATALHVTDASSLSTGDTTPLPVTSPSSASTGDTTPLPVTDTSSVSTGHATSLPVTDTSSASTGHATSLPVTDTSSASTGQATPLPVTSPSSASTGHAIPLLVTDTSSASTGQATPLPVTSLSSASTGDTTPLPVTDASSVSTGHATSLPVTSLSSVSTGDTTPLPVTSPSSASTGHATPLHVTSPSSASTGHATPLPVTSLSSASTGDTTPLPVTSPSSASTGHATPLHVTDASSVSTGDTTPLPVTSPSSASSGHTTPLPVTDASSASTGDTTPLPVTDTSSASTGHATHLPVTGLSSASTGDTTRLPVTDVSSASTGHATPLPVTSTSSASTGDTTPLPGTDTSSVSTGHTTPLLVTDASSVSTGDTTRLPVTSPSSASTGHTTPLPVTDTPSASTGDTTPLPVTNASSLSTRHATSLHVTSPSSASTGHATPLPVTDTSAASTGHATPLPVTSTSSASTGDTTPLPVTDTSSASTGHATPLPVTNTSSVSTGHATPLHVTSPSSASTGHTTPLPVTDASSVSTGHATSLPVTDASSVSTGHATPLPVTDASSVSTGHATPLPLTSLSSVSTGDTTPLPVTDTSSASTGQATPLPVTSLSSVSTGDTTPLPVTDTSSASTGHATSLPVTDTSSASTGHATPLHVTSPSSASTGHATPLPVTDTSSASTGHATPLPVTSLSSVSTGDTTPLPVTSPSSASTGHATPLLVTDASSASTGQATPLPVTSLSSVSTGDTTPLPVTSPSSASTGHATSLPVTDTSSASTGDTTSLPVTDTSSAYTGDTTSLPVTDTSSSSTGDTTPLLVTETSSASTGDTTPVPVTDTSSVSTGHATPLPVTGLSSASTGDTTRLPVTDISSASTGQATPLPVTNTSSVSTGDTMPLPVTSPSSASTGHATPLPVTSTSSASTGHATPVPVTSTSSASTGHTTPLPVTSPSSASTGHTTPLPVTDTSSASTGDTTPLPVTNASSLSTGHTTPLHVTIPSSASTGDTSTLPVTGASSASTGHATPLPVTDTSSVSTGHATPLPVTSFSSVSTGDTTPLPVTDASSASTGHATPLPVTDTSSASTGDTTPLPVTDASSASTGQATPLPVTSLSSVSTGDTTPLPVTIPSSASSGHTTSLPVSDTSSASTGQATPLPVTSLSSVSTGDTTPLLVTDASSVSTGHATPLPVTDTSSASTGDTTRLPVTDTSSASTGQATPLPVTSLSSVSTGDTTPLLVTNTSSVSTGHATSLPVTIPSSSSSGHTTPLPVTSTSSVSTGHVTPLHVTSPSSSSTGQATPLPVTSTSSSSTGQATPLPVTSTSSASTGHATPLPVTDASSVSTGHATPLPVTDTSSASTGDTTPLPVTDTSSASTGQATPLPVTSLSSVSTGHATPLAVSSATSASTVSSDSPLKMETSGMTTPSLKTDGGRRTATSPPPTTSQTIISTIPSTAMHTRSTAAPIPILPERGVSLFPYGADAGDLEFVRRTVDFTSPLFKPATGFPLGSSLRDSLYASQAGTLWPWWLRSGTMLTSPLVGGPHFIRATPTKPSSPRTGAGPMPCFSTRAVGCSGTWPSAQASRCSWASLVEMAISKTAH

SEQ ID NO: 53315 - protein, 4403 aa, Homo sapiens; identical to SEQ ID NO: 53236
  Payload ID: 10597
  Gene Symbol: MUC4
  Gene Name: mucin 4, cell surface associated
  ENSP ID: ENSP00000487506
  MOD_RES (1)..(1): Any amino acid

SEQ ID NO: 53316 - protein, 1176 aa, Homo sapiens
  Payload ID: 10597
  Gene Symbol: MUC4
  Gene Name: mucin 4, cell surface associated
  ENSP ID: ENSP00000487522
MKGARWRRVPWVSLSCLCLCLLPHVVPGMTTPSLKTDGGRRTATSPPPTTSQTIISTIPSTAMHTRSTAAPIPILPERGVSLFPYGADAGDLEFVRRTVDFTSPLFKPATGFPLGSSLRDSLYFTDNGQIIFPESDYQIFSYPNPLPTGFTGRDPVALVAPFWDDADFSTGRGTTFYQEYETFYGEHSLLVQQAESWIRKMTNNGGYKARWALKVTWVNAHAYPAQWTLGSNTYQAILSTDGSRSYALFLYQSGGMQWDVAQRSGNPVLMGFSSGDGYFENSPLMSQPVWERYRPDRFLNSNSGLQGLQFYRLHREERPNYRLECLQWLKSQPRWPSWGWNQVSCPCSWQQGRRDLRFQPVSIGRWGLGSRQLCSFTSWRGGVCCSYGPWGEFREGWHVQRPWQLAQELEPQSWCCRWNDKPYLCALYQQRRPHVGCATYRPPQPAWMFGDPHITTLDGVSYTFNGLGDFLLVGAQDGNSSFLLQGRTAQTGSAQATNFIAFAAQYRSSSLGPVTVQWLLEPHDAIRVLLDNQTVTFQPDHEDGGGQETFNATGVLLSRNGSEVSASFDGWATVSVIALSNILHASASLPPEYQNRTEGLLGVWNNNPEDDFRMPNGSTIPPGSPEEMLFHFGMTWQINGTGLLGKRNDQLPSNFTPVFYSQLQKNSSWAEHLISNCDGDSSCIYDTLALRNASIGLHTREVSKNYEQANATLNQYPPSINGGRVIEAYKGQTTLIQYTSNAEDANFTLRDSCTDLELFENGTLLWTPKSLEPFTLEILARSAKIGLASALQPRTVVCHCNAESQCLYNQTSRVGNSSLEVAGCKCDGGTFGRYCEGSEDACEEPCFPSVHCVPGKGCEACPPNLTGDGRHCAALGSSFLCQNQSCPVNYCYNQGHCYISQTLGCQPMCTCPPAFTDSRCFLAGNNFSPTVNLELPLRVIQLLLSEEENASMAEVNASVAYRLGTLDMRAFLRNSQVERIDSAAPASGSPIQHWMVISEFQYRPRGPVIDFLNNQLLAAVVEAFLYHVPRRSEEPRNDVVFQPISGEDVRDVTALNVSTLKAYFRCDGYKGYDLVYSPQSGFTCVSPCSRGYCDHGGQCQHLPSGPRCSCVSFSIYTAWGEHCEHLSMKLDAFFGIFFGALGGLLLLGVGTFVVLRFWGCSGARFSYFLNSAEALP

SEQ ID NO: 53317 - protein, 137 aa, Homo sapiens; identical to SEQ ID NO: 53256
  Payload ID: 10597
  Gene Symbol: MUC4
  Gene Name: mucin 4, cell surface associated
  ENSP ID: ENSP00000487547
  MOD_RES (1)..(1): Any amino acid

SEQ ID NO: 53318 - protein, 4418 aa, Homo sapiens
  Payload ID: 10597
  Gene Symbol: MUC4
  Gene Name: mucin 4, cell surface associated
  ENSP ID: ENSP00000487564
  MOD_RES (1)..(1): Any amino acid
XTTEDTLITGSKTAAPVTSTGSTTATLEGQSTAASSRTSNQDISASSQNHQTKSTETTSKAQTDTLTQMMTSTLFSSPSVHNVMETAPPDEMTTSFPSSVTNTLMMTSKTITMTTSTDSTLGNTEETSTAGTESSTPVTSAVSITAGQEGQSRTTSWRTSIQDTSASSQNHWTRSTQTTRESQTSTLTHRTTSTPSFSPSVHNVTGTVSQKTSPSGETATSSLCSVTNTSMMTSEKITVTTSTGSTLGNPGETSSVPVTGSLMPVTSAALVTFDPEGQSPATFSRTSTQDTTAFSKNHQTQSVETTRVSQINTLNTLTPVTTSTVLSSPSGFNPSGTVSQETFPSGETTTSSPSSVSNTFLVTSKVFRMPTSRDSTLGNTEETSLSVSGTISAITSKVSTIWWSDTLSTALSPSSLPPKISTAFHTQQSEGAETTGRPHERSSFSPGVSQEIFTLHETTTWPSSFSSKGHTTWSQTELPSTSTGAATRLVTGNPSTGTAGTIPRVPSKVSAIGEPGEPTTYSSHSTTLPKTTGAGAQTQWTQETGTTGEALLSSPSYSVTQMIKTATSPSSSPMLDRHTSQQITTAPSTNHSTIHSTSTSPQESPAVSQRGHTQAPQTTQESQTTRSVSPMTDTKTVTTPGSSFTASGHSPSEIVPQDAPTISAATTFAPAPTGDGHTTQAPTTALQAAPSSHDATLGPSGGTSLSKTGALTLANSVVSTPGGPEGQWTSASASTSPDTAAAMTHTHQAESTEASGQTQTSEPASSGSRTTSAGTATPSSSGASGTTPSGSEGISTSGETTRFSSNPSRDSHTTQSTTELLSASASHGAIPVSTGMASSIVPGTFHPTLSEASTAGRPTGQSSPTSPSASPQETAAISRMAQTQRTRTSRGSDTISLASQATDTFSTVPPTPPSITSTGLTSPQTETHTLSPSGSGKTFTTALISNATPLPVTYASSASTGHTTPLHVTDASSVSTGHATPLPVTSPSSVSTGHTTPLPVTDTSSESTGHVTPLPVTSFSSASTGDSTPLPVTDTSSASTGHVTPLPVTSLSSASTGDTTPLPVTDTSSASTGHATSLPVTDTSSVSTGHTTPLPVTDTSSASTGHATSLPVTDTSSVSTGHTTPLHVTDASSASTGQATPLPVTSLSSVSTGDTTPLPVTSPSSASTGHATPLLVTDTSSASTGHATPLPVTDASSVSTDHATSLPVTIPSAASTGHTTPLPVTDTSSASTGQATSLLVTDTSSVSTGDTTPLPVTSTSSASTGHVTPLHVTSPSSASTGHATPLPVTSLSSASTGDTMPLPVTSPSSASTGDTTPLPVTDASSVSTGHTTPLHVTDASSASTGQATPLPVTSLSSVSTGDTTPLPVTSPSSASTGHATPLLVTDTSSASTGHATPLPVTDASSVSTDHATSLPVTIPSAASTGHTTPLPVTDTSSASTGQATSLLVTDTSSVSTGDTTPLPVTSTSSASTGHVTPLHVTSPSSASTGHATPLPVTSLSSASTGDTMPLPVTSPSSASTGDTTPLPVTDASSVSTGHTTPLPVTSPSSASTGHTTPLPVTDTSSASKGDTTPLPVTSPSSASTGHTTPLPVTDTSSASTGDTTPLPVTNASSLSTGHATPLHVTSPSSASTGHATPLPVTSTSSASTGHATPLPVTGLSSATTDDTTRLPVTDVSSASTGQATPLPVTSLSSVSTGDTTPLPVTSPSSASTGHASPLLVTDASSASTGQATPLPVTDTSSVSTAHATPLPVTGLSSASTDDTTRLPVTDVSSASTGQAIPLPVTSPSSASTGDTTPLPVTDASSASTGDTTSLPVTIPSSASSGHTTSLPVTDASSVSTGHATSLLVTDASSVSTGDTTPLPVTDTNSASTGDTTPLHVTDASSVSTGHATSLPVTSLSSASTGDTTPLPVTSPSSASSGHTTPLPVTDASSVPTGHATSLPVTDASSVSTGHATPLPVTDASSVSTGHATPLPVTDTSSVSTGQATPLPVTSLSSASTGDTTPLPVTDTSSASTGHAPHLPVTGLSSASTGDTTRLPVTNVSSASTGHATPLPVTSTSSASTGDTTPLPGTDTSSVSTGHTTPLLVTDASSVSTGDTTRLPVTSPSSASTGHTTPLHVTDASSVSTGHTTPLPVTDTSSASTGQATSLLVTDTSSVSTGDTTPLPVTSTSSASTGHVTPLHVTSPSSASTGHATPLPVTSLSSASTGDTTPLPVTDTSSVSTGHTTPLPVTSPSSASTGHTTPLPVTDTSSASKGDTTPLPVTSPSSASTGHTTPLPVTDTSSASTGDTTPLPVTNASSLSTGHATPLHVTSPSSASTGHATPLPVTSTSSASTGHATPLPVTSTSSASTGHATPLPVTDNSSVSTGHATPLPVTGLSSATTDDTTRLPVTDVSSASTGQATPLPVTSLSSVSTGDTTPLPVTSPSSASTGHASPLLVTDASSASTGQATPLPVTDTSSVSTAHATPLPVTGLSSASTDDTTRLPVTDVSSASTGQAIPLPVTSPSSASTGDTTPLPVTDASSASTGDTTSLPVTIPSSASSGHTTSLPVTDASSVSTGHATSLLVTDASSVSTGDTTPLPVTDTNSASTGDTTPLHVTDASSVSTGHATSLPVTSLSSASTGDTTPLPVTSPSSASSGHTTSLPVTDASSVSTGHATSLPVTIPSSASSGHTTPLPVTDASSVPTGHATSLPVTDASSVSTGHATPLPVTDASSVSTGHATPLPVTDTSSVSTGQATPLPVTSLSSASSTGDTTPLPVTDTSSASTGQDTPLPVTSLFSVSTGDTTPLPVTSPSSASTGHATHLLVTDASSVSTGHATSLLVTDASSVSTGHATALHVTDASSLSTGDTTPLPVTSPSSASTGDTTPLPVTDTSSVSTGHATSLPVTDTSSASTGHATSLPVTDTSSASTGQATPLPVTSPSSASTGHAIPLLVTDTSSASTGQATPLPVTSLSSASTGDTTPLPVTDASSVSTGHATSLPVTSLSSVSTGDTTPLPVTSPSSASTGHATPLHVTSPSSASTGHATPLPVTSLSSASTGDTTPLPVTSPSSASTGHATPLHVTDASSVSTGDTTPLPVTSPSSASSGHTTPLPVTDASSASTGDTTPLPVTDTSSASTGHATHLPVTGLSSASTGDTTRLPVTDVSSASTGHATPLPVTSTSSASTGDTTPLPGTDTSSVSTGHTTPLLVTDASSVSTGDTTRLPVTSPSSASTGHTTPLPVTDTPSASTGDTTPLPVTNASSLSTRHATSLHVTSPSSASTGHATPLPVTDTSAASTGHATPLPVTSTSSASTGDTTPLPVTDTSSASTGHATPLPVTNTSSVSTGHATPLHVTSPSSASTGHTTPLPVTDASSVSTGHATSLPVTDASSVSTGHATPLPVTDASSVSTGHATPLPLTSLSSVSTGDTTPLPVTDTSSASTGQATPLPVTSLSSVSTGDTTPLPVTDTSSASTGHATSLPVTDTSSASTGHATPLHVTSPSSASTGHATPLPVTDTSSASTGHATPLPVTSLSSVSTGDTTPLPVTSPSSASTGHATPLLVTDASSASTGQATPLPVTSLSSVSTGDTTPLPVTSPSSASTGHATSLPVTDTSSASTGDTTSLPVTDTSSAYTGDTTSLPVTDTSSSSTGDTTPLLVTETSSASTGDTTPVPVTDTSSVSTGHATPLPVTGLSSASTGDTTRLPVTDISSASTGQATPLPVTNTSSVSTGDTMPLPVTSPSSASTGHATPLPVTSTSSASTGHATPVPVTSTSSASTGHTTPLPVTSPSSASTGHTTPLPVTDTSSASTGDTTPLPVTNASSLSTGHTTPLHVTIPSSASTGDTSTLPVTGASSASTGHATPLPVTDTSSVSTGHATPLPVTSFSSVSTGDTTPLPVTDASSASTGHATPLPVTDTSSASTGDTTPLPVTDASSASTGQATPLPVTSLSSVSTGDTTPLPVTIPSSASSGHTTSLPVSDTSSASTGQATPLPVTSLSSVSTGDTTPLLVTDASSVSTGHATPLPVTDTSSASTGDTTRLPVTDTSSASTGQATPLPVTSLSSVSTGDTTPLLVTNTSSVSTGHATSLPVTIPSSSSSGHTTPLPVTSTSSVSTGHVTPLHVTSPSSSSTGQATPLPVTSTSSSSTGQATPLPVTSTSSASTGHATPLPVTDASSVSTGHATPLPVTDTSSASTGDTTPLPVTDTSSASTGQATPLPVTSLSSVSTGHATPLAVSSATSASTVSSDSPLKMETSGMTTPSLKTDGGRRTATSPPPTTSQTIISTIPSTAMHTRSTAAPIPILPERGVSLFPYGADAGDLEFVRRTVDFTSPLFKPATGFPLGSSLRDSLYASQAGTLWPWWLRSGTMLTSPLVGGPHFIRATPTKPSSPRTGAGPMPCFSTRAVGCSGTWPSAQWRWLFRKQPTDVPASVGEVSP

SEQ ID NO: 53319 - protein, 1098 aa, Homo sapiens; identical to SEQ ID NO: 53230
  Payload ID: 10597
  Gene Symbol: MUC4
  Gene Name: mucin 4, cell surface associated
  ENSP ID: ENSP00000487574
  MOD_RES (1)..(1): Any amino acid

SEQ ID NO: 53320 - protein, 167 aa, Homo sapiens; identical to SEQ ID NO: 53224
  Payload ID: 10597
  Gene Symbol: MUC4
  Gene Name: mucin 4, cell surface associated
  ENSP ID: ENSP00000487575
  MOD_RES (1)..(1): Any amino acid

SEQ ID NO: 53321 - protein, 157 aa, Homo sapiens; identical to SEQ ID NO: 53259
  Payload ID: 10597
  Gene Symbol: MUC4
  Gene Name: mucin 4, cell surface associated
  ENSP ID: ENSP00000487581
  MOD_RES (1)..(1): Any amino acid

SEQ ID NO: 53322 - protein, 5654 aa, Homo sapiens
  Payload ID: 10598
  Gene Symbol: MUC5AC
  Gene Name: mucin 5AC, oligomeric mucus/gel-forming
  Uniprot ID: P98088
  ENSP ID: ENSP00000485659
MSVGRRKLALLWALALALACTRHTGHAQDGSSESSYKHHPALSPIARGPSGVPLRGATVFPSLRTIPVVRASNPAHNGRVCSTWGSFHYKTFDGDVFRFPGLCNYVFSEHCGAAYEDFNIQLRRSQESAAPTLSRVLMKVDGVVIQLTKGSVLVNGHPVLLPFSQSGVLIQQSSSYTKVEARLGLVLMWNHDDSLLLELDTKYANKTCGLCGDFNGMPVVSELLSHNTKLTPMEFGNLQKMDDPTDQCQDPVPEPPRNCSTGFGICEELLHGQLFSGCVALVDVGSYLEACRQDLCFCEDTDLLSCVCHTLAEYSRQCTHAGGLPQDWRGPDFCPQKCPNNMQYHECRSPCADTCSNQEHSRACEDHCVAGCFCPEGTVLDDIGQTGCVPVSKCACVYNGAAYAPGATYSTDCTNCTCSGGRWSCQEVPCPGTCSVLGGAHFSTFDGKQYTVHGDCSYVLTKPCDSSAFTVLAELRRCGLTDSETCLKSVTLSLDGAQTVVVIKASGEVFLNQIYTQLPISAANVTIFRPSTFFIIAQTSLGLQLNLQLVPTMQLFMQLAPKLRGQTCGLCGNFNSIQADDFRTLSGVVEATAAAFFNTFKTQAACPNIRNSFEDPCSLSVENEKYAQHWCSQLTDADGPFGRCHAAVKPGTYYSNCMFDTCNCERSEDCLCAALSSYVHACAAKGVQLGGWRDGVCTKPMTTCPKSMTYHYHVSTCQPTCRSLSEGDITCSVGFIPVDGCICPKGTFLDDTGKCVQASNCPCYHRGSMIPNGESVHDSGAICTCTHGKLSCIGGQAPAPVCAAPMVFFDCRNATPGDTGAGCQKSCHTLDMTCYSPQCVPGCVCPDGLVADGEGGCITAEDCPCVHNEASYRAGQTIRVGCNTCTCDSRMWRCTDDPCLATCAVYGDGHYLTFDGQSYSFNGDCEYTLVQNHCGGKDSTQDSFRVVTENVPCGTTGTTCSKAIKIFLGGFELKLSHGKVEVIGTDESQEVPYTIRQMGIYLVVDTDIGLVLLWDKKTSIFINLSPEFKGRVCGLCGNFDDIAVNDFATRSRSVVGDVLEFGNSWKLSPSCPDALAPKDPCTANPFRKSWAQKQCSILHGPTFAACHAHVEPARYYEACVNDACACDSGGDCECFCTAVAAYAQACHEVGLCVSWRTPSICPLFCDYYNPEGQCEWHYQPCGVPCLRTCRNPRGDCLRDVRGLEGCYPKCPPEAPIFDEDKMQCVATCPTPPLPPRCHVHGKSYRPGAVVPSDKNCQSCLCTERGVECTYKAEACVCTYNGQRFHPGDVIYHTTDGTGGCISARCGANGTIERRVYPCSPTTPVPPTTFSFSTPPLVVSSTHTPSNGPSSAHTGPPSSAWPTTAGTSPRTRLPTASASLPPVCGEKCLWSPWMDVSRPGRGTDSGDFDTLENLRAHGYRVCESPRSVECRAEDAPGVPLRALGQRVQCSPDVGLTCRNREQASGLCYNYQIRVQCCTPLPCSTSSSPAQTTPPTTSKTTETRASGSSAPSSTPGTVSLSTARTTPAPGTATSVKKTFSTPSPPPVPATSTSSMSTTAPGTSVVSSKPTPTEPSTSSCLQELCTWTEWIDGSYPAPGINGGDFDTFQNLRDEGYTFCESPRSVQCRAESFPNTPLADLGQDVICSHTEGLICLNKNQLPPICYNYEIRIQCCETVNVCRDITRLPKTVATTRPTPHPTGAQTQTTFTTHMPSASTEQPTATSRGGPTATSVTQGTHTTLVTRNCHPRCTWTKWFDVDFPSPGPHGGDKETYNNIIRSGEKICRRPEEITRLQCRAKSHPEVSIEHLGQVVQCSREEGLVCRNQDQQGPFKMCLNYEVRVLCCETPRGCHMTSTPGSTSSSPAQTTPSTTSKTTETQASGSSAPSSTPGTVSLSTARTTPAPGTATSVKKTFSTPSPPPVPATSTSSMSTTAPGTSVVSSKPTPTEPSTSSCLQELCTWTEWIDGSYPAPGINGGDFDTFQNLRDEGYTFCESPRSVQCRAESFPNTPLADLGQDVICSHTEGLICLNKNQLPPICYNYEIRIQCCETVNVCRDITRPPKTVATTRPTPHPTGAQTQTTFTTHMPSASTEQPTATSRGGPTATSVTQGTHTTPVTRNCHPRCTWTTWFDVDFPSPGPHGGDKETYNNIIRSGEKICRRPEEITRLQCRAKSHPEVSIEHLGQVVQCSREEGLVCRNQDQQGPFKMCLNYEVRVLCCETPKGCPVTSTPVTAPSTPSGRATSPTQSTSSWQKSRTTTLVTTSTTSTPQTSTTYAHTTSTTSAPTARTTSAPTTRTTSASPASTTSGPGNTPSPVPTTSTISAPTTSITSAPTTSTTSAPTSSTTSGPGTTPSPVPTTSITSAPTTSTTSAPTTSTTSARTSSTTSATTTSRISGPETTPSPVPTTSTTSATTTSTTSAPTTSTTSAPTSSTTSSPQTSTTSAPTTSTTSGPGTTPSPVPTTSTTSAPTTRTTSAPKSSTTSAATTSTTSGPETTPRPVPTTSTTSSPTTSTTSAPTTSTTSASTTSTTSGAGTTPSPVPTTSTTSAPTTSTTSAPISSTTSATTTSTTSGPGTTPSPVPTTSTTSAPTTSTTSGPGTTPSAVPTTSITSAPTTSTNSAPISSTTSATTTSRISGPETTPSPVPTASTTSASTTSTTSGPGTTPSPVPTTSTISVPTTSTTSASTTSTTSASTTSTTSGPGTTPSPVPTTSTTSAPTTSTTSAPTTSTISAPTTSTTSATTTSTTSAPTPRRTSAPTTSTISASTTSTTSATTTSTTSATTTSTISAPTTSTTLSPTTSTTSTTITSTTSAPISSTTSTPQTSTTSAPTTSTTSGPGTTSSPVPTTSTTSAPTTSTTSAPTTRTTSVPTSSTTSTATTSTTSGPGTTPSPVPTTSTTSAPTTRTTSAPTTSTTSAPTTSTTSAPTSSTTSATTTSTISVPTTSTTSVPGTTPSPVPTTSTISVPTTSTTSASTTSTTSGPGTTPSPVPTTSTTSAPTTSTTSAPTTSTISAPTTSTPSAPTTSTTLAPTTSTTSAPTTSTTSTPTSSTTSSPQTSTTSASTTSITSGPGTTPSPVPTTSTTSAPTTSTTSAATTSTISAPTTSTTSAPTTSTTSASTASKTSGLGTTPSPIPTTSTTSPPTTSTTSASTASKTSGPGTTPSPVPTTSTIFAPRTSTTSASTTSTTPGPGTTPSPVPTTSTASVSKTSTSHVSISKTTHSQPVTRDCHLRCTWTKWFDIDFPSPGPHGGDKETYNNIIRSGEKICRRPEEITRLQCRAESHPEVSIEHLGQVVQCSREEGLVCRNQDQQGPFKMCLNYEVRVLCCETPKGCPVTSTPVTAPSTPSGRATSPTQSTSSWQKSRTTTLVTTSTTSTPQTSTTSAPTTSTTSAPTTSTTSAPTTSTTSTPQTSISSAPTSSTTSAPTSSTISARTTSIISAPTTSTTSSPTTSTTSATTTSTTSAPTSSTTSTPQTSKTSAATSSTTSGSGTTPSPVTTTSTASVSKTSTSHVSVSKTTHSQPVTRDCHPRCTWTKWFDVDFPSPGPHGGDKETYNNIIRSGEKICRRPEEITRLQCRAKSHPEVSIEHLGQVVQCSREEGLVCRNQDQQGPFKMCLNYEVRVLCCETPKGCPVTSTSVTAPSTPSGRATSPTQSTSSWQKSRTTTLVTSSITSTTQTSTTSAPTTSTTPASIPSTTSAPTTSTTSAPTTSTTSAPTTSTTSTPQTTTSSAPTSSTTSAPTTSTISAPTTSTISAPTTSTTSAPTASTTSAPTSTSSAPTTNTTSAPTTSTTSAPITSTISAPTTSTTSTPQTSTISSPTTSTTSTPQTSTTSSPTTSTTSAPTTSTTSAPTTSTTSTPQTSISSAPTSSTTSAPTASTISAPTTSTTSFHTTSTTSPPTSSTSSTPQTSKTSAATSSTTSGSGTTPSPVPTTSTASVSKTSTSHVSVSKTTHSQPVTRDCHPRCTWTKWFDVDFPSPGPHGGDKETYNNIIRSGEKICRRPEEITRLQCRAESHPEVSIEHLGQVVQCSREEGLVCRNQDQQGPFKMCLNYEVRVLCCETPKGCPVTSTPVTAPSTPSGRATSPTQSTSSWQKSRTTTLVTTSTTSTPQTSTTSAPTTSTIPASTPSTTSAPTTSTTSAPTTSTTSAPTHRTTSGPTTSTTLAPTTSTTSAPTTSTNSAPTTSTISASTTSTISAPTTSTISSPTSSTTSTPQTSKTSAATSSTTSGSGTTPSPVPTTSTTSASTTSTTSAPTTSTTSGPGTTPSPVPSTSTTSAATTSTTSAPTTRTTSAPTSSMTSGPGTTPSPVPTTSTTSAPTTSTTSGPGTTPSPVPTTSTTSAPITSTTSGPGSTPSPVPTTSTTSAPTTSTTSASTASTTSGPGTTPSPVPTTSTTSAPTTRTTSASTASTTSGPGSTPSPVPTTSTTSAPTTRTTPASTASTTSGPGTTPSPVPTTSTTSASTTSTISLPTTSTTSAPITSMTSGPGTTPSPVPTTSTTSAPTTSTTSASTASTTSGPGTTPSPVPTTSTTSAPTTSTTSASTASTTSGPGTSLSPVPTTSTTSAPTTSTTSGPGTTPSPVPTTSTTSAPTTSTTSGPGTTPSPVPTTSTTPVSKTSTSHLSVSKTTHSQPVTSDCHPLCAWTKWFDVDFPSPGPHGGDKETYNNIIRSGEKICRRPEEITRLQCRAESHPEVNIEHLGQVVQCSREEGLVCRNQDQQGPFKMCLNYEVRVLCCETPRGCPVTSVTPYGTSPTNALYPSLSTSMVSASVASTSVASSSVASSSVAYSTQTCFCNVADRLYPAGSTIYRHRDLAGHCYYALCSQDCQVVRGVDSDCPSTTLPPAPATSPSISTSEPVTELGCPNAVPPRKKGETWATPNCSEATCEGNNVISLRPRTCPRVEKPTCANGYPAVKVADQDGCCHHYQCQCVCSGWGDPHYITFDGTYYTFLDNCTYVLVQQIVPVYGHFRVLVDNYFCGAEDGLSCPRSIILEYHQDRVVLTRKPVHGVMTNEIIFNNKVVSPGFRKNGIVVSRIGVKMYATIPELGVQVMFSGLIFSVEVPFSKFANNTEGQCGTCTNDRKDECRTPRGTVVASCSEMSGLWNVSIPDQPACHRPHPTPTTVGPTTVGSTTVGPTTVGSTTVGPTTPPAPCLPSPICQLILSKVFEPCHTVIPPLLFYEGCVFDRCHMTDLDVVCSSLELYAALCASHDICIDWRGRTGHMCPFTCPADKVYQPCGPSNPSYCYGNDSASLGALPEAGPITEGCFCPEGMTLFSTSAQVCVPTGCPRCLGPHGEPVKVGHTVGMDCQECTCEAATWTLTCRPKLCPLPPACPLPGFVPVPAAPQAGQCCPQYSCACNTSRCPAPVGCPEGARAIPTYQEGACCPVQNCSWTVCSINGTLYQPGAVVSSSLCETCRCELPGGPPSDAFVVSCETQICNTHCPVGFEYQEQSGQCCGTCVQVACVTNTSKSPAHLFYPGETWSDAGNHCVTHQCEKHQDGLVVVTTKKACPPLSCSLDEARMSKDGCCRFCPPPPPPYQNQSTCAVYHRSLIIQQQGCSSSEPVRLAYCRGNCGDSSSMYSLEGNTVEHRCQCCQELRTSLRNVTLHCTDGSSRAFSYTEVEECGCMGRRCPAPGDTQHSEEAEPEPSQEAESGSWERGVPVSPMH

SEQ ID NO: 53323 - protein, 153 aa, Homo sapiens
  Payload ID: 10599
  Gene Symbol: MUC5B
  Gene Name: mucin 5B, oligomeric mucus/gel-forming
  ENSP ID: ENSP00000434539
QPPPCNRPGFVTVTRPRAENPCCPETVCVCNTTTCPQSLPVCPPGQESICTQEEGDCCPTFRCRPQLCSYNGTFYGVGATFPGALPCHMCTCLSGDTQDPTVQCQEDACNNTTCPQGFEYKRVAGQCCGECVQTACLTPDGQPVQEAATGKAA

SEQ ID NO: 53324 - protein, 5762 aa, Homo sapiens
  Payload ID: 10599
  Gene Symbol: MUC5B
  Gene Name: mucin 5B, oligomeric mucus/gel-forming
  Uniprot ID: Q9HC84
  ENSP ID: ENSP00000436812
MGAPSACRTLVLALAAMLVVPQAETQGPVEPSWENAGHTMDGGAPTSSPTRRVSFVPPVTVFPSLSPLNPAHNGRVCSTWGDFHYKTFDGDVFRFPGLCNYVFSEHCRAAYEDFNVQLRRGLVGSRPVVTRVVIKAQGLVLEASNGSVLINGQREELPYSRTGLLVEQSGDYIKVSIRLVLTFLWNGEDSALLELDPKYANQTCGLCGDFNGLPAFNEFYAHNARLTPLQFGNLQKLDGPTEQCPDPLPLPAGNCTDEEGICHRTLLGPAFAECHALVDSTAYLAACAQDLCRCPTCPCATFVEYSRQCAHAGGQPRNWRCPELCPRTCPLNMQHQECGSPCTDTCSNPQRAQLCEDHCVDGCFCPPGTVLDDITHSGCLPLGQCPCTHGGRTYSPGTSFNTTCSSCTCSGGLWQCQDLPCPGTCSVQGGAHISTYDEKLYDLHGDCSYVLSKKCADSSFTVLAELRKCGLTDNENCLKAVTLSLDGGDTAIRVQADGGVFLNSIYTQLPLSAANITLFTPSSFFIVVQTGLGLQLLVQLVPLMQVFVRLDPAHQGQMCGLCGNFNQNQADDFTALSGVVEATGAAFANTWKAQAACANARNSFEDPCSLSVENENYARHWCSRLTDPNSAFSRCHSIINPKPFHSNCMFDTCNCERSEDCLCAALSSYVHACAAKGVQLSDWRDGVCTKYMQNCPKSQRYAYVVDACQPTCRGLSEADVTCSVSFVPVDGCTCPAGTFLNDAGACVPAQECPCYAHGTVLAPGEVVHDEGAVCSCTGGKLSCLGASLQKSTGCAAPMVYLDCSNSSAGTPGAECLRSCHTLDVGCFSTHCVSGCVCPPGLVSDGSGGCIAEEDCPCVHNEATYKPGETIRVDCNTCTCRNRRWECSHRLCLGTCVAYGDGHFITFDGDRYSFEGSCEYILAQDYCGDNTTHGTFRIVTENIPCGTTGTTCSKAIKLFVESYELILQEGTFKAVARGPGGDPPYKIRYMGIFLVIETHGMAVSWDRKTSVFIRLHQDYKGRVCGLCGNFDDNAINDFATRSRSVVGDALEFGNSWKLSPSCPDALAPKDPCTANPFRKSWAQKQCSILHGPTFAACRSQVDSTKYYEACVNDACACDSGGDCECFCTAVAAYAQACHDAGLCVSWRTPDTCPLFCDFYNPHGGCEWHYQPCGAPCLKTCRNPSGHCLVDLPGLEGCYPKCPPSQPFFNEDQMKCVAQCGCYDKDGNYYDVGARVPTAENCQSCNCTPSGIQCAHSLEACTCTYEDRTYSYQDVIYNTTDGLGACLIAICGSNGTIIRKAVACPGTPATTPFTFTTAWVPHSTTSPALPVSTVCVREVCRWSSWYNGHRPEPGLGGGDFETFENLRQRGYQVCPVLADIECRAAQLPDMPLEELGQQVDCDRMRGLMCANSQQSPPLCHDYELRVLCCEYVPCGPSPAPGTSPQPSLSASTEPAVPTPTQTTATEKTTLWVTPSIRSTAALTSQTGSSSGPVTVTPSAPGTTTCQPRCQWTEWFDEDYPKSEQLGGDVESYDKIRAAGGHLCQQPKDIECQAESFPNWTLAQVGQKVHCDVHFGLVCRNWEQEGVFKMCYNYRIRVLCCSDDHCRGRATTPPPTTELETATTTTTQALFSTPQPTSSPGLTRAPPASTTAVPTLSEGLTSPRYTSTLGTATTGGPTTPAGSTEPTVPGVATSTLPTRSALPGTTGSLGTWRPSQPPTLAPTTMATSRARPTGTASTASKEPLTTSLAPTLTSELSTSQAETSTPRTETTMSPLTNTTTSQGTTRCQPKCEWTEWFDVDFPTSGVAGGDMETFENIRAAGGKMCWAPKSIECRAENYPEVSIDQVGQVLTCSLETGLTCKNEDQTGRFNMCFNYNVRVLCCDDYSHCPSTPATSSTATPSSTPGTTWILTKPTTTATTTASTGSTATPTSTLRTAPPPKVLTTTATTPTVTSSKATPSSSPGTATALPALRSTATTPTATSVTPIPSSSLGTTWTRLSQTTTPTATMSTATPSSTPETAHTSTVLTATATTTGATGSVATPSSTPGTAHTTKVPTTTTTGFTATPSSSPGTALTPPVWISTTTTPTTRGSTVTPSSIPGTTHTATVLTTTTTTVATGSMATPSSSTQTSGTPPSLTTTATTITATGSTTNPSSTPGTTPIPPVLTTTATTPAATSNTVTPSSALGTTHTPPVPNTMATTHGRSLPPSSPHTVRTAWTSATSGILGTTHITEPSTVTSHTLAATTGTTQHSTPALSSPHPSSRTTESPPSPGTTTPGHTTATSRTTATATPSKTRTSTLLPSSPTSAPITTVVTMGCEPQCAWSEWLDYSYPMPGPSGGDFDTYSNIRAAGGAVCEQPLGLECRAQAQPGVPLRELGQVVECSLDFGLVCRNREQVGKFKMCFNYEIRVFCCNYGHCPSTPATSSTAMPSSTPGTTWILTELTTTATTTESTGSTATPSSTPGTTWILTEPSTTATVTVPTGSTATASSTQATAGTPHVSTTATTPTVTSSKATPFSSPGTATALPALRSTATTPTATSFTAIPSSSLGTTWTRLSQTTTPTATMSTATPSSTPETVHTSTVLTTTATTTGATGSVATPSSTPGTAHTTKVLTTTTTGFTATPSSSPGTARTLPVWISTTTTPTTRGSTVTPSSIPGTTHTPTVLTTTTTTVATGSMATPSSSTQTSGTPPSLTTTATTITATGSTTNPSSTPGTTPIPPVLTTTATTPAATSSTVTPSSALGTTHTPPVPNTTATTHGRSLSPSSPHTVRTAWTSATSGTLGTTHITEPSTGTSHTPAATTGTTQHSTPALSSPHPSSRTTESPPSPGTTTPGHTRATSRTTATATPSKTRTSTLLPSSPTSAPITTVVTMGCEPQCAWSEWLDYSYPMPGPSGGDFDTYSNIRAAGGAVCEQPLGLECRAQAQPGVPLRELGQVVECSLDFGLVCRNREQVGKFKMCFNYEIRVFCCNYGHCPSTPATSSTATPSSTPGTTWILTEQTTAATTTATTGSTAIPSSTPGTAPPPKVLTSTATTPTATSSKATSSSSPRTATTLPVLTSTATKSTATSFTPIPSFTLGTTGTLPEQTTTPMATMSTIHPSSTPETTHTSTVLTTKATTTRATSSMSTPSSTPGTTWILTELTTAATTTAATGPTATPSSTPGTTWILTEPSTTATVTVPTGSTATASSTRATAGTLKVLTSTATTPTVISSRATPSSSPGTATALPALRSTATTPTATSVTAIPSSSLGTAWTRLSQTTTPTATMSTATPSSTPETVHTSTVLTTTTTTTRATGSVATPSSTPGTAHTTKVPTTTTTGFTATPSSSPGTALTPPVWISTTTTPTTRGSTVTPSSIPGTTHTATVLTTTTTTVATGSMATPSSSTQTSGTPPSLTTTATTITATGSTTNPSSTPGTTPIPPVLTTTATTPAATSSTVTPSSALGTTHTPPVPNTTATTHGRSLPPSSPHTVRTAWTSATSGILGTTHITEPSTVTSHTPAATTSTTQHSTPALSSPHPSSRTTESPPSPGTTTPGHTRGTSRTTATATPSKTRTSTLLPSSPTSAPITTVVTTGCEPQCAWSEWLDYSYPMPGPSGGDFDTYSNIRAAGGAVCEQPLGLECRAQAQPGVPLRELGQVVECSLDFGLVCRNREQVGKFKMCFNYEIRVFCCNYGHCPSTPATSSTATPSSTPGTTWILTKLTTTATTTESTGSTATPSSTPGTTWILTEPSTTATVTVPTGSTATASSTQATAGTPHVSTTATTPTVTSSKATPFSSPGTATALPALRSTATTPTATSFTAIPSSSLGTTWTRLSQTTTPTATMSTATPSSTPETAHTSTVLTTTATTTRATGSVATPSSTPGTAHTTKVPTTTTTGFTVTPSSSPGTARTPPVWISTTTTPTTSGSTVTPSSVPGTTHTPTVLTTTTTTVATGSMATPSSSTQTSGTPPSLITTATTITATGSTTNPSSTPGTTPIPPVLTTTATTPAATSSTVTPSSALGTTHTPPVPNTTATTHGRSLSPSSPHTVRTAWTSATSGTLGTTHITEPSTGTSHTPAATTGTTQHSTPALSSPHPSSRTTESPPSPGTTTPGHTTATSRTTATATPSKTRTSTLLPSSPTSAPITTVVTTGCEPQCAWSEWLDYSYPMPGPSGGDFDTYSNIRAAGGAVCEQPLGLECRAQAQPGVPLGELGQVVECSLDFGLVCRNREQVGKFKMCFNYEIRVFCCNYGHCPSTPATSSTAMPSSTPGTTWILTELTTTATTTASTGSTATPSSTPGTAPPPKVLTSPATTPTATSSKATSSSSPRTATTLPVLTSTATKSTATSVTPIPSSTLGTTGTLPEQTTTPVATMSTIHPSSTPETTHTSTVLTTKATTTRATSSTSTPSSTPGTTWILTELTTAATTTAATGPTATPSSTPGTTWILTELTTTATTTASTGSTATPSSTPGTTWILTEPSTTATVTVPTGSTATASSTQATAGTPHVSTTATTPTVTSSKATPSSSPGTATALPALRSTATTPTATSFTAIPSSSLGTTWTRLSQTTTPTATMSTATPSSTPETVHTSTVLTATATTTGATGSVATPSSTPGTAHTTKVPTTTTTGFTATPSSSPGTALTPPVWISTTTTPTTTTPTTSGSTVTPSSIPGTTHTARVLTTTTTTVATGSMATPSSSTQTSGTPPSLTTTATTITATGSTTNPSSTPGTTPITPVLTSTATTPAATSSKATSSSSPRTATTLPVLTSTATKSTATSFTPIPSSTLWTTWTVPAQTTTPMSTMSTIHTSSTPETTHTSTVLTTTATMTRATNSTATPSSTLGTTRILTELTTTATTTAATGSTATLSSTPGTTWILTEPSTIATVMVPTGSTATASSTLGTAHTPKVVTTMATMPTATASTVPSSSTVGTTRTPAVLPSSLPTFSVSTVSSSVLTTLRPTGFPSSHFSTPCFCRAFGQFFSPGEVIYNKTDRAGCHFYAVCNQHCDIDRFQGACPTSPPPVSSAPLSSPSPAPGCDNAIPLRQVNETWTLENCTVARCVGDNRVVLLDPKPVANVTCVNKHLPIKVSDPSQPCDFHYECECICSMWGGSHYSTFDGTSYTFRGNCTYVLMREIHARFGNLSLYLDNHYCTASATAAAARCPRALSIHYKSMDIVLTVTMVHGKEEGLILFDQIPVSSGFSKNGVLVSVLGTTTMRVDIPALGVSVTFNGQVFQARLPYSLFHNNTEGQCGTCTNNQRDDCLQRDGTTAASCKDMAKTWLVPDSRKDGCWAPTGTPPTASPAAPVSSTPTPTPCPPQPLCDLMLSQVFAECHNLVPPGPFFNACISDHCRGRLEVPCQSLEAYAELCRARGVCSDWRGATGGLCDLTCPPTKVYKPCGPIQPATCNSRNQSPQLEGMAEGCFCPEDQILFNAHMGICVQACPCVGPDGFPKFPGERWVSNCQSCVCDEGSVSVQCKPLPCDAQGQPPPCNRPGFVTVTRPRAENPCCPETVCVCNTTTCPQSLPVCPPGQESICTQEEGDCCPTFRCRPQLCSYNGTFYGVGATFPGALPCHMCTCLSGDTQDPTVQCQEDACNNTTCPQGFEYKRVAGQCCGECVQTACLTPDGQPVQLNETWVNSHVDNCTVYLCEAEGGVHLLTPQPASCPDVSSCRGSLRKTGCCYSCEEDSCQVRINTTILWHQGCETEVNITFCEGSCPGASKYSAEAQAMQHQCTCCQERRVHEETVPLHCPNGSAILHTYTHVDECGCTPFCVPAPMAPPHTRGFPAQEATAV

SEQ ID NO: 53325 - protein, 2439 aa, Homo sapiens
  Payload ID: 10600
  Gene Symbol: MUC6
  Gene Name: mucin 6, oligomeric mucus/gel-forming
  Uniprot ID: Q6W4X9
  ENSP ID: ENSP00000406861
MVQRWLLLSCCGALLSAGLANTSYTSPGLQRLKDSPQTAPDKGQCSTWGAGHFSTFDHHVYDFSGTCNYIFAATCKDAFPTFSVQLRRGPDGSISRIIVELGASVVTVSEAIISVKDIGVISLPYTSNGLQITPFGQSVRLVAKQLELELEVVWGPDSHLMVLVERKYMGQMCGLCGNFDGKVTNEFVSEEGKFLEPHKFAALQKLDDPGEICTFQDIPSTHVRQAQHARICTQLLTLVAPECSVSKEPFVLSCQADVAAAPQPGPQNSSCATLSEYSRQCSMVGQPVRRWRSPGLCSVGQCPANQVYQECGSACVKTCSNPQHSCSSSCTFGCFCPEGTVLNDLSNNHTCVPVTQCPCVLHGAMYAPGEVTIAACQTCRCTLGRWVCTERPCPGHCSLEGGSFVTTFDARPYRFHGTCTYILLQSPQLPEDGALMAVYDKSGVSHSETSLVAVVYLSRQDKIVISQDEVVTNNGEAKWLPYKTRNITVFRQTSTHLQMATSFGLELVVQLRPIFQAYVTVGPQFRGQTRGLCGNFNGDTTDDFTTSMGIAEGTASLFVDSWRAGNCPAALERETDPCSMSQLNKVCAETHCSMLLRTGTVFERCHATVNPAPFYKRCVYQACNYEETFPHICAALGDYVHACSLRGVLLWGWRSSVDNCTIPCTGNTTFSYNSQACERTCLSLSDRATECHHSAVPVDGCNCPDGTYLNQKGECVRKAQCPCILEGYKFILAEQSTVINGITCHCINGRLSCPQRPQMFLASCQAPKTFKSCSQSSENKFGAACAPTCQMLATGVACVPTKCEPGCVCAEGLYENADGQCVPPEECPCEFSGVSYPGGAELHTDCRTCSCSRGRWACQQGTHCPSTCTLYGEGHVITFDGQRFVFDGNCEYILATDVCGVNDSQPTFKILTENVICGNSGVTCSRAIKIFLGGLSVVLADRNYTVTGEEPHVQLGVTPGALSLVVDISIPGRYNLTLIWNRHMTILIRIARASQDPLCGLCGNFNGNMKDDFETRSRYVASSELELVNSWKESPLCGDVSFVTDPCSLNAFRRSWAERKCSVINSQTFATCHSKVYHLPYYEACVRDACGCDSGGDCECLCDAVAAYAQACLDKGVCVDWRTPAFCPIYCGFYNTHTQDGHGEYQYTQEANCTWHYQPCLCPSQPQSVPGSNIEGCYNCSQDEYFDHEEGVCVPCMPPTTPQPPTTPQLPTTGSRPTQVWPMTGTSTTIGLLSSTGPSPSSNHTPASPTQTPLLPATLTSSKPTASSGEPPRPTTAVTPQATSGLPPTATLRSTATKPTVTQATTRATASTASPATTSTAQSTTRTTMTLPTPATSGTSPTLPKSTNQELPGTTATQTTGPRPTPASTTGPTTPQPGQPTRPTATETTQTRTTTEYTTPQTPHTTHSPPTAGSPVPSTGPVTATSFHATTTYPTPSHPETTLPTHVPPFSTSLVTPSTHTVITPTHAQMATSASNHSAPTGTIPPPTTLKATGSTHTAPPITPTTSGTSQAHSSFSTNKTPTSLHSHTSSTHHPEVTPTSTTTITPNPTSTRTRTPVAHTNSATSSRPPPPFTTHSPPTGSSPFSSTGPMTATSFKTTTTYPTPSHPQTTLPTHVPPFSTSLVTPSTHTVITPTHAQMATSASIHSMPTGTIPPPTTLKATGSTHTAPTMTLTTSGTSQALSSLNTAKTSTSLHSHTSSTHHAEATSTSTTNITPNPTSTGTPPMTVTTSGTSQSRSSFSTAKTSTSLHSHTSSTHHPEVTSTSTTSITPNHTSTGTRTPVAHTTSATSSRLPTPFTTHSPPTGTTPISSTGPVTATSFQTTTTYPTPSHPHTTLPTHVPSFSTSLVTPSTHTVIIPTHTQMATSASIHSMPTGTIPPPTTIKATGSTHTAPPMTPTTSGTSQSPSSFSTAKTSTSLPYHTSSTHHPEVTPTSTTNITPKHTSTGTRTPVAHTTSASSSRLPTPFTTHSPPTGSSPFSSTGPMTATSFQTTTTYPTPSHPQTTLPTHVPPFSTSLVTPSTHTVIITTHTQMATSASIHSTPTGTVPPPTTLKATGSTHTAPPMTVTTSGTSQTHSSFSTATASSSFISSSSWLPQNSSSRPPSSPITTQLPHLSSATTPVSTTNQLSSSFSPSPSAPSTVSSYVPSSHSSPQTSSPSVGTSSSFVSAPVHSTTLSSGSHSSLSTHPTTASVSASPLFPSSPAASTTIRATLPHTISSPFTLSALLPISTVTVSPTPSSHLASSTIAFPSTPRTTASTHTAPAFSSQSTTSRSTSLTTRVPTSGFVSLTSGVTGIPTSPVTNLTTRHPGPTLSPTTRFLTSSLTAHGSTPASAPVSSLGTPTPTSPGVCSVREQQEEITFKGCMANVTVTRCEGACISAASFNIITQQVDARCSCCRPLHSYEQQLELPCPDPSTPGRRLVLTLQVFSHCVCSSVACGD

SEQ ID NO: 53326 - protein, 219 aa, Homo sapiens
  Payload ID: 10600
  Gene Symbol: MUC6
  Gene Name: mucin 6, oligomeric mucus/gel-forming
  ENSP ID: ENSP00000433246
  MOD_RES (1)..(1): Any amino acid
XSSPFTLSALLPISTVTVSPTPSSHLASSTIAFPSTPRTTASTHTAPAFSSQSTTSRSTSLTTRVPTSGFVSLTSGVTGIPTSPVTNLTTRHPGPTLSPTTRFLTSSLTAHGSTPASAPVSSLGTPTPTSPGESTGGRPAPRPPRCSQPHPREVRAPHPGACCPISFNIITQQVDARCSCCRPLHSYEQQLELPCPDPSTPGRRLVLTLQVFSHCVCSS

SEQ ID NO: 53327 - protein, 181 aa, Homo sapiens
  Payload ID: 10600
  Gene Symbol: MUC6
  Gene Name: mucin 6, oligomeric mucus/gel-forming
  ENSP ID: ENSP00000433790
MDTSRTPSVCRETGGAALSRGERRPQGRRGSPTPTAGPVHTGLANTSYTSPGLQRLKDSPQTAPDKGQCSTWGAGHFSTFDHHVYDFSGTCNYIFAATCKDAFPTFSVQLRRGPDGSISRIIVELGASVVTVSEAIISVKDIGVISLPYTSNGLQITPFGQSVRLVAKQLELELEVVWGPD

SEQ ID NO: 53328 - protein, 115 aa, Homo sapiens
  Payload ID: 10600
  Gene Symbol: MUC6
  Gene Name: mucin 6, oligomeric mucus/gel-forming
  ENSP ID: ENSP00000436903
  MOD_RES (1)..(1): Any amino acid
XPPTTPQPPTTPQLPTTGSRPTQVWPMTGTSTTIGLLSSTGPSPSSNHTPASPTQTPLLPATLTSSKPTASSGGKEPPAEPMERAAAGGPRYTSGVGLGMALLPGSHLPLSRFPA

SEQ ID NO: 53329 - protein, 2439 aa, Homo sapiens
  Payload ID: 10600
  Gene Symbol: MUC6
  Gene Name: mucin 6, oligomeric mucus/gel-forming
  ENSP ID: ENSP00000480618
MVQRWLLLSCCGALLSAGLANTSYTSPGLQRLKDSPQTAPDKGQCSTWGAGHFSTFDHHVYDFSGTCNYIFAATCKDAFPTFSVQLRRGPDGSISRIIVELGASVVTVSEAIISVKDIGVISLPYTSNGLQITPFGQSVRLVAKQLELELEVVWGPDSHLMVLVERKYMGQMCGLCGNFDGKVTNEFVSEEGKFLEPHKFAALQKLDDPGEICTFQDIPSTHVRQAQHARICTQLLTLVAPECSVSKEPFVLSCQADVAAAPQPGPQNSSCATLSEYSRQCSMVGQPVRRWRSPGLCSVGQCPANQVYQECGSACVKTCSNPQHSCSSSCTFGCFCPEGTVLNDLSNNHTCVPVTQCPCVLHGAMYAPGEVTIAACQTCRCTLGRWVCTERPCPGHCSLEGGSFVTTFDARPYRFHGTCTYILLQSPQLPEDGALMAVYDKSGVSHSETSLVAVVYLSRQDKIVISQDEVVTNNGEAKWLPYKTRNITVFRQTSTHLQMATSFGLELVVQLRPIFQAYVTVGPQFRGQTRGLCGNFNGDTTDDFTTSMGIAEGTASLFVDSWRAGNCPAALERETDPCSMSQLNKVCAETHCSMLLRTGTVFERCHATVNPAPFYKRCVYQACNYEETFPHICAALGDYVHACSLRGVLLWGWRSSVDNCTIPCTGNTTFSYNSQACERTCLSLSDRATECHHSAVPVDGCNCPDGTYLNQKGECVRKAQCPCILEGYKFILAEQSTVINGITCHCINGRLSCPQRPQMFLASCQAPKTFKSCSQSSENKFGAACAPTCQMLATGVACVPTKCEPGCVCAEGLYENADGQCVPPEECPCEFSGVSYPGGAELHTDCRTCSCSRGRWACQQGTHCPSTCTLYGEGHVITFDGQRFVFDGNCEYILATDVCGVNDSQPTFKILTENVICGNSGVTCSRAIKIFLGGLSVVLADRNYTVTGEEPHVQLGVTPGALSLVVDISIPGRYNLTLIWNRHMTILIRIARASQDPLCGLCGNFNGNMKDDFETRSRYVASSELELVNSWKESPLCGDVSFVTDPCSLNAFRRSWAERKCSVINSQTFATCHSKVYHLPYYEACVRDACGCDSGGDCECLCDAVAAYAQACLDKGVCVDWRTPAFCPIYCGFYNTHTQDGHGEYQYTQEANCTWHYQPCLCPSQPQSVPGSNIEGCYNCSQDEYFDHEEGVCVPCMPPTTPQPPTTPQLPTTGSRPTQVWPMTGTSTTIGLLSSTGPSPSSNHTPASPTQTPLLPATLTSSKPTASSGEPPRPTTAVTPQATSGLPPTATLRSTATKPTVTQATTRATASTASPATTSTAQSTTRTTMTLPTPATSGTSPTLPKSTNQELPGTTATQTTGPRPTPASTTGPTTPQPGQPTRPTATETTQTRTTTEYTTPQTPHTTHSPPTAGSPVPSTGPVTATSFHATTTYPTPSHPETTLPTHVPPFSTSLVTPSTHTVITPTHAQMATSASNHSAPTGTIPPPTTLKATGSTHTAPPITPTTSGTSQAHSSFSTNKTPTSLHSHTSSTHHPEVTPTSTTTITPNPTSTRTRTPVAHTNSATSSRPPPPFTTHSPPTGSSPFSSTGPMTATSFKTTTTYPTPSHPQTTLPTHVPPFSTSLVTPSTHTVITPTHAQMATSASIHSMPTGTIPPPTTLKATGSTHTAPTMTPTTSGTSQALSSLNTAKTSTSLHSHTSSTHHAEATSTSTTNITPNPTSTGTPPMTVTTSGTSQSRSSFSTAKTSTSLHSHTSSTHHPEVTSTSTTSITPNHTSTGTRTPVAHTTSATSSRLPTPFTTHSPPTGTTPISSTGPVTATSFQTTTTYPTPSHPHTTLPTHVPSFSTSLVTPSTHTVIIPTHTQMATSASIHSMPTGTIPPPTTIKATGSTHTAPPMTPTTSGTSQSPSSFSTAKTSTSLPYHTSSTHHPEVTPTSTTNITPKHTSTGTRTPVAHTTSASSSRLPTPFTTHSPPTGSSPFSSTGPMTATSFQTTTTYPTPSHPQTTLPTHVPPFSTSLVTPSTHTVIITTHTQMATSASIHSTPTGTVPPPTTLKATGSTHTAPPMTVTTSGTSQTHSSFSTATASSSFISSSSWLPQNSSSRPPSSPITTQLPHLSSATTPVSTTNQLSSSFSPSPSAPSTVSSYVPSSHSSPQTSSPSVGTSSSFVSAPVHSTTLSSGSHSSLSTHPTTASVSASPLFPSSPAASTTIRATLPHTISSPFTLSALLPISTVTVSPTPSSHLASSTIAFPSTPRTTASTHTAPAFSSQSTTSRSTSLTTRVPTSGFVSLTSGVTGIPTSPVTNLTTRHPGPTLSPTTRFLTSSLTAHGSTPASAPVSSLGTPTPTSPGVCSVREQQEEITFKGCMANVTVTRCEGACISAASFNIITQQVDARCSCCRPLHSYEQQLELPCPDPSTPGRRLVLTLQVFSHCVCSSVACGD

SEQ ID NO: 53330 - protein, 2439 aa, Homo sapiens
  Payload ID: 10600
  Gene Symbol: MUC6
  Gene Name: mucin 6, oligomeric mucus/gel-forming
  ENSP ID: ENSP00000481532
MVQRWLLLSCCGALLSAGLANTSYTSPGLQRLKDSPQTAPDKGQCSTWGAGHFSTFDHHVYDFSGTCNYIFAATCKDAFPTFSVQLRRGPDGSISRIIVELGASVVTVSEAIISVKDIGVISLPYTSNGLQITPFGQSVRLVAKQLELELEVVWGPDSHLMVLVERKYMGQMCGLCGNFDGKVTNEFVSEEGKFLEPHKFAALQKLDDPGEICTFQDIPSTHVRQAQHARICTQLLTLVAPECSVSKEPFVLSCQADVAAAPQPGPQNSSCATLSEYSRQCSMVGQPVRRWRSPGLCSVGQCPANQVYQECGSACVKTCSNPQHSCSSSCTFGCFCPEGTVLNDLSNNHTCVPVTQCPCVLHGAMYAPGEVTIAACQTCRCTLGRWVCTERPCPGHCSLEGGSFVTTFDARPYRFHGTCTYILLQSPQLPEDGALMAVYDKSGVSHSETSLVAVVYLSRQDKIVISQDEVVTNNGEAKWLPYKTRNITVFRQTSTHLQMATSFGLELVVQLRPIFQAYVTVGPQFRGQTRGLCGNFNGDTTDDFTTSMGIAEGTASLFVDSWRAGNCPAALERETDPCSMSQLNKVCAETHCSMLLRTGTVFERCHATVNPAPFYKRCMYQACNYEETFPHICAALGDYVHACSLRGVLLWGWRSSVDNCTIPCTGNTTFSYNSQACERTCLSLSDRATECHHSAVPVDGCNCPDGTYLNQKGECVRKAQCPCILEGYKFILAEQSTVINGITCHCINGRLSCPQRPQMFLASCQAPKTFKSCSQSSENKFGAACAPTCQMLATGVACVPTKCEPGCVCAEGLYENADGQCVPPEECPCEFSGVSYPGGAELHTDCRTCSCSRGRWACQQGTHCPSTCTLYGEGHVITFDGQRFVFDGNCEYILATDVCGVNDSQPTFKILTENVICGNSGVTCSRAIKIFLGGLSVVLADRNYTVTGEEPHVQLGVTPGALSLVVDISIPGRYNLTLIWNRHMTILIRIARASQDPLCGLCGNFNGNMKDDFETRSRYVASSELELVNSWKESPLCGDVSFVTDPCSLNAFRRSWAERKCSVINSQTFATCHSKVYHLPYYEACVRDACGCDSGGDCECLCDAVAAYAQACLDKGVCVDWRTPAFCPIYCGFYNTHTQDGHGEYQYTQEANCTWHYQPCLCPSQPQSVPGSNIEGCYNCSQDEYFDHEEGVCVPCMPPTTPQPPTTPQLPTTGSRPTQVWPMTGTSTTIGLLSSTGPSPSSNHTPASPTQTPLLPATLTSSKPTASSGEPPRPTTAVTPQATSGLPPTATLRSTATKPTVTQATTRATASTASPATTSTAQSTTRTTMTLPTPATSGTSPTLPKSTNQELPGTTATQTTGPRPTPASTTGPTTPQPGQPTRPTATETTQTRTTTEYTTPQTPHTTHSPPTAGSPVPSTGPVTATSFHATTTYPTPSHPETTLPTHVPPFSTSLVTPSTHTVITPTHAQMATSASIHSAPTGTIPPPTTLKATGSTHTAPPITPTTSGTSQAHSSFSTNKTPTSLHSHTSSTHHPEVTPTSTTTITPNPTSTRTRTPVAHTNSATSSRPPPPFTTHSPPTGSSPFSSTGPMTATSFKTTTTYPTPSHPQTTLPTHVPPFSTSLVTPSTHTVITPTHAQMATSASIHSMPTGTIPPPTTLKATGSTHTAPTMTLTTSGTSQALSSLNTAKTSTSLHSHTSSTHHAEATSTSTTNITPNPTSTGTPPMTVTTSGTSQSRSSFSTAKTSTSLHSHTSSTHHPEVTSTSTTSITPNHTSTGTRTPVAHTTSATSSRLPTPFTTHSPPTGTTPISSTGPVTATSFQTTTTYPTPSHPHTTLPTHVPSFSTSLVTPSTHTVIIPTHTQMATSASIHSMPTGTIPPPTTIKATGSTHTAPPMTPTTSGTSQSPSSFSTAKTSTSLPYHTSSTHHPEVTPTSTTNITPKHTSTGTRTPVAHTTSASSSRLPTPFTTHSPPTGSSPFSSTGPMTATSFQTTTTYPTPSHPQTTLPTHVPPFSTSLVTPSTHTVIITTHTQMATSASIHSTPTGTVPPPTTLKATGSTHTAPPMTVTTSGTSQTHSSFSTATASSSFISSSSWLPQNSSSRPPSSPITTQLPHLSSATTPVSTTNQLSSSFSPSPSAPSTVSSYVPSSHSSPQTSSPSVGTSSSFVSAPVHSTTLSSGSHSSLSTHPTTASVSASPLFPSSPAASTTIRATLPHTISSPFTLSALLPISTVTVSPTPSSHLASSTIAFPSTPRTTASTHTAPAFSSQSTTSRSTSLTTRVPTSGFVSLTSGVTGIPTSPVTNLTTRHPGPTLSPTTRFLTSSLTAHGSTPASAPVSSLGTPTPTSPGVCSVREQQEEITFKGCMANVTVTRCEGACISAASFNIITQQVDARCSCCRPLHSYEQQLELPCPDPSTPGRRLVLTLQVFSHCVCSSVACGD

SEQ ID NO: 53331 - protein, 4029 aa, Homo sapiens
  Payload ID: 10600
  Gene Symbol: MUC6
  Gene Name: mucin 6, oligomeric mucus/gel-forming
  ENSP ID: ENSP00000486295
MVQRWLLLSCCGALLSAGLANTSYTSPGLQRLKDSPQTAPDKGQCSTWGAGHFSTFDHHVYDFSGTCNYIFAATCKDAFPTFSVQLRRGPDGSISRIIVELGASVVTVSEAIISVKDIGVISLPYTSNGLQITPFGQSVRLVAKQLELELEVVWGPDSHLMVLVERKYMGQMCGLCGNFDGKVTNEFVSEEGKFLEPHKFAALQKLDDPGEICTFQDIPSTHVRQAQHARICTQLLTLVAPECSVSKEPFVLSCQADVAAAPQPGPQNSSCATLSEYSRQCSMVGQPVRRWRSPGLCSVGQCPANQVYQECGSACVKTCSNPQHSCSSSCTFGCFCPEGTVLNDLSNNHTCVPVTQCPCVLHGAMYAPGEVTIAACQTCRCTLGRWVCTERPCPGHCSLEGGSFVTTFDARPYRFHGTCTYILLQSPQLPEDGALMAVYDKSGVSHSETSLVAVVYLSRQDKIVISQDEVVTNNGEAKWLPYKTRNITVFRQTSTHLQMATSFGLELVVQLRPIFQAYVTVGPQFRGQTRGLCGNFNGDTTDDFTTSMGIAEGTASLFVDSWRAGNCPAALERETDPCSMSQLNKVCAETHCSMLLRTGTVFERCHATVNPAPFYKRCVYQACNYEETFPHICAALGDYVHACSLRGVLLWGWRSSVDNCTIPCTGNTTFSYNSQACERTCLSLSDRATECHHSAVPVDGCNCPDGTYLNQKGECVRKAQCPCILEGYKFILAEQSTVINGITCHCINGRLSCPQRPQMFLASCQAPKTFKSCSQSSENKFGAACAPTCQMLATGVACVPTKCEPGCVCAEGLYENADGQCVPPEECPCEFSGVSYPGGAELHTDCRTCSCSRGRWACQQGTHCPSTCTLYGEGHVITFDGQRFVFDGNCEYILATDVCGVNDSQPTFKILTENVICGNSGVTCSRAIKIFLGGLSVVLADRNYTVTGEEPHVQLGVTPGALSLVVDISIPGRYNLTLIWNRHMTILIRIARASQDPLCGLCGNFNGNMKDDFETRSRYVASSELELVNSWKESPLCGDVSFVTDPCSLNAFRRSWAERKCSVINSQTFATCHSKVYHLPYYEACVRDACGCDSGGDCECLCDAVAAYAQACLDKGVCVDWRTPAFCPIYCGFYNTHTQDGHGEYQYTQEANCTWHYQPCLCPSQPQSVPGSNIEGCYNCSQDEYFDHEEGVCVPCMPPTTPQPPTTPQLPTTGSRPTQVWPMTGTSTTIGLLSSTGPSPSSNHTPASPTQTPLLPATLTSSKPTASSGEPPRPTTAVTPQATSGLPPTATLRSTATKPTVTQATTRATASTASPATTSTAQSTTRTTMTLPTPATSGTSPTLPKSTNQELPGTTATQTTGPRPTPASTTGPTTPQPGQPTRPTATETTQTRTTTEYTTPQTPHTTHSPPTAGSPVPSTGPVTATSFHATTTYPTPSHPETTLPTHVPPFSTSLVTPSTHTVITPTHAQMATSASNHSAPTGTIPPPTTLKATGSTHTAPPITPTTSGTSQAHSSFSTNKTPTSLHSHTSSTHHPEVTPTSTTTITPNPTSTRTRTPVAHTNSATSSRPPPPFTTHSPPTGSSPFSSTGPMTATSFKTTTTYPTPSLPQTTLLTHVPPFSTSLVTPITHTVITPTHPQMSTSAYIHSTPTGTIAPPTTVKATRSTYTAPLMTATTSRISQAHSSISTAKTSTSLHSHASSTHHPEVTPTSTTNVTPKSTSRGTSTPVTHTTSATSSRPPTPITTHSSPTRSSPLSSTGRMTATSLKTTTTYPTPSQAHITLPIHVPPFSTSSVTPSTHTVITPTHPQMSTSASNHSTSTGTIPPLTTLTTTLHHTLPTYREQSPLSHRSYDSNILQDHHYLSNHITPSDHTSHSRSTFLQLVSDSKYSHSHHPYPCTDVHFCLDPLNANRYHSSTDNAHGHRVHTHSLTNDGDNHSDHPSPQLIQHSQNLYIHPLTCFLHTPSGNHTNFYHQHYSQVHCRNQHPCGPHHLGHQQQATHTLHHTLPTYREQSHLFHRSYDCNIHQDHHDLSNPITPSDHTYHSCSTFLHLISHSKYSHSHHPYPRTDVHFLHTLSSHPNFYHHHHPQPHQYRHQNPCGPHHLGHQQQATHTLHHTFPTYREQSHLFHRSYDCNILSDHHYLSNPITPSDHTSHSPSTFLHLLGDSKYSHSHHHYPHTDGHFCLHPLNANRHRSSTNNAQGHRVHPHSANNDADHQRDEPSPELIQHSQNLYIPTFTNFLHTPSSHPNFYRHHPQSHQYRNRHPCGPHHLSHQQQANHTLHHTLPTYREQSLLFHRSYDCNILPDHHYLSNTITPSDHTSHSRYIFLHLLGDSKYSHSHHPYPRTDGHLCVHPLNANRHHFSTNNAQGHRVLPLSPTNDVDHQWDQPIPKLIHGQNLYIPTFTHFLNTSSSHLNFYHQHHPQPHQYRHQNPCGPHHVGHQQQATHTLHHTLPTYREQSHLFHRSYDCKHPSRPPLPIQPHHTLTPHFPLTFHLSPPPWGLQVLTSSPLPTHRWPLLPPSTQCQQALFLHRPRSRPQGPPTQPHQRQPPVGPANPQAHLARPKLLHPYIHTFPQHIILKSPQLLPPPSPPTTPVQAPEPLWPTPPRPPAAGYPYPSPHIPHLQGAVPSLPQVLLQHPFRPPLPIQPHHTLTPHFPLTFHLSPPPWLQVLTSSPLPTHRWPLLPPSTQCQQALFLHRPRSRPQGPPTQPHQRQPPVGPANPQAHLARHWASTSLHSHIPPPTTVKATGTGSTHTAPRMTVTTSGTSQAHSSFSTAKTSTSLHSHASSTLHPEVTPTSTTTITPNPTNTGIRTPVANTTSATSSRLTTPFTTHSPPTGSSPISSTGPMTATSFQTTTTYPTPSHPQTTLPTHVPPFSTSLVTPSTHTVITPTHAQMATSASIHSTPTGTIPPPTTLKATGSTHTAPPMMPTTSGTSQASSSFNTAKTSTSLHSHTSSTHHPEVTPTSITNITLNPTSIGTWTPVAHTTSATSSRLTTPFTTHSPPTGTTPISSTGPVTATSFHATTTYPTPSHPQTTLPTHVPSFSTSLVTPSTHIVITPTHAQMATSASIHSMQTGTIPPPTTIKATGSTHTAPPMTPTTSGTSQSLSSFSTAKTSTSLPYHTSSTHHPEVTPTSTTNITPKHTSTGTRTPVAHTTSATSSRLPTPFTTHSPPTGSSPISSTGPMTAPSFQTTTTYPTPSHPQTTLPTHVPPFSTSLVTPSTHTVITPTHAQMATSASIHSMPTGTIPPPTTLKATGSTHTAPTMTPTTSGTSQALSSLNTAKTSTSLHSHTSSTHHAEATSTSTTNITPNPTSTGTPPMTVTTSGTSQSRSSFSTAKTSTSLHSHTSSTHHPEVTSTSTTSITPNHTSTGTRTPVAHTTSATSSRLPTPFTTHSPPTGTTPISSTGPVTATSFQTTTTYPTPSHPHTTLPTHVPSFSTSLVTPSTHTVIIPTHTQMATSASIHSMPTGTIPPPTTIKATGSTHTAPPMTPTTSGTSQSPSSFSTAKTSTSLPYHTSSTHHPEVTPTSTTNITPKHTSTGTRTPVAHTTSASSSRLPTPFTTHSPPTGSSPFSSTGPMTATSFQTTTTYPTPSHPQTTLPTHVPPFSTSLVTPSTHTVIITTHTQMATSASIHSTPTGTVPPPTTLKATGSTHTAPPMTVTTSGTSQTHSSFSTATASSSFISSSSWLPQNSSSRPPSSPITTQLPHLSSATTPVSTTNQLSSSFSPSPSAPSTVSSYVPSSHSSPQTSSPSVGTSSSFVSAPVHSTTLSSGSHSSLSTHPTTASVSASPLFPSSPAASTTIRATLPHTISSPFTLSALLPISTVTVSPTPSSHLASSTIAFPSTPRTTASTHTAPAFSSQSTTSRSTSLTTRVPTSGFVSLTSGVTGIPTSPVTNLTTRHPGPTLSPTTRFLTSSLTAHGSTPASAPVSSLGTPTPTSPGVCSVREQQEEITFKGCMANVTVTRCEGACISAASFNIITQQVDARCSCCRPLHSYEQQLELPCPDPSTPGRRLVLTLQVFSHCVCSSVACGD

SEQ ID NO: 53332 - protein, 4691 aa, Homo sapiens
  Payload ID: 10600
  Gene Symbol: MUC6
  Gene Name: mucin 6, oligomeric mucus/gel-forming
  ENSP ID: ENSP00000487059
MVQRWLLLSCCGALLSAGLANTSYTSPGLQRLKDSPQTAPDKGQCSTWGAGHFSTFDHHVYDFSGTCNYIFAATCKDAFPTFSVQLRRGPDGSISRIIVELGASVVTVSEAIISVKDIGVISLPYTSNGLQITPFGQSVRLVAKQLELELEVVWGPDSHLMVLVERKYMGQMCGLCGNFDGKVTNEFVSEEGKFLEPHKFAALQKLDDPGEICTFQDIPSTHVRQAQHARICTQLLTLVAPECSVSKEPFVLSCQADVAAAPQPGPQNSSCATLSEYSRQCSMVGQPVRRWRSPGLCSVGQCPANQVYQECGSACVKTCSNPQHSCSSSCTFGCFCPEGTVLNDLSNNHTCVPVTQCPCVLHGAMYAPGEVTIAACQTCRCTLGRWVCTERPCPGHCSLEGGSFVTTFDARPYRFHGTCTYILLQSPQLPEDGALMAVYDKSGVSHSETSLVAVVYLSRQDKIVISQDEVVTNNGEAKWLPYKTRNITVFRQTSTHLQMATSFGLELVVQLRPIFQAYVTVGPQFRGQTRGLCGNFNGDTTDDFTTSMGIAEGTASLFVDSWRAGNCPAALERETDPCSMSQLNKVCAETHCSMLLRTGTVFERCHATVNPAPFYKRCMYQACNYEETFPHICAALGDYVHACSLRGVLLWGWRSSVDNCTIPCTGNTTFSYNSQACERTCLSLSDRATECHHSAVPVDGCNCPDGTYLNQKGECVRKAQCPCILEGYKFILAEQSTVINGITCHCINGRLSCPQRPQMFLASCQAPKTFKSCSQSSENKFGAACAPTCQMLATGVACVPTKCEPGCVCAEGLYENADGQCVPPEECPCEFSGVSYPGGAELHTDCRTCSCSRGRWACQQGTHCPSTCTLYGEGHVITFDGQRFVFDGNCEYILATDVCGVNDSQPTFKILTENVICGNSGVTCSRAIKIFLGGLSVVLADRNYTVTGEEPHVQLGVTPGALSLVVDISIPGRYNLTLIWNRHMTILIRIARASQDPLCGLCGNFNGNMKDDFETRSRYVASSELELVNSWKESPLCGDVSFVTDPCSLNAFRRSWAERKCSVINSQTFATCHSKVYHLPYYEACVRDACGCDSGGDCECLCDAVAAYAQACLDKGVCVDWRTPAFCPIYCGFYNTHTQDGHGEYQYTQEANCTWHYQPCLCPSQPQSVPGSNIEGCYNCSQDEYFDHEEGVCVPCMPPTTPQPPTTPQLPTTGSRPTQVWPMTGTSTTIGLLSSTGPSPSSNHTPASPTQTPLLPATLTSSKPTASSGEPPRPTTAVTPQATSGLPPTATLRSTATKPTVTQATTRATASTASPATTSTAQSTTRTTMTLPTPATSGTSPTLPKSTNQELPGTTATQTTGPRPTPASTTGPTTPQPGQPTRPTATETTQTRTTTEYTTPQTPHTTHSPPTAGSPVPSTGPVTATSFHATTTYPTPSHPETTLPTHVPPFSTSLVTPSTHTVITPTHAQMATSASIHSAPTGTIPPPTTLKATGSTHTAPPITPTTSGTSQAHSSFSTNKTPTSLHSHTSSTHHPEVTPTSTTTITPNPTSTRTRTPVAHTNSATSSRPPPPFTTHSPPTGSSPFSSTGPMTATSFKTTTTYPTPSLPQTTLLTHVPPFSTSLVTPITHTVITPTHPQMSTSAYIHSTPTGTIAPPTTVKATRSTYTAPLMTATTSRISQAHSSISTAKTSTSLHSHASSTHHPEVTPTSTTNVTPKSTSRGTSTPVTHTTSATSSRPPTPITTHSSPTRSSPLSSTGRMTATSLKTTTTYPTPSQAHITLPIHVPPFSTSSVTPSTHTVITPTHPQMSTSASNHSTSTGTIPPLTTLMATGSTHTAPLITVTTSRTSQVHSSFSTAKTSTSLLSHASSTHHPEITTNSTTTITPNPTSTGTGTPVAHTTSATSSRPPPPFTTHSPPTESSPLSPTGPMTPTSFKTTTTYPTTSHPQTTLPTHVPPFSSSSVTPSTHTVITPTHAQMSTSASIHSTPTGTIPPLTTLTATGSTHTASPMTGTTIRTTQAHSSFSIAKTSTSILSHASSTHHPETTPTSTTNITPKSTSAGTSTPVAHTTLATSSRPPTPFTTHSPPTGSSPISSTGPMTATSIKTTTTYPTPSHPQTTLTTHVPPFSTSSVTPSTHTVITPTHAQMSTSASIHSTPTGTVPPLTTRMPTGSTHTGPPMTGTIIQTSKAHNSFSTAKTSTSLHSHASSTHHPETTPTSTTNITPKPTSAGTSTPVAHTTLATSSRLPTTFTTHFPSTGSSPVSSTGPMTATSSQTTTTYPTPSHPQTTLPTHIPPFSTSLVTPSTHTVITPTRAQMSTSASIHSTPTGTIPPPTTLKATGTTHTHTTRTMTVTTTSQALRSLYIGTASTSIPLHSHASSHLRTRHFYYHHHHPQPHQYRNPTNDSDHQWDQPIPKLIHGQNLYIPTFTHFLHTPSSHLNFYHQHHPQPHQYRHQNPCGPHHVGHQQQATHTLHHTLPTYRDHSHLFHRSCHCNILPDHHYRSNPITPSHHTSHSRSIFLHLLGDSKYSHSHHPYPRTDGHFCLHPLNANRHYSSTDHDQGHRVHPHSPTNDGNHQWDQPIPKLIHGQNFYIPTFTHFLNTSSSHPNFYHHHHPQPHQYRHQNPCGPHHLGHQQQATHTLHHTFPTYREQSHLFHRSYDCNILSDHHYLSNPITPSDHTSHSHSTFLHLLGDSKYSHSHHHYPHTDGHFCLHPLNANRHRSSTNNAQGHRVHPHSANNDADHQRDEPSPELIQHSQNLYIPTFTNFLHTPSSHPNFYRHHPQSHQSRNRHPCGPHHLSHQQQANHTLHHTLLTYREQSLLFHRSYDCNILPDHHYLSNPITPSDHTSHSRSTFLHLFGDSKYSHSHHPYPCTDGHFCLHPLNANRHDSSTDNAQGHRVHPHSANNDADHQRDQPSPELIKHSQNLYIPTFTHFLHTPCSHLNFYHQHHPQPHQYRNWGACGPHHLSHQQQANPALHHTLPTYRVTTLKATGSIHTAPPMTPTTSGTSQSPSSFSMAKTSTSLPYHTSSTHHPEVTPTSTTNITPKHTSTGTRTPVAHTTSATSSKLPTPFTTHSPPTGSSPISSTGPVTATSFQTTTTYPTPSHSHTTLPTHVPPSSTSLVTPNTHTVITHTHAQMSTSASIHSTPTGTIPPPTTLKATGSTHTAPPMTPTTSGTRQAPSSFSTAKTSTSLHSHTSSTHHPAVTPTSTTTITPNHTSTGTRTPVAHTTSATSSRLPTPFTTHSPPTGSSPISSTAPCHCNILPDHHYPIQPTSQSQYHTSHSHSTFLHLLGDSKYTHSHHPNFYHHHPQSHQYRNRHPCGPHHLSHQQQANHTLHHTLPTYREQSHLFHRSCHCNILPCHHYLSNTITPSDHTSHSRSIFLHLLGDSKYSHSHHPYPRTDDHFCLHPLNANRHHSSTDNAEGHRVHPHSPTNDANHQWDQPSLKLIQHSQNLYIPTFTHFLHTPSSHPNFYHQHHPQPHQYRNLDTRGPHHLSHQQQANHTLHHTLPTYRDHSHLFHRSCHCNILPCHHYLSNTITPSDHTSHSRSIFLHLLGDSKYSHSHHPYPRTDGHFCLHPLNANRHHSSTDHDQGHRVHPHSPTNDTDHQWDQPIPKLIHGQNFYIPTLPHFLHTPSSHPNFYHQHHPQTHQYRHQNPCGPHHLGHQQQTTHTLHHTFPTYREQSHLFHRSYDCTILSDHHYLSNPITPSDHTSHSHSTFLHLLGDSKYSQGHHPYPCTDVHFCLHPLNANRHHSSTNNAQGHRVHPHSPTNHSDHQWDQPIRKLIHRQNLYILTFTHFLHTLSSHPNFYHHHHPQPHQYRHQNPCGPHHLGHQQQATHTLHHTFPTYREQSHLFHRSYDCNILPDHHYLSNPITPSDHTSHSRSTFLHLFGDSKYSHSHHPYPCTDGHFCLHPLNANRHDSSTDNAQGHRVHPHSANNDADHQRDQPSPELIKHSQNLYIPTFTHFLHTPCSHLNFYHQHHPQPHQYRNPTNDSDHQWDQPIPKLIHGQNLYIPTFTHFLHTPSSHLNFYHQHHPQPHQYRHQNPCGPHHVGHQQQATHTLHHTLPTYRDHSHLFHRSCHCNILPDHHYLSNPITPSHHTSHSRSIFLHLLGDSKYSHGHHPYPHTDGHFCLHPLNANRHHSSTDHDQGHRVHPHSPTNDTDHQWDQPIPKLIHGQNFYIPTLPHFLNTPSSHPNFYHQHHPQTHQYRHQNPCGPHHLGQQQQATHTLHHTLPTYREQSLLFHRSYDCNILPDHHYLSNPITPSDHTSHSRSTFLHLLGDSKYSHSHHHYPHTDGHFCLHPLNANRHRSSTNNAQGHRVHPHSPTNDSDHQWDQPNPQLIQHSYSLFFLHILLVLAASELLKATVITYHHTTPPLEFCNHSCFHNSAVLLIFSQSFCPLYCFFLCALLPLLSPDFIAFCWHIFLFRVRPRALHNPELGVTLLIVHSSHDCISVCISSFSFFSSCLYYHGHSPPHYLLSFHPLCSTPHIHCYRVSHPIQPPSLQHHCISVHAQDHGQHPHRPCLLLSVHHLAVHFSHHPSSHIRLCVTHLGGDGYPHLSSHQPYHQAPWSHLVAYHTVPDQLPHCPWKHPCFCPGIFSRDTYAHLTRGLQCAGAAGGDHVQGVHGERDGNPLGRLHFRCQLQHHHPAGGCPLQLLPPPPLLAAAGAALPRSQHAWPAARTHPAGVQPLRVQLCGLWRL

SEQ ID NO: 53333 - protein, 377 aa, Homo sapiens
  Payload ID: 10601
  Gene Symbol: MUC7
  Gene Name: mucin 7, secreted
  Uniprot ID: Q8TAX7
  ENSP ID: ENSP00000302021
MKTLPLFVCICALSACFSFSEGRERDHELRHRRHHHQSPKSHFELPHYPGLLAHQKPFIRKSYKCLHKRCRPKLPPSPNNPPKFPNPHQPPKHPDKNSSVVNPTLVATTQIPSVTFPSASTKITTLPNVTFLPQNATTISSRENVNTSSSVATLAPVNSPAPQDTTAAPPTPSATTPAPPSSSAPPETTAAPPTPSATTQAPPSSSAPPETTAAPPTPPATTPAPPSSSAPPETTAAPPTPSATTPAPLSSSAPPETTAVPPTPSATTLDPSSASAPPETTAAPPTPSATTPAPPSSPAPQETTAAPITTPNSSPTTLAPDTSETSAAPTHQTTTSVTTQTTTTKQPTSAPGQNKISRFLLYMKNLLNRIIDDMVEQ

SEQ ID NO: 53334 - protein, 377 aa, Homo sapiens; identical to SEQ ID NO: 53333
  Payload ID: 10601
  Gene Symbol: MUC7
  Gene Name: mucin 7, secreted
  Uniprot ID: Q8TAX7
  ENSP ID: ENSP00000400585

SEQ ID NO: 53335 - protein, 377 aa, Homo sapiens; identical to SEQ ID NO: 53333
  Payload ID: 10601
  Gene Symbol: MUC7
  Gene Name: mucin 7, secreted
  Uniprot ID: Q8TAX7
  ENSP ID: ENSP00000407422

SEQ ID NO: 53336 - protein, 136 aa, Homo sapiens
  Payload ID: 10601
  Gene Symbol: MUC7
  Gene Name: mucin 7, secreted
  ENSP ID: ENSP00000427594
MKTLPLFVCICALSACFSFSEGRERDHELRHRRHHHQSPKSHFELPHYPGLLAHQKPFIRKSYKCLHKRCRPKLPPSPNNPPKFPNPHQPPKHPDKNSSVVNPTLVATTQIPSVTFPSASTKITTLPNVTFLPQNA

SEQ ID NO: 53337 - protein, 90 aa, Homo sapiens
  Payload ID: 10602
  Gene Symbol: MUCL1
  Gene Name: mucin-like 1
  Uniprot ID: Q96DR8
  ENSP ID: ENSP00000311364
MKFLAVLVLLGVSIFLVSAQNPTTAAPADTYPATGPADDEAPDAETTAAATTATTAAPTTATTAASTTARKDIPVLPKWVGDLPNGRVCP

SEQ ID NO: 53338 - protein, 85 aa, Homo sapiens
  Payload ID: 10602
  Gene Symbol: MUCL1
  Gene Name: mucin-like 1
  ENSP ID: ENSP00000449369
MGGDHGYQLAVTKAENPTTAAPADTYPATGPADDEAPDAETTAAATTATTAAPTTATTAASTTARKDIPVLPKWVGDLPNGRVCP

SEQ ID NO: 53339 - protein, 80 aa, Homo sapiens
  Payload ID: 10602
  Gene Symbol: MUCL1
  Gene Name: mucin-like 1
  ENSP ID: ENSP00000480191
MKFLAVLVLLGVSIFLVSAQNPTTAAPADTYPATGPADDEAPDAETTPTTATTAASTTARKDIPVLPKWVGDLPNGRVCP

SEQ ID NO: 53340 - protein, 580 aa, Homo sapiens
  Payload ID: 10603
  Gene Symbol: MCOLN1
  Gene Name: mucolipin 1
  Uniprot ID: Q9GZU1
  ENSP ID: ENSP00000264079
MTAPAGPRGSETERLLTPNPGYGTQAGPSPAPPTPPEEEDLRRRLKYFFMSPCDKFRAKGRKPCKLMLQVVKILVVTVQLILFGLSNQLAVTFREENTIAFRHLFLLGYSDGADDTFAAYTREQLYQAIFHAVDQYLALPDVSLGRYAYVRGGGDPWTNGSGLALCQRYYHRGHVDPANDTFDIDPMVVTDCIQVDPPERPPPPPSDDLTLLESSSSYKNLTLKFHKLVNVTIHFRLKTINLQSLINNEIPDCYTFSVLITFDNKAHSGRIPISLETQAHIQECKHPSVFQHGDNSFRLLFDVVVILTCSLSFLLCARSLLRGFLLQNEFVGFMWRQRGRVISLWERLEFVNGWYILLVTSDVLTISGTIMKIGIEAKNLASYDVCSILLGTSTLLVWVGVIRYLTFFHNYNILIATLRVALPSVMRFCCCVAVIYLGYCFCGWIVLGPYHVKFRSLSMVSECLFSLINGDDMFVTFAAMQAQQGRSSLVWLFSQLYLYSFISLFIYMVLSLFIALITGAYDTIKHPGGAGAEESELQAYIAQCQDSPTSGKFRRGSGSACSLLCCCGRDPSEEHSLLVN

SEQ ID NO: 53341 - protein, 200 aa, Homo sapiens
  Payload ID: 10603
  Gene Symbol: MCOLN1
  Gene Name: mucolipin 1
  ENSP ID: ENSP00000469074
MTAPAGPRGSETERLLTPNPGYGTQAGPSPAPPTPPEEEDLRRRLKYFFMSPCDKFRAKGRKPCKLMLQVVKILVVTVQLILFGLSNQLAVTFREENTIAFRHLFLLGYSDGADDTFAAYTREQLYQAIFHAVDQYLALPDVSLGRYAYVRGGGDPWTNGSGLALCQRYYHRGHVDPANDTFDIDPMVVTGWSMSPSTSG

SEQ ID NO: 53342 - protein, 182 aa, Homo sapiens
  Payload ID: 10603
  Gene Symbol: MCOLN1
  Gene Name: mucolipin 1
  ENSP ID: ENSP00000472176
  MOD_RES (1)..(1): Any amino acid
XEAKNLASYDVCSILLGTSTLLVWVGVIRYLTFFHNYNILIATLRVALPSVMRFCCCVAVIYLGYCFCGWIVLGPYHVKPLHLHGAQPLHRAHHRRLRHHQASRRRRRRGERAAGLHRTVPGQPHLRQVPPRERLGLQPSLLLRKGPLGGAFAAGELIRPDCRWTVGPGLQRPPPPTPLIYL

SEQ ID NO: 53343 - protein, 538 aa, Homo sapiens
  Payload ID: 10604
  Gene Symbol: MCOLN2
  Gene Name: mucolipin 2
  Uniprot ID: Q8IZK6
  ENSP ID: ENSP00000284027
MAHRDSEMKEECLREDLKFYFMSPCEKYRARRQIPWKLGLQILKIVMVTTQLVRFGLSNQLVVAFKEDNTVAFKHLFLKGYSGTDEDDYSCSVYTQEDAYESIFFAINQYHQLKDITLGTLGYGENEDNRIGLKVCKQHYKKGTMFPSNETLNIDNDVELDCVQLDLQDLSKKPPDWKNSSFFRLEFYRLLQVEISFHLKGIDLQTIHSRELPDCYVFQNTIIFDNKAHSGKIKIYFDSDAKIEECKDLNIFGSTQKNAQYVLVFDAFVIVICLASLILCTRSIVLALRLRKRFLNFFLEKYKRPVCDTDQWEFINGWYVLVIISDLMTIIGSILKMEIKAKNLTNYDLCSIFLGTSTLLVWVGVIRYLGYFQAYNVLILTMQASLPKVLRFCACAGMIYLGYTFCGWIVLGPYHDKFENLNTVAECLFSLVNGDDMFATFAQIQQKSILVWLFSRLYLYSFISLFIYMILSLFIALITDSYDTIKKFQQNGFPETDLQEFLKECSSKEEYQKESSAFLSCICCRRRKRSDDHLIPIS

SEQ ID NO: 53344 - protein, 566 aa, Homo sapiens
  Payload ID: 10604
  Gene Symbol: MCOLN2
  Gene Name: mucolipin 2
  Uniprot ID: Q8IZK6
  ENSP ID: ENSP00000359640
MARQPYRFPQARIPERGSGVFRLTVRNAMAHRDSEMKEECLREDLKFYFMSPCEKYRARRQIPWKLGLQILKIVMVTTQLVRFGLSNQLVVAFKEDNTVAFKHLFLKGYSGTDEDDYSCSVYTQEDAYESIFFAINQYHQLKDITLGTLGYGENEDNRIGLKVCKQHYKKGTMFPSNETLNIDNDVELDCVQLDLQDLSKKPPDWKNSSFFRLEFYRLLQVEISFHLKGIDLQTIHSRELPDCYVFQNTIIFDNKAHSGKIKIYFDSDAKIEECKDLNIFGSTQKNAQYVLVFDAFVIVICLASLILCTRSIVLALRLRKRFLNFFLEKYKRPVCDTDQWEFINGWYVLVIISDLMTIIGSILKMEIKAKNLTNYDLCSIFLGTSTLLVWVGVIRYLGYFQAYNVLILTMQASLPKVLRFCACAGMIYLGYTFCGWIVLGPYHDKFENLNTVAECLFSLVNGDDMFATFAQIQQKSILVWLFSRLYLYSFISLFIYMILSLFIALITDSYDTIKKFQQNGFPETDLQEFLKECSSKEEYQKESSAFLSCICCRRRKRSDDHLIPIS

SEQ ID NO: 53345 - protein, 249 aa, Homo sapiens
  Payload ID: 10604
  Gene Symbol: MCOLN2
  Gene Name: mucolipin 2
  ENSP ID: ENSP00000436299
MARQPYRFPQARIPERGSGVFRLTVRNAMAHRDSEMKEECLREDLKFYFMSPCEKYRARRQIPWKLGLQILKIVMVTTQLVRFGLSNQLVVAFKEDNTVAFKHLFLKGYSGTDEDDYSCSVYTQEDAYESIFFAINQYHQLKDITLGTLGYGENEDNRIGLKVCKQHYKKGTMFPSNETLNIDNDVELDCVQLDLQDLSKKPPDWKNSSFFRLEFYRLLQVEISFHLKGIDLQTIHSRELPDCYVFQNT

SEQ ID NO: 53346 - protein, 497 aa, Homo sapiens
  Payload ID: 10605
  Gene Symbol: MCOLN3
  Gene Name: mucolipin 3
  Uniprot ID: Q8TDD5
  ENSP ID: ENSP00000342698
MADPEVVVSSCSSHEEENRCNFNQQTSPSEELLLEDQMRRKLKFFFMNPCEKFWARGRKPWKLAIQILKIAMVTIQYLQLYNVSVGNHAYENKGTKQSAMAICQHFYKRGNIYPGNDTFDIDPEIETECFFVEPDEPFHIGTPAENKLNLTLDFHRLLTVELQFKLKAINLQTVRHQELPDCYDFTLTITFDNKAHSGRIKISLDNDISIRECKDWHVSGSIQKNTHYMMIFDAFVILTCLVSLILCIRSVIRGLQLQQEFVNFFLLHYKKEVSVSDQMEFVNGWYIMIIISDILTIIGSILKMEIQAKSLTSYDVCSILLGTSTMLVWLGVIRYLGFFAKYNLLILTLQAALPNVIRFCCCAAMIYLGYCFCGWIVLGPYHDKFRSLNMVSECLFSLINGDDMFATFAKMQQKSYLVWLFSRIYLYSFISLFIYMILSLFIALITDTYETIKQYQQDGFPETELRTFISECKDLPNSGKYRLEDDPPVSLFCCCKK

SEQ ID NO: 53347 - protein, 321 aa, Homo sapiens
  Payload ID: 10605
  Gene Symbol: MCOLN3
  Gene Name: mucolipin 3
  ENSP ID: ENSP00000359619
MADPEVVVSSCSSHEEENRCNFNQQTSPSEELLLEDQMRRKLKFFFMNPCEKFWARGRKPWKLAIQILKIAMVTIQLVLFGLSNQMVVAFKEENTIAFKHLFLKGYMDRMDDTYAVYTQSDVYDQLIFAVNQYLQLYNVSVGNHAYENKGTKQSAMAICQHFYKRGNIYPGNDTFDIDPEIETECFFVEPDEPFHIGTPAENKLNLTLDFHRLLTVELQFKLKAINLQTVRHQELPDCYDFTLTITFDNKAHSGRIKISLDNDISIRECKDWHVSGSIQKNTHYMMIFDAFVILTCLVSLILCIRSVIRGLQLQQVGNVAF

SEQ ID NO: 53348 - protein, 553 aa, Homo sapiens
  Payload ID: 10605
  Gene Symbol: MCOLN3
  Gene Name: mucolipin 3
  Uniprot ID: Q8TDD5
  ENSP ID: ENSP00000359621
MADPEVVVSSCSSHEEENRCNFNQQTSPSEELLLEDQMRRKLKFFFMNPCEKFWARGRKPWKLAIQILKIAMVTIQLVLFGLSNQMVVAFKEENTIAFKHLFLKGYMDRMDDTYAVYTQSDVYDQLIFAVNQYLQLYNVSVGNHAYENKGTKQSAMAICQHFYKRGNIYPGNDTFDIDPEIETECFFVEPDEPFHIGTPAENKLNLTLDFHRLLTVELQFKLKAINLQTVRHQELPDCYDFTLTITFDNKAHSGRIKISLDNDISIRECKDWHVSGSIQKNTHYMMIFDAFVILTCLVSLILCIRSVIRGLQLQQEFVNFFLLHYKKEVSVSDQMEFVNGWYIMIIISDILTIIGSILKMEIQAKSLTSYDVCSILLGTSTMLVWLGVIRYLGFFAKYNLLILTLQAALPNVIRFCCCAAMIYLGYCFCGWIVLGPYHDKFRSLNMVSECLFSLINGDDMFATFAKMQQKSYLVWLFSRIYLYSFISLFIYMILSLFIALITDTYETIKQYQQDGFPETELRTFISECKDLPNSGKYRLEDDPPVSLFCCCKK

SEQ ID NO: 53349 - protein, 141 aa, Homo sapiens
  Payload ID: 10605
  Gene Symbol: MCOLN3
  Gene Name: mucolipin 3
  ENSP ID: ENSP00000474024
MADPEVVVSSCSSHEEENRCNFNQQTSPSEELLLEDQMRRKLKFFFMNPCEKFWARGRKPWKLAIQILKIAMVTIQLVLFGLSNQMVVAFKEENTIAFKHLFLKGYMDRMDDTYAVYTQSDVYDQLIFAVNQGNDKCYEEK

SEQ ID NO: 53350 - protein, 382 aa, Homo sapiens
  Payload ID: 10606
  Gene Symbol: MADCAM1
  Gene Name: mucosal vascular addressin cell adhesion molecule 1
  Uniprot ID: Q13477
  ENSP ID: ENSP00000215637
MDFGLALLLAGLLGLLLGQSLQVKPLQVEPPEPVVAVALGASRQLTCRLACADRGASVQWRGLDTSLGAVQSDTGRSVLTVRNASLSAAGTRVCVGSCGGRTFQHTVQLLVYAFPDQLTVSPAALVPGDPEVACTAHKVTPVDPNALSFSLLVGGQELEGAQALGPEVQEEEEEPQGDEDVLFRVTERWRLPPLGTPVPPALYCQATMRLPGLELSHRQAIPVLHSPTSPEPPDTTSPESPDTTSPESPDTTSQEPPDTTSPEPPDKTSPEPAPQQGSTHTPRSPGSTRTRRPEISQAGPTQGEVIPTGSSKPAGDQLPAALWTSSAVLGLLLLALPTYHLWKRCRHLAEDDTHPPASLRLLPQVSAWAGLRGTGQVGISPS

SEQ ID NO: 53351 - protein, 295 aa, Homo sapiens
  Payload ID: 10606
  Gene Symbol: MADCAM1
  Gene Name: mucosal vascular addressin cell adhesion molecule 1
  Uniprot ID: Q13477
  ENSP ID: ENSP00000304247
MDFGLALLLAGLLGLLLGQSLQVKPLQVEPPEPVVAVALGASRQLTCRLACADRGASVQWRGLDTSLGAVQSDTGRSVLTVRNASLSAAGTRVCVGSCGGRTFQHTVQLLVYAFPDQLTVSPAALVPGDPEVACTAHKVTPVDPNALSFSLLVGGQELEGAQALGPEVQEEEEEPQGDEDVLFRVTERWRLPPLGTPVPPALYCQATMRLPGLELSHRQAIPASKPAGDQLPAALWTSSAVLGLLLLALPTYHLWKRCRHLAEDDTHPPASLRLLPQVSAWAGLRGTGQVGISPS

SEQ ID NO: 53352 - protein, 200 aa, Homo sapiens
  Payload ID: 10606
  Gene Symbol: MADCAM1
  Gene Name: mucosal vascular addressin cell adhesion molecule 1
  Uniprot ID: Q13477
  ENSP ID: ENSP00000372130
MDFGLALLLAGLLGLLLAFPDQLTVSPAALVPGDPEVACTAHKVTPVDPNALSFSLLVGGQELEGAQALGPEVQEEEEEPQGDEDVLFRVTERWRLPPLGTPVPPALYCQATMRLPGLELSHRQAIPASKPAGDQLPAALWTSSAVLGLLLLALPTYHLWKRCRHLAEDDTHPPASLRLLPQVSAWAGLRGTGQVGISPS

SEQ ID NO: 53353 - protein, 163 aa, Homo sapiens
  Payload ID: 10606
  Gene Symbol: MADCAM1
  Gene Name: mucosal vascular addressin cell adhesion molecule 1
  ENSP ID: ENSP00000475575
MGGILHSPTSPEPPDTTSPESPDTTSPESPDTTSQEPPDTTSPEPPDKTSPEPAPQQGSTHTPRSPGSTRTRRPEISQAGPTQGEVIPTGSSKPAGDQLPAALWTSSAVLGLLLLALPTYHLWKRCRHLAEDDTHPPASLRLLPQVSAWAGLRGTGQVGISPS

SEQ ID NO: 53354 - protein, 390 aa, Homo sapiens
  Payload ID: 10606
  Gene Symbol: MADCAM1
  Gene Name: mucosal vascular addressin cell adhesion molecule 1
  ENSP ID: ENSP00000480104
MDFGLALLLAGLLGLLLGQSLQVKPLQVEPPEPVVAVALGASRQLTCRLACADRGASVQWRGLDTSLGAVQSDTGRSVLTVRNASLSAAGTRVCVGSCGGRTFQHTVQLLVYAFPDQLTVSPAALVPGDPEVACTAHKVTPVDPNALSFSLLVGGQELEGAQALGPEVQEEEEEPQGDEDVLFRVTERWRLPPLGTPVPPALYCQATMRLPGLELSHRQAIPALHALSNPEAPAPTSPEPPDTTSPESPDTTSPESPDTTSQEPPDTTSPEPPDKTSPEPAPQQGSTHTPRSPGSTRTRRPEISQAGPTQGEVIPTGSSKPAGDQLPAALWTSSAVLGLLLLALPTYHLWKRCRHLAEDDTHPPASLRLLPQVSAWAGLRGTGQVGISPS

SEQ ID NO: 53355 - protein, 406 aa, Homo sapiens
  Payload ID: 10606
  Gene Symbol: MADCAM1
  Gene Name: mucosal vascular addressin cell adhesion molecule 1
  ENSP ID: ENSP00000480908
MDFGLALLLAGLLGLLLGQSLQVKPLQVEPPEPVVAVALGASRQLTCRLACADRGASVQWRGLDTSLGAVQSDTGRSVLTVRNASLSAAGTRVCVGSCGGRTFQHTVQLLVYAFPDQLTVSPAALVPGDPEVACTAHKVTPVDPNALSFSLLVGGQELEGAQALGPEVQEEEEEPQGDEDVLFRVTERWRLPPLGTPVPPALYCQATMRLPGLELSHRQAIPALHALSNPEAPAAESPQAPSLSTPASSHPTSPEPPDTTSPESPDTTSPESPDTTSQEPPDTTSPEPPDKTSPEPAPQQGSTHTPRSPGSTRTRRPEISQAGPTQGEVIPTGSSKPAGDQLPAALWTSSAVLGLLLLALPTYHLWKRCRHLAEDDTHPPASLRLLPQVSAWAGLRGTGQVGISPS

SEQ ID NO: 53356 - protein, 400 aa, Homo sapiens
  Payload ID: 10606
  Gene Symbol: MADCAM1
  Gene Name: mucosal vascular addressin cell adhesion molecule 1
  ENSP ID: ENSP00000483663
MDFGLALLLAGLLGLLLGQSLQVKPLQVEPPEPVVAVALGASRQLTCRLACADRGASVQWRGLDTSLGAVQSDTGRSVLTVRNASLSAAGTRVCVGSCGGRTFQHTVQLLVYAFPDQLTVSPAALVPGDPEVACTAHKVTPVDPNALSFSLLVGGQELEGAQALGPEVQEEEEEPQGDEDVLFRVTERWRLPPLGTPVPPALYCQATMRLPGLELSHRQAIPVRWVPWRPTRSPALTSTSESHSPTSPEPPDTTSPESPDTTSPESPDTTSQEPPDTTSPEPPDKTSPEPAPQQGSTHTPRSPGSTRTRRPEISQAGPTQGEVIPTGSSKPAGDQLPAALWTSSAVLGLLLLALPTYHLWKRCRHLAEDDTHPPASLRLLPQVSAWAGLRGTGQVGISPS

SEQ ID NO: 53357 - protein, 398 aa, Homo sapiens
  Payload ID: 10606
  Gene Symbol: MADCAM1
  Gene Name: mucosal vascular addressin cell adhesion molecule 1
  ENSP ID: ENSP00000484153
MDFGLALLLAGLLGLLLGQSLQVKPLQVEPPEPVVAVALGASRQLTCRLACADRGASVQWRGLDTSLGAVQSDTGRSVLTVRNASLSAAGTRVCVGSCGGRTFQHTVQLLVYAFPDQLTVSPAALVPGDPEVACTAHKVTPVDPNALSFSLLVGGQELEGAQALGPEVQEEEEEPQGDEDVLFRVTERWRLPPLGTPVPPALYCQATMRLPGLELSHRQAIPALHGWLSPPPPQNTGPHGPHPTSPEPPDTTSPESPDTTSPESPDTTSQEPPDTTSPEPPDKTSPEPAPQQGSTHTPRSPGSTRTRRPEISQAGPTQGEVIPTGSSKPAGDQLPAALWTSSAVLGLLLLALPTYHLWKRCRHLAEDDTHPPASLRLLPQVSAWAGLRGTGQVGISPS

SEQ ID NO: 53358 - protein, 400 aa, Homo sapiens
  Payload ID: 10606
  Gene Symbol: MADCAM1
  Gene Name: mucosal vascular addressin cell adhesion molecule 1
  ENSP ID: ENSP00000484317
MDFGLALLLAGLLGLLLGQSLQVKPLQVEPPEPVVAVALGASRQLTCRLACADRGASVQWRGLDTSLGAVQSDTGRSVLTVRNASLSAAGTRVCVGSCGGRTFQHTVQLLVYAFPDQLTVSPAALVPGDPEVACTAHKVTPVDPNALSFSLLVGGQELEGAQALGPEVQEEEEEPQGDEDVLFRVTERWRLPPLGTPVPPALYCQATMRLPGLELSHRQAIPVRWVPWRPTRSPADSTSPVLHSPTSPEPPDTTSPESPDTTSPESPDTTSQEPPDTTSPEPPDKTSPEPAPQQGSTHTPRSPGSTRTRRPEISQAGPTQGEVIPTGSSKPAGDQLPAALWTSSAVLGLLLLALPTYHLWKRCRHLAEDDTHPPASLRLLPQVSAWAGLRGTGQVGISPS

SEQ ID NO: 53359 - protein, 179 aa, Homo sapiens
  Payload ID: 10607
  Gene Symbol: MCIDAS
  Gene Name: multiciliate differentiation and DNA synthesis associated cell cycle protein
  ENSP ID: ENSP00000422165
MQACGGGAAGRRAFDSICPNRMLALPGRALLCKPGKPERKFAPPRKFFPGCTGGSPVSVYEDPPDAEPTALPALTTIDLQDLADCSSLLGSDAPPGGDLAASQNHSHQTEADFNLQDFRDTVDDLISGKLILYDVAYPGQRRLPLLSLRHITIRALPLPATGPTGPAVTTAAPSRRAPA

SEQ ID NO: 53360 - protein, 385 aa, Homo sapiens
  Payload ID: 10607
  Gene Symbol: MCIDAS
  Gene Name: multiciliate differentiation and DNA synthesis associated cell cycle protein
  Uniprot ID: D6RGH6
  ENSP ID: ENSP00000426359
MQACGGGAAGRRAFDSICPNRMLALPGRALLCKPGKPERKFAPPRKFFPGCTGGSPVSVYEDPPDAEPTALPALTTIDLQDLADCSSLLGSDAPPGGDLAASQNHSHQTEADFNLQDFRDTVDDLISDSSSMMSPTLASGDFPFSPCDISPFGPCLSPPLDPRALQSPPLRPPDVPPPEQYWKEVADQNQRALGDALVENNQLHVTLTQKQEEIASLKERNVQLKELASRTRHLASVLDKLMITQSRDCGAAAEPFLLKAKAKRSLEELVSAAGQDCAEVDAILREISERCDEALQSRDPKRPRLLPEPANTDTRPGNLHGAFRGLRTDCSRSALNLSHSELEEGGSFSTRIRSHSTIRTLAFPQGNAFTIRTANGGYKFRWVPS

SEQ ID NO: 53361 - protein, 1228 aa, Homo sapiens
  Payload ID: 10608
  Gene Symbol: MMRN1
  Gene Name: multimerin 1
  Uniprot ID: Q13201
  ENSP ID: ENSP00000264790
MKGARLFVLLSSLWSGGIGLNNSKHSWTIPEDGNSQKTMPSASVPPNKIQSLQILPTTRVMSAEIATTPEARTSEDSLLKSTLPPSETSAPAEGVRNQTLTSTEKAEGVVKLQNLTLPTNASIKFNPGAESVVLSNSTLKFLQSFARKSNEQATSLNTVGGTGGIGGVGGTGGVGNRAPRETYLSRGDSSSSQRTDYQKSNFETTRGKNWCAYVHTRLSPTVILDNQVTYVPGGKGPCGWTGGSCPQRSQKISNPVYRMQHKIVTSLDWRCCPGYSGPKCQLRAQEQQSLIHTNQAESHTAVGRGVAEQQQQQGCGDPEVMQKMTDQVNYQAMKLTLLQKKIDNISLTVNDVRNTYSSLEGKVSEDKSREFQSLLKGLKSKSINVLIRDIVREQFKIFQNDMQETVAQLFKTVSSLSEDLESTRQIIQKVNESVVSIAAQQKFVLVQENRPTLTDIVELRNHIVNVRQEMTLTCEKPIKELEVKQTHLEGALEQEHSRSILYYESLNKTLSKLKEVHEQLLSTEQVSDQKNAPAAESVSNNVTEYMSTLHENIKKQSLMMLQMFEDLHIQESKINNLTVSLEMEKESLRGECEDMLSKCRNDFKFQLKDTEENLHVLNQTLAEVLFPMDNKMDKMSEQLNDLTYDMEILQPLLEQGASLRQTMTYEQPKEAIVIRKKIENLTSAVNSLNFIIKELTKRHNLLRNEVQGRDDALERRINEYALEMEDGLNKTMTIINNAIDFIQDNYALKETLSTIKDNSEIHHKCTSDMETILTFIPQFHRLNDSIQTLVNDNQRYNFVLQVAKTLAGIPRDEKLNQSNFQKMYQMFNETTSQVRKYQQNMSHLEEKLLLTTKISKNFETRLQDIESKVTQTLIPYYISVKKGSVVTNERDQALQLQVLNSRFKALEAKSIHLSINFFSLNKTLHEVLTMCHNASTSVSELNATIPKWIKHSLPDIQLLQKGLTEFVEPIIQIKTQAALSNLTCCIDRSLPGSLANVVKSQKQVKSLPKKINALKKPTVNLTTVLIGRTQRNTDNIIYPEEYSSCSRHPCQNGGTCINGRTSFTCACRHPFTGDNCTIKLVEENALAPDFSKGSYRYAPMVAFFASHTYGMTIPGPILFNNLDVNYGASYTPRTGKFRIPYLGVYVFKYTIESFSAHISGFLVVDGIDKLAFESENINSEIHCDRVLTGDALLELNYGQEVWLRLAKGTIPAKFPPVTTFSGYLLYRT

SEQ ID NO: 53362 - protein, 1228 aa, Homo sapiens; identical to SEQ ID NO: 53361
  Payload ID: 10608
  Gene Symbol: MMRN1
  Gene Name: multimerin 1
  Uniprot ID: Q13201
  ENSP ID: ENSP00000378431

SEQ ID NO: 53363 - protein, 970 aa, Homo sapiens
  Payload ID: 10608
  Gene Symbol: MMRN1
  Gene Name: multimerin 1
  ENSP ID: ENSP00000426461
MQHKIVTSLDWRCCPGYSGPKCQLRAQEQQSLIHTNQAESHTAVGRGVAEQQQQQGCGDPEVMQKMTDQVNYQAMKLTLLQKKIDNISLTVNDVRNTYSSLEGKVSEDKSREFQSLLKGLKSKSINVLIRDIVREQFKIFQNDMQETVAQLFKTVSSLSEDLESTRQIIQKVNESVVSIAAQQKFVLVQENRPTLTDIVELRNHIVNVRQEMTLTCEKPIKELEVKQTHLEGALEQEHSRSILYYESLNKTLSKLKEVHEQLLSTEQVSDQKNAPAAESVSNNVTEYMSTLHENIKKQSLMMLQMFEDLHIQESKINNLTVSLEMEKESLRGECEDMLSKCRNDFKFQLKDTEENLHVLNQTLAEVLFPMDNKMDKMSEQLNDLTYDMEILQPLLEQGASLRQTMTYEQPKEAIVIRKKIENLTSAVNSLNFIIKELTKRHNLLRNEVQGRDDALERRINEYALEMEDGLNKTMTIINNAIDFIQDNYALKETLSTIKDNSEIHHKCTSDMETILTFIPQFHRLNDSIQTLVNDNQRYNFVLQVAKTLAGIPRDEKLNQSNFQKMYQMFNETTSQVRKYQQNMSHLEEKLLLTTKISKNFETRLQDIESKVTQTLIPYYISVKKGSVVTNERDQALQLQVLNSRFKALEAKSIHLSINFFSLNKTLHEVLTMCHNASTSVSELNATIPKWIKHSLPDIQLLQKGLTEFVEPIIQIKTQAALSNLTCCIDRSLPGSLANVVKSQKQVKSLPKKINALKKPTVNLTTVLIGRTQRNTDNIIYPEEYSSCSRHPCQNGGTCINGRTSFTCACRHPFTGDNCTIKLVEENALAPDFSKGSYRYAPMVAFFASHTYGMTIPGPILFNNLDVNYGASYTPRTGKFRIPYLGVYVFKYTIESFSAHISGFLVVDGIDKLAFESENINSEIHCDRVLTGDALLELNYGQEVWLRLAKGTIPAKFPPVTTFSGYLLYRT

SEQ ID NO: 53364 - protein, 949 aa, Homo sapiens
  Payload ID: 10609
  Gene Symbol: MMRN2
  Gene Name: multimerin 2
  Uniprot ID: Q9H8L6
  ENSP ID: ENSP00000361097
MILSLLFSLGGPLGWGLLGAWAQASSTSLSDLQSSRTPGVWKAEAEDTGKDPVGRNWCPYPMSKLVTLLALCKTEKFLIHSQQPCPQGAPDCQKVKVMYRMAHKPVYQVKQKVLTSLAWRCCPGYTGPNCEHHDSMAIPEPADPGDSHQEPQDGPVSFKPGHLAAVINEVEVQQEQQEHLLGDLQNDVHRVADSLPGLWKALPGNLTAAVMEANQTGHEFPDRSLEQVLLPHVDTFLQVHFSPIWRSFNQSLHSLTQAIRNLSLDVEANRQAISRVQDSAVARADFQELGAKFEAKVQENTQRVGQLRQDVEDRLHAQHFTLHRSISELQADVDTKLKRLHKAQEAPGTNGSLVLATPGAGARPEPDSLQARLGQLQRNLSELHMTTARREEELQYTLEDMRATLTRHVDEIKELYSESDETFDQISKVERQVEELQVNHTALRELRVILMEKSLIMEENKEEVERQLLELNLTLQHLQGGHADLIKYVKDCNCQKLYLDLDVIREGQRDATRALEETQVSLDERRQLDGSSLQALQNAVDAVSLAVDAHKAEGERARAATSRLRSQVQALDDEVGALKAAAAEARHEVRQLHSAFAALLEDALRHEAVLAALFGEEVLEEMSEQTPGPLPLSYEQIRVALQDAASGLQEQALGWDELAARVTALEQASEPPRPAEHLEPSHDAGREEAATTALAGLARELQSLSNDVKNVGRCCEAEAGAGAASLNASLHGLHNALFATQRSLEQHQRLFHSLFGNFQGLMEANVSLDLGKLQTMLSRKGKKQQKDLEAPRKRDKKEAEPLVDIRVTGPVPGALGAALWEAGSPVAFYASFSEGTAALQTVKFNTTYINIGSSYFPEHGYFRAPERGVYLFAVSVEFGPGPGTGQLVFGGHHRTPVCTTGQGSGSTATVFAMAELQKGERVWFELTQGSITKRSLSGTAFGGFLMFKT

SEQ ID NO: 53365 - protein, 123 aa, Homo sapiens
  Payload ID: 10609
  Gene Symbol: MMRN2
  Gene Name: multimerin 2
  ENSP ID: ENSP00000473405
MSKLVTLLALCKTEKFLIHSQQPCPQGAPDCQKVKVMYRMAHKPVYQVKQKVLTSLAWRCCPGYTGPNCEHHDSMAIPEPADPGDSHQEPQDGPVSFKPGHLAAVINEVEVQQEQQEHLLGDL

SEQ ID NO: 53366 - protein, 109 aa, Homo sapiens
  Payload ID: 10609
  Gene Symbol: MMRN2
  Gene Name: multimerin 2
  ENSP ID: ENSP00000476355
MILSLLFSLGGPLGWGLLGAWAQASSTSLSDLQSSRTPGVWKAEAEDTGKDPVGRIMDSRIPALLRQEARTGGSALAPPVDLGVAQQPSPLACFPVTGAPTQCPSWSPY

SEQ ID NO: 53367 - protein, 204 aa, Homo sapiens
  Payload ID: 10609
  Gene Symbol: MMRN2
  Gene Name: multimerin 2
  ENSP ID: ENSP00000476378
MAHKPVYQVKQKVLTSLAWRCCPGYTGPNCEHHDSMAIPEPADPGDSHQEPQDGPVSFKPGHLAAVINEVEVQQEQQEHLLGDLQNDVHRVADSLPGLWKALPGNLTAAVMEANQTGHEFPDRSLEQVLLPHVDTFLQVHFSPIWRSFNQSLHSLTQAIRNLSLDVEANRQAISRVQDSAVARADFQELGAKFEAKVQENTQRV

SEQ ID NO: 53368 - protein, 295 aa, Homo sapiens
  Payload ID: 10609
  Gene Symbol: MMRN2
  Gene Name: multimerin 2
  ENSP ID: ENSP00000477052
MGTSASWAGGMGIKGQPEAAKSWRKPKQSNWCPYPMSKLVTLLALCKTEKFLIHSQQPCPQGAPDCQKVKVMYRMAHKPVYQVKQKVLTSLAWRCCPGYTGPNCEHHDSMAIPEPADPGDSHQEPQDGPVSFKPGHLAAVINEVEVQQEQQEHLLGDLQNDVHRVADSLPGLWKALPGNLTAAVMEANQTGHEFPDRSLEQVLLPHVDTFLQVHFSPIWRSFNQSLHSLTQAIRNLSLDVEANRQAISRVQDSAVARADFQELGAKFEAKVQENTQRVGQLRQDVEDRLHAQHFT

SEQ ID NO: 53369 - protein, 778 aa, Homo sapiens
  Payload ID: 10610
  Gene Symbol: MCTP1
  Gene Name: multiple C2 domains, transmembrane 1
  Uniprot ID: Q6DN14
  ENSP ID: ENSP00000308957
MLDSCKLKSACNLPFICNKKIINTAGTSNAEVPLADPGMYQLDITLRRGQSLAARDRGGTSDPYVKFKIGGKEVFRSKIIHKNLNPVWEEKACILVDHLREPLYIKVFDYDFGLQDDFMGSAFLDLTQLELNRPTDVTLTLKDPHYPDHDLGIILLSVILTPKEGESRDVTMLMRKSWKRSSKELSENEVVGSYFSVKSLFWRTCGRPALPVLGFCRAELQNPYCKNVQFQTQSLRLSDLHRKSHLWRGIVSITLIEGRDLKAMDSNGLSDPYVKFRLGHQKYKSKIMPKTLNPQWREQFDFHLYEERGGVIDITAWDKDAGKRDDFIGRCQVDLSALSREQTHKLELQLEEGEGHLVLLVTLTASATVSISDLSVNSLEDQKEREEILKRYSPLRIFHNLKDVGFLQVKVIRAEGLMAADVTGKSDPFCVVELNNDRLLTHTVYKNLNPEWNKVFTFNIKDIHSVLEVTVYDEDRDRSADFLGKVAIPLLSIQNGEQKAYVLKNKQLTGPTKGVIYLEIDVIFNAVKASLRTLIPKEQKYIEEENRLSKQLLLRNFIRMKRCVMVLVNAAYYVNSCFDWDSPPRSLAAFVLFLFVVWNFELYMIPLVLLLLLTWNYFLIISGKDNRQRDTVVEDMLEDEEEEDDKDDKDSEKKGFINKIYAIQEVCVSVQNILDEVASFGERIKNTFNWTVPFLSWLAIVALCVFTAILYCIPLRYIVLVWGINKFTKKLRSPYAIDNNELLDFLSRVPSDVQVVQYQELKPDPSHSPYKRKKNNLG

SEQ ID NO: 53370 - protein, 692 aa, Homo sapiens
  Payload ID: 10610
  Gene Symbol: MCTP1
  Gene Name: multiple C2 domains, transmembrane 1
  Uniprot ID: Q6DN14
  ENSP ID: ENSP00000391639
MLDSCKLKSACNLPFICNKKIINTAGTSNAEVPLADPGMYQLDITLRRGQSLAARDRGGTSDPYVKFKIGGKEVFRSKIIHKNLNPVWEEKACILVDHLREPLYIKVFDYDFGLQDDFMGSAFLDLTQLELNRPTDVTLTLKDPHYPDHDLGIILLSVILTPKEGESRDVTMLMRKSWKRSSKFQTQSLRLSDLHRKSHLWRGIVSITLIEGRDLKAMDSNGLSDPYVKFRLGHQKYKSKIMPKTLNPQWREQFDFHLYEERGGVIDITAWDKDAGKRDDFIGRCQVDLSALSREQTHKLELQLEEGEGHLVLLVTLTASATVSISDLSVNSLEDQKEREEILKRYSPLRIFHNLKDVGFLQVKVIRAEGLMAADVTGKSDPFCVVELNNDRLLTHTVYKNLNPEWNKVFTFNIKDIHSVLEVTVYDEDRDRSADFLGKVAIPLLSIQNGEQKAYVLKNKQLTGPTKGVIYLEIDVIFNAVKASLRTLIPKEQKYIEEENRLSKQLLLRNFIRMKRCVMVLVNAAYYVNSCFDWDSPPRSLAAFVVVEDMLEDEEEEDDKDDKDSEKKGFINKIYAIQEVCVSVQNILDEVASFGERIKNTFNWTVPFLSWLAIVALCVFTAILYCIPLRYIVLVWGINKFTKKLRSPYAIDNNELLDFLSRVPSDVQVVQYQELKPDPSHSPYKRKKNNLG

SEQ ID NO: 53371 - protein, 169 aa, Homo sapiens
  Payload ID: 10610
  Gene Symbol: MCTP1
  Gene Name: multiple C2 domains, transmembrane 1
  ENSP ID: ENSP00000421543
KIINTAGTSNAEVPLADPGMYQLDITLRRGQSLAARDRGGTSDPYVKFKIGGKEVFRSKIIHKNLNPVWEEKACILVDHLREPLYIKVFDYDFGLQDDFMGSAFLDLTQLELNRPTDVTLTLKDPHYPDHDLGIILLSVILTPKEGESRDVTMLMRKSWKRSSKVILSL

SEQ ID NO: 53372 - protein, 135 aa, Homo sapiens
  Payload ID: 10610
  Gene Symbol: MCTP1
  Gene Name: multiple C2 domains, transmembrane 1
  ENSP ID: ENSP00000422219
MLDSCKLKSACNLPFICNKTLYGKIGKDRLNAVNKIINTAGTSNAEVPLADPGMYQLDITLRRGQSLAARDRGGTSDPYVKFKIGGKEVFRSKIIHKNLNPVWEEKACILVDHLREPLYIKVFDYDFGLQDDFMG

SEQ ID NO: 53373 - protein, 81 aa, Homo sapiens
  Payload ID: 10610
  Gene Symbol: MCTP1
  Gene Name: multiple C2 domains, transmembrane 1
  ENSP ID: ENSP00000422317
MLDSCKLKSACNLPFICNKKIINTAGTSNAEVPLADPGMYQLDITLRRGQSLAARDRGGTSDPYVKFKIGGKEVFRSKIIH

SEQ ID NO: 53374 - protein, 683 aa, Homo sapiens
  Payload ID: 10610
  Gene Symbol: MCTP1
  Gene Name: multiple C2 domains, transmembrane 1
  ENSP ID: ENSP00000423410
MLDSCKLKSACNLPFICNKKIINTAGTSNAEVPLADPGMYQLDITLRRGQSLAARDRGGTSDPYVKFKIGGKEVFRSKIIHKNLNPVWEEKACILVDHLREPLYIKVFDYDFGLQDDFMGSAFLDLTQLELNRPTDVTLTLKDPHYPDHDLGIILLSVILTPKEGESRDVFQTQSLRLSDLHRKSHLWRGIVSITLIEGRDLKAMDSNGLSDPYVKFRLGHQKYKSKIMPKTLNPQWREQFDFHLYEERGGVIDITAWDKDAGKRDDFIGRCQVDLSALSREQTHKLELQLEEGEGHLVLLVTLTASATVSISDLSVNSLEDQKEREEILKRYSPLRIFHNLKDVGFLQVKVIRAEGLMAADVTGKSDPFCVVELNNDRLLTHTVYKNLNPEWNKVFTFNIKDIHSVLEVTVYDEDRDRSADFLGKVAIPLLSIQNGEQKAYVLKNKQLTGPTKGVIYLEIDVIFNAVKASLRTLIPKEQKYIEEENRLSKQLLLRNFIRMKRCVMVLVNAAYYVNSCFDWDSPPRSLAAFVLFLFVVWNFELYMIPLVLLLLLTWNYFLIISGKDNRQRDTVVEDMLEDEEEEDDKDDKDSEKKGFINKIYAIQEVCVSVQNILDEVASFGERIKNTFNWTVPFLSWLAIVALCVFTAILYCIPLRYIVLVWGINKFTKKLRSPYAIDNNEL

SEQ ID NO: 53375 - protein, 999 aa, Homo sapiens
  Payload ID: 10610
  Gene Symbol: MCTP1
  Gene Name: multiple C2 domains, transmembrane 1
  Uniprot ID: Q6DN14
  ENSP ID: ENSP00000424126
MEPRAAAAGEPEPPAASSSFQARLWKNLQLGVGRSKGGGGGRAGGPERRTADTPSPSPPPPVGTGNAPARGSGAGSRWSGFKKRKQVLDRVFSSSQPNLCCSSPEPLEPGGAGRAEQGSTLRRRIREHLLPAVKGPAAASGAAGGTPPGGRSPDSAPSSSSASSSLSSSPQPPPRGDRARDEGARRQGPGAHLCHQKSSSLPGTACLEQLLEPPPPPAEPARSPAESRAPETGEEHGSSQKIINTAGTSNAEVPLADPGMYQLDITLRRGQSLAARDRGGTSDPYVKFKIGGKEVFRSKIIHKNLNPVWEEKACILVDHLREPLYIKVFDYDFGLQDDFMGSAFLDLTQLELNRPTDVTLTLKDPHYPDHDLGIILLSVILTPKEGESRDVTMLMRKSWKRSSKELSENEVVGSYFSVKSLFWRTCGRPALPVLGFCRAELQNPYCKNVQFQTQSLRLSDLHRKSHLWRGIVSITLIEGRDLKAMDSNGLSDPYVKFRLGHQKYKSKIMPKTLNPQWREQFDFHLYEERGGVIDITAWDKDAGKRDDFIGRCQVDLSALSREQTHKLELQLEEGEGHLVLLVTLTASATVSISDLSVNSLEDQKEREEILKRYSPLRIFHNLKDVGFLQVKVIRAEGLMAADVTGKSDPFCVVELNNDRLLTHTVYKNLNPEWNKVFTFNIKDIHSVLEVTVYDEDRDRSADFLGKVAIPLLSIQNGEQKAYVLKNKQLTGPTKGVIYLEIDVIFNAVKASLRTLIPKEQKYIEEENRLSKQLLLRNFIRMKRCVMVLVNAAYYVNSCFDWDSPPRSLAAFVLFLFVVWNFELYMIPLVLLLLLTWNYFLIISGKDNRQRDTVVEDMLEDEEEEDDKDDKDSEKKGFINKIYAIQEVCVSVQNILDEVASFGERIKNTFNWTVPFLSWLAIVALCVFTAILYCIPLRYIVLVWGINKFTKKLRSPYAIDNNELLDFLSRVPSDVQVVQYQELKPDPSHSPYKRKKNNLG

SEQ ID NO: 53376 - protein, 191 aa, Homo sapiens
  Payload ID: 10610
  Gene Symbol: MCTP1
  Gene Name: multiple C2 domains, transmembrane 1
  ENSP ID: ENSP00000424936
QKIINTAGTSNAEVPLADPGMYQLDITLRRGQSLAARDRGGTSDPYVKFKIGGKEVFRSKIIHKNLNPVWEEKACILVDHLREPLYIKVFDYDFGLQDDFMGSAFLDLTQLELNRPTDVTLTLKDPHYPDHDLGIILLSVILTPKEGESRDVFQTQSLRLSDLHRKSHLWRGIVSITLIEGRDLKAMDSNG

SEQ ID NO: 53377 - protein, 292 aa, Homo sapiens
  Payload ID: 10610
  Gene Symbol: MCTP1
  Gene Name: multiple C2 domains, transmembrane 1
  ENSP ID: ENSP00000425515
  MOD_RES (1)..(1): Any amino acid
XLCHQKSSSLPGTACLEQLLEPPPPPAEPARSPAESRAPETGEEHGSSQKIINTAGTSNAEVPLADPGMYQLDITLRRGQSLAARDRGGTSDPYVKFKIGGKEVFRSKIIHKNLNPVWEEKACILVDHLREPLYIKVFDYDFGLQDDFMGSAFLDLTQLELNRPTDVTLTLKDPHYPDHDLGIILLSVILTPKEGESRDVTMLMRKSWKRSSKFQTQSLRLSDLHRKSHLWRGIVSITLIEGRDLKAMDSNGLSDPYVKFRLGHQKYKSKIMPKTLNPQWREQFDFHLYEER

SEQ ID NO: 53378 - protein, 414 aa, Homo sapiens
  Payload ID: 10610
  Gene Symbol: MCTP1
  Gene Name: multiple C2 domains, transmembrane 1
  ENSP ID: ENSP00000426294
TLKDPHYPDHDLGIILLSVILTPKEGESRDVELSENEVVGSYFSVKSLFWRFQTQSLRLSDLHRKSHLWRGIVSITLIEGRDLKAMDSNGLSDPYVKFRLGHQKYKSKIMPKTLNPQWREQFDFHLYEERGGVIDITAWDKDAGKRDDFIGRCQVDLSALSREQTHKLELQLEEGEGHLVLLVTLTASATVSISDLSVNSLEDQKEREEILKRYSPLRIFHNLKDVGFLQVKVIRAEGLMAADVTGKSDPFCVVELNNDRLLTHTVYKNLNPEWNKVFTFNIKDIHSVLEVTVYDEDRDRSADFLGKVAIPLLSIQNGEQKAYVLKNKQLTGPTKGVIYLEIDVIFNAVKASLRTLIPKEQKYIEEENRLSKQLLLRNFIRMKRCVMVLVNAAYYVNSCFDWDSPPRSLAAFVV

SEQ ID NO: 53379 - protein, 515 aa, Homo sapiens
  Payload ID: 10610
  Gene Symbol: MCTP1
  Gene Name: multiple C2 domains, transmembrane 1
  Uniprot ID: Q6DN14
  ENSP ID: ENSP00000426417
MDSNGLSDPYVKFRLGHQKYKSKIMPKTLNPQWREQFDFHLYEERGGVIDITAWDKDAGKRDDFIGRCQVDLSALSREQTHKLELQLEEGEGHLVLLVTLTASATVSISDLSVNSLEDQKEREEILKRYSPLRIFHNLKDVGFLQVKVIRAEGLMAADVTGKSDPFCVVELNNDRLLTHTVYKNLNPEWNKVFTFNIKDIHSVLEVTVYDEDRDRSADFLGKVAIPLLSIQNGEQKAYVLKNKQLTGPTKGVIYLEIDVIFNAVKASLRTLIPKEQKYIEEENRLSKQLLLRNFIRMKRCVMVLVNAAYYVNSCFDWDSPPRSLAAFVLFLFVVWNFELYMIPLVLLLLLTWNYFLIISGKDNRQRDTVVEDMLEDEEEEDDKDDKDSEKKGFINKIYAIQEVCVSVQNILDEVASFGERIKNTFNWTVPFLSWLAIVALCVFTAILYCIPLRYIVLVWGINKFTKKLRSPYAIDNNELLDFLSRVPSDVQVVQYQELKPDPSHSPYKRKKNNLG

SEQ ID NO: 53380 - protein, 600 aa, Homo sapiens
  Payload ID: 10610
  Gene Symbol: MCTP1
  Gene Name: multiple C2 domains, transmembrane 1
  Uniprot ID: Q6DN14
  ENSP ID: ENSP00000426438
MLDSCKLKSACNLPFICNKKIINTAGTSNAEVPLADPGMYQLDITLRRGQSLAARDRGGTSDPYVKFKIGGKEVFRSKIIHKNLNPVWEEKACILVDHLREPLYIKVFDYDFGLQDDFMGSAFLDLTQLELNRPTDVTLTLKDPHYPDHDLGIILLSVILTPKEGESRDVTMLMRKSWKRSSKELSENEVVGSYFSVKSLFWRTCGRPALPVLGFCRAELQNPYCKNVQFQTQSLRLSDLHRKSHLWRGIVSITLIEGRDLKAMDSNGLSDPYVKFRLGHQKYKSKIMPKTLNPQWREQFDFHLYEERGGVIDITAWDKDAGKRDDFIGRCQVDLSALSREQTHKLELQLEEGEGHLVLLVTLTASATVSISDLSVNSLEDQKEREEILKRYSPLRIFHNLKDVGFLQVKVIRAEGLMAADVTGKSDPFCVVELNNDRLLTHTVYKNLNPEWNKVFTFNIKDIHSVLEVTVYDEDRDRSADFLGKVAIPLLSIQNGEQKAYVLKNKQLTGPTKGVIYLEIDVIFNAVKASLRTLIPKEQKYIEEENRLSKQLLLRNFIRMKRCVMVLVNAAYYVNSCFDWDSPPRSLAAFVALYGTFINV

SEQ ID NO: 53381 - protein, 489 aa, Homo sapiens
  Payload ID: 10610
  Gene Symbol: MCTP1
  Gene Name: multiple C2 domains, transmembrane 1
  ENSP ID: ENSP00000431075
MGSAFLDLTQLELNRPTDVTLTLKDPHYPDHDLGIILLSVILTPKEGESRDVTMLMRKSWKRSSKELSENEVVGSYFSVKSLFWRTCGRPALPVLGFCRAELQNPYCKNVQFQTQSLRLSDLHRKSHLWRGIVSITLIEGRDLKAMDSNGLSDPYVKFRLGHQKYKSKIMPKTLNPQWREQFDFHLYEERGGVIDITAWDKDAGKRDDFIGRCQVDLSALSREQTHKLELQLEEGEGHLVLLVTLTASATVSISDLSVNSLEDQKEREEILKRYSPLRIFHNLKDVGFLQVKVIRAEGLMAADVTGKSDPFCVVELNNDRLLTHTVYKNLNPEWNKVFTFNIKDIHSVLEVTVYDEDRDRSADFLGKVAIPLLSIQNGEQKAYVLKNKQLTGPTKGVIYLEIDVIFNAVKASLRTLIPKEQKYIEEENRLSKQLLLRNFIRMKRCVMVLVNAAYYVNSCFDWDSPPRSLAAFVLFLFVVWNFELYMIPL

SEQ ID NO: 53382 - protein, 878 aa, Homo sapiens
  Payload ID: 10611
  Gene Symbol: MCTP2
  Gene Name: multiple C2 domains, transmembrane 2
  Uniprot ID: Q6DN12
  ENSP ID: ENSP00000350377
MDLDKPSVWGSLKQRTRPLLINLSKKKVKKNPSKPPDLRARHHLDRRLSLSVPDLLEAEALAPEGRPYSGPQSSYTSVPSSLSTAGIFPKSSSSSLKQSEEELDWSQEEASHLHVVETDSEEAYASPAERRRVSSNGIFDLQKTSLGGDAPEEPEKLCGSSDLNASMTSQHFEEQSVPGEASDGLSNLPSPFAYLLTIHLKEGRNLVVRDRCGTSDPYVKFKLNGKTLYKSKVIYKNLNPVWDEIVVLPIQSLDQKLRVKVYDRDLTTSDFMGSAFVILSDLELNRTTEHILKLEDPNSLEDDMGVIVLNLNLVVKQGDFKRHRWSNRKRLSASKSSLIRNLRLSESLKKNQLWNGIISITLLEGKNVSGGSMTEMFVQLKLGDQRYKSKTLCKSANPQWQEQFDFHYFSDRMGILDIEVWGKDNKKHEERLGTCKVDISALPLKQANCLELPLDSCLGALLMLVTLTPCAGVSVSDLCVCPLADLSERKQITQRYCLQNSLKDVKDVGILQVKVLKAADLLAADFSGKSDPFCLLELGNDRLQTHTVYKNLNPEWNKVFTFPIKDIHDVLEVTVFDEDGDKPPDFLGKVAIPLLSIRDGQPNCYVLKNKDLEQAFKGVIYLEMDLIYNPVKASIRTFTPREKRFVEDSRKLSKKILSRDVDRVKRITMAIWNTMQFLKSCFQWESTLRSTIAFAVFLITVWNFELYMIPLALLLIFVYNFIRPVKGKVSSIQDSQESTDIDDEEDEDDKESEKKGLIERIYMVQDIVSTVQNVLEEIASFGERIKNTFNWTVPFLSSLACLILAAATIILYFIPLRYIILIWGINKFTKKLRNPYSIDNNELLDFLSRVPSDVQKVQYAELKLCSSHSPLRKKRSAL

SEQ ID NO: 53383 - protein, 199 aa, Homo sapiens
  Payload ID: 10611
  Gene Symbol: MCTP2
  Gene Name: multiple C2 domains, transmembrane 2
  Uniprot ID: Q6DN12
  ENSP ID: ENSP00000388887
MDLDKPSVWGSLKQRTRPLLINLSKKKVKKNPSKPPDLRARHHLDRRLSLSVPDLLEAEALAPEGRPYSGPQSSYTSVPSSLSTAGIFPKSSSSSLKQSEEELDWSQEEASHLHVVETDSEEAYASPAERRRVSSNGIFDLQKTSLGGDAPEEPEKLCGSSDLNASMTSQHFEEQSDSQKFEMTQKFNWAHVIHIQKQT

SEQ ID NO: 53384 - protein, 823 aa, Homo sapiens
  Payload ID: 10611
  Gene Symbol: MCTP2
  Gene Name: multiple C2 domains, transmembrane 2
  Uniprot ID: Q6DN12
  ENSP ID: ENSP00000395109
MDLDKPSVWGSLKQRTRPLLINLSKKKVKKNPSKPPDLRARHHLDRRLSLSVPDLLEAEALAPEGRPYSGPQSSYTSVPSSLSTAGIFPKSSSSSLKQSEEELDWSQEEASHLHVVETDSEEAYASPAERRRVSSNGIFDLQKTSLGGDAPEEPEKLCGSSDLNASMTSQHFEEQSVPGEASDGLSNLPSPFAYLLTIHLKEGRNLVVRDRCGTSDPYVKFKLNGKTLYKSKVIYKNLNPVWDEIVVLPIQSLDQKLRVKVYDRDLTTSDFMGSAFVILSDLELNRTTEHILKLEDPNSLEDDMGVIVLNLNLVVKQGDFKRHRWSNRKRLSASKSSLIRNLRLSESLKKNQLWNGIISITLLEGKNVSGGSMTEMFVQLKLGDQRYKSKTLCKSANPQWQEQFDFHYFSDRMGILDIEVWGKDNKKHEERLGTCKVDISALPLKQANCLELPLDSCLGALLMLVTLTPCAGVSVSDLCVCPLADLSERKQITQRYCLQNSLKDVKDVGILQVKVLKAADLLAADFSGKSDPFCLLELGNDRLQTHTVYKNLNPEWNKVFTFPIKDIHDVLEVTVFDEDGDKPPDFLGKVAIPLLSIRDGQPNCYVLKNKDLEQAFKGVIYLEMDLIYNPVKASIRTFTPREKRFVEDSRKLSKKILSRDVDRVKRITMAIWNTMQFLKSCFQWESTLRSTIAFAESEKKGLIERIYMVQDIVSTVQNVLEEIASFGERIKNTFNWTVPFLSSLACLILAAATIILYFIPLRYIILIWGINKFTKKLRNPYSIDNNELLDFLSRVPSDVQKVQYAELKLCSSHSPLRKKRSAL

SEQ ID NO: 53385 - protein, 396 aa, Homo sapiens
  Payload ID: 10611
  Gene Symbol: MCTP2
  Gene Name: multiple C2 domains, transmembrane 2
  ENSP ID: ENSP00000438521
MDLDKPSVWGSLKQRTRPLLINLSKKKVKKNPSKPPDLRARHHLDRRLSLSVPDLLEAEALAPEGRPYSGPQSSYTSVPSSLSTAGIFPKSSSSSLKQSEEELDWSQEEASHLHVVETDSEEAYASPAERRRVSSNGIFDLQKTSLGGDAPEEPEKLCGSSDLNASMTSQHFEEQSVPGEASDGLSNLPSPFAYLLTIHLKEGRNLVVRDRCGTSDPYVKFKLNGKTLYKSKVIYKNLNPVWDEIVVLPIQSLDQKLRVKVYDRDLTTSDFMGSAFVILSDLELNRTTEHILKLEDPNSLEDDMGVIVLNLNLVVKQGDFKRHRWSNRKRLSASKSSLIRNLRLSESLKKNQLWNGIISITLLEGKNVSGGSMTEMFVQLKLGDQRYKSKDGHFGH

SEQ ID NO: 53386 - protein, 306 aa, Homo sapiens
  Payload ID: 10611
  Gene Symbol: MCTP2
  Gene Name: multiple C2 domains, transmembrane 2
  Uniprot ID: Q6DN12
  ENSP ID: ENSP00000454847
MGILDIEVWGKDNKKHEERLGTCKVDISALPLKQANCLELPLDSCLGALLMLVTLTPCAGVSVSDLCVCPLADLSERKQITQRYCLQNSLKDVKDVGILQVKVLKAADLLAADFSGKSDPFCLLELGNDRLQTHTVYKNLNPEWNKVFTFPIKDIHDVLEVTVFDEDGDKPPDFLGKVAIPLLSIRDGQPNCYVLKNKDLEQAFKGVIYLEMDLIYNPVKASIRTFTPREKRFVEDSRKLSKKILSRDVDRVKRITMAIWNTMQFLKSCFQWESTLRSTIAFAHRKEEPPLSMKCTLFSGDIGPSL

SEQ ID NO: 53387 - protein, 146 aa, Homo sapiens
  Payload ID: 10612
  Gene Symbol: MCFD2
  Gene Name: multiple coagulation factor deficiency 2
  Uniprot ID: Q8NI22
  ENSP ID: ENSP00000317271
MTMRSLLRTPFLCGLLWAFCAPGARAEEPAASFSQPGSMGLDKNTVHDQEHIMEHLEGVINKPEAEMSPQELQLHYFKMHDYDGNNLLDGLELSTAITHVHKEEGSEQAPLMSEDELINIIDGVLRDDDKNNDGYIDYAEFAKSLQ

SEQ ID NO: 53388 - protein, 146 aa, Homo sapiens; identical to SEQ ID NO: 53387
  Payload ID: 10612
  Gene Symbol: MCFD2
  Gene Name: multiple coagulation factor deficiency 2
  Uniprot ID: Q8NI22
  ENSP ID: ENSP00000386261

SEQ ID NO: 53389 - protein, 146 aa, Homo sapiens; identical to SEQ ID NO: 53387
  Payload ID: 10612
  Gene Symbol: MCFD2
  Gene Name: multiple coagulation factor deficiency 2
  Uniprot ID: Q8NI22
  ENSP ID: ENSP00000386279

SEQ ID NO: 53390 - protein, 146 aa, Homo sapiens; identical to SEQ ID NO: 53387
  Payload ID: 10612
  Gene Symbol: MCFD2
  Gene Name: multiple coagulation factor deficiency 2
  Uniprot ID: Q8NI22
  ENSP ID: ENSP00000386386

SEQ ID NO: 53391 - protein, 146 aa, Homo sapiens; identical to SEQ ID NO: 53387
  Payload ID: 10612
  Gene Symbol: MCFD2
  Gene Name: multiple coagulation factor deficiency 2
  Uniprot ID: Q8NI22
  ENSP ID: ENSP00000386651

SEQ ID NO: 53392 - protein, 94 aa, Homo sapiens
  Payload ID: 10612
  Gene Symbol: MCFD2
  Gene Name: multiple coagulation factor deficiency 2
  Uniprot ID: Q8NI22
  ENSP ID: ENSP00000386941
MEHLEGVINKPEAEMSPQELQLHYFKMHDYDGNNLLDGLELSTAITHVHKEEGSEQAPLMSEDELINIIDGVLRDDDKNNDGYIDYAEFAKSLQ

SEQ ID NO: 53393 - protein, 94 aa, Homo sapiens; identical to SEQ ID NO: 53392
  Payload ID: 10612
  Gene Symbol: MCFD2
  Gene Name: multiple coagulation factor deficiency 2
  Uniprot ID: Q8NI22
  ENSP ID: ENSP00000387082

SEQ ID NO: 53394 - protein, 94 aa, Homo sapiens; identical to SEQ ID NO: 53392
  Payload ID: 10612
  Gene Symbol: MCFD2
  Gene Name: multiple coagulation factor deficiency 2
  Uniprot ID: Q8NI22
  ENSP ID: ENSP00000387202

SEQ ID NO: 53395 - protein, 90 aa, Homo sapiens
  Payload ID: 10612
  Gene Symbol: MCFD2
  Gene Name: multiple coagulation factor deficiency 2
  ENSP ID: ENSP00000387360
SQPGSMGLDKNTVHDQEHIMEHLEGVINKPEAEMSPQELQLHYFKMHDYDGNNLLDGLELSTAITHVHKEANLCTELTLRRTGTFPIKEE

SEQ ID NO: 53396 - protein, 61 aa, Homo sapiens
  Payload ID: 10612
  Gene Symbol: MCFD2
  Gene Name: multiple coagulation factor deficiency 2
  ENSP ID: ENSP00000387541
MTMRSLLRTPFLCGLLWAFCAPGARAEEPAASFSQPGSMGLDKNTVHDQEHIMEHLEGVIN

SEQ ID NO: 53397 - protein, 127 aa, Homo sapiens
  Payload ID: 10612
  Gene Symbol: MCFD2
  Gene Name: multiple coagulation factor deficiency 2
  Uniprot ID: Q8NI22
  ENSP ID: ENSP00000394647
MLSVCSCRTSSGMRSQWPSARQRSSSLSTFRHIMEHLEGVINKPEAEMSPQELQLHYFKMHDYDGNNLLDGLELSTAITHVHKEEGSEQAPLMSEDELINIIDGVLRDDDKNNDGYIDYAEFAKSLQ

SEQ ID NO: 53398 - protein, 146 aa, Homo sapiens; identical to SEQ ID NO: 53387
  Payload ID: 10612
  Gene Symbol: MCFD2
  Gene Name: multiple coagulation factor deficiency 2
  Uniprot ID: Q8NI22
  ENSP ID: ENSP00000402717

SEQ ID NO: 53399 - protein, 1140 aa, Homo sapiens
  Payload ID: 10613
  Gene Symbol: MEGF10
  Gene Name: multiple EGF-like-domains 10
  Uniprot ID: Q96KG7
  ENSP ID: ENSP00000274473
MVISLNSCLSFICLLLCHWIGTASPLNLEDPNVCSHWESYSVTVQESYPHPFDQIYYTSCTDILNWFKCTRHRVSYRTAYRHGEKTMYRRKSQCCPGFYESGEMCVPHCADKCVHGRCIAPNTCQCEPGWGGTNCSSACDGDHWGPHCTSRCQCKNGALCNPITGACHCAAGFRGWRCEDRCEQGTYGNDCHQRCQCQNGATCDHVTGECRCPPGYTGAFCEDLCPPGKHGPQCEQRCPCQNGGVCHHVTGECSCPSGWMGTVCGQPCPEGRFGKNCSQECQCHNGGTCDAATGQCHCSPGYTGERCQDECPVGTYGVLCAETCQCVNGGKCYHVSGACLCEAGFAGERCEARLCPEGLYGIKCDKRCPCHLENTHSCHPMSGECACKPGWSGLYCNETCSPGFYGEACQQICSCQNGADCDSVTGKCTCAPGFKGIDCSTPCPLGTYGINCSSRCGCKNDAVCSPVDGSCTCKAGWHGVDCSIRCPSGTWGFGCNLTCQCLNGGACNTLDGTCTCAPGWRGEKCELPCQDGTYGLNCAERCDCSHADGCHPTTGHCRCLPGWSGVHCDSVCAEGRWGPNCSLPCYCKNGASCSPDDGICECAPGFRGTTCQRICSPGFYGHRCSQTCPQCVHSSGPCHHITGLCDCLPGFTGALCNEVCPSGRFGKNCAGICTCTNNGTCNPIDRSCQCYPGWIGSDCSQPCPPAHWGPNCIHTCNCHNGAFCSAYDGECKCTPGWTGLYCTQRCPLGFYGKDCALICQCQNGADCDHISGQCTCRTGFMGRHCEQKCPSGTYGYGCRQICDCLNNSTCDHITGTCYCSPGWKGARCDQAGVIIVGNLNSLSRTSTALPADSYQIGAIAGIIILVLVVLFLLALFIIYRHKQKGKESSMPAVTYTPAMRVVNADYTISGTLPHSNGGNANSHYFTNPSYHTLTQCATSPHVNNRDRMTVTKSKNNQLFVNLKNVNPGKRGPVGDCTGTLPADWKHGGYLNELGAFGLDRSYMGKSLKDLGKNSEYNSSNCSLSSSENPYATIKDPPVLIPKSSECGYVEMKSPARRDSPYAEINNSTSANRNVYEVEPTVSVVQGVFSNNGRLSQDPYDLPKNSHIPCHYDLLPVRDSSSSPKQEDSGGSSSNSSSSSE

SEQ ID NO: 53400 - protein, 567 aa, Homo sapiens
  Payload ID: 10613
  Gene Symbol: MEGF10
  Gene Name: multiple EGF-like-domains 10
  Uniprot ID: Q96KG7
  ENSP ID: ENSP00000416284
MVISLNSCLSFICLLLCHWIGTASPLNLEDPNVCSHWESYSVTVQESYPHPFDQIYYTSCTDILNWFKCTRHRVSYRTAYRHGEKTMYRRKSQCCPGFYESGEMCVPHCADKCVHGRCIAPNTCQCEPGWGGTNCSSACDGDHWGPHCTSRCQCKNGALCNPITGACHCAAGFRGWRCEDRCEQGTYGNDCHQRCQCQNGATCDHVTGECRCPPGYTGAFCEDLCPPGKHGPQCEQRCPCQNGGVCHHVTGECSCPSGWMGTVCGQPCPEGRFGKNCSQECQCHNGGTCDAATGQCHCSPGYTGERCQDECPVGTYGVLCAETCQCVNGGKCYHVSGACLCEAGFAGERCEARLCPEGLYGIKCDKRCPCHLENTHSCHPMSGECACKPGWSGLYCNETCSPGFYGEACQQICSCQNGADCDSVTGKCTCAPGFKGIDCSTPCPLGTYGINCSSRCGCKNDAVCSPVDGSCTCKAGWHGVDCSIRCPSGTWGFGCNLTCQCLNGGACNTLDGTCTCAPGWRGEKCELPCQDGTYGLNCAERCDCSHADGCHPTTGHCRCLPGWSGLF

SEQ ID NO: 53401 - protein, 567 aa, Homo sapiens; identical to SEQ ID NO: 53400
  Payload ID: 10613
  Gene Symbol: MEGF10
  Gene Name: multiple EGF-like-domains 10
  Uniprot ID: Q96KG7
  ENSP ID: ENSP00000423195

SEQ ID NO: 53402 - protein, 1140 aa, Homo sapiens; identical to SEQ ID NO: 53399
  Payload ID: 10613
  Gene Symbol: MEGF10
  Gene Name: multiple EGF-like-domains 10
  Uniprot ID: Q96KG7
  ENSP ID: ENSP00000423354

SEQ ID NO: 53403 - protein, 969 aa, Homo sapiens
  Payload ID: 10614
  Gene Symbol: MEGF11
  Gene Name: multiple EGF-like-domains 11
  Uniprot ID: A6BM72
  ENSP ID: ENSP00000288745
MHTPSIRSITHDAQTSSTGSSAPGTALCTEECVHGRCVSPDTCHCEPGWGGPDCSSGCDSDHWGPHCSNRCQCQNGALCNPITGACVCAAGFRGWRCEELCAPGTHGKGCQLPCQCRHGASCDPRAGECLCAPGYTGVYCEELCPPGSHGAHCELRCPCQNGGTCHHITGECACPPGWTGAVCAQPCPPGTFGQNCSQDCPCHHGGQCDHVTGQCHCTAGYMGDRCQEECPFGSFGFQCSQHCDCHNGGQCSPTTGACECEPGYKGPRCQERLCPEGLHGPGCTLPCPCDADNTISCHPVTGACTCQPGWSGHHCNESCPVGYYGDGCQLPCTCQNGADCHSITGGCTCAPGFMGEVCAVSCAAGTYGPNCSSICSCNNGGTCSPVDGSCTCKEGWQGLDCTLPCPSGTWGLNCNESCTCANGAACSPIDGSCSCTPGWLGDTCELPCPDGTFGLNCSEHCDCSHADGCDPVTGHCCCLAGWTGIRCDSTCPPGRWGPNCSVSCSCENGGSCSPEDGSCECAPGFRGPLCQRICPPGFYGHGCAQPCPLCVHSSRPCHHISGICECLPGFSGALCNQVCAGGYFGQDCAQLCSCANNGTCSPIDGSCQCFPGWIGKDCSQACPPGFWGPACFHACSCHNGASCSAEDGACHCTPGWTGLFCTQRCPAAFFGKDCGRVCQCQNGASCDHISGKCTCRTGFTGQHCEQRCAPGTFGYGCQQLCECMNNSTCDHVTGTCYCSPGFKGIRCDQAALMMEELNPYTKISPALGAERHSVGAVTGIMLLLFLIVVLLGLFAWHRRRQKEKGRDLAPRVSYTPAMRMTSTDYSLSGACGMDRRQNTYIMDKGFKDYMKESVCSSSTCSLNSSENPYATIKDPPILTCKLPESSYVEMKSPVHMGSPYTDVPSLSTSNKNIYEVEPTVSVVQEGCGHNSSYIQNAYDLPRNSHIPGHYDLLPVRQSPANGPSQDKQS

SEQ ID NO: 53404 - protein, 1140 aa, Homo sapiens
  Payload ID: 10614
  Gene Symbol: MEGF11
  Gene Name: multiple EGF-like-domains 11
  ENSP ID: ENSP00000378976
MVLSLTGLIAFSFLQATLALNPEDPNVCSHWESYAVTVQESYAHPFDQIYYTRCTDILNWFKCTRHRISYKTAYRRGLRTMYRRRSQCCPGYYESGDFCIPLCTEECVHGRCVSPDTCHCEPGWGGPDCSSGCDSDHWGPHCSNRCQCQNGALCNPITGACVCAAGFRGWRCEELCAPGTHGKGCQLPCQCRHGASCDPRAGECLCAPGYTGVYCEELCPPGSHGAHCELRCPCQNGGTCHHITGECACPPGWTGAVCAQPCPPGTFGQNCSQDCPCHHGGQCDHVTGQCHCTAGYMGDRCQEECPFGSFGFQCSQHCDCHNGGQCSPTTGACECEPGYKGPRCQERLCPEGLHGPGCTLPCPCDADNTISCHPVTGACTCQPGWSGHHCNESCPVGYYGDGCQLPCTCQNGADCHSITGGCTCAPGFMGEVCAVSCAAGTYGPNCSSICSCNNGGTCSPVDGSCTCKEGWQGLDCTLPCPSGTWGLNCNESCTCANGAACSPIDGSCSCTPGWLGDTCELPCPDGTFGLNCSEHCDCSHADGCDPVTGHCCCLAGWTGIRCDSTCPPGRWGPNCSVSCSCENGGSCSPEDGSCECAPGFRGPLCQRICPPGFYGHGCAQPCPLCVHSSRPCHHISGICECLPGFSGALCNQVCAGGYFGQDCAQLCSCANNGTCSPIDGSCQCFPGWIGKDCSQACPPGFWGPACFHACSCHNGASCSAEDGACHCTPGWTGLFCTQRCPAAFFGKDCGRVCQCQNGASCDHISGKCTCRTGFTGQHCEQRCAPGTFGYGCQQLCECMNNSTCDHVTGTCYCSPGFKGIRCDQAALMMEELNPYTKISPALGAERHSVGAVTGIMLLLFLIVVLLGLFAWHRRRQKEKGRDLAPRVSYTPAMRMTSTDYSLSDLSQSSSHAHCFSNSSYHALACGGPATSQASTLDRNSPTKLSNKSLDRDTAGWTPYSYVNVLDSHFQISALEARYPPEDFYIELRHLSRPAEPHSPGACGMDRRQNTYIMDKGFKDYMKESVCSSSTCSLNSSENPYATIKDPPILTCKLPESSYVEMKSPVHMGSPYTDVPSLSTSNKNIYEVEPTVSVVQEGCGHNSSYIQNAYDLPRNSHIPGHYDLLPVRQSPANGPSQDKQS

SEQ ID NO: 53405 - protein, 1044 aa, Homo sapiens
  Payload ID: 10614
  Gene Symbol: MEGF11
  Gene Name: multiple EGF-like-domains 11
  Uniprot ID: A6BM72
  ENSP ID: ENSP00000386908
MVLSLTGLIAFSFLQATLALNPEDPNVCSHWESYAVTVQESYAHPFDQIYYTRCTDILNWFKCTRHRISYKTAYRRGLRTMYRRRSQCCPGYYESGDFCIPLCTEECVHGRCVSPDTCHCEPGWGGPDCSSGCDSDHWGPHCSNRCQCQNGALCNPITGACVCAAGFRGWRCEELCAPGTHGKGCQLPCQCRHGASCDPRAGECLCAPGYTGVYCEELCPPGSHGAHCELRCPCQNGGTCHHITGECACPPGWTGAVCAQPCPPGTFGQNCSQDCPCHHGGQCDHVTGQCHCTAGYMGDRCQEECPFGSFGFQCSQHCDCHNGGQCSPTTGACECEPGYKGPRCQERLCPEGLHGPGCTLPCPCDADNTISCHPVTGACTCQPGWSGHHCNESCPVGYYGDGCQLPCTCQNGADCHSITGGCTCAPGFMGEVCAVSCAAGTYGPNCSSICSCNNGGTCSPVDGSCTCKEGWQGLDCTLPCPSGTWGLNCNESCTCANGAACSPIDGSCSCTPGWLGDTCELPCPDGTFGLNCSEHCDCSHADGCDPVTGHCCCLAGWTGIRCDSTCPPGRWGPNCSVSCSCENGGSCSPEDGSCECAPGFRGPLCQRICPPGFYGHGCAQPCPLCVHSSRPCHHISGICECLPGFSGALCNQVCAGGYFGQDCAQLCSCANNGTCSPIDGSCQCFPGWIGKDCSQACPPGFWGPACFHACSCHNGASCSAEDGACHCTPGWTGLFCTQRCPAAFFGKDCGRVCQCQNGASCDHISGKCTCRTGFTGQHCEQRCAPGTFGYGCQQLCECMNNSTCDHVTGTCYCSPGFKGIRCDQAALMMEELNPYTKISPALGAERHSVGAVTGIMLLLFLIVVLLGLFAWHRRRQKEKGRDLAPRVSYTPAMRMTSTDYSLSGACGMDRRQNTYIMDKGFKDYMKESVCSSSTCSLNSSENPYATIKDPPILTCKLPESSYVEMKSPVHMGSPYTDVPSLSTSNKNIYEVEPTVSVVQEGCGHNSSYIQNAYDLPRNSHIPGHYDLLPVRQSPANGPSQDKQS

SEQ ID NO: 53406 - protein, 227 aa, Homo sapiens
  Payload ID: 10614
  Gene Symbol: MEGF11
  Gene Name: multiple EGF-like-domains 11
  ENSP ID: ENSP00000401400
MGDRCQEECPFGSFGFQCSQHCDCHNGGQCSPTTGACECEPGYKGPRCQERLCPEGLHGPGCTLPCPCDADNTISCHPVTGACTCQPGWSGHHCNESCPVGYYGDGCQLPCTCQNGADCHSITGGCTCAPGFMGEVCAVSCAAGTYGPNCSSICSCNNGGTCSPVDGSCTCKEGWQGLDCTLPCPSGTWGLNCNESCTCANGAACSPIDGSCSCTPGWLGDTCELPC

SEQ ID NO: 53407 - protein, 1044 aa, Homo sapiens; identical to SEQ ID NO: 53405
  Payload ID: 10614
  Gene Symbol: MEGF11
  Gene Name: multiple EGF-like-domains 11
  Uniprot ID: A6BM72
  ENSP ID: ENSP00000414475

SEQ ID NO: 53408 - protein, 579 aa, Homo sapiens
  Payload ID: 10614
  Gene Symbol: MEGF11
  Gene Name: multiple EGF-like-domains 11
  ENSP ID: ENSP00000456118
MGDRCQEECPFGSFGFQCSQHCDCHNGGQCSPTTGACECEPGYKGPRCQERLCPEGLHGPGCTLPCPCDADNTISCHPVTGACTCQPGWSGHHCNESCPVGYYGDGCQLPCTCQNGADCHSITGGCTCAPGFMGEVCAVSCAAGTYGPNCSSICSCNNGGTCSPVDGSCTCKEGWQGLDCTLPCPSGTWGLNCNESCTCANGAACSPIDGSCSCTPGWLGDTCELPCPDGTFGLNCSEHCDCSHADGCDPVTGHCCCLAGWTGIRCDSTCPPGRWGPNCSVSCSCENGGSCSPEDGSCECAPGFRGPLCQRICPPGFYGHGCAQPCPLCVHSSRPCHHISGICECLPGFSGALCNQVCAGGYFGQDCAQLCSCANNGTCSPIDGSCQCFPGWIGKDCSQACPPGFWGPACFHACSCHNGASCSAEDGACHCTPGWTGLFCTQRKPHLLASQPLRIPCCGLLATVGIVQTSREGGMQAAPGLVVPDSCPTRTEELCRGSSRPDWIQGIDKPKVLEGQGCKAAQQHFLGRTVGAYASVRMAPAVTTSVASAPAAQASPGNTVSRDVPQEPLAMGVSSYVSA

SEQ ID NO: 53409 - protein, 30 aa, Homo sapiens
  Payload ID: 10614
  Gene Symbol: MEGF11
  Gene Name: multiple EGF-like-domains 11
  ENSP ID: ENSP00000477691
  MOD_RES (1)..(1): Any amino acid
XCLPGFSGALCNQASKWQKQILIPTCMLKG

SEQ ID NO: 53410 - protein, 828 aa, Homo sapiens
  Payload ID: 10614
  Gene Symbol: MEGF11
  Gene Name: multiple EGF-like-domains 11
  ENSP ID: ENSP00000478094
MHTPSIRSITHDAQTSSTGSSAPGTALCTEECVHGRCVSPDTCHCEPGWGGPDCSSGCDSDHWGPHCSNRCQCQNGALCNPITGACVCAAGFRGWRCEELCAPGTHGKGCQLPCQCRHGASCDPRAGECLCAPGYTGVYCEELCPPGSHGAHCELRCPCQNGGTCHHITGECACPPGWTGAVCAQPCPPGTFGQNCSQDCPCHHGGQCDHVTGQCHCTAGYMGDRCQEECPFGSFGFQCSQHCDCHNGGQCSPTTGACECEPGYKGPRCQERLCPEGLHGPGCTLPCPCDADNTISCHPVTGACTCQPGWSGHHCNESCPVGYYGDGCQLPCTCQNGADCHSITGGCTCAPGFMGEVCAVSCAAGTYGPNCSSICSCNNGGTCSPVDGSCTCKEGWQGLDCTLPCPSGTWGLNCNESCTCANGAACSPIDGSCSCTPGWLGDTCELPCPDGTFGLNCSEHCDCSHADGCDPVTGHCCCLAGWTGIRCDSTCPPGRWGPNCSVSCSCENGGSCSPEDGSCECAPGFRGPLCQRICPPGFYGHGCAQPCPLCVHSSRPCHHISGICECLPGFSGALCNQVCAGGYFGQDCAQLCSCANNGTCSPIDGSCQCFPGWIGKDCSQACPPGFWGPACFHACSCHNGASCSAEDGACHCTPGWTGLFCTQRCPAAFFGKDCGRVCQCQNGASCDHISGKCTCRTGFTGQHCEQRCAPGTFGYGCQQLCECMNNSTCDHVTGTCYCSPGFKGIRCDQAALMMEELNPYTKISPALGAERHSVGAVTGIMLLLFLIVVLLGLFAWHRRRQKEKGRDLAPRVSYTPAMRMTSTDYSLS

SEQ ID NO: 53411 - protein, 117 aa, Homo sapiens
  Payload ID: 10614
  Gene Symbol: MEGF11
  Gene Name: multiple EGF-like-domains 11
  ENSP ID: ENSP00000478311
  MOD_RES (1)..(1): Any amino acid
XLSQSSSHAHCFSNSSYHALACGGPATSQASTLDRNSPTKLSNKSLDRDTAGWTPYSYVNVLDSHFQISALEARYPPEDFYIELRHLSRPAEPHSPDKPWIQERTDRTRAERCLWNG

SEQ ID NO: 53412 - protein, 621 aa, Homo sapiens
  Payload ID: 10614
  Gene Symbol: MEGF11
  Gene Name: multiple EGF-like-domains 11
  ENSP ID: ENSP00000480105
GAVCAQPCPPGTFGQNCSQDCPCHHGGQCDHVTGQCHCTAGYMGDRCQEECPFGSFGFQCSQHCDCHNGGQCSPTTGACECEPGYKGPRCQERLCPEGLHGPGCTLPCPCDADNTISCHPVTGACTCQPGWSGHHCNESCPVGYYGDGCQLPCTCQNGADCHSITGGCTCAPGFMGEVCAVSCAAGTYGPNCSSICSCNNGGTCSPVDGSCTCKEGWQGLDCTLPCPSGTWGLNCNESCTCANGAACSPIDGSCSCTPGWLGDTCELPCPDGTFGLNCSEHCDCSHADGCDPVTGHCCCLAGWTGIRCDSTCPPGRWGPNCSVSCSCENGGSCSPEDGSCECAPGFRGPLCQRICPPGFYGHGCAQPCPLCVHSSRPCHHISGICECLPGFSGALCNQVCAGGYFGQDCAQLCSCANNGTCSPIDGSCQCFPGWIGKDCSQACPPGFWGPACFHACSCHNGASCSAEDGACHCTPGWTGLFCTQRKPHLLASQPLRIPCCGLLATVGIVQTSREGGMQAAPGLVVPDSCPTRTEELCRGSSRPDWIQGIDKPKVLEGQGCKAAQQHFLGRTVGAYASVRMAPAVTTSVASAPAAQASPGNTVSRDVPQEPLAMGVSSYVSA

SEQ ID NO: 53413 - protein, 903 aa, Homo sapiens
  Payload ID: 10614
  Gene Symbol: MEGF11
  Gene Name: multiple EGF-like-domains 11
  ENSP ID: ENSP00000480614
MVLSLTGLIAFSFLQATLALNPEDPNVCSHWESYAVTVQESYAHPFDQIYYTRCTDILNWFKCTRHRISYKTAYRRGLRTMYRRRSQCCPGYYESGDFCIPLCTEECVHGRCVSPDTCHCEPGWGGPDCSSGCDSDHWGPHCSNRCQCQNGALCNPITGACVCAAGFRGWRCEELCAPGTHGKGCQLPCQCRHGASCDPRAGECLCAPGYTGVYCEELCPPGSHGAHCELRCPCQNGGTCHHITGECACPPGWTGAVCAQPCPPGTFGQNCSQDCPCHHGGQCDHVTGQCHCTAGYMGDRCQEECPFGSFGFQCSQHCDCHNGGQCSPTTGACECEPGYKGPRCQERLCPEGLHGPGCTLPCPCDADNTISCHPVTGACTCQPGWSGHHCNESCPVGYYGDGCQLPCTCQNGADCHSITGGCTCAPGFMGEVCAVSCAAGTYGPNCSSICSCNNGGTCSPVDGSCTCKEGWQGLDCTLPCPSGTWGLNCNESCTCANGAACSPIDGSCSCTPGWLGDTCELPCPDGTFGLNCSEHCDCSHADGCDPVTGHCCCLAGWTGIRCDSTCPPGRWGPNCSVSCSCENGGSCSPEDGSCECAPGFRGPLCQRICPPGFYGHGCAQPCPLCVHSSRPCHHISGICECLPGFSGALCNQVCAGGYFGQDCAQLCSCANNGTCSPIDGSCQCFPGWIGKDCSQACPPGFWGPACFHACSCHNGASCSAEDGACHCTPGWTGLFCTQRCPAAFFGKDCGRVCQCQNGASCDHISGKCTCRTGFTGQHCEQRCAPGTFGYGCQQLCECMNNSTCDHVTGTCYCSPGFKGIRCDQAALMMEELNPYTKISPALGAERHSVGAVTGIMLLLFLIVVLLGLFAWHRRRQKEKGRDLAPRVSYTPAMRMTSTDYSLS

SEQ ID NO: 53414 - protein, 26 aa, Homo sapiens
  Payload ID: 10614
  Gene Symbol: MEGF11
  Gene Name: multiple EGF-like-domains 11
  ENSP ID: ENSP00000483007
  MOD_RES (1)..(1): Any amino acid
XWTPYSYVNVLDQCPGGQVPARGLLH

SEQ ID NO: 53415 - protein, 30 aa, Homo sapiens; identical to SEQ ID NO: 53409
  Payload ID: 10614
  Gene Symbol: MEGF11
  Gene Name: multiple EGF-like-domains 11
  ENSP ID: ENSP00000488336
  MOD_RES (1)..(1): Any amino acid

SEQ ID NO: 53416 - protein, 1229 aa, Homo sapiens
  Payload ID: 10615
  Gene Symbol: MEGF6
  Gene Name: multiple EGF-like-domains 6
  Uniprot ID: O75095
  ENSP ID: ENSP00000294599
MGASRDRGLAALWCLGLLGGLARVAGTHYRYLWRGCYPCHLGQAGYPVSAGDQRPDVDECRTHNGGCQHRCVNTPGSYLCECKPGFRLHTDSRTCLAINSCALGNGGCQHHCVQLTITRHRCQCRPGFQLQEDGRHCVRRSPCANRNGSCMHRCQVVRGLARCECHVGYQLAADGKACEDVDECAAGLAQCAHGCLNTQGSFKCVCHAGYELGADGRQCYRIEMEIVNSCEANNGGCSHGCSHTSAGPLCTCPRGYELDTDQRTCIDVDDCADSPCCQQVCTNNPGGYECGCYAGYRLSADGCGCEDVDECASSRGGCEHHCTNLAGSFQCSCEAGYRLHEDRRGCSPLEEPMVDLDGELPFVRPLPHIAVLQDELPQLFQDDDVGADEEEAELRGEHTLTEKFVCLDDSFGHDCSLTCDDCRNGGTCLLGLDGCDCPEGWTGLICNETCPPDTFGKNCSFSCSCQNGGTCDSVTGACRCPPGVSGTNCEDGCPKGYYGKHCRKKCNCANRGRCHRLYGACLCDPGLYGRFCHLTCPPWAFGPGCSEECQCVQPHTQSCDKRDGSCSCKAGFRGERCQAECELGYFGPGCWQACTCPVGVACDSVSGECGKRCPAGFQGEDCGQECPVGTFGVNCSSSCSCGGAPCHGVTGQCRCPPGRTGEDCEADCPEGRWGLGCQEICPACQHAARCDPETGACLCLPGFVGSRCQDVCPAGWYGPSCQTRCSCANDGHCHPATGHCSCAPGWTGFSCQRACDTGHWGPDCSHPCNCSAGHGSCDAISGLCLCEAGYVGPRCEQQCPQGHFGPGCEQRCQCQHGAACDHVSGACTCPAGWRGTFCEHACPAGFFGLDCRSACNCTAGAACDAVNGSCLCPAGRRGPRCAEKCLPRDVRAGCRHSGGCLNGGLCDPHTGRCLCPAGWTGDKCQSPCLRGWFGEACAQRCSCPPGAACHHVTGACRCPPGFTGSGCEQGCPPGRYGPGCEQLCGCLNGGSCDAATGACRCPTGFLGTDCNLTCPQGRFGPNCTHVCGCGQGAACDPVTGTCLCPPGRAGVRCERGCPQNRFGVGCEHTCSCRNGGLCHASNGSCSCGLGWTGRHCELACPPGRYGAACHLECSCHNNSTCEPATGTCRCGPGFYGQACEHRRSGATCNLDCRRGQFGPSCTLHCDCGGGADCDPVSGQCHCVDGYMGPTCREGGPLRLPENPSLAQGSAGTLPASSRPTSRSGGPARH

SEQ ID NO: 53417 - protein, 1541 aa, Homo sapiens
  Payload ID: 10615
  Gene Symbol: MEGF6
  Gene Name: multiple EGF-like-domains 6
  Uniprot ID: O75095
  ENSP ID: ENSP00000348982
MSFLEEARAAGRAVVLALVLLLLPAVPVGASVPPRPLLPLQPGMPHVCAEQELTLVGRRQPCVQALSHTVPVWKAGCGWQAWCVGHERRTVYYMGYRQVYTTEARTVLRCCRGWMQQPDEEGCLSAECSASLCFHGGRCVPGSAQPCHCPPGFQGPRCQYDVDECRTHNGGCQHRCVNTPGSYLCECKPGFRLHTDSRTCLAINSCALGNGGCQHHCVQLTITRHRCQCRPGFQLQEDGRHCVRRSPCANRNGSCMHRCQVVRGLARCECHVGYQLAADGKACEDVDECAAGLAQCAHGCLNTQGSFKCVCHAGYELGADGRQCYRIEMEIVNSCEANNGGCSHGCSHTSAGPLCTCPRGYELDTDQRTCIDVDDCADSPCCQQVCTNNPGGYECGCYAGYRLSADGCGCEDVDECASSRGGCEHHCTNLAGSFQCSCEAGYRLHEDRRGCSPLEEPMVDLDGELPFVRPLPHIAVLQDELPQLFQDDDVGADEEEAELRGEHTLTEKFVCLDDSFGHDCSLTCDDCRNGGTCLLGLDGCDCPEGWTGLICNETCPPDTFGKNCSFSCSCQNGGTCDSVTGACRCPPGVSGTNCEDGCPKGYYGKHCRKKCNCANRGRCHRLYGACLCDPGLYGRFCHLTCPPWAFGPGCSEECQCVQPHTQSCDKRDGSCSCKAGFRGERCQAECELGYFGPGCWQACTCPVGVACDSVSGECGKRCPAGFQGEDCGQECPVGTFGVNCSSSCSCGGAPCHGVTGQCRCPPGRTGEDCEADCPEGRWGLGCQEICPACQHAARCDPETGACLCLPGFVGSRCQDVCPAGWYGPSCQTRCSCANDGHCHPATGHCSCAPGWTGFSCQRACDTGHWGPDCSHPCNCSAGHGSCDAISGLCLCEAGYVGPRCEQQCPQGHFGPGCEQRCQCQHGAACDHVSGACTCPAGWRGTFCEHACPAGFFGLDCRSACNCTAGAACDAVNGSCLCPAGRRGPRCAETCPAHTYGHNCSQACACFNGASCDPVHGQCHCAPGWMGPSCLQACPAGLYGDNCRHSCLCQNGGTCDPVSGHCACPEGWAGLACEKECLPRDVRAGCRHSGGCLNGGLCDPHTGRCLCPAGWTGDKCQSPCLRGWFGEACAQRCSCPPGAACHHVTGACRCPPGFTGSGCEQACPPGSFGEDCAQMCQCPGENPACHPATGTCSCAAGYHGPSCQQRCPPGRYGPGCEQLCGCLNGGSCDAATGACRCPTGFLGTDCNLTCPQGRFGPNCTHVCGCGQGAACDPVTGTCLCPPGRAGVRCERGCPQNRFGVGCEHTCSCRNGGLCHASNGSCSCGLGWTGRHCELACPPGRYGAACHLECSCHNNSTCEPATGTCRCGPGFYGQACEHPCPPGFHGAGCQGLCWCQHGAPCDPISGRCLCPAGFHGHFCERGCEPGSFGEGCHQRCDCDGGAPCDPVTGLCLCPPGRSGATCNLDCRRGQFGPSCTLHCDCGGGADCDPVSGQCHCVDGYMGPTCREGGPLRLPENPSLAQGSAGTLPASSRPTSRSGGPARH

SEQ ID NO: 53418 - protein, 1323 aa, Homo sapiens
  Payload ID: 10615
  Gene Symbol: MEGF6
  Gene Name: multiple EGF-like-domains 6
  ENSP ID: ENSP00000419033
MSFLEEARAAGRAVVLALVLLLLPAVPVGASVPPRPLLPLQPGMPHVCAEQELTLVGRRQPCVQALSHTVPVWKAGCGWQAWCVGHERRTVYYMGYRQVYTTEARTVLRCCRGWMQQPDEEGCLSDVGECANANGGCAGRCRDTVGGFYCRWPPPSHQLQGDGETCQDVDECRTHNGGCQHRCVNTPGSYLCECKPGFRLHTDSRTCLAINSCALGNGGCQHHCVQLTITRHRCQCRPGFQLQEDGRHCVRRSPCANRNGSCMHRCQVVRGLARCECHVGYQLAADGKACEDVDECAAGLAQCAHGCLNTQGSFKCVCHAGYELGADGRQCYRIEMEIVNSCEANNGGCSHGCSHTSAGPLCTCPRGYELDTDQRTCIDVDDCADSPCCQQVCTNNPGGYECGCYAGYRLSADGCGCEDVDECASSRGGCEHHCTNLAGSFQCSCEAGYRLHEDRRGCSPLEEPMVDLDGELPFVRPLPHIAVLQDELPQLFQDDDVGADEEEAELRGEHTLTEKFVCLDDSFGHDCSLTCDDCRNGGTCLLGLDGCDCPEGWTGLICNETCPPDTFGKNCSFSCSCQNGGTCDSVTGACRCPPGVSGTNCEDGCPKGYYGKHCRKKCNCANRGRCHRLYGACLCDPGLYGRFCHLTCPPWAFGPGCSEECQCVQPHTQSCDKRDGSCSCKAGFRGERCQAECELGYFGPGCWQACTCPVGVACDSVSGECGKRCPAGFQGEDCGQECPVGTFGVNCSSSCSCGGAPCHGVTGQCRCPPGRTGEDCEADCPEGRWGLGCQEICPACQHAARCDPETGACLCLPGFVGSRCQDVCPAGWYGPSCQTRCSCANDGHCHPATGHCSCAPGWTGFSCQRACDTGHWGPDCSHPCNCSAGHGSCDAISGLCLCEAGYVGPRCEQQCPQGHFGPGCEQRCQCQHGAACDHVSGACTCPAGWRGTFCEHACPAGFFGLDCRSACNCTAGAACDAVNGSCLCPAGRRGPRCAETCPAHTYGHNCSQACACFNGASCDPVHGQCHCAPGWMGPSCLQACPAGLYGDNCRHSCLCQNGGTCDPVSGHCACPEGWAGLACEKECLPRDVRAGCRHSGGCLNGGLCDPHTGRCLCPAGWTGDKCQSPCAKGTFGPHCEGRCACRWGGPCHLATGACLCPPGWRGAPGVRMPACGAGLERPVPSAAAARLALPATTSLGPAAVPLASLAPAASRPAHPAALGRTVRRCASVPVRTRPATLPPGPAHVLLATTAPAASNDVRPGGMGQAVNSCVGVSTGAPVMRPRGPAAAPLGSSGRTATSPVRRAASAPTAPTCVGVGRGRPATL

SEQ ID NO: 53419 - protein, 248 aa, Homo sapiens
  Payload ID: 10615
  Gene Symbol: MEGF6
  Gene Name: multiple EGF-like-domains 6
  ENSP ID: ENSP00000420386
  MOD_RES (1)..(1): Any amino acid
XDAATGACRCPTGFLGTDCNLTCPQGRFGPNCTHVCGCGQGAACDPVTGTCLCPPGRAGVRCERGCPQNRFGVGCEHTCSCRNGGLCHASNGSCSCGLGWTGRHCELACPPGRYGAACHLECSCHNNSTCEPATGTCRCGPGFYGQACEHPCPPGFHGAGCQGLCWCQHGAPCDPISGRCLCPAGFHGHFCERDCRRGQFGPSCTLHCDCGGGADCDPVSGQCHCVDGYMGPTCREGGPLRLPENPSL

SEQ ID NO: 53420 - protein, 2845 aa, Homo sapiens
  Payload ID: 10616
  Gene Symbol: MEGF8
  Gene Name: multiple EGF-like-domains 8
  Uniprot ID: Q7Z7M0
  ENSP ID: ENSP00000251268
MALGKVLAMALVLALAVLGSLSPGARAGDCKGQRQVLREAPGFVTDGAGNYSVNGNCEWLIEAPSPQHRILLDFLFLDTECTYDYLFVYDGDSPRGPLLASLSGSTRPPPIEASSGKMLLHLFSDANYNLLGFNASFRFSLCPGGCQSHGQCQPPGVCACEPGWGGPDCGLQECSAYCGSHGTCASPLGPCRCEPGFLGRACDLHLWENQGAGWWHNVSARDPAFSARIGAAGAFLSPPGLLAVFGGQDLNNALGDLVLYNFSANTWESWDLSPAPAARHSHVAVAWAGSLVLMGGELADGSLTNDVWAFSPLGRGHWELLAPPASSSSGPPGLAGHAAALVDDVWLYVSGGRTPHDLFSSGLFRFRLDSTSGGYWEQVIPAGGRPPAATGHSMVFHAPSRALLVHGGHRPSTARFSVRVNSTELFHVDRHVWTTLKGRDGLQGPRERAFHTASVLGNYMVVYGGNVHTHYQEEKCYEDGIFFYHLGCHQWVSGAELAPPGTPEGRAAPPSGRYSHVAAVLGGSVLLVAGGYSGRPRGDLMAYKVPPFVFQAPAPDYHLDYCSMYTDHSVCSRDPECSWCQGACQAAPPPGTPLGACPAASCLGLGRLLGDCQACLAFSSPTAPPRGPGTLGWCVHNESCLPRPEQARCRGEQISGTVGWWGPAPVFVTSLEACVTQSFLPGLHLLTFQQPPNTSQPDKVSIVRSTTITLTPSAETDVSLVYRGFIYPMLPGGPGGPGAEDVAVWTRAQRLHVLARMARGPDTENMEEVGRWVAHQEKETRRLQRPGSARLFPLPGRDHKYAVEIQGQLNGSAGPGHSELTLLWDRTGVPGGSEISFFFLEPYRSSSCTSYSSCLGCLADQGCGWCLTSATCHLRQGGAHCGDDGAGGSLLVLVPTLCPLCEEHRDCHACTQDPFCEWHQSTSRKGDAACSRRGRGRGALKSPEECPPLCSQRLTCEDCLANSSQCAWCQSTHTCFLFAAYLARYPHGGCRGWDDSVHSEPRCRSCDGFLTCHECLQSHECGWCGNEDNPTLGRCLQGDFSGPLGGGNCSLWVGEGLGLPVALPARWAYARCPDVDECRLGLARCHPRATCLNTPLSYECHCQRGYQGDGISHCNRTCLEDCGHGVCSGPPDFTCVCDLGWTSDLPPPTPAPGPPAPRCSRDCGCSFHSHCRKRGPGFCDECQDWTWGEHCERCRPGSFGNATGSRGCRPCQCNGHGDPRRGHCDNLSGLCFCQDHTEGAHCQLCSPGYYGDPRAGGSCFRECGGRALLTNVSSVALGSRRVGGLLPPGGGAARAGPGLSYCVWVVSATEELQPCAPGTLCPPLTLTFSPDSSTPCTLSYVLAFDGFPRFLDTGVVQSDRSLIAAFCGQRRDRPLTVQALSGLLVLHWEANGSSSWGFNASVGSARCGSGGPGSCPVPQECVPQDGAAGAGLCRCPQGWAGPHCRMALCPENCNAHTGAGTCNQSLGVCICAEGFGGPDCATKLDGGQLVWETLMDSRLSADTASRFLHRLGHTMVDGPDATLWMFGGLGLPQGLLGNLYRYSVSERRWTQMLAGAEDGGPGPSPRSFHAAAYVPAGRGAMYLLGGLTAGGVTRDFWVLNLTTLQWRQEKAPQTVELPAVAGHTLTARRGLSLLLVGGYSPENGFNQQLLEYQLATGTWVSGAQSGTPPTGLYGHSAVYHEATDSLYVFGGFRFHVELAAPSPELYSLHCPDRTWSLLAPSQGAKRDRMRNVRGSSRGLGQVPGEQPGSWGFREVRKKMALWAALAGTGGFLEEISPHLKEPRPRLFHASALLGDTMVVLGGRSDPDEFSSDVLLYQVNCNAWLLPDLTRSASVGPPMEESVAHAVAAVGSRLYISGGFGGVALGRLLALTLPPDPCRLLSSPEACNQSGACTWCHGACLSGDQAHRLGCGGSPCSPMPRSPEECRRLRTCSECLARHPRTLQPGDGEASTPRCKWCTNCPEGACIGRNGSCTSENDCRINQREVFWAGNCSEAACGAADCEQCTREGKCMWTRQFKRTGETRRILSVQPTYDWTCFSHSLLNVSPMPVESSPPLPCPTPCHLLPNCTSCLDSKGADGGWQHCVWSSSLQQCLSPSYLPLRCMAGGCGRLLRGPESCSLGCAQATQCALCLRRPHCGWCAWGGQDGGGRCMEGGLSGPRDGLTCGRPGASWAFLSCPPEDECANGHHDCNETQNCHDQPHGYECSCKTGYTMDNMTGLCRPVCAQGCVNGSCVEPDHCRCHFGFVGRNCSTECRCNRHSECAGVGARDHCLLCRNHTKGSHCEQCLPLFVGSAVGGGTCRPCHAFCRGNSHICISRKELQMSKGEPKKYSLDPEEIENWVTEGPSEDEAVCVNCQNNSYGEKCESCLQGYFLLDGKCTKCQCNGHADTCNEQDGTGCPCQNNTETGTCQGSSPSDRRDCYKYQCAKCRESFHGSPLGGQQCYRLISVEQECCLDPTSQTNCFHEPKRRALGPGRTVLFGVQPKFTNVDIRLTLDVTFGAVDLYVSTSYDTFVVRVAPDTGVHTVHIQPPPAPPPPPPPADGGPRGAGDPGGAGASSGPGAPAEPRVREVWPRGLITYVTVTEPSAVLVVRGVRDRLVITYPHEHHALKSSRFYLLLLGVGDPSGPGANGSADSQGLLFFRQDQAHIDLFVFFSVFFSCFFLFLSLCVLLWKAKQALDQRQEQRRHLQEMTKMASRPFAKVTVCFPPDPTAPASAWKPAGLPPPAFRRSEPFLAPLLLTGAGGPWGPMGGGCCPPAIPATTAGLRAGPITLEPTEDGMAGVATLLLQLPGGPHAPNGACLGSALVTLRHRLHEYCGGGGGAGGSGHGTGAGRKGLLSQDNLTSMSL

SEQ ID NO: 53421 - protein, 2778 aa, Homo sapiens
  Payload ID: 10616
  Gene Symbol: MEGF8
  Gene Name: multiple EGF-like-domains 8
  Uniprot ID: Q7Z7M0
  ENSP ID: ENSP00000334219
MALGKVLAMALVLALAVLGSLSPGARAGDCKGQRQVLREAPGFVTDGAGNYSVNGNCEWLIEAPSPQHRILLDFLFLDTECTYDYLFVYDGDSPRGPLLASLSGSTRPPPIEASSGKMLLHLFSDANYNLLGFNASFRFSLCPGGCQSHGQCQPPGVCACEPGWGGPDCGLQECSAYCGSHGTCASPLGPCRCEPGFLGRACDLHLWENQGAGWWHNVSARDPAFSARIGAAGAFLSPPGLLAVFGGQDLNNALGDLVLYNFSANTWESWDLSPAPAARHSHVAVAWAGSLVLMGGELADGSLTNDVWAFSPLGRGHWELLAPPASSSSGPPGLAGHAAALVDDVWLYVSGGRTPHDLFSSGLFRFRLDSTSGGYWEQVIPAGGRPPAATGHSMVFHAPSRALLVHGGHRPSTARFSVRVNSTELFHVDRHVWTTLKGRDGLQGPRERAFHTASVLGNYMVVYGGNVHTHYQEEKCYEDGIFFYHLGCHQWVSGAELAPPGTPEGRAAPPSGRYSHVAAVLGGSVLLVAGGYSGRPRGDLMAYKVPPFVFQAPAPDYHLDYCSMYTDHSVCSRDPECSWCQGACQAAPPPGTPLGACPAASCLGLGRLLGDCQACLAFSSPTAPPRGPGTLGWCVHNESCLPRPEQARCRGEQISGTVGWWGPAPVFVTSLEACVTQSFLPGLHLLTFQQPPNTSQPDKEEVGRWVAHQEKETRRLQRPGSARLFPLPGRDHKYAVEIQGQLNGSAGPGHSELTLLWDRTGVPGGSEISFFFLEPYRSSSCTSYSSCLGCLADQGCGWCLTSATCHLRQGGAHCGDDGAGGSLLVLVPTLCPLCEEHRDCHACTQDPFCEWHQSTSRKGDAACSRRGRGRGALKSPEECPPLCSQRLTCEDCLANSSQCAWCQSTHTCFLFAAYLARYPHGGCRGWDDSVHSEPRCRSCDGFLTCHECLQSHECGWCGNEDNPTLGRCLQGDFSGPLGGGNCSLWVGEGLGLPVALPARWAYARCPDVDECRLGLARCHPRATCLNTPLSYECHCQRGYQGDGISHCNRTCLEDCGHGVCSGPPDFTCVCDLGWTSDLPPPTPAPGPPAPRCSRDCGCSFHSHCRKRGPGFCDECQDWTWGEHCERCRPGSFGNATGSRGCRPCQCNGHGDPRRGHCDNLSGLCFCQDHTEGAHCQLCSPGYYGDPRAGGSCFRECGGRALLTNVSSVALGSRRVGGLLPPGGGAARAGPGLSYCVWVVSATEELQPCAPGTLCPPLTLTFSPDSSTPCTLSYVLAFDGFPRFLDTGVVQSDRSLIAAFCGQRRDRPLTVQALSGLLVLHWEANGSSSWGFNASVGSARCGSGGPGSCPVPQECVPQDGAAGAGLCRCPQGWAGPHCRMALCPENCNAHTGAGTCNQSLGVCICAEGFGGPDCATKLDGGQLVWETLMDSRLSADTASRFLHRLGHTMVDGPDATLWMFGGLGLPQGLLGNLYRYSVSERRWTQMLAGAEDGGPGPSPRSFHAAAYVPAGRGAMYLLGGLTAGGVTRDFWVLNLTTLQWRQEKAPQTVELPAVAGHTLTARRGLSLLLVGGYSPENGFNQQLLEYQLATGTWVSGAQSGTPPTGLYGHSAVYHEATDSLYVFGGFRFHVELAAPSPELYSLHCPDRTWSLLAPSQGAKRDRMRNVRGSSRGLGQVPGEQPGSWGFREVRKKMALWAALAGTGGFLEEISPHLKEPRPRLFHASALLGDTMVVLGGRSDPDEFSSDVLLYQVNCNAWLLPDLTRSASVGPPMEESVAHAVAAVGSRLYISGGFGGVALGRLLALTLPPDPCRLLSSPEACNQSGACTWCHGACLSGDQAHRLGCGGSPCSPMPRSPEECRRLRTCSECLARHPRTLQPGDGEASTPRCKWCTNCPEGACIGRNGSCTSENDCRINQREVFWAGNCSEAACGAADCEQCTREGKCMWTRQFKRTGETRRILSVQPTYDWTCFSHSLLNVSPMPVESSPPLPCPTPCHLLPNCTSCLDSKGADGGWQHCVWSSSLQQCLSPSYLPLRCMAGGCGRLLRGPESCSLGCAQATQCALCLRRPHCGWCAWGGQDGGGRCMEGGLSGPRDGLTCGRPGASWAFLSCPPEDECANGHHDCNETQNCHDQPHGYECSCKTGYTMDNMTGLCRPVCAQGCVNGSCVEPDHCRCHFGFVGRNCSTECRCNRHSECAGVGARDHCLLCRNHTKGSHCEQCLPLFVGSAVGGGTCRPCHAFCRGNSHICISRKELQMSKGEPKKYSLDPEEIENWVTEGPSEDEAVCVNCQNNSYGEKCESCLQGYFLLDGKCTKCQCNGHADTCNEQDGTGCPCQNNTETGTCQGSSPSDRRDCYKYQCAKCRESFHGSPLGGQQCYRLISVEQECCLDPTSQTNCFHEPKRRALGPGRTVLFGVQPKFTNVDIRLTLDVTFGAVDLYVSTSYDTFVVRVAPDTGVHTVHIQPPPAPPPPPPPADGGPRGAGDPGGAGASSGPGAPAEPRVREVWPRGLITYVTVTEPSAVLVVRGVRDRLVITYPHEHHALKSSRFYLLLLGVGDPSGPGANGSADSQGLLFFRQDQAHIDLFVFFSVFFSCFFLFLSLCVLLWKAKQALDQRQEQRRHLQEMTKMASRPFAKVTVCFPPDPTAPASAWKPAGLPPPAFRRSEPFLAPLLLTGAGGPWGPMGGGCCPPAIPATTAGLRAGPITLEPTEDGMAGVATLLLQLPGGPHAPNGACLGSALVTLRHRLHEYCGGGGGAGGSGHGTGAGRKGLLSQDNLTSMSL

SEQ ID NO: 53422 - protein, 439 aa, Homo sapiens
  Payload ID: 10616
  Gene Symbol: MEGF8
  Gene Name: multiple EGF-like-domains 8
  ENSP ID: ENSP00000367313
MRELPAGLLPPGREVHQCAKCRESFHGSPLGGQQCYRLISVEQECCLDPTSQTNCFHEPKRRALGPGRTVLFGVQPKFTNVDIRLTLDVTFGAVDLYVSTSYDTFVVRVAPDTGVHTVHIQPPPAPPPPPPPADGGPRGAGDPGGAGASSGPGAPAEPRVREVWPRGLITYVTVTEPSAVLVVRGVRDRLVITYPHEHHALKSSRFYLLLLGVGDPSGPGANGSADSQGLLFFRQDQAHIDLFVFFSVFFSCFFLFLSLCVLLWKAKQALDQRQEQRRHLQEMTKMASRPFAKVTVCFPPDPTAPASAWKPAGLPPPAFRRSEPFLAPLLLTGAGGPWGPMGGGCCPPAIPATTAGLRAGPITLEPTEDGMAGVATLLLQLPGGPHAPNGACLGSALVTLRHRLHEYCGGGGGAGGSGHGTGAGRKGLLSQDNLTSMSL

SEQ ID NO: 53423 - protein, 178 aa, Homo sapiens
  Payload ID: 10616
  Gene Symbol: MEGF8
  Gene Name: multiple EGF-like-domains 8
  ENSP ID: ENSP00000470620
NCSTECRCNRHSECAGVGARDHCLLCRNHTKGSHCEQCLPLFVGSAVGGGTCRPCHAFCRGNSHICISRKELQMSKGEPKKYSLDPEEIENWVTEGPSEDEAVCVNCQNNSYGEKCESCLQGYFLLDGKCTNAPSAGNHFTGVRWAASSATASSRWSRSAAWTPRPRPTASMSPNAGR

SEQ ID NO: 53424 - protein, 70 aa, Homo sapiens
  Payload ID: 10616
  Gene Symbol: MEGF8
  Gene Name: multiple EGF-like-domains 8
  ENSP ID: ENSP00000471370
  MOD_RES (1)..(1): Any amino acid
XHGACLSGDQAHRLGCGGSPCSPMPRSPEECRRLRTCSECLARHPRTLQPGDGEVVGTTSEEEGGDEINK

SEQ ID NO: 53425 - protein, 602 aa, Homo sapiens
  Payload ID: 10617
  Gene Symbol: MEGF9
  Gene Name: multiple EGF-like-domains 9
  Uniprot ID: Q9H1U4
  ENSP ID: ENSP00000363040
MNGGAERAMRSLPSLGGLALLCCAAAAAAAAVASAASAGNVTGGGGAAGQVDASPGPGLRGEPSHPFPRATAPTAQAPRTGPPRATVHRPLAATSPAQSPETTPLWATAGPSSTTFQAPLGPSPTTPPAAERTSTTSQAPTRPAPTTLSTTTGPAPTTPVATTVPAPTTPRTPTPDLPSSSNSSVLPTPPATEAPSSPPPEYVCNCSVVGSLNVNRCNQTTGQCECRPGYQGLHCETCKEGFYLNYTSGLCQPCDCSPHGALSIPCNSSGKCQCKVGVIGSICDRCQDGYYGFSKNGCLPCQCNNRSASCDALTGACLNCQENSKGNHCEECKEGFYQSPDATKECLRCPCSAVTSTGSCSIKSSELEPECDQCKDGYIGPNCNKCENGYYNFDSICRKCQCHGHVDPVKTPKICKPESGECINCLHNTTGFWCENCLEGYVHDLEGNCIKKEVILPTPEGSTILVSNASLTTSVPTPVINSTFTPTTLQTIFSVSTSENSTSALADVSWTQFNIIILTVIIIVVVLLMGFVGAVYMYREYQNRKLNAPFWTIELKEDNISFSSYHDSIPNADVSGLLEDDGNEVAPNGQLTLTTPIHNYKA

SEQ ID NO: 53426 - protein, 610 aa, Homo sapiens
  Payload ID: 10618
  Gene Symbol: MEN1
  Gene Name: multiple endocrine neoplasia I
  Uniprot ID: O00255
  ENSP ID: ENSP00000308975
MGLKAAQKTLFPLRSIDDVVRLFAAELGREEPDLVLLSLVLGFVEHFLAVNRVIPTNVPELTFQPSPAPDPPGGLTYFPVADLSIIAALYARFTAQIRGAVDLSLYPREGGVSSRELVKKVSDVIWNSLSRSYFKDRAHIQSLFSFITGTKLDSSGVAFAVVGACQALGLRDVHLALSEDHAWVVFGPNGEQTAEVTWHGKGNEDRRGQTVNAGVAERSWLYLKGSYMRCDRKMEVAFMVCAINPSIDLHTDSLELLQLQQKLLWLLYDLGHLERYPMALGNLADLEELEPTPGRPDPLTLYHKGIASAKTYYRDEHIYPYMYLAGYHCRNRNVREALQAWADTATVIQDYNYCREDEEIYKEFFEVANDVIPNLLKEAASLLEAGEERPGEQSQGTQSQGSALQDPECFAHLLRFYDGICKWEEGSPTPVLHVGWATFLVQSLGRFEGQVRQKVRIVSREAEAAEAEEPWGEEAREGRRRGPRRESKPEEPPPPKKPALDKGLGTGQGAVSGPPRKPPGTVAGTARGPEGGSTAQVPAPTASPPPEGPVLTFQSEKMKGMKELLVATKINSSAIKLQLTAQSQVQMKKQKVSTPSDYTLSFLKRQRKGL

SEQ ID NO: 53427 - protein, 610 aa, Homo sapiens; identical to SEQ ID NO: 53426
  Payload ID: 10618
  Gene Symbol: MEN1
  Gene Name: multiple endocrine neoplasia I
  Uniprot ID: O00255
  ENSP ID: ENSP00000323747

SEQ ID NO: 53428 - protein, 615 aa, Homo sapiens
  Payload ID: 10618
  Gene Symbol: MEN1
  Gene Name: multiple endocrine neoplasia I
  Uniprot ID: O00255
  ENSP ID: ENSP00000337088
MGLKAAQKTLFPLRSIDDVVRLFAAELGREEPDLVLLSLVLGFVEHFLAVNRVIPTNVPELTFQPSPAPDPPGGLTYFPVADLSIIAALYARFTAQIRGAVDLSLYPREGGVSSRELVKKVSDVIWNSLSRSYFKDRAHIQSLFSFITGWSPVGTKLDSSGVAFAVVGACQALGLRDVHLALSEDHAWVVFGPNGEQTAEVTWHGKGNEDRRGQTVNAGVAERSWLYLKGSYMRCDRKMEVAFMVCAINPSIDLHTDSLELLQLQQKLLWLLYDLGHLERYPMALGNLADLEELEPTPGRPDPLTLYHKGIASAKTYYRDEHIYPYMYLAGYHCRNRNVREALQAWADTATVIQDYNYCREDEEIYKEFFEVANDVIPNLLKEAASLLEAGEERPGEQSQGTQSQGSALQDPECFAHLLRFYDGICKWEEGSPTPVLHVGWATFLVQSLGRFEGQVRQKVRIVSREAEAAEAEEPWGEEAREGRRRGPRRESKPEEPPPPKKPALDKGLGTGQGAVSGPPRKPPGTVAGTARGPEGGSTAQVPAPTASPPPEGPVLTFQSEKMKGMKELLVATKINSSAIKLQLTAQSQVQMKKQKVSTPSDYTLSFLKRQRKGL

SEQ ID NO: 53429 - protein, 615 aa, Homo sapiens; identical to SEQ ID NO: 53428
  Payload ID: 10618
  Gene Symbol: MEN1
  Gene Name: multiple endocrine neoplasia I
  Uniprot ID: O00255
  ENSP ID: ENSP00000366530

SEQ ID NO: 53430 - protein, 555 aa, Homo sapiens
  Payload ID: 10618
  Gene Symbol: MEN1
  Gene Name: multiple endocrine neoplasia I
  ENSP ID: ENSP00000366533
MGLKAAQKTLFPLRSIDDVVRLFAAELGREEPDLVLLSLVLGFVEHFLAVNRVIPTNVPELTFQPSPAPDPPGGLTYFPVADLSIIAALYARFTAQIRGAVDLSLYPREGGVSSRELVKKVSDVIWNSLSRSYFKDRAHIQSLFSFITGTKLDSSGVAFAVVGACQALGLRDVHLALSEDHAWVVFGPNGEQTAEVTWHGKGNEDRRGQTVNAGVAERSWLYLKGSYMRCDRKMEVAFMVCAINPSIDLHTDSLELLQLQQKLLWLLYDLGHLERYPMALGNLADLEELEPTPGRPDPLTLYHKGIASAKTYYRDEHIYPYMYLAGYHCRNRNVREALQAWADTATVIQDYNYCREDEEIYKEFFEVANDVIPNLLKEAASLLEAGEERPGEQSQVRQKVRIVSREAEAAEAEEPWGEEAREGRRRGPRRESKPEEPPPPKKPALDKGLGTGQGAVSGPPRKPPGTVAGTARGPEGGSTAQVPAPTASPPPEGPVLTFQSEKMKGMKELLVATKINSSAIKLQLTAQSQVQMKKQKVSTPSDYTLSFLKRQRKGL

SEQ ID NO: 53431 - protein, 575 aa, Homo sapiens
  Payload ID: 10618
  Gene Symbol: MEN1
  Gene Name: multiple endocrine neoplasia I
  Uniprot ID: O00255
  ENSP ID: ENSP00000366538
MGLKAAQKTLFPLRSIDDVVRLFAAELGREEPDLVLLSLVLGFVEHFLAVNRVIPTNVPELTFQPSPAPDPPGGLTYFPVADLSIIAALYARFTAQIRGAVDLSLYPREGGVSSRELVKKVSDVIWNSLSRSYFKDRAHIQSLFSFITGTKLDSSGVAFAVVGACQALGLRDVHLALSEDHAWSWLYLKGSYMRCDRKMEVAFMVCAINPSIDLHTDSLELLQLQQKLLWLLYDLGHLERYPMALGNLADLEELEPTPGRPDPLTLYHKGIASAKTYYRDEHIYPYMYLAGYHCRNRNVREALQAWADTATVIQDYNYCREDEEIYKEFFEVANDVIPNLLKEAASLLEAGEERPGEQSQGTQSQGSALQDPECFAHLLRFYDGICKWEEGSPTPVLHVGWATFLVQSLGRFEGQVRQKVRIVSREAEAAEAEEPWGEEAREGRRRGPRRESKPEEPPPPKKPALDKGLGTGQGAVSGPPRKPPGTVAGTARGPEGGSTAQVPAPTASPPPEGPVLTFQSEKMKGMKELLVATKINSSAIKLQLTAQSQVQMKKQKVSTPSDYTLSFLKRQRKGL

SEQ ID NO: 53432 - protein, 610 aa, Homo sapiens; identical to SEQ ID NO: 53426
  Payload ID: 10618
  Gene Symbol: MEN1
  Gene Name: multiple endocrine neoplasia I
  Uniprot ID: O00255
  ENSP ID: ENSP00000366543

SEQ ID NO: 53433 - protein, 615 aa, Homo sapiens; identical to SEQ ID NO: 53428
  Payload ID: 10618
  Gene Symbol: MEN1
  Gene Name: multiple endocrine neoplasia I
  Uniprot ID: O00255
  ENSP ID: ENSP00000377899

SEQ ID NO: 53434 - protein, 615 aa, Homo sapiens; identical to SEQ ID NO: 53428
  Payload ID: 10618
  Gene Symbol: MEN1
  Gene Name: multiple endocrine neoplasia I
  Uniprot ID: O00255
  ENSP ID: ENSP00000377901

SEQ ID NO: 53435 - protein, 146 aa, Homo sapiens
  Payload ID: 10618
  Gene Symbol: MEN1
  Gene Name: multiple endocrine neoplasia I
  ENSP ID: ENSP00000388016
MGLKAAQKTLFPLRSIDDVVRLFAAELGREEPDLVLLSLVLGFVEHFLAVNRVIPTNVPELTFQPSPAPDPPGGLTYFPVADLSIIAALYARFTAQIRGAVDLSLYPREGGVSSRELVKKVSDVIWNSLSRSYFKDRAHIQSLFSF

SEQ ID NO: 53436 - protein, 281 aa, Homo sapiens
  Payload ID: 10618
  Gene Symbol: MEN1
  Gene Name: multiple endocrine neoplasia I
  ENSP ID: ENSP00000394933
MGLKAAQKTLFPLRSIDDVVRLFAAELGREEPDLVLLSLVLGFVEHFLAVNRVIPTNVPELTFQPSPAPDPPGGLTYFPVADLSIIAALYARFTAQIRGAVDLSLYPREGGVSSRELVKKVSDVIWNSLSRSYFKDRAHIQSLFSFITGTKLDSSGVAFAVVGACQALGLRDVHLALSEDHAWVVFGPNGEQTAEVTWHGKGNEDRRGQTVNAGVAERSWLYLKGSYMRCDRKMEVAFMVCAINPSIDLHTDSLELLQLQQKLLWLLYDLGHLERYPMALG

SEQ ID NO: 53437 - protein, 146 aa, Homo sapiens; identical to SEQ ID NO: 53435
  Payload ID: 10618
  Gene Symbol: MEN1
  Gene Name: multiple endocrine neoplasia I
  ENSP ID: ENSP00000402752

SEQ ID NO: 53438 - protein, 261 aa, Homo sapiens
  Payload ID: 10618
  Gene Symbol: MEN1
  Gene Name: multiple endocrine neoplasia I
  ENSP ID: ENSP00000411218
MGLKAAQKTLFPLRSIDDVVRLFAAELGREEPDLVLLSLVLGFVEHFLAVNRVIPTNVPELTFQPSPAPDPPGGLTYFPVADLSIIAALYARFTAQIRGAVDLSLYPREGGVSSRELVKKVSDVIWNSLSRSYFKDRAHIQSLFSFITGTKLDSSGVAFAVVGACQALGLRDVHLALSEDHAWVVFGPNGEQTAEVTWHGKGNEDRRGQTVNAGVAERSWLYLKGSYMRCDRKMEVAFMVCAINPSIDLHTDSLELLQLQQ

SEQ ID NO: 53439 - protein, 346 aa, Homo sapiens
  Payload ID: 10618
  Gene Symbol: MEN1
  Gene Name: multiple endocrine neoplasia I
  ENSP ID: ENSP00000413944
MGLKAAQKTLFPLRSIDDVVRLFAAELGREEPDLVLLSLVLGFVEHFLAVNRVIPTNVPELTFQPSPAPDPPGGLTYFPVADLSIIAALYARFTAQIRGAVDLSLYPREGGVSSRELVKKVSDVIWNSLSRSYFKDRAHIQSLFSFITGTKLDSSGVAFAVVGACQALGLRDVHLALSEDHAWVVFGPNGEQTAEVTWHGKGNEDRRGQTVNAGVAERSWLYLKGSYMRCDRKMEVAFMVCAINPSIDLHTDSLELLQLQQKLLWLLYDLGHLERYPMALGNLADLEELEPTPGRPDPLTLYHKGIASAKTYYRDEHIYPYMYLAGYHCRNRNVREALQAWADTAT

SEQ ID NO: 53440 - protein, 312 aa, Homo sapiens
  Payload ID: 10619
  Gene Symbol: MINPP1
  Gene Name: multiple inositol-polyphosphate phosphatase 1
  Uniprot ID: Q9UNW1
  ENSP ID: ENSP00000361062
MLRAPGCLLRTSVAPAAALAAALLSSLARCSLLEPRDPVASSLSPYFGTKTRYEDVNPVLLSGPEAPWRDPELLEGTCTPVQLVALIRHGTRYPTVKQIRKLRQLHGLLQARGSRDGGASSTGSRDLGAALADWPLWYADWMDGQLVEKGRQDMRQLALRLASLFPALFSRENYGRLRLITSSKHRCMDSSAAFLQGLWQHYHPGLPPPDVADMEFGPPTVNDKLMRFFDHCEKFLTEVEKNATALYHVEAFKTGPEMQNILKKVAATLQVPVNDLNAGLSQFLLQSSSSLVMQRLFFHCFLSWATSKTRNP

SEQ ID NO: 53441 - protein, 487 aa, Homo sapiens
  Payload ID: 10619
  Gene Symbol: MINPP1
  Gene Name: multiple inositol-polyphosphate phosphatase 1
  Uniprot ID: Q9UNW1
  ENSP ID: ENSP00000361064
MLRAPGCLLRTSVAPAAALAAALLSSLARCSLLEPRDPVASSLSPYFGTKTRYEDVNPVLLSGPEAPWRDPELLEGTCTPVQLVALIRHGTRYPTVKQIRKLRQLHGLLQARGSRDGGASSTGSRDLGAALADWPLWYADWMDGQLVEKGRQDMRQLALRLASLFPALFSRENYGRLRLITSSKHRCMDSSAAFLQGLWQHYHPGLPPPDVADMEFGPPTVNDKLMRFFDHCEKFLTEVEKNATALYHVEAFKTGPEMQNILKKVAATLQVPVNDLNADLIQVAFFTCSFDLAIKGVKSPWCDVFDIDDAKVLEYLNDLKQYWKRGYGYTINSRSSCTLFQDIFQHLDKAVEQKQRSQPISSPVILQFGHAETLLPLLSLMGYFKDKEPLTAYNYKKQMHRKFRSGLIVPYASNLIFVLYHCENAKTPKEQFRVQMLLNEKVLPLAYSQETVSFYEDLKNHYKDILQSCQTSEECELARANSTSDEL

SEQ ID NO: 53442 - protein, 286 aa, Homo sapiens
  Payload ID: 10619
  Gene Symbol: MINPP1
  Gene Name: multiple inositol-polyphosphate phosphatase 1
  Uniprot ID: Q9UNW1
  ENSP ID: ENSP00000437823
MCLFQLCGLVRYMEFGPPTVNDKLMRFFDHCEKFLTEVEKNATALYHVEAFKTGPEMQNILKKVAATLQVPVNDLNADLIQVAFFTCSFDLAIKGVKSPWCDVFDIDDAKVLEYLNDLKQYWKRGYGYTINSRSSCTLFQDIFQHLDKAVEQKQRSQPISSPVILQFGHAETLLPLLSLMGYFKDKEPLTAYNYKKQMHRKFRSGLIVPYASNLIFVLYHCENAKTPKEQFRVQMLLNEKVLPLAYSQETVSFYEDLKNHYKDILQSCQTSEECELARANSTSDEL

SEQ ID NO: 53443 - protein, 2070 aa, Homo sapiens
  Payload ID: 10620
  Gene Symbol: MPDZ
  Gene Name: multiple PDZ domain protein
  Uniprot ID: O75970
  ENSP ID: ENSP00000320006
MLEAIDKNRALHAAERLQTKLRERGDVANEDKLSLLKSVLQSPLFSQILSLQTSVQQLKDQVNIATSATSNIEYAHVPHLSPAVIPTLQNESFLLSPNNGNLEALTGPGIPHINGKPACDEFDQLIKNMAQGRHVEVFELLKPPSGGLGFSVVGLRSENRGELGIFVQEIQEGSVAHRDGRLKETDQILAINGQALDQTITHQQAISILQKAKDTVQLVIARGSLPQLVSPIVSRSPSAASTISAHSNPVHWQHMETIELVNDGSGLGFGIIGGKATGVIVKTILPGGVADQHGRLCSGDHILKIGDTDLAGMSSEQVAQVLRQCGNRVKLMIARGAIEERTAPTALGITLSSSPTSTPELRVDASTQKGEESETFDVELTKNVQGLGITIAGYIGDKKLEPSGIFVKSITKSSAVEHDGRIQIGDQIIAVDGTNLQGFTNQQAVEVLRHTGQTVLLTLMRRGMKQEAELMSREDVTKDADLSPVNASIIKENYEKDEDFLSSTRNTNILPTEEEGYPLLSAEIEEIEDAQKQEAALLTKWQRIMGINYEIVVAHVSKFSENSGLGISLEATVGHHFIRSVLPEGPVGHSGKLFSGDELLEVNGITLLGENHQDVVNILKELPIEVTMVCCRRTVPPTTQSELDSLDLCDIELTEKPHVDLGEFIGSSETEDPVLAMTDAGQSTEEVQAPLAMWEAGIQHIELEKGSKGLGFSILDYQDPIDPASTVIIIRSLVPGGIAEKDGRLLPGDRLMFVNDVNLENSSLEEAVEALKGAPSGTVRIGVAKPLPLSPEEGYVSAKEDSFLYPPHSCEEAGLADKPLFRADLALVGTNDADLVDESTFESPYSPENDSIYSTQASILSLHGSSCGDGLNYGSSLPSSPPKDVIENSCDPVLDLHMSLEELYTQNLLQRQDENTPSVDISMGPASGFTINDYTPANAIEQQYECENTIVWTESHLPSEVISSAELPSVLPDSAGKGSEYLLEQSSLACNAECVMLQNVSKESFERTINIAKGNSSLGMTVSANKDGLGMIVRSIIHGGAISRDGRIAIGDCILSINEESTISVTNAQARAMLRRHSLIGPDIKITYVPAEHLEEFKISLGQQSGRVMALDIFSSYTGRDIPELPEREEGEGEESELQNTAYSNWNQPRRVELWREPSKSLGISIVGGRGMGSRLSNGEVMRGIFIKHVLEDSPAGKNGTLKPGDRIVEVDGMDLRDASHEQAVEAIRKAGNPVVFMVQSIINRPRKSPLPSLLHNLYPKYNFSSTNPFADSLQINADKAPSQSESEPEKAPLCSVPPPPPSAFAEMGSDHTQSSASKISQDVDKEDEFGYSWKNIRERYGTLTGELHMIELEKGHSGLGLSLAGNKDRSRMSVFIVGIDPNGAAGKDGRLQIADELLEINGQILYGRSHQNASSIIKCAPSKVKIIFIRNKDAVNQMAVCPGNAVEPLPSNSENLQNKETEPTVTTSDAAVDLSSFKNVQHLELPKDQGGLGIAISEEDTLSGVIIKSLTEHGVAATDGRLKVGDQILAVDDEIVVGYPIEKFISLLKTAKMTVKLTIHAENPDSQAVPSAAGAASGEKKNSSQSLMVPQSGSPEPESIRNTSRSSTPAIFASDPATCPIIPGCETTIEISKGRTGLGLSIVGGSDTLLGAIIIHEVYEEGAACKDGRLWAGDQILEVNGIDLRKATHDEAINVLRQTPQRVRLTLYRDEAPYKEEEVCDTLTIELQKKPGKGLGLSIVGKRNDTGVFVSDIVKGGIADADGRLMQGDQILMVNGEDVRNATQEAVAALLKCSLGTVTLEVGRIKAGPFHSERRPSQSSQVSEGSLSSFTFPLSGSSTSESLESSSKKNALASEIQGLRTVEMKKGPTDSLGISIAGGVGSPLGDVPIFIAMMHPTGVAAQTQKLRVGDRIVTICGTSTEGMTHTQAVNLLKNASGSIEMQVVAGGDVSVVTGHQQEPASSSLSFTGLTSSSIFQDDLGPPQCKSITLERGPDGLGFSIVGGYGSPHGDLPIYVKTVFAKGAASEDGRLKRGDQIIAVNGQSLEGVTHEEAVAILKRTKGTVTLMVLS

SEQ ID NO: 53444 - protein, 2037 aa, Homo sapiens
  Payload ID: 10620
  Gene Symbol: MPDZ
  Gene Name: multiple PDZ domain protein
  Uniprot ID: O75970
  ENSP ID: ENSP00000370410
MLEAIDKNRALHAAERLQTKLRERGDVANEDKLSLLKSVLQSPLFSQILSLQTSVQQLKDQVNIATSATSNIEYAHVPHLSPAVIPTLQNESFLLSPNNGNLEALTGPGIPHINGKPACDEFDQLIKNMAQGRHVEVFELLKPPSGGLGFSVVGLRSENRGELGIFVQEIQEGSVAHRDGRLKETDQILAINGQALDQTITHQQAISILQKAKDTVQLVIARGSLPQLVSPIVSRSPSAASTISAHSNPVHWQHMETIELVNDGSGLGFGIIGGKATGVIVKTILPGGVADQHGRLCSGDHILKIGDTDLAGMSSEQVAQVLRQCGNRVKLMIARGAIEERTAPTALGITLSSSPTSTPELRVDASTQKGEESETFDVELTKNVQGLGITIAGYIGDKKLEPSGIFVKSITKSSAVEHDGRIQIGDQIIAVDGTNLQGFTNQQAVEVLRHTGQTVLLTLMRRGMKQEAELMSREDVTKDADLSPVNASIIKENYEKDEDFLSSTRNTNILPTEEEGYPLLSAEIEEIEDAQKQEAALLTKWQRIMGINYEIVVAHVSKFSENSGLGISLEATVGHHFIRSVLPEGPVGHSGKLFSGDELLEVNGITLLGENHQDVVNILKELPIEVTMVCCRRTVPPTTQSELDSLDLCDIELTEKPHVDLGEFIGSSETEDPVLAMTDAGQSTEEVQAPLAMWEAGIQHIELEKGSKGLGFSILDYQDPIDPASTVIIIRSLVPGGIAEKDGRLLPGDRLMFVNDVNLENSSLEEAVEALKGAPSGTVRIGVAKPLPLSPEEGYVSAKEDSFLYPPHSCEEAGLADKPLFRADLALVGTNDADLVDESTFESPYSPENDSIYSTQASILSLHGSSCGDGLNYGSSLPSSPPKDVIENSCDPVLDLHMSLEELYTQNLLQRQDENTPSVDISMGPASGFTINDYTPANAIEQQYECENTIVWTESHLPSEVISSAELPSVLPDSAGKGSEYLLEQSSLACNAECVMLQNVSKESFERTINIAKGNSSLGMTVSANKDGLGMIVRSIIHGGAISRDGRIAIGDCILSINEESTISVTNAQARAMLRRHSLIGPDIKITYVPAEHLEEFKISLGQQSGRVMALDIFSSYTGRDIPELPEREEGEGEESELQNTAYSNWNQPRRVELWREPSKSLGISIVGGRGMGSRLSNGEVMRGIFIKHVLEDSPAGKNGTLKPGDRIVEVDGMDLRDASHEQAVEAIRKAGNPVVFMVQSIINRPRAPSQSESEPEKAPLCSVPPPPPSAFAEMGSDHTQSSASKISQDVDKEDEFGYSWKNIRERYGTLTGELHMIELEKGHSGLGLSLAGNKDRSRMSVFIVGIDPNGAAGKDGRLQIADELLEINGQILYGRSHQNASSIIKCAPSKVKIIFIRNKDAVNQMAVCPGNAVEPLPSNSENLQNKETEPTVTTSDAAVDLSSFKNVQHLELPKDQGGLGIAISEEDTLSGVIIKSLTEHGVAATDGRLKVGDQILAVDDEIVVGYPIEKFISLLKTAKMTVKLTIHAENPDSQAVPSAAGAASGEKKNSSQSLMVPQSGSPEPESIRNTSRSSTPAIFASDPATCPIIPGCETTIEISKGRTGLGLSIVGGSDTLLGAIIIHEVYEEGAACKDGRLWAGDQILEVNGIDLRKATHDEAINVLRQTPQRVRLTLYRDEAPYKEEEVCDTLTIELQKKPGKGLGLSIVGKRNDTGVFVSDIVKGGIADADGRLMQGDQILMVNGEDVRNATQEAVAALLKCSLGTVTLEVGRIKAGPFHSERRPSQSSQVSEGSLSSFTFPLSGSSTSESLESSSKKNALASEIQGLRTVEMKKGPTDSLGISIAGGVGSPLGDVPIFIAMMHPTGVAAQTQKLRVGDRIVTICGTSTEGMTHTQAVNLLKNASGSIEMQVVAGGDVSVVTGHQQEPASSSLSFTGLTSSSIFQDDLGPPQCKSITLERGPDGLGFSIVGGYGSPHGDLPIYVKTVFAKGAASEDGRLKRGDQIIAVNGQSLEGVTHEEAVAILKRTKGTVTLMVLS

SEQ ID NO: 53445 - protein, 191 aa, Homo sapiens
  Payload ID: 10620
  Gene Symbol: MPDZ
  Gene Name: multiple PDZ domain protein
  ENSP ID: ENSP00000389705
MALDIFSSYTGRDIPELPEREEGEGEESELQNTAYSNWNQPRRVELWREPSKSLGISIVGGRGMGSRLSNGEVMRGIFIKHVLEDSPAGKNGTLKPGDRIVEAPSQSESEPEKAPLCSVPPPPPSAFAEMGSDHTQSSASKISQDVDKEDEFGYSWKNIRERYGTLTGELHMIELEKGHSGLGLSLAGNKD

SEQ ID NO: 53446 - protein, 79 aa, Homo sapiens
  Payload ID: 10620
  Gene Symbol: MPDZ
  Gene Name: multiple PDZ domain protein
  ENSP ID: ENSP00000406902
  MOD_RES (1)..(1): Any amino acid
XFASDPATCPIIPGCETTIEISKGRTGLGLSIVGGSDTLLGAIIIHEVYEEGAACKDGRLWAGDQILESVSHFCTGEWN

SEQ ID NO: 53447 - protein, 2037 aa, Homo sapiens; identical to SEQ ID NO: 53444
  Payload ID: 10620
  Gene Symbol: MPDZ
  Gene Name: multiple PDZ domain protein
  Uniprot ID: O75970
  ENSP ID: ENSP00000415208

SEQ ID NO: 53448 - protein, 611 aa, Homo sapiens
  Payload ID: 10620
  Gene Symbol: MPDZ
  Gene Name: multiple PDZ domain protein
  ENSP ID: ENSP00000415964
NKDAVNQMAVCPGNAVEPLPSNSENLQNKETEPTVTTSDAAVDLSSFKNVQHLELPKDQGGLGIAISEEDTLSGVIIKSLTEHGVAATDGRLKVGDQILAVDDEIVVGYPIEKFISLLKTAKMTVKLTIHAENPDSQAVPSAAGAASGEKKNSSQSLMVPQSGSPEPESIRNTSRSSTPAIFASDPATCPIIPGCETTIEISKGRTGLGLSIVGGSDTLLVNGIDLRKATHDEAINVLRQTPQRVRLTLYRDEAPYKEEEVCDTLTIELQKKPGKGLGLSIVGKRNDTGVFVSDIVKGGIADADGRLMQGDQILMVNGEDVRNATQEAVAALLKCSLGTVTLEVGRIKAGPFHSERRPSQSSQVSEGSLSSFTFPLSGSSTSESLESSSKKNALASEIQGLRTVEMKKGPTDSLGISIAGGVGSPLGDVPIFIAMMHPTGVAAQTQKLRVGDRIVTICGTSTEGMTHTQAVNLLKNASGSIEMQVVAGGDVSVVTGHQQEPASSSLSFTGLTSSSIFQDDLGPPQCKSITLERGPDGLGFSIVGGYGSPHGDLPIYVKTVFAKGAASEDGRLKRGDQIIAVNGQSLEGVTHEEAVAILKRTKGTVTLMVLS

SEQ ID NO: 53449 - protein, 34 aa, Homo sapiens
  Payload ID: 10620
  Gene Symbol: MPDZ
  Gene Name: multiple PDZ domain protein
  ENSP ID: ENSP00000437651
  MOD_RES (1)..(1): Any amino acid
XSASKISQDVDKEDEFGYSWSKLCFCDAFNCKRY

SEQ ID NO: 53450 - protein, 2041 aa, Homo sapiens
  Payload ID: 10620
  Gene Symbol: MPDZ
  Gene Name: multiple PDZ domain protein
  Uniprot ID: O75970
  ENSP ID: ENSP00000439807
MLEAIDKNRALHAAERLQTKLRERGDVANEDKLSLLKSVLQSPLFSQILSLQTSVQQLKDQVNIATSATSNIEYAHVPHLSPAVIPTLQNESFLLSPNNGNLEALTGPGIPHINGKPACDEFDQLIKNMAQGRHVEVFELLKPPSGGLGFSVVGLRSENRGELGIFVQEIQEGSVAHRDGRLKETDQILAINGQALDQTITHQQAISILQKAKDTVQLVIARGSLPQLVSPIVSRSPSAASTISAHSNPVHWQHMETIELVNDGSGLGFGIIGGKATGVIVKTILPGGVADQHGRLCSGDHILKIGDTDLAGMSSEQVAQVLRQCGNRVKLMIARGAIEERTAPTALGITLSSSPTSTPELRVDASTQKGEESETFDVELTKNVQGLGITIAGYIGDKKLEPSGIFVKSITKSSAVEHDGRIQIGDQIIAVDGTNLQGFTNQQAVEVLRHTGQTVLLTLMRRGMKQEAELMSREDVTKDADLSPVNASIIKENYEKDEDFLSSTRNTNILPTEEEGYPLLSAEIEEIEDAQKQEAALLTKWQRIMGINYEIVVAHVSKFSENSGLGISLEATVGHHFIRSVLPEGPVGHSGKLFSGDELLEVNGITLLGENHQDVVNILKELPIEVTMVCCRRTVPPTTQSELDSLDLCDIELTEKPHVDLGEFIGSSETEDPVLAMTDAGQSTEEVQAPLAMWEAGIQHIELEKGSKGLGFSILDYQDPIDPASTVIIIRSLVPGGIAEKDGRLLPGDRLMFVNDVNLENSSLEEAVEALKGAPSGTVRIGVAKPLPLSPEEGYVSAKEDSFLYPPHSCEEAGLADKPLFRADLALVGTNDADLVDESTFESPYSPENDSIYSTQASILSLHGSSCGDGLNYGSSLPSSPPKDVIENSCDPVLDLHMSLEELYTQNLLQRQDENTPSVDISMGPASGFTINDYTPANAIEQQYECENTIVWTESHLPSEVISSAELPSVLPDSAGKGSEYLLEQSSLACNAECVMLQNVSKESFERTINIAKGNSSLGMTVSANKDGLGMIVRSIIHGGAISRDGRIAIGDCILSINEESTISVTNAQARAMLRRHSLIGPDIKITYVPAEHLEEFKISLGQQSGRVMALDIFSSYTGRDIPELPEREEGEGEESELQNTAYSNWNQPRRVELWREPSKSLGISIVGGRGMGSRLSNGEVMRGIFIKHVLEDSPAGKNGTLKPGDRIVEVDGMDLRDASHEQAVEAIRKAGNPVVFMVQSIINRPRKSPLPSLLHNLYPKYNFSSTNPFADSLQINADKAPSQSESEPEKAPLCSVPPPPPSAFAEMGSDHTQSSASKISQDVDKEDEFGYSWKNIRERYGTLTGELHMIELEKGHSGLGLSLAGNKDRSRMSVFIVGIDPNGAAGKDGRLQIADELLEINGQILYGRSHQNASSIIKCAPSKVKIIFIRNKDAVNQMAVCPGNAVEPLPSNSENLQNKETEPTVTTSDAAVDLSSFKNVQHLELPKDQGGLGIAISEEDTLSGVIIKSLTEHGVAATDGRLKVGDQILAVDDEIVVGYPIEKFISLLKTAKMTVKLTIHAENPDSQAVPSAAGAASGEKKNSSQSLMVPQSGSPEPESIRNTSRSSTPAIFASDPATCPIIPGCETTIEISKGRTGLGLSIVGGSDTLLGAIIIHEVYEEGAACKDGRLWAGDQILEVNGIDLRKATHDEAINVLRQTPQRVRLTLYRDEAPYKEEEVCDTLTIELQKKPGKGLGLSIVGKRNDTGVFVSDIVKGGIADADGRLMQGDQILMVNGEDVRNATQEAVAALLKVSEGSLSSFTFPLSGSSTSESLESSSKKNALASEIQGLRTVEMKKGPTDSLGISIAGGVGSPLGDVPIFIAMMHPTGVAAQTQKLRVGDRIVTICGTSTEGMTHTQAVNLLKNASGSIEMQVVAGGDVSVVTGHQQEPASSSLSFTGLTSSSIFQDDLGPPQCKSITLERGPDGLGFSIVGGYGSPHGDLPIYVKTVFAKGAASEDGRLKRGDQIIAVNGQSLEGVTHEEAVAILKRTKGTVTLMVLS

SEQ ID NO: 53451 - protein, 30 aa, Homo sapiens
  Payload ID: 10620
  Gene Symbol: MPDZ
  Gene Name: multiple PDZ domain protein
  ENSP ID: ENSP00000441111
  MOD_RES (1)..(1): Any amino acid
XQVAQVLRQCGNRVKLMLLLRKVKKVRHLM

SEQ ID NO: 53452 - protein, 128 aa, Homo sapiens
  Payload ID: 10620
  Gene Symbol: MPDZ
  Gene Name: multiple PDZ domain protein
  ENSP ID: ENSP00000443672
MALDIFSSYTGRDIPELPEREEGEGEESELQNTAYSNWNQPRRVELWREPSKSLGISIVGGRGMGSRLSNGEVMRGIFIKHVLEDSPAGKNGTLKPGDRIVEKSPLPSLLHNLYPKYNFSSTNPFADS

SEQ ID NO: 53453 - protein, 2008 aa, Homo sapiens
  Payload ID: 10620
  Gene Symbol: MPDZ
  Gene Name: multiple PDZ domain protein
  Uniprot ID: O75970
  ENSP ID: ENSP00000444151
MLEAIDKNRALHAAERLQTKLRERGDVANEDKLSLLKSVLQSPLFSQILSLQTSVQQLKDQVNIATSATSNIEYAHVPHLSPAVIPTLQNESFLLSPNNGNLEALTGPGIPHINGKPACDEFDQLIKNMAQGRHVEVFELLKPPSGGLGFSVVGLRSENRGELGIFVQEIQEGSVAHRDGRLKETDQILAINGQALDQTITHQQAISILQKAKDTVQLVIARGSLPQLVSPIVSRSPSAASTISAHSNPVHWQHMETIELVNDGSGLGFGIIGGKATGVIVKTILPGGVADQHGRLCSGDHILKIGDTDLAGMSSEQVAQVLRQCGNRVKLMIARGAIEERTAPTALGITLSSSPTSTPELRVDASTQKGEESETFDVELTKNVQGLGITIAGYIGDKKLEPSGIFVKSITKSSAVEHDGRIQIGDQIIAVDGTNLQGFTNQQAVEVLRHTGQTVLLTLMRRGMKQEAELMSREDVTKDADLSPVNASIIKENYEKDEDFLSSTRNTNILPTEEEGYPLLSAEIEEIEDAQKQEAALLTKWQRIMGINYEIVVAHVSKFSENSGLGISLEATVGHHFIRSVLPEGPVGHSGKLFSGDELLEVNGITLLGENHQDVVNILKELPIEVTMVCCRRTVPPTTQSELDSLDLCDIELTEKPHVDLGEFIGSSETEDPVLAMTDAGQSTEEVQAPLAMWEAGIQHIELEKGSKGLGFSILDYQDPIDPASTVIIIRSLVPGGIAEKDGRLLPGDRLMFVNDVNLENSSLEEAVEALKGAPSGTVRIGVAKPLPLSPEEGYVSAKEDSFLYPPHSCEEAGLADKPLFRADLALVGTNDADLVDESTFESPYSPENDSIYSTQASILSLHGSSCGDGLNYGSSLPSSPPKDVIENSCDPVLDLHMSLEELYTQNLLQRQDENTPSVDISMGPASGFTINDYTPANAIEQQYECENTIVWTESHLPSEVISSAELPSVLPDSAGKGSEYLLEQSSLACNAECVMLQNVSKESFERTINIAKGNSSLGMTVSANKDGLGMIVRSIIHGGAISRDGRIAIGDCILSINEESTISVTNAQARAMLRRHSLIGPDIKITYVPAEHLEEFKISLGQQSGRVMALDIFSSYTGRDIPELPEREEGEGEESELQNTAYSNWNQPRRVELWREPSKSLGISIVGGRGMGSRLSNGEVMRGIFIKHVLEDSPAGKNGTLKPGDRIVEVDGMDLRDASHEQAVEAIRKAGNPVVFMVQSIINRPRAPSQSESEPEKAPLCSVPPPPPSAFAEMGSDHTQSSASKISQDVDKEDEFGYSWKNIRERYGTLTGELHMIELEKGHSGLGLSLAGNKDRSRMSVFIVGIDPNGAAGKDGRLQIADELLEINGQILYGRSHQNASSIIKCAPSKVKIIFIRNKDAVNQMAVCPGNAVEPLPSNSENLQNKETEPTVTTSDAAVDLSSFKNVQHLELPKDQGGLGIAISEEDTLSGVIIKSLTEHGVAATDGRLKVGDQILAVDDEIVVGYPIEKFISLLKTAKMTVKLTIHAENPDSQAVPSAAGAASGEKKNSSQSLMVPQSGSPEPESIRNTSRSSTPAIFASDPATCPIIPGCETTIEISKGRTGLGLSIVGGSDTLLGAIIIHEVYEEGAACKDGRLWAGDQILEVNGIDLRKATHDEAINVLRQTPQRVRLTLYRDEAPYKEEEVCDTLTIELQKKPGKGLGLSIVGKRNDTGVFVSDIVKGGIADADGRLMQGDQILMVNGEDVRNATQEAVAALLKVSEGSLSSFTFPLSGSSTSESLESSSKKNALASEIQGLRTVEMKKGPTDSLGISIAGGVGSPLGDVPIFIAMMHPTGVAAQTQKLRVGDRIVTICGTSTEGMTHTQAVNLLKNASGSIEMQVVAGGDVSVVTGHQQEPASSSLSFTGLTSSSIFQDDLGPPQCKSITLERGPDGLGFSIVGGYGSPHGDLPIYVKTVFAKGAASEDGRLKRGDQIIAVNGQSLEGVTHEEAVAILKRTKGTVTLMVLS

SEQ ID NO: 53454 - protein, 1006 aa, Homo sapiens
  Payload ID: 10620
  Gene Symbol: MPDZ
  Gene Name: multiple PDZ domain protein
  ENSP ID: ENSP00000444230
VMLQNVSKESFERTINIAKGNSSLGMTVSANKDGLGMIVRSIIHGGAISRDGRIAIGDCILSINEESTISVTNAQARAMLRRHSLIGPDIKITYVPAEHLEEFKISLGQQSGRVMALDIFSSYTGRDIPELPEREEGEGEESELQNTAYSNWNQPRRVELWREPSKSLGISIVGGRGMGSRLSNGEVMRGIFIKHVLEDSPAGKNGTLKPGDRIVEAPSQSESEPEKAPLCSVPPPPPSAFAEMGSDHTQSSASKISQDVDKEDEFGYSWKNIRERYGTLTGELHMIELEKGHSGLGLSLAGNKDRSRMSVFIVGIDPNGAAGKDGRLQIADELLEINGQILYGRSHQNASSIIKCAPSKVKIIFIRNKDAVNQMAVCPGNAVEPLPSNSENLQNKETEPTVTTSDAAVDLSSFKNVQHLELPKDQGGLGIAISEEDTLSGVIIKSLTEHGVAATDGRLKVGDQILAVDDEIVVGYPIEKFISLLKTAKMTVKLTIHAENPDSQAVPSAAGAASGEKKNSSQSLMVPQSGSPEPESIRNTSRSSTPAIFASDPATCPIIPGCETTIEISKGRTGLGLSIVGGSDTLLGAIIIHEVYEEGAACKDGRLWAGDQILEVNGIDLRKATHDEAINVLRQTPQRVRLTLYRDEAPYKEEEVCDTLTIELQKKPGKGLGLSIVGKRNDTGVFVSDIVKGGIADADGRLMQGDQILMVNGEDVRNATQEAVAALLKCSLGTVTLEVGRIKAGPFHSERRPSQSSQVSEGSLSSFTFPLSGSSTSESLESSSKKNALASEIQGLRTVEMKKGPTDSLGISIAGGVGSPLGDVPIFIAMMHPTGVAAQTQKLRVGDRIVTICGTSTEGMTHTQAVNLLKNASGSIEMQVVAGGDVSVVTGHQQEPASSSLSFTGLTSSSIFQDDLGPPQCKSITLERGPDGLGFSIVGGYGSPHGDLPIYVKTVFAKGAASEDGRLKRGDQIIAVNGQSLEGVTHEEAVAILKRTKGTVTLMVLS

SEQ ID NO: 53455 - protein, 929 aa, Homo sapiens
  Payload ID: 10620
  Gene Symbol: MPDZ
  Gene Name: multiple PDZ domain protein
  ENSP ID: ENSP00000444717
MALDIFSSYTGRDIPELPEREEGEGEESELQNTAYSNWNQPRRVELWREPSKSLGISIVGGRGMGSRLSNGEVMRGIFIKHVLEDSPAGKNGTLKPGDRIVEVDGMDLRDASHEQAVEAIRKAGNPVVFMVQSIINRPRAPSQSESEPEKAPLCSVPPPPPSAFAEMGSDHTQSSASKISQDVDKEDEFGYSWKNIRERYGTLTGELHMIELEKGHSGLGLSLAGNKDRSRMSVFIVGIDPNGAAGKDGRLQIADELLEINGQILYGRSHQNASSIIKCAPSKVKIIFIRNKDAVNQMAVCPGNAVEPLPSNSENLQNKETEPTVTTSDAAVDLSSFKNVQHLELPKDQGGLGIAISEEDTLSGVIIKSLTEHGVAATDGRLKVGDQILAVDDEIVVGYPIEKFISLLKTAKMTVKLTIHAENPDSQAVPSAAGAASGEKKNSSQSLMVPQSGSPEPESIRNTSRSSTPAIFASDPATCPIIPGCETTIEISKGRTGLGLSIVGGSDTLLGAIIIHEVYEEGAACKDGRLWAGDQILEVNGIDLRKATHDEAINVLRQTPQRVRLTLYRDEAPYKEEEVCDTLTIELQKKPGKGLGLSIVGKRNDTGVFVSDIVKGGIADADGRLMQGDQILMVNGEDVRNATQEAVAALLKCSLGTVTLEVGRIKAGPFHSERRPSQSSQVSEGSLSSFTFPLSGSSTSESLESSSKKNALASEIQGLRTVEMKKGPTDSLGISIAGGVGSPLGDVPIFIAMMHPTGVAAQTQKLRVGDRIVTICGTSTEGMTHTQAVNLLKNASGSIEMQVVAGGDVSVVTGHQQEPASSSLSFTGLTSSSIFQDDLGPPQCKSITLERGPDGLGFSIVGGYGSPHGDLPIYVKTVFAKGAASEDGRLKRGDQIIAVNGQSLEGVTHEEAVAILKRTKGTVTLMVLS

SEQ ID NO: 53456 - protein, 95 aa, Homo sapiens
  Payload ID: 10620
  Gene Symbol: MPDZ
  Gene Name: multiple PDZ domain protein
  ENSP ID: ENSP00000446298
  MOD_RES (1)..(1): Any amino acid
XMGSDHTQSSASKISQDVDKEDEFGYSWKNIRERYGTLTGELHMIELEKGHSGLGLSLAGNKDRSRMSVFIVGIDPNGAAGKDGRLQIADELLEK

SEQ ID NO: 53457 - protein, 2084 aa, Homo sapiens
  Payload ID: 10620
  Gene Symbol: MPDZ
  Gene Name: multiple PDZ domain protein
  ENSP ID: ENSP00000446358
MLEAIDKNRALHAAERLQTKLRERGDVANEDKLSLLKSVLQSPLFSQILSLQTSVQQLKDQVNIATSATSNIEYAHVPHLSPAVIPTLQNESFLLSPNNGNLEALTGPGIPHINGKPACDEFDQLIKNMAQGRHVEVFELLKPPSGGLGFSVVGLRSENRGELGIFVQEIQEGSVAHRDGRLKETDQILAINGQALDQTITHQQAISILQKAKDTVQLVIARGSLPQLVSPIVSRSPSAASTISAHSNPVHWQHMETIELVNDGSGLGFGIIGGKATGVIVKTILPGGVADQHGRLCSGDHILKIGDTDLAGMSSEQVAQVLRQCGNRVKLMIARGAIEERTAPTALGITLSSSPTSTPELRVDASTQKGEESETFDVELTKNVQGLGITIAGYIGDKKLEPSGIFVKSITKSSAVEHDGRIQIGDQIIAVDGTNLQGFTNQQAVEVLRHTGQTVLLTLMRRGMKQEAELMSREDVTKDADLSPVNASIIKENYEKDEDFLSSTRNTNILPTEEEGYPLLSAEIEEIEDAQKQEAALLTKWQRIMGINYEIVVAHVSKFSENSGLGISLEATVGHHFIRSVLPEGPVGHSGKLFSGDELLEVNGITLLGENHQDVVNILKELPIEVTMVCCRRTVPPTTQSELDSLDLCDIELTEKPHVDLGEFIGSSETEDPVLAMTDAGQSTEEVQAPLAMWEAGIQHIELEKGSKGLGFSILDYQDPIDPASTVIIIRSLVPGGIAEKDGRLLPGDRLMFVNDVNLENSSLEEAVEALKGAPSGTVRIGVAKPLPLSPEEGYVSAKEDSFLYPPHSCEEAGLADKPLFRADLALVGTNDADLVDESTFESPYSPENDSIYSTQASILSLHGSSCGDGLNYGSSLPSSPPKDVIENSCDPVLDLHMSLEELYTQNLLQRQDENTPSVDISMGPASGFTINDYTPANAIEQQYECENTIVWTESHLPSEVISSAELPSVLPDSAGKGSEYLLEQSSLACNAECVMLQNVSKESFERTINIAKGNSSLGMTVSANKDGLGMIVRSIIHGGAISRDGRIAIGDCILSINEESTISVTNAQARAMLRRHSLIGPDIKFSAAPADDRAPFYVITYVPAEHLEEFKISLGQQSGRVMALDIFSSYTGRDIPELPEREEGEGEESELQNTAYSNWNQPRRVELWREPSKSLGISIVGGRGMGSRLSNGEVMRGIFIKHVLEDSPAGKNGTLKPGDRIVEVDGMDLRDASHEQAVEAIRKAGNPVVFMVQSIINRPRKSPLPSLLHNLYPKYNFSSTNPFADSLQINADKAPSQSESEPEKAPLCSVPPPPPSAFAEMGSDHTQSSASKISQDVDKEDEFGYSWKNIRERYGTLTGELHMIELEKGHSGLGLSLAGNKDRSRMSVFIVGIDPNGAAGKDGRLQIADELLEINGQILYGRSHQNASSIIKCAPSKVKIIFIRNKDAVNQMAVCPGNAVEPLPSNSENLQNKETEPTVTTSDAAVDLSSFKNVQHLELPKDQGGLGIAISEEDTLSGVIIKSLTEHGVAATDGRLKVGDQILAVDDEIVVGYPIEKFISLLKTAKMTVKLTIHAENPDSQAVPSAAGAASGEKKNSSQSLMVPQSGSPEPESIRNTSRSSTPAIFASDPATCPIIPGCETTIEISKGRTGLGLSIVGGSDTLLGAIIIHEVYEEGAACKDGRLWAGDQILEVNGIDLRKATHDEAINVLRQTPQRVRLTLYRDEAPYKEEEVCDTLTIELQKKPGKGLGLSIVGKRNDTGVFVSDIVKGGIADADGRLMQGDQILMVNGEDVRNATQEAVAALLKCSLGTVTLEVGRIKAGPFHSERRPSQSSQVSEGSLSSFTFPLSGSSTSESLESSSKKNALASEIQGLRTVEMKKGPTDSLGISIAGGVGSPLGDVPIFIAMMHPTGVAAQTQKLRVGDRIVTICGTSTEGMTHTQAVNLLKNASGSIEMQVVAGGDVSVVTGHQQEPASSSLSFTGLTSSSIFQDDLGPPQCKSITLERGPDGLGFSIVGGYGSPHGDLPIYVKTVFAKGAASEDGRLKRGDQIIAVNGQSLEGVTHEEAVAILKRTKGTVTLMVLS

SEQ ID NO: 53458 - protein, 273 aa, Homo sapiens
  Payload ID: 10621
  Gene Symbol: MVB12A
  Gene Name: multivesicular body subunit 12A
  Uniprot ID: Q96EY5
  ENSP ID: ENSP00000324810
MDPVPGTDSAPLAGLAWSSASAPPPRGFSAISCTVEGAPASFGKSFAQKSGYFLCLSSLGSLENPQENVVADIQIVVDKSPLPLGFSPVCDPMDSKASVSKKKRMCVKLLPLGATDTAVFDVRLSGKTKTVPGYLRIGDMGGFAIWCKKAKAPRPVPKPRGLSRDMQGLSLDAASQPSKGGLLERTASRLGSRASTLRRNDSIYEASSLYGISAMDGVPFTLHPRFEGKSCSPLAFSAFGDLTIKSLADIEEEYNYGFVVEKTAAARLPPSVS

SEQ ID NO: 53459 - protein, 273 aa, Homo sapiens
  Payload ID: 10621
  Gene Symbol: MVB12A
  Gene Name: multivesicular body subunit 12A
  ENSP ID: ENSP00000432526
MDPVPGTDSAPLAGLAWSSASAPPPRGFSAISCTVEGAPASFGKSFAQKSGYFLCLSSLGSLENPQENVVADIQIVVDKSPLPLGFSPVCDPMDSKASVSKKKRMCVKLLPLGATDTAVFDVRLSGKTKTVPGYLRIGDMGGFAIWCKKAKAPRPVPKPRGLSRDMQGLSLDAASQPSKGGLLERTASRLGSRASTLRRNDSIYEASSLYGISAMDGVPFTLHPRFEGKSCSPLAGLPSSRNTLKAARQTHIRCLESGGFGCSPRTSLALRLT

SEQ ID NO: 53460 - protein, 121 aa, Homo sapiens
  Payload ID: 10621
  Gene Symbol: MVB12A
  Gene Name: multivesicular body subunit 12A
  ENSP ID: ENSP00000433280
MDSKASVSKKKRMCVKLLPLGATDTAVFDVRLSGKTKTVPGYLRIGDMGGFAIWCKKAKAPRPVPKPRGLSRDMQGLSLDAASQPSKGGLLERTASRLGSRASTLRRNDSIYEASSLYGIS

SEQ ID NO: 53461 - protein, 199 aa, Homo sapiens
  Payload ID: 10621
  Gene Symbol: MVB12A
  Gene Name: multivesicular body subunit 12A
  ENSP ID: ENSP00000433677
MDPVPGTDSAPLAGLAWSSASAPPPRGFSAISCTVEGAPASFGKSFAQKSGYFLCLSSLGSLENPQENVVADIQIVVDKSPLPLGFSPVCDPMDSRTWAALPSGARRPRPRGQCPSPEVSAGTCRASLWMQPASQVRAASWSGQRQGWALGHPLCGGMTPSTRPPASMASQPWMGFPSHSTHDLRARAAAPWPSLLLGT

SEQ ID NO: 53462 - protein, 133 aa, Homo sapiens
  Payload ID: 10621
  Gene Symbol: MVB12A
  Gene Name: multivesicular body subunit 12A
  ENSP ID: ENSP00000435052
MGGFAIWCKKAKAPRPVPKPRGLSRDMQGLSLDAASQPSKGGLLERTASRLGSRASTLRRNDSIYEASSLYGISAMDGVPFTLHPRFEGKSCSPLAFSAFGDLTIKSLADIEEEYNYGFVVEKTAAARLPPSV

SEQ ID NO: 53463 - protein, 273 aa, Homo sapiens; identical to SEQ ID NO: 53458
  Payload ID: 10621
  Gene Symbol: MVB12A
  Gene Name: multivesicular body subunit 12A
  Uniprot ID: Q96EY5
  ENSP ID: ENSP00000444653

SEQ ID NO: 53464 - protein, 122 aa, Homo sapiens
  Payload ID: 10621
  Gene Symbol: MVB12A
  Gene Name: multivesicular body subunit 12A
  ENSP ID: ENSP00000470611
  MOD_RES (1)..(1): Any amino acid
XYLRIGDMGGFAIWCKKAKAPRPVPKPRGLSRDMQGLSLDAASQPSKGGLLERTASRLGSRASTLRRNDSIYEASSLYGISAMDGVPFTLHPRFEGKSCSPLYNYGFVVEKTAAARLPPSVS

SEQ ID NO: 53465 - protein, 121 aa, Homo sapiens; identical to SEQ ID NO: 53460
  Payload ID: 10621
  Gene Symbol: MVB12A
  Gene Name: multivesicular body subunit 12A
  ENSP ID: ENSP00000472288

SEQ ID NO: 53466 - protein, 319 aa, Homo sapiens
  Payload ID: 10622
  Gene Symbol: MVB12B
  Gene Name: multivesicular body subunit 12B
  Uniprot ID: Q9H7P6
  ENSP ID: ENSP00000354772
MRSCFCVRRSRDPPPPQPPPPPPQRGTDQSTMPEVKDLSEALPETSMDPITGVGVVASRNRAPTGYDVVAQTADGVDADLWKDGLFKSKVTRYLCFTRSFSKENSHLGNVLVDMKLIDIKDTLPVGFIPIQETVDTQEVAFRKKRLCIKFIPRDSTEAAICDIRIMGRTKQAPPQYTFIGELNSMGIWYRMGRVPRNHDSSQPTTPSQSSAASTPAPNLPRHISLTLPATFRGRNSTRTDYEYQHSNLYAISAMDGVPFMISEKFSCVPESMQPFDLLGITIKSLAEIEKEYEYSFRTEQSAAARLPPSPTRCQQIPQS

SEQ ID NO: 53467 - protein, 205 aa, Homo sapiens
  Payload ID: 10622
  Gene Symbol: MVB12B
  Gene Name: multivesicular body subunit 12B
  ENSP ID: ENSP00000384751
MDTGLSSQPSEEDQSTMPEVKDLSEALPETSMDPITGVGVVASRNRAPTGYDVVAQTADGVDADLWKDGLFKSKVTRYLCFTRSFSKENSHLGNVLVDMKLIDIKDTLPVGFIPIQETVDTQEVAFRKKRLCIKFIPRDSTEAAICDIRIMGRTKQAPPQYTFIGELNSMGIWYRMGRVPRNHDSSQPTTPSQSSAASTPAPNLP

SEQ ID NO: 53468 - protein, 221 aa, Homo sapiens
  Payload ID: 10622
  Gene Symbol: MVB12B
  Gene Name: multivesicular body subunit 12B
  Uniprot ID: Q9H7P6
  ENSP ID: ENSP00000485994
MRSCFCVRRSRDPPPPQPPPPPPQRGTDQSTMPEVKDLSEALPETSMDPITGVGVVASRNRAPTGYDVVAQTADGVDADLWKDGLFKSKVTRYLCFTRSFSKENSHLGNVLVDMKLIDIKDTLPVGFIPIQETVDTQEVAFRKKRLCIKFIPRDSTEAAICDIRIMGRTKQAPPQYTFIGELNSMGIWYRMGRVPRNHDSSQPTTPSQSSAASTPAPNLPR

SEQ ID NO: 53469 - protein, 597 aa, Homo sapiens
  Payload ID: 10623
  Gene Symbol: MRVI1
  Gene Name: murine retrovirus integration site 1 homolog
  Uniprot ID: Q9Y6F6
  ENSP ID: ENSP00000401205
MALNSPQPGPVESELGKQLLKTGWEGSPLPRSPTQDAAGVGPPASQGRGPAGEPMGPEAGSKAELPPTVSRPPLLRGLSWDSGPEEPGPRLQKVLAKLPLAEEEKRFAGKAGGKLAKAPGLKDFQIQVQPVRMQKLTKLREEHILMRNQNLVGLKLPDLSEAAEQEKGLPSELSPAIEEEESKSGLDVMPNISDVLLRKLRVHRSLPGSAPPLTEKEVENVFVQLSLAFRNDSYTLESRINQAERERNLTEENTEKELENFKASITSSASLWHHCEHRETYQKLLEDIAVLHRLAARLSSRAEVVGAVRQEKRMSKATEVMMQYVENLKRTYEKDHAELMEFKKLANQNSSRSCGPSEDGVPRTARSMSLTLGKNMPRRRVSVAVVPKFNALNLPGQTPSSSSIPSLPALSESPNGKGSLPVTSALPALLENGKTNGDPDCEASAPALTLSCLEELSQETKARMEEEAYSKGFQEGLKKTKELQDLKEEEEEQKSESPEEPEEVEETEEEEKGPRSSKLEELVHFLQVMYPKLCQHWQVIWMMAAVMLVLTVVLGLYNSYNSCAEQADGPLGRSTCSAAQRDSWWSSGLQHEQPTEQ

SEQ ID NO: 53470 - protein, 912 aa, Homo sapiens
  Payload ID: 10623
  Gene Symbol: MRVI1
  Gene Name: murine retrovirus integration site 1 homolog
  Uniprot ID: Q9Y6F6
  ENSP ID: ENSP00000412130
MVKAPQSEERLARGGKENNSVLACGAQASWSIFGADAAEVPGTRGHSQQEAAMPHIPEDEEPPGEPQAAQSPAGQGPPAAGVSCSPTPTIVLTGDATSPEGETDKNLANRVHSPHKRLSHRHLKVSTASLTSVDPAGHIIDLVNDQLPDISISEEDKKKNLALLEEAKLVSERFLTRRGRKSRSSPGDSPSAVSPNLSPSASPTSSRSNSLTVPTPPGLDVCSGPPSPLPGAPPQKGDEADVSSPHPGEPNVPKGLADRKQNDQRKVSQGRLAPRPPPVEKSKEIAIEQKENFDPLQYPETTPKGLAPVTNSSGKMALNSPQPGPVESELGKQLLKTGWEGSPLPRSPTQDAAGVGPPASQGRGPAGEPMGPEAGSKAELPPTVSRPPLLRGLSWDSGPEEPGPRLQKVLAKLPLAEEEKRFAGKAGGKLAKAPGLKDFQIQVQPVRMQKLTKLREEHILMRNQNLVGLKLPDLSEAAEQEKGLPSELSPAIEEEESKSGLDVMPNISDVLLRKLRVHRSLPGSAPPLTEKEVENVFVQLSLAFRNDSYTLESRINQAERERNLTEENTEKELENFKASITSSASLWHHCEHRETYQKLLEDIAVLHRLAARLSSRAEVVGAVRQEKRMSKATEVMMQYVENLKRTYEKDHAELMEFKKLANQNSSRSCGPSEDGVPRTARSMSLTLGKNMPRRRVSVAVVPKFNALNLPGQTPSSSSIPSLPALSESPNGKGSLPVTSALPALLENGKTNGDPDCEASAPALTLSCLEELSQETKARMEEEAYSKGFQEGLKKTKELQDLKEEEEEQKSESPEEPEEVEETEEEEKGPRSSKLEELVHFLQVMYPKLCQHWQVIWMMAAVMLVLTVVLGLYNSYNSCAEQADGPLGRSTCSAAQRDSWWSSGLQHEQPTEQ

SEQ ID NO: 53471 - protein, 117 aa, Homo sapiens
  Payload ID: 10623
  Gene Symbol: MRVI1
  Gene Name: murine retrovirus integration site 1 homolog
  ENSP ID: ENSP00000431845
KNLANRVHSPHKRLSHRHLKVSTASLTSVDPAGHIIDLVNDQLPDISISEEDKKKNLALLEEAKLVSERFLTRRGRKSRSSPGDSPSAVSPNLSPSASPTSSRSNSLTVPTPPAEGG

SEQ ID NO: 53472 - protein, 821 aa, Homo sapiens
  Payload ID: 10623
  Gene Symbol: MRVI1
  Gene Name: murine retrovirus integration site 1 homolog
  ENSP ID: ENSP00000432067
LTGDATSPEGETDKNLANRVHSPHKRLSHRHLKVSTASLTSVDPAGHIIDLVNDQLPDISISEEDKKKNLALLEEAKLVSERFLTRRGRKSRSSPGDSPSAVSPNLSPSASPTSSRSNSLTVPTPPGLDVCSGPPSPLPGAPPQKGDEADVSSPHPGEPNVPKGLADRKQNDQRKVSQGRLAPRPPPVEKSKEIAIEQKENFDPLQYPETTPKGLAPVTNSSGKMALNSPQPGPVESELGKQLLKTGWEGSPLPRSPTQDAAGVGPPASQGRGPAGEPMGPEAGSKAELPPTVSRPPLLRGLSWDSGPEEPGPRLQKVLAKLPLAEEEKRFAGKAGGKLAKAPGLKDFQIQVQPVRMQKLTKLREEHILMRNQNLVGLKLPDLSEAAEQEKGLPSELSPAIEEEESKSGLDVMPNISDVLLRKLRVHRSLPGSAPPLTEKEVENVFVQLSLAFRNDSYTLESRINQAERERNLTEENTEKELENFKASITSSASLWHHCEHRETYQKLLEDIAVLHRLAARLSSRAEVVGAVRQEKRMSKATEVMMQYVENLKRTYEKDHAELMEFKKLANQNSSRSCGPSEDGVPRTARSMSLTLGKNMPRRRVSVAVVPKFNALNLPGQTPSSSSIPSLPALSESPNGKGSLPVTSALPALLENGKTNGDPDCEASAPALTLSCLEELSQETKARMEEEAYSKGFQEGLKKTKELQDLKEEEEEQKSESPEEPEEVEETEEEEKGPRSSKLEELVHFLQVMYPKLCQHWQVIWMMAAVMLVLTVVLGLYNSYNSCAEQADGPLGRSTCSAAQRDSWWSSGLQHEQPTEQ

SEQ ID NO: 53473 - protein, 68 aa, Homo sapiens
  Payload ID: 10623
  Gene Symbol: MRVI1
  Gene Name: murine retrovirus integration site 1 homolog
  ENSP ID: ENSP00000432312
MVKAPQSEERLARGGKENNSVLDRVSHCHPGWSAVVQPHLPGSSNSHASASQVAGITEIPSRRLLHWV

SEQ ID NO: 53474 - protein, 69 aa, Homo sapiens
  Payload ID: 10623
  Gene Symbol: MRVI1
  Gene Name: murine retrovirus integration site 1 homolog
  ENSP ID: ENSP00000432325
MPHIPEDEEPPGEPQAAQSPAGQGPPAAGVSCSPTPTIVLTGDATSPEGETDKNLANRVHSPHKRLSHR

SEQ ID NO: 53475 - protein, 904 aa, Homo sapiens
  Payload ID: 10623
  Gene Symbol: MRVI1
  Gene Name: murine retrovirus integration site 1 homolog
  Uniprot ID: Q9Y6F6
  ENSP ID: ENSP00000432436
MGMDLTCPFGISPACGAQASWSIFGADAAEVPGTRGHSQQEAAMPHIPEDEEPPGEPQAAQSPAGQGPPAAGVSCSPTPTIVLTGDATSPEGETDKNLANRVHSPHKRLSHRHLKVSTASLTSVDPAGHIIDLVNDQLPDISISEEDKKKNLALLEEAKLVSERFLTRRGRKSRSSPGDSPSAVSPNLSPSASPTSSRSNSLTVPTPPGLDVCSGPPSPLPGAPPQQKGDEADVSSPHPGEPNVPKGLADRKQNDQRKVSQGRLAPRPPPVEKSKEIAIEQKENFDPLQYPETTPKGLAPVTNSSGKMALNSPQPGPVESELGKQLLKTGWEGSPLPRSPTQDAAGVGPPASQGRGPAGEPMGPEAGSKAELPPTVSRPPLLRGLSWDSGPEEPGPRLQKVLAKLPLAEEEKRFAGKAGGKLAKAPGLKDFQIQVQPVRMQKLTKLREEHILMRNQNLVGLKLPDLSEAAEQEKGLPSELSPAIEEEESKSGLDVMPNISDVLLRKLRVHRSLPGSAPPLTEKEVENVFVQLSLAFRNDSYTLESRINQAERERNLTEENTEKELENFKASITSSASLWHHCEHRETYQKLLEDIAVLHRLAARLSSRAEVVGAVRQEKRMSKATEVMMQYVENLKRTYEKDHAELMEFKKLANQNSSRSCGPSEDGVPRTARSMSLTLGKNMPRRRVSVAVVPKFNALNLPGQTPSSSSIPSLPALSESPNGKGSLPVTSALPALLENGKTNGDPDCEASAPALTLSCLEELSQETKARMEEEAYSKGFQEGLKKTKELQDLKEEEEEQKSESPEEPEEVEETEEEEKGPRSSKLEELVHFLQVMYPKLCQHWQVIWMMAAVMLVLTVVLGLYNSYNSCAEQADGPLGRSTCSAAQRDSWWSSGLQHEQPTEQ

SEQ ID NO: 53476 - protein, 597 aa, Homo sapiens; identical to SEQ ID NO: 53469
  Payload ID: 10623
  Gene Symbol: MRVI1
  Gene Name: murine retrovirus integration site 1 homolog
  Uniprot ID: Q9Y6F6
  ENSP ID: ENSP00000433296

SEQ ID NO: 53477 - protein, 63 aa, Homo sapiens
  Payload ID: 10623
  Gene Symbol: MRVI1
  Gene Name: murine retrovirus integration site 1 homolog
  ENSP ID: ENSP00000433970
  MOD_RES (1)..(1): Any amino acid
XSEERLARGGKENNSVLDRVSHCHPGWSAVVQPHLPGSSNSHASASQVAGITEIPSRRLLHWV

SEQ ID NO: 53478 - protein, 87 aa, Homo sapiens
  Payload ID: 10623
  Gene Symbol: MRVI1
  Gene Name: murine retrovirus integration site 1 homolog
  ENSP ID: ENSP00000434741
MVKAPQSEERLARGGKENNSVLGSSCRRSILQSNSHDCPDWGCHFTRRRNRQKPGQQSSQSPQEAFSPTLEGVHCLPDICGPRGAHH

SEQ ID NO: 53479 - protein, 428 aa, Homo sapiens
  Payload ID: 10623
  Gene Symbol: MRVI1
  Gene Name: murine retrovirus integration site 1 homolog
  ENSP ID: ENSP00000435658
MPHIPEDEEPPGEPQAAQSPAGQQGPPAAGVSCSPTPTIVLTGDATSPEGETDKNLANRVHSPHKRLSHRHLKVSTASLTSVDPAGHIIDLVNDQLPDISISEEDKKKNLALLEEAKLVSERFLTRRGRKSRSSPGDSPSAVSPNLSPSASPTSSRSNSLTVPTPPGLDVCSGPPSPLPGAPPQKGDEADVSSPHPGEPEHILMRNQNLVGLKLPDLSEAAEQEKGLPSELSPAIEEEESKSGLDVMPNISDVLLRKLRVHRSLPGSAPPLTEKEVENVFVQLSLAFRNDSYTLESRINQAERERNLTEENTEKELENFKASITSSASLWHHCEHRETYQKLLEDIAVLHRLAARLSSRAEVVGAVRQEKRMSKATEVMMQYVENLKRTYEKDHAELMEFKKLANQNSSRSCGPSEYASPEGQRCCGS

SEQ ID NO: 53480 - protein, 706 aa, Homo sapiens
  Payload ID: 10623
  Gene Symbol: MRVI1
  Gene Name: murine retrovirus integration site 1 homolog
  Uniprot ID: Q9Y6F6
  ENSP ID: ENSP00000437784
MVKAPQSEERLARGGKENNSVLACGAQASWSIFGADAAEVPGTRGHSQQEAAMPHIPEDEEPPGEPQAAQSPAGQGPPAAGVSCSPTPTIVLTGDATSPEGETDKNLANRVHSPHKRLSHRHLKVSTASLTSVDPAGHIIDLVNDQLPDISISEEDKKKNLALLEEAKLVSERFLTRRGRKSRSSPGDSPSAVSPNLSPSASPTSSRSNSLTVPTPPGLDVCSGPPSPLPGAPPQKGDEADVSSPHPGEPEHILMRNQNLVGLKLPDLSEAAEQEKGLPSELSPAIEEEESKSGLDVMPNISDVLLRKLRVHRSLPGSAPPLTEKEVENVFVQLSLAFRNDSYTLESRINQAERERNLTEENTEKELENFKASITSSASLWHHCEHRETYQKLLEDIAVLHRLAARLSSRAEVVGAVRQEKRMSKATEVMMQYVENLKRTYEKDHAELMEFKKLANQNSSRSCGPSEDGVPRTARSMSLTLGKNMPRRRVSVAVVPKFNALNLPGQTPSSSSIPSLPALSESPNGKGSLPVTSALPALLENGKTNGDPDCEASAPALTLSCLEELSQETKARMEEEAYSKGFQEGLKKTKELQDLKEEEEEQKSESPEEPEEVEETEEEEKGPRSSKLEELVHFLQVMYPKLCQHWQVIWMMAAVMLVLTVVLGLYNSYNSCAEQADGPLGRSTCSAAQRDSWWSSGLQHEQPTEQ

SEQ ID NO: 53481 - protein, 597 aa, Homo sapiens; identical to SEQ ID NO: 53469
  Payload ID: 10623
  Gene Symbol: MRVI1
  Gene Name: murine retrovirus integration site 1 homolog
  Uniprot ID: Q9Y6F6
  ENSP ID: ENSP00000448278

SEQ ID NO: 53482 - protein, 597 aa, Homo sapiens; identical to SEQ ID NO: 53469
  Payload ID: 10623
  Gene Symbol: MRVI1
  Gene Name: murine retrovirus integration site 1 homolog
  Uniprot ID: Q9Y6F6
  ENSP ID: ENSP00000453013

SEQ ID NO: 53483 - protein, 551 aa, Homo sapiens
  Payload ID: 10624
  Gene Symbol: MUS81
  Gene Name: MUS81 structure-specific endonuclease subunit
  Uniprot ID: Q96NY9
  ENSP ID: ENSP00000307853
MAAPVRLGRKRPLPACPNPLFVRWLTEWRDEATRSRRRTRFVFQKALRSLRRYPLPLRSGKEAKILQHFGDGLCRMLDERLQRHRTSGGDHAPDSPSGENSPAPQGRLAEVQDSSMPVPAQPKAGGSGSYWPARHSGARVILLVLYREHLNPNGHHFLTKEELLQRCAQKSPRVAPGSARPWPALRSLLHRNLVLRTHQPARYSLTPEGLELAQKLAESEGLSLLNVGIGPKEPPGEETAVPGAASAELASEAGVQQQPLELRPGEYRVLLCVDIGETRGGGHRPELLRELQRLHVTHTVRKLHVGDFVWVAQETNPRDPANPGELVLDHIVERKRLDDLCSSIIDGRFREQKFRLKRCGLERRVYLVEEHGSVHNLSLPESTLLQAVTNTQVIDGFFVKRTADIKESAAYLALLTRGLQRLYQGHTLRSRPWGTPGNPESGAMTSPNPLCSLLTFSDFNAGAIKNKAQSVREVFARQLMQVRGVSGEKAAALVDRYSTPASLLAAYDACATPKEQETLLSTIKCGRLQRNLGPALSRTLSQLYCSYGPLT

SEQ ID NO: 53484 - protein, 135 aa, Homo sapiens
  Payload ID: 10624
  Gene Symbol: MUS81
  Gene Name: MUS81 structure-specific endonuclease subunit
  ENSP ID: ENSP00000431478
MLDERLQRHRTSGGDHAPDSPSGENSPAPQGRLAEVQDSSMPVPAQPKAGGSGSYWPARHSGARVILLVLYREHLNPNGHHFLTKEELLQRCAQKSPRVAPGSARPWPALRSLLHRNLVLRTHQPARYSLTPEGL

SEQ ID NO: 53485 - protein, 202 aa, Homo sapiens
  Payload ID: 10624
  Gene Symbol: MUS81
  Gene Name: MUS81 structure-specific endonuclease subunit
  ENSP ID: ENSP00000431979
MHGPRLSWTLFKTSLHLQPPSSLRLKLTILRDLRAAKLRCSNPDSRTGGVPVPRAWSAGGPALGLMAAPVRLGRKRPLPACPNPLFVRWLTEWRDEATRSRRRTRFVFQKALRSLRRYPLPLRSGKEAKILQHFGDGLCRMLDERLQRHRTSGGDHAPDSPSGENSPAPQGRLAEVQDSSMPVPAQPKAGGSGSYWPARHSG

SEQ ID NO: 53486 - protein, 476 aa, Homo sapiens
  Payload ID: 10624
  Gene Symbol: MUS81
  Gene Name: MUS81 structure-specific endonuclease subunit
  ENSP ID: ENSP00000432287
MLDERLQRHRTSGGDHAPDSPSGENSPAPQGRLAEVQDSSMPVPAQPKAGGSGSYWPARHSGARVILLVLYREHLNPNGHHFLTKEELLQRCAQKSPRVAPGSARPWPALRSLLHRNLVLRTHQPARYSLTPEGLELAQKLAESEGLSLLNVGIGPKEPPGEETAVPGAASAELASEAGVQQQPLELRPGEYRVLLCVDIGETRGGGHRPELLRELQRLHVTHTVRKLHVGDFVWVAQETNPRDPANPGELVLDHIVERKRLDDLCSSIIDGRFREQKFRLKRCGLERRVYLVEEHGSVHNLSLPESTLLQAVTNTQVIDGFFVKRTADIKESAAYLALLTRGLQRLYQGHTLRSRPWGTPGNPESGAMTSPNPLCSLLTFSDFNAGAIKNKAQSVREVFARQLMQVRGVSGEKAAALVDRYSTPASLLAAYDACATPKEQETLLSTIKCGRLQRNLGPALSRTLSQLYCSYGPLT

SEQ ID NO: 53487 - protein, 389 aa, Homo sapiens
  Payload ID: 10624
  Gene Symbol: MUS81
  Gene Name: MUS81 structure-specific endonuclease subunit
  ENSP ID: ENSP00000433473
  MOD_RES (1)..(1): Any amino acid
XRRTRFVFQKALRSLRRYPLPLRSGKEAKILQHFGDGLCRMLDERLQRHRTSGGDHAPDSPSGENSPAPQGRLAEVQDSSMPVPAQPKAGGSGSYWPARHSGARVILLVLYREHLNPNGHHFLTKEELLQRCAQKSPRVAPGSARPWPALRSLLHRNLVLRTHQPARYSLTPEGLELAQKLAESEGLSLLNVGIGPKEPPGEETAVPGAASAELASEAGVQQQPLELRPGEYRVLLCVDIGETRGGGHRPELLRELQRLHVTHTVRKLHVGDFVWVAQETNPRDPANPGELVLDHIVERKRLDDLCSSIIDGRFREQKFRLKRCGLERRVYLVEEHGSVHNLSLPESTLLQAVTNTQVIDGFFVKRTADIKESAAYLALLTRGLQRLYQ

SEQ ID NO: 53488 - protein, 231 aa, Homo sapiens
  Payload ID: 10624
  Gene Symbol: MUS81
  Gene Name: MUS81 structure-specific endonuclease subunit
  ENSP ID: ENSP00000433809
  MOD_RES (1)..(1): Any amino acid
XGRLAEVQDSSMPVPAQPKAGGSGSYWPARHSGARVILLVLYREHLNPNGHHFLTKEELLQRCAQKSPRVAPGSARPWPALRSLLHRNLVLRTHQPARYSLTPEGLELAQKLAESEGLSLLNVGIGPKEPPGEETAVPGAASAELASEAGVQQQPLELRPGEYRVLLCVDIGETRGLPSLPLQGRAQAGAAPRATAAARDPHANPGELVLDHIVERKRLDDLCSSIIDGRF

SEQ ID NO: 53489 - protein, 411 aa, Homo sapiens
  Payload ID: 10624
  Gene Symbol: MUS81
  Gene Name: MUS81 structure-specific endonuclease subunit
  ENSP ID: ENSP00000434305
  MOD_RES (1)..(1): Any amino acid
XLDERLQRHRTSGGDHAPDSPSGENSPAPQGRLAEVQDSSMPVPAQPKAGGSGSYWPARHSGARVILLVLYREHLNPNGHHFLTKEELLQRCAQKSPRVAPGSARPWPALRSLLHRNLVLRTHQPARYSLTPEGLELAQKLAESEGLSLLNVGIGPKEPPGEETAVPGAASAELASEAGVQQQPLELRPGEYRVLLCVDIGETRGGGHRPELLRELQRLHVTHTVRKLHVGDFVWVAQETNPRDPAANPGELVLDHIVERKRLDDLCSSIIDGRFREQKFRLKRCGLERRVYLVEEHGSVHNLSLPESTLLQAVTNTQVIDGFFVKRTADIKESAAYLALLTRGLQRLYQGHTLRSRPWGTPGNPESGAMTSPNPLCSLLTFSDFNAGAIKNKAQSVREVFARQLMQVRGV

SEQ ID NO: 53490 - protein, 63 aa, Homo sapiens
  Payload ID: 10624
  Gene Symbol: MUS81
  Gene Name: MUS81 structure-specific endonuclease subunit
  ENSP ID: ENSP00000435277
AQSVREVFARQLMQVRGVSGEKAAALVDRYSTPASLLAAYDACATPKEQETLLSTIKCGRLQR

SEQ ID NO: 53491 - protein, 362 aa, Homo sapiens
  Payload ID: 10625
  Gene Symbol: MSI1
  Gene Name: musashi RNA-binding protein 1
  Uniprot ID: O43347
  ENSP ID: ENSP00000257552
METDAPQPGLASPDSPHDPCKMFIGGLSWQTTQEGLREYFGQFGEVKECLVMRDPLTKRSRGFGFVTFMDQAGVDKVLAQSRHELDSKTIDPKVAFPRRAQPKMVTRTKKIFVGGLSVNTTVEDVKQYFEQFGKVDDAMLMFDKTTNRHRGFGFVTFESEDIVEKVCEIHFHEINNKMVECKKAQPKEVMSPTGSARGRSRVMPYGMDAFMLGIGMLGYPGFQATTYASRSYTGLAPGYTYQFPEFRVERTPLPSAPVLPELTAIPLTAYGPMAAAAAAAAVVRGTGSHPWTMAPPPGSTPSRTGGFLGTTSPGPMAELYGAANQDSGVSSYISAASPAPSTGFGHSLGGPLIATAFTNGYH

SEQ ID NO: 53492 - protein, 233 aa, Homo sapiens
  Payload ID: 10625
  Gene Symbol: MSI1
  Gene Name: musashi RNA-binding protein 1
  ENSP ID: ENSP00000446710
  MOD_RES (1)..(1): Any amino acid
XDQAGVDKVLAQSRHELDSKTIDPKVAFPRRAQPKMVTRTKKIFVGGLSVNTTVEDVKQYFEQFGKVDDAMLMFDKTTNRHRGFGFVTFESEDIVEKVCEIHFHEINNKMVECKKAQPKEVMSPTGSARGRSRVMPYGMDAFMLGIGMLGYPGFQATTYASRSYTGLAPGYTYQFPAIPLTAYGPMAAAAAAAAVVRGTGSHPWTMAPPPGSTPSRTGGFLGTTSPGPMAELY

SEQ ID NO: 53493 - protein, 328 aa, Homo sapiens
  Payload ID: 10626
  Gene Symbol: MSI2
  Gene Name: musashi RNA-binding protein 2
  Uniprot ID: Q96DH6
  ENSP ID: ENSP00000284073
MEANGSQGTSGSANDSQHDPGKMFIGGLSWQTSPDSLRDYFSKFGEIRECMVMRDPTTKRSRGFGFVTFADPASVDKVLGQPHHELDSKTIDPKVAFPRRAQPKMVTRTKKIFVGGLSANTVVEDVKQYFEQFGKVEDAMLMFDKTTNRHRGFGFVTFENEDVVEKVCEIHFHEINNKMVECKKAQPKEVMFPPGTRGRARGLPYTMDAFMLGMGMLGYPNFVATYGRGYPGFAPSYGYQFPGFPAAAYGPVAAAAVAAARGSGSNPARPGGFPGANSPGPVADLYGPASQDSGVGNYISAASPQPGSGFGHGIAGPLIATAFTNGYH

SEQ ID NO: 53494 - protein, 251 aa, Homo sapiens
  Payload ID: 10626
  Gene Symbol: MSI2
  Gene Name: musashi RNA-binding protein 2
  Uniprot ID: Q96DH6
  ENSP ID: ENSP00000313616
MADLTSVLTSVMFSPSSKMFIGGLSWQTSPDSLRDYFSKFGEIRECMVMRDPTTKRSRGFGFVTFADPASVDKVLGQPHHELDSKTIDPKVAFPRRAQPKMVTRTKKIFVGGLSANTVVEDVKQYFEQFGKVEDAMLMFDKTTNRHRGFGFVTFENEDVVEKVCEIHFHEINNKMVECKKAQPKEVMFPPGTRGRARGLPYTMDAFMLGMGMLGYPNFVATYGRGYPGFAPSYGYQFPDYLPVSQDIIFIN

SEQ ID NO: 53495 - protein, 267 aa, Homo sapiens
  Payload ID: 10626
  Gene Symbol: MSI2
  Gene Name: musashi RNA-binding protein 2
  ENSP ID: ENSP00000392607
MMRGYIKKVLKNTSYHVNQYLFIQHGWSGSGDQSVLYSCNLMRMVTRTKKIFVGGLSANTVVEDVKQYFEQFGKVEDAMLMFDKTTNRHRGFGFVTFENEDVVEKVCEIHFHEINNKMVECKKAQPKEVMFPPGTRGRARGLPYTMDAFMLGMGMLGYPNFVATYGRGYPGFAPSYGYQFPGFPAAAYGPVAAAAVAAARGSGSNPARPGGFPGANSPGPVADLYGPASQDSGVGNYISAASPQPGSGFGHGIAGPLIATAFTNGYH
